United States Patent Application Publication US 2006/0134663 A1 - sequence listing, part 99

SEQ ID NO: 298907 - DNA, 729 bp, Homo Sapiens
  misc_feature (596)..(597): n is a, c, g, or t
gttaattgtgcattatatggaaccaccaaaaggctgctaccacagaaaatgaatgatgccaactgggagactaagaaaggggtttcagaggcagcatattttgctctgggagtgaaaagatcaccacattttgtaacatgccaaaacttacccctgtacttggaaatgagtgagtgaaactattaaggagtaaatgaatgaaatatggaactgtgtcccgtgtacctttcaaggctcaagatatatttgatattattagtctaaacgctaccaaaagtatctctaatcttgaaattctccatattcttccataatttaagacagcacttgccttagcttcattattttaaaatgatagcttagagtgaaacctactcgatatatagatgaagggagcatatgtaaaggattatatttcttaagtctttcatccgctatacatttagaaaactcgataggcatcagatgtgtgttctttgccactgtggctttcttctcagggtaactgccattcattcaccaaactacctgttgtgtgcatctctcttagatgaaaattatggctggcattatgtgatccctgttcttaagatgtnntgtgggctaaatggagctaaggcattcacatgtggttgaataatataacacactagagagactcttataacctgtggtggttcacaggcatctggaagaggagaatttggtctgatcttgtgtgatagggcc

SEQ ID NO: 298908 - DNA, 144 bp, Homo Sapiens
gtctttcctcactgcttaaggggctggctttttaaccattaagggctaattgcccggccattccgaattggaaaaactcttttttaggggttttttccccaccctgtggggaaaaaaccccgccggggttttcccggggagaaa

SEQ ID NO: 298909 - DNA, 364 bp, Homo Sapiens
  misc_feature (61)..(196): n is a, c, g, or t
  misc_feature (248)..(268): n is a, c, g, or t
  misc_feature (304)..(316): n is a, c, g, or t
gggacctgtgaattcagcattccgggccttcagaaagggaaaaattaaaggcaaaaagaannnnnnnnnnnnnnnnnnnnnnnnnnnnnnnnnnnnnnnnnnnnnnnnnnnnnnnnnnnnnnnnnnnnnnnnnnnnnnnnnnnnnnnnnnnnnnnnnnnnnnnnnnnnnnnnnnnnnnnnnnnnnnnnnnnnnnnnccagcgggggaaaaacaccacccccctcttttttagaggaggggggggttgnnnnnnnnnnnnnnnnnnnnntttttcccccctcttggggggaggggttcccccacnnnnnnnnnnnnnggggggggtgttttttttgggaggggcttaaaaaaccccccccaaaaa

SEQ ID NO: 298910 - DNA, 138 bp, Homo Sapiens
cagataactgattacttctgggctgaaatatgaggattctataaggacgcctggaacccaaggttttaattggggttgggccaagcccattcaccccctctttgggttttttcccccccgggccaattataaaccctt

SEQ ID NO: 298911 - DNA, 108 bp, Homo Sapiens
  misc_feature (16)..(16): n is a, c, g, or t
  misc_feature (26)..(26): n is a, c, g, or t
  misc_feature (44)..(44): n is a, c, g, or t
cacttgttacagacanctttagcaanccatttacccaattaagnttagggcgattgaaattgaaccttggggccatataattttggcccccgagggggaagagtgaaa

SEQ ID NO: 298912 - DNA, 355 bp, Homo Sapiens
  misc_feature (278)..(278): n is a, c, g, or t
  misc_feature (311)..(311): n is a, c, g, or t
ggcacgagcctcagccttggagtaagagatcacttcacctgtggcatgtgtgacttgctgccccagggctaccttggcactcatccgtggtacctgatattctgtttcatggtttatcctacccctcacctgttagagacccctcaacttctgtcagccttttgtgtgttagggagtgtatctccagcccagttgagagattatgttgtgagatatatagtctcagcaccattgccactggaggtggcaattctggaaggcagtctatctcagagttntatctagtcatacttgatctcacctcttagagnacaggatatctggagagtcgacatgatactagcataggtggccc

SEQ ID NO: 298913 - DNA, 709 bp, Homo Sapiens
gttttactgtgtgcagctatctacatagcacttcgagttgaccccatgaacatttcactatacgttggtctatcacctctctatccatttgagcatcctgctaacgatgccttattatactttattttcttgatgcattgcaaagtagactagcacacatcggtctgttacgtactaaatatctcaccttgcataataaattacaggtggatagaaagggacatctacattcagaataaagctgccatggagctctggttgtgggccacatgctctaagcatatccggattatcatactccttcatacccgtaatctcgtaattcgcaaacgctgttcctgacacataagatatgaatgttcacatgtatactgacagatactagaggagacttttggaagaggtatcgtttgccacactgactaactgcttgactattgtgcacgccacccacaggcttgagctctacattctctcgaactgtaatcctatcctgacatgtttacttctgtcagctagagacatatgcgtacaatgcaacctgtgcggggttgcatgacacgctgggcccattccacaggatcgttgagattcactagaacagttgggtacttcgccaccttcatagagttgcacatgaactactcggacctaacatctggactcagtatcctcacagggatattatgttggagcgctaggcatcact

SEQ ID NO: 298914 - DNA, 404 bp, Homo Sapiens
agcaatatacttgctagagctatcggcgcgcctatctatgttgtataccacactatctatgctagatctatctatgctttatactatctatttcgaacattgacttaccatatctttatcatgagacaagactcattcttacactgcactgtaccagcactcgtatcatgggtcgcgacagcctatagtctgagcccagaagtacgcttcggatgacctcatacgagacgcatgaatgtgtacactgacctcctagagcgagctggatatatcatagcacagatagacctagaaggaactcaatgctctgatcaggctgagcgtcgaactcaagctacgcactgatcggagcactgatagcaggagcccatacactctcatatggtcacactagccatcagtct

SEQ ID NO: 298915 - DNA, 117 bp, Homo Sapiens
ccacctataatgactttaatgctacaaattaggcagaggattggctatttttcctctgggaaagataggacgtctccatttctgttttgccgtggcagtattcatgataccatgatt

SEQ ID NO: 298916 - DNA, 349 bp, Homo Sapiens
gcccctgcttggtctctgtaccttgtgtgctcacaacggcgtgcagctctgagatgcgcactccagtgatggtgatcataggttcaaggatcccggcgaccacaatttgatgacctgcctgtcgatagctttcgctcacaatcgacagaatcgctcatcagatgatgatgttcaactaatgcatgcggtcactgcctgtgcgagaacacgtgccggtgctgtgtcaattacatctctactggccacctactgtgagagctgatggctgatgagcaacacacgcctgacattgagacgctggtagcagccactacatgactgatccacctgctcagactgatcataccct

SEQ ID NO: 298917 - DNA, 214 bp, Homo Sapiens
cggatattaacagctctaactgataatgtacaacatgcacgagggcgagacattttcacactgggatgacagctcgctgtgataacgcacatattaggctttctgtgcctggcactatacaacgtctgaacaattgtttaactgtcagtccatctgttgattctcaggcctgccacggtgggtgcgcacatatctggccttggcgcagcgtgcc

SEQ ID NO: 298918 - DNA, 207 bp, Homo Sapiens
cacatacacttgtgtcctgtggataatgtcccccatgctcgtagactgtgattatactcagacgttctccgatgtgtgtcagacagagcatgtaagcataaggtgatcgtgtctgatcgaccgaggagacacgctgcacagaagagatatgcgctgcttggttggttaacacacgagggctcagagatgctagtcgtgtatggtggt

SEQ ID NO: 298919 - DNA, 305 bp, Homo Sapiens
gccatgcgaagttgacgtctacagacatgtctatggctgctggcatggactatagggatggaaccacacagagaccgcgagacctgtgtggctgccattgtggcggtacttttggaacctgggcactatactgagtatagctgtggaggagaccggctgtggctctgctgacactacagctgaataatggtgatgaagtcatacgctctatagctgcaaatgttggagattgacagagtacagacggattgtatgcagggcctttcaaggatactgtttaacgatgacgattagtttcgagactc

SEQ ID NO: 298920 - DNA, 427 bp, Homo Sapiens
  misc_feature (169)..(169): n is a, c, g, or t
ataccacgggctgtacgaatttgggacgagggcagccaagcaaaccacacactcttgatcaccagatgtgtgtatcacagagagcggtgagtatgtgagtctcctctattgtgctgatggactaccacactgtgaaggccagagggtgggtgtgcctgaataaccttcncttcactggacagtgtcccccagttgtgggaccaagtctattttgagcttgaggtgcacaatcttaaggtgggggcctcaagagagggcacagacccttaatctcttgttctttccctggctgtaacaagctgtctgtcccgccttgctcaacaacttggttcatatgattgagcgcgggaactgtgaacaagcccctgtccgtggtgggccccttaaggaatagcaccgttgggcccctggccttttagcacgggtg

SEQ ID NO: 298921 - DNA, 395 bp, Homo Sapiens
ggaatgtgcacgggcacagcatgtgggcacatatgacccagagttgtgaacacacgacacacaccaacctgtggctgagcgctctctatcccaagtcagaccggccggaagacagatcacaagtgcacgggtgaggacacccgctctgaccacagagtttggggaggctcaagacaatggtgtgctttggggaatcccttcacaaggtgtacgcgcatattggccccaagggcaccggccggaagatataagagaccgggcgggctttggttactcttaaccggttctgagttggccaagagggcactgtgccatgtgcccgcgaagagaagagacacactggtgggagaaggagaccgagagattccctttctgtgactcggcctcatctcttt

SEQ ID NO: 298922 - DNA, 418 bp, Homo Sapiens
gtggacttcatgtgatgctgccaggccagacgccagatgctagtgctctactctggccaggtgcaccatgcctaagcatgggtcactatatgctgtacactggttgagacaggctgacgcacatgtgctaatagcgcctatggacgctattgactactgcggtgtgtgtcagatgtgttgttcggtactcagttgtgacaggtctcttctgtgcgactacatatgtgtgcattaggctgtgcgtcttcccaatcacacgtgtagttactacgagactctcagagttgccagagcccagtctgagcactgttctgtggccgcacttagaggacgatgtctcatgagtatcctcagctcattagatttgttcggaccacttgtcgcaccagtgtcgctctgacatgcttacagtgattac

SEQ ID NO: 298923 - DNA, 438 bp, Homo Sapiens
gtactactggagtccccgagctgtaggcgtgtggcacacggagaactctggacccacaatttcagatgtgttatgtcgccacgagcgacgatattcgcgtcagacacatctgtctccacgatagcgtatgggtgcgtcgtactgagagatagaaatatgggcacaccacgagatatagagatgctattggcccgctcaaggagaggccggagtgccaaggcactggggcaaggtaacaccgtggttgaccggggtgggagcaatcccggagccgtgggagcccacggaacaagatgccggttggctccacagggcccggactgtgggccgggtgtggaacacgggcaagctttctttctgtgggcggaagacaccatggattcataccgtaaccgcccgggacacgaatggtgggttagcccgcgcgggtttggggcc

SEQ ID NO: 298924 - DNA, 390 bp, Homo Sapiens
ggtagagctgagagtgcggagtgtgtgctgcgggctcggaacacacatgtatgattaaaaaatccaaatcagatctaaaggaatcttttaaaaaaccgcaagaacatttacaagtccgcggcttccccgacggagacttatattttatttcttcctctcttattaacccggtgaagcagccgagaccgacccgaccgaccgtgggcccgcagcagctgcaagaaggaaccacgagaccgagggcttaccgctggccggacccgacaccgtcaccctcgcttcccgacggcagacggtagacagcgcgagaggaacgacccaggtctgaggccgttgagtagttatcttccggatgattgttgaccctctgcgcttgctccccgctcattt

SEQ ID NO: 298925 - DNA, 626 bp, Homo Sapiens
gttgaatgcatagcttagaaaggtcacacgtggaaaattccacgaggatcatgctcagtatctcatcaactcattgcatgattccagttgcattagacacctggcgtgacaagacctgacatcgtaccctagatctgggtctgcagggaggctttgtagccatgctgcacggccctaactagagttctagagtttgtgaatatgattctaagtactccttttatacgcttgctatacaaaatccgctacagggtagtcgatcttagaatgtatgaagaatgatatgcaccagctgtcaagacctaagactgatgtcagccagctgatccggacttgctgtgcacgactatggcagatgctgatgccagtagtctgtgactgatgctgcacgtgtgactaagcagcattatctgcatatgcaatcagcacatacaggcctgtgtgagactgatcagtgtttgcccgttgacccatcagctgcttcccatagttaccactttgaatccaacactctttcaccatcttgcatacgcaacgggatcaggatacttggacgtaactggaagtagagatcgatccaacacgcccacgtaacaagctgtctgatgcattttgggcacgtattt

SEQ ID NO: 298926 - DNA, 170 bp, Homo Sapiens
aacagaccaacatagagctgctacaactactcaaagtagctgtgcggactattgtagatgctgtcccacaaccctatttggtcccattactgagccgtacgcacgaccatgcagcaagtgaacgctgacctccgcactcagcgcattatggttgactactttagtactcc

SEQ ID NO: 298927 - DNA, 398 bp, Homo Sapiens
gagaactaggctcgagtggatattctgagtctgaaactttaaacagatgtgtattacacaaaggtcgacgaatagttggatacttccctactttgggcactattattctcactctccacagagaggctgattagcttctcatctggtggcggtaagcactaccttactgaacttaacagaatactagtaacaatgccttagtgatttaagctgaatgctggacactggaacatggctcttgtacccagtatcaggaatgcacaaatgtgttccagttaacaatacaccttacattatctgtaggcatggacactgacagcagtgccatttcttttgtgacctgactccagtacctgatggatatagtgattatcagccacacttgttcttcttgtctt

SEQ ID NO: 298928 - DNA, 405 bp, Homo Sapiens
cctagactgcatctatagcacagtctacgcggaggtgagtgtatcggtgtgtctaccctgtggaaatatcgcaacatggctcgacaacacctagcgggatcaacactcactgaggacaaatgcatccacaacccgagtatctcgctgagaggcctgacattgaatacaggcagtatacgactgagctcatgagctagggactctgtgtcgcggagcgtcaaggcatggagaatgaatctgtagtgatgcactacggatgtagagagatgtcaaggaagcagactggagtaagacgactgagtcagcattacgcgagacgttactcagtatcacggaacgcatgaggtgtctgagcgatgattgagacactggcgtaaatgctgcgctattcaatgctcacggcgg

SEQ ID NO: 298929 - DNA, 357 bp, Homo Sapiens
gggagaaccagacactatcaggcactgcgaggatctctttttaaatgtcactactgtcgtcacaaaactgatgatgatactggacatgaatggggatgagaggagggagatgatatgacgtgaccactccagccgtttccaagtagacttactatacttacaccccttaacatctttgtgcacacattacaggtggtgtgggctgtgatgatggcatcctagaagccattggactgtgcggtttcctctatggtgcatttttagatctctgtgactccctgtgatgccccccatatgacgcctgtttctctcactatgcagtggacccgacacgatgagtagtgttaccagcagtgg

SEQ ID NO: 298930 - DNA, 367 bp, Homo Sapiens
gtgtactcttgactacgagtgattaatccgttgtaatggagggacctataacagtgacagagggaggacaggacagcgaatgatgctgaattgaacttggatcgtactgactgtgcagcccttcaacaggtgtgtctttcagcaacatagatgaccagatgctgctattttccattaccgataagagacgacatgtgtgtcctttgcttccaggctgacattgagattcgaaatactggcttgaacacgcattgtgcattagtcaggtcacgcagtgaaggctatttttacaatgctgattattacttcctggcagggaatgacttcatggtgcctactgtatacgcacacctagccattgcttttg

SEQ ID NO: 298931 - DNA, 413 bp, Homo Sapiens
gtctccctgagaccaggagatgttttccgaggtgtgctctccaggtggcacgagcagagtgacatatgggactggaccaggaagcttctatcctacaacaggcacagatgatgctctgaaggaccgcaagagtgatatcaccagcgagctgagtaccacaattattgattggcatccatgcgcattgtgcgcacggtgtatgggaaattttggatactaaattacctttcagaataggggttaaggaacattatcatctattattcagaatgactctgatacaagagaagcaggtgtgactacttatttgagtaccgagcctgaagatctgaaacctgactttagacagactaaagatcctttctgcacaagtgcatatctgttggaaaccagagaggtctgtcggactcctg

SEQ ID NO: 298932 - DNA, 360 bp, Homo Sapiens
cattcgggctttccttgggacctgttccgggactatctgtggggattgagtctgttcaacatgacaacttacttctttcacagactctttagtgtatcagatcttcgctgacatccctgtgcagtgcctgcatattatagaggaaatcctgtcttctaaattacttgtgagcatttgattcaactcctatgttagtctcgcccttacaatgcatctcattaatggcacctttctctattattgctgaactgacttgaggatctgtgtcccccattgacccagagctctgaatatcctttggagagtgcactatctcttgatgattgaagacatctgtcacgttctcctcttgatgcatgt

SEQ ID NO: 298933 - DNA, 298 bp, Homo Sapiens
cgtgttgctggccagtccggtgccctctgctgccccttctgttgccattgccccatgttaattctcttgtccatcccatatcactggtctctgtcccctcatcacctcctttttccactctttatgcttcaccacttctctctccatgtgcaccatttgtatcctgcttcattttcctctgttcacttctgtacacttagtgtcacccatcttcgcctctcttcttcctgctcatcatcttccccttctccttttggctgctcattcttcattttttcttctatgtccttatctacta

SEQ ID NO: 298934 - DNA, 354 bp, Homo Sapiens
aggaggctcactcgagatcagtagaacacaaccgtagagaggccattgagcctaagacgcagaggagttagagaatggacacggcgcgagagatattgtcccggacgggaaagagagttaattatataccacacataagatattgaggattaatcgatatagcttctggaaactggaatgaccatctaagaacagcttaaagagtgcactcctatatctaggagaatgttgccaagaatcacaatttgaacttaagagcctaccgcgcctcctgaaatgtggatgtccaagattgcctatgtggactttacactttcccagagcaccctagagaccgccttggtgagatctgtg

SEQ ID NO: 298935 - DNA, 345 bp, Homo Sapiens
ggtaagagaagggagtgtgtcctgtgcatgccctttttctgaggttgtgacactagctgtggacccctgccttgagactcatctcatcaatgctggcaacctcttgggttttagagctggtaggttacttcattctttgtggcacgaggcatgtggctctcaaacttcttagggcgcccgaagagtcacttactggatagtgtgaagatattcagagggcctctgtcccctttcattctcaaccacatttgactgtggcattggatctgtggactggtggcaattatgtgaaccttcacgtgttcttgctgtatatattgacatatcttgagatctgcggcttgg

SEQ ID NO: 298936 - DNA, 375 bp, Homo Sapiens
cgcgatctctgtgctcaaaatttatacctgtgcagattttcaatcagagactgtgtgctcaatattatgctactcggtcttcaggccacctgaggcacatactctctgaaaccgctattgaaaggtatggccactctggactggacacattctaaagcaccacaagagctctaacattttctgagagccacagagaatttggccataaatgagctctcaatttttcacacttgactggcaatctaactctaaaaattaataaggttacttttcaaccactcctggaaggctgggttttacctgtcccttcattaccatctaaattataggctggccttgctgtgtaacatttacacgagaagctgtttcccgccg

SEQ ID NO: 298937 - DNA, 613 bp, Homo Sapiens
ggtgacgtcggccgagagtctttcctgctatggccggattccagactcacctgggaaaggctgtatatcaacagaccacatggatcaaggccttaagtaggtggctgaggatacacgcatgccctgaaccatctggagcccaagatgctagagattctgtcagctcaagtggacaccctctggccaccatagcagagaagtctgcaggcaggagtttccaaggcaggacaggacaagagacagagcaagtgccttgtacatatgcagacagaggtgtagactgtgcctctgtcatagttgtgacaagcaatccagatgaccttgcaaggatcttaatgcatgtcatgaactcgaatgcgccgatcaagcctggcattgctgttcacagacagagtgaggaagcgttgtccacacccttatcctagtttgctgaccaactgtgcaatcagaggatgatggttagcatacaaacacacatctgcactacgactcctttaattgtaggcaatcagacctttacaagagtgcatattctagggaggtattgttgcggattagtgaatgatacccttcactctgaactatctctggaacctaacagaggaacagcctt

SEQ ID NO: 298938 - DNA, 353 bp, Homo Sapiens
ccgagaggctaccaagacatgcgagactccagggtcaccttcgcatcagatttcagagacgctgaagatttctcagggccagagtacctggtcttcatgctcaagaagtaacacatctctagccagggctattaataccacgaggttagtggccgcacaaggctggccgacgagagccgctggtgccataatacatcgtccaagtccttcattgcacgtgcagaaacttgtggtccagcatttatgcaactcatggacgctccagccagtttcataggcgtcactgtggtgcaaggtggatgcgggacttagctcgaccatattttacacgtgcactaggagcctttccggcg

SEQ ID NO: 298939 - DNA, 366 bp, Homo Sapiens
ccttgttttttatactctcttaagagccgtcactgcggcacattgtgttctattctctattcgcatacttatctcggttcttatccttcacatacctctgtttctccttagccacatgcttgtcctggtgataccacgttttacacataggcctccaaattttgcctgtcttgaatgctctacatattttttagctacttatgcctctattccattttacttttatttcttgtctcctcctgtacattggcctttctacattgctattttatcactggcaccttttgttcttttttttaggtctgtgttttaaagtttaccttttgtctctaattggatgccattttgaccttctttctatgtatg

SEQ ID NO: 298940 - DNA, 476 bp, Homo Sapiens
cgcgatatacagacctagagagtctctgtctcagagacacccagagttgcctacctctttagagcactcgcttctcagtactttcagaccgatactgcctttggcacggacctcgtggattatgccaagagcccacatgtttctgcctaggcccagacttactctgtgacgtcacaggtgtccctctcacccctcatcatgagcgcttgttcggagctgcgcatactttcgagctatatctggcaacttggcacactacctgacaccctgtgttacgcccacacctttgtctttctaccccggctggcctttaggacacccactggcccttgctttagcttctgtccctacccactctctgcttcaatacatgctgaacggatccacagatgtgcttcgagttccatattcagcttgatgtctccacatgtttattatcccttttttgcatcatctttacctccgattatgctcgg

SEQ ID NO: 298941 - DNA, 409 bp, Homo Sapiens
aaaagataggcctgtgtaatgtcatcaatttgagaaaatagccatttttctcttatgcattattagtaagataaagtatattaggaatgaaattgaaatagacattagatttcttctccatcatttgacctgttcatagttcaaacaattaagtcatgatagtgtcaacagggattatcttaattttaattgtaaaagaatctgttttctttcatgaggataaactatcaggctttgggcttggtacttttatttgcttaggaactgagtaattgcctcataaaacagcatgatggtactattaacaccgaattataagacctgttattatagaatttgcttttctagttgggataagacttcattttttggtgctttaattagtttctccaaatgggtgtattcaggt

SEQ ID NO: 298942 - DNA, 476 bp, Homo Sapiens
ccaaagtgctgggattacaggcgtgagccactgcgccagtcctctggagctattaaaaaggcttctaattggtttccgcacttccactctgattggtttccgcacttccactctgatttgttattatatcttgttattgaggtgttattcacatgccatataattcatcctttaaagagaatttttttaaaaatttttgtggatatatagtaggtatatatatttatgaggtacatgagatgttttgatacaggcatataatgcataataatcacatcatggaaaatggggtatccatcccgttaaacatttatcttttgtgttacaaacaatccatttatactcttttagttgttttagaatgtataaattattactgcctatagtcaccctgttgtgctatcatgtagtaggccttattcattctttctatttttttggtacctattaaccacccctacctcccctacccttct

SEQ ID NO: 298943 - DNA, 301 bp, Homo Sapiens
attatatcatatataatattgatacgtgaacgcgtgcaggacctgcgccttgcaaagctaactgcaccggtatgagatgatgtagcagcacctttagtttgtgatactcgctgagatgtcagtattctatgatgacgccagatactaacctatttgaggatcttgccacagtcgactggtctaacacatcggagggtaagtcattagcctccatcagtattaagctctacgccttatacgcaccgtcgccgggaacatgaccgacgtccatgcttttgacgtaggcctacgctgctgtcct

SEQ ID NO: 298944 - DNA, 220 bp, Homo Sapiens
  misc_feature (156)..(156): n is a, c, g, or t
tcatatctatcccatcgaacgctcagtaggcagcacttgggccagagcttagaccaagtgcatccatttttgggttctccaatagccacctaccgaatcgtcgaatcaaaaggttagtagcgcccctacttgtaatatgtatgttggtctagaatngccttcaccatatctaggagtcgaacgtctaatgtacccacaacgtgcttgctatagacatagg

SEQ ID NO: 298945 - DNA, 535 bp, Homo Sapiens
caaaggaaaaaatacaacgatacaaccaggtctggacagttccccccgatatgttgaggttttagtttccccgaggttttttggggtggacgggagactctagaaaattaacagaaaccaccggtcaccggtagtcaatgggggatggtcccccctgcacggagataactagagatttggttgggtgcccaaccccgctaaaagcccaataccaaccagacacccatgcaatggcgcctcatcctcgggacagaaaacccaccggcagcatgcaaggcttgggctattaatattattacggttggagaggtcgaacacaaccagattccccaggaccccctagaacccccggattttctgggaaccgatagaacccatggaaggaggaaacccaaaaccaaagaaggcgcaacttcgcgagaacggggaaacaaacacaggcctgggggtgcccaaatggcgcactggaaaactcaacacgaactcccccaaaccaggaaatttggccagacagccccttcctcgcactccgcgg

SEQ ID NO: 298946 - DNA, 1176 bp, Homo Sapiens
tgacactgataactatcgtatccgagaactgcgacgacagcctagactgcgtactacatctacgactacacatcgtctctgttctgattatgatggtaatacccatagaccaactgtagtagagtgagcaatacaccacattaatatgtcagatcaaagcacttctctcttccacagcacgattagtgatgtggagttactacgtataacgtcctcatcacactataccaacaagctctctgattgattgactgcgttcgcactgatactgatgtcgtacatccagctatacagcagaacgtattacgtagatacatgggacgtccttaggatgtagtcactcgatcgaggcgcacatcgtacgtcgacaaggctacacgaatacattgagtatcgttcatcgtgaggctctgaacgtggtatccgtctgcgaagataccgatgacatagtcgctgatgaaggctacctgtgtttgttggcacgatcgatctgggctgtaccctgtaggcttatacttcaataacgaattacgcacgatctcatgatttattacataatcatagactatgtttcaattctgattgatattaacggctgtaatcgatgcaaatggcaatagtgtgcgtcgacgcagtgtacggtatggatgaccaccacaacatcccggatgatgctgtacgattgcttagagctaactggctaccgctcattctacacgtgcatcctgtattatgctcataccgaatcaagcaggatgaggagccagcgcacacagtatagcactcacatcactgtaagcatataaatacctaagatcatgtctttggattatctgactacagataatgagacatagaatgaccagagtagacaccagctaacgcgacgaagcagctcactatcggagactcacgaccacgattgtatagcttgatcaacgaaaggctgaatgtgatagactagcttaattcatcgccttagagtgataatacacatcgcgtcctcacatcttaactgagtgtacgttgcattgagtaacacgtgcattcttgcagccccagtgcaagtagagatagttatcaattgataacatgatattggtctgctgagaagaacgaagaatcaatgcatttattatgccccaattgtttataggcatcacatgtcggtctttc

SEQ ID NO: 298947 - DNA, 636 bp, Homo Sapiens
gggtgctgtatccactgaacagactgatgcatcttcactctactccattgtattagtatggcatcaggctacataggctgtgtgctcgagtacggtcgactatggactggccgggcactcatacattacattctctctatacggtcaactatacttgctgtcaggcacacgtccaatgcttctctcatcggctactcagttcgagaaatcttccataacacgactgtatacctctcaagcaatgttaatcttgaatattagtgtcctattcgcactgcatctgctagaactgccctaatagctataggtcaaattctctagatgactctaccattgcgatatacgatacgacattgtcactactcacactgagacattctttgctgaattctcatgctcatgtgacttgtgtcattaacgcttgactcaccagagctcctaggctgatcagactattgtacactagtcgtcccctgatatagccatttaagatcaaggccgatgctattgcctgttccacacactattcacagatcgcgcactaacaatctgtaggtgtacgacacgtattatatacatgctagctaagtctcatcctcatctacactgatcagacactaaccatattgctcttct

SEQ ID NO: 298948 - DNA, 587 bp, Homo Sapiens
caccagtgacgtgcacgccgtcccggttgaactacagttctgaagactctactccgtcagaggtgtcgtgaccgtgcccgacagcagatagagcacccagacctacatcagcaacgtgaatgacaagcccagtatcaccgaggtgtacatgagagttgagcccaaatcatgtgaccaggtatcgctatgctacgcaacccatggacaccctcatgatcggcctggcccatgagggcacatgcgtggtgaagcacgctagccacgtagacccgtgggacgtcatacaggtacacctacagcgtcactgtgcaatgtgccatgactatgtcgcgagacgagcagtacaacagcacgtaccgagtggtcagcgttatgagcgtactgcaccaagactgtctgaatggaatggagaacaagtgcaggggctctcacacagactgtccagactgcatagggaacaccatctccaatggacacagtctgaccaagagccacacgtgtgcaacatggccctaccgggatgagctgaccatgatccgggttagtctgacctgcctgacataggcttatatgcagcgacatatcgg

SEQ ID NO: 298949 - DNA, 710 bp, Homo Sapiens
ttatgagcataaatgtgttgcataactttgggggaaggaatgactttttacaaggtagtctcgacccgccctttaaaactgacgtttgggttgtaaatcagaacttaacgttcatttcggcatatagacggtgatctatgtcctcaaatacaaccattaccattttcatagcgtaattggtcattcccaatgccagaaagcatatgccgttctcggtgctctacagaccattcatgcatttaacctccacgactgcagggtcaaaaggtctcttctttcaacaccccgggtggcttcttatgacctccacataagggcagactgtccattagtgttcacagagcagttgctaccatcctgacacaccaaaagcatctagggaaactgtcgttttcagttagggcaggtgaggctccacctatgagttcccgacctccaaccagggccttgtttgagagtgagcaagattatccttgtatgccaagcatcattccacctttctttgaaaaaaagccactggtcttctttatccaagctacccgaggaggccccaaacaatactcggtattgttactgacttgccaggttaatattttgttatgaagaggaattttttcaagcccttcggggcctggtcaggtgatgcccaagggtccgctctttaagcattaaggggaagttacccctgttttgccttaaactcgggaata

SEQ ID NO: 298950 - DNA, 463 bp, Homo Sapiens
  misc_feature (130)..(139): n is a, c, g, or t
ccttttggttttggaaaaagttccaaagttaacattctcgagtttggttgtttggtgtgtcccaaccctggggaagagacctttaaggccattagggggtattcccttccaaccttaaaaaaaccctaannnnnnnnnncccggtaccctccatttggggaaggaaaaagcttcctatttaaagtccaaaagtaagtaattggggaataatctaaagccaaccaaccaaatggtttcctcccggcacccaaattttaaccccccccacgtggggtggcaaaattttgaatttcaaaaaattaccaagggccttgttaaaaaaaccttggaactggtaactgtggttggtccaaggcacacatctgggttgtttaagggaagaaaagaaaacttgatttttcaaataatccccaattgttctttaaaaatcttggactatttgcatgtattacccatttaagaa

SEQ ID NO: 298951 - DNA, 714 bp, Homo Sapiens
  misc_feature (571)..(571): n is a, c, g, or t
  misc_feature (583)..(583): n is a, c, g, or t
  misc_feature (619)..(619): n is a, c, g, or t
  misc_feature (642)..(642): n is a, c, g, or t
  misc_feature (674)..(674): n is a, c, g, or t
ctgggcttttattggcaattacaaaagtaatagattttcttacataatacatttcttcagtaatatatgtttcaagtattttactgtagaatttctaaagtaccttgtcactgaccccataatttaatataaagtaggtcccataatcacattttttggaagttactgaaactgagataaaaaaatattgcttatgggaaaaaactggacaaaatacagaagagccaaaactagattcactggctcagttatgtctactaggtgaaagaaactgagtcttctaataattcattcagaatctgttactgtagaaattttaagaggttttgagtcagttccagtataaaaataaggccaaagtgctccttgtaaattatcattaaaagtatagagaagagatctatcattcaaattataaaaggaaacttcattcatttcatagtctaaaaaaatgccaatcttactaggaattacttgtggcagcagaataatttccctgtggcccaatacaatataattattctgactagatcgccaaaatccccataatccatccctgtctaaaaatggntgactcttcctncttctgggaagacagtccttacagacaccaagaatnctttcaggcttgtctttcacttntactttccaggacttgcttgcacaactatatnccttatgaaccagaacagctggaggagaataaaatttttt

SEQ ID NO: 298952 - DNA, 448 bp, Homo Sapiens
  misc_feature (427)..(427): n is a, c, g, or t
ggtgatggtgggagttggaagtgagaatgaacaaatattattctggattcccaacttttcaacctaaagcatgagattggtcttcagaaaaaagataagtgaactgtctaggcatcccagaccaatcacagtaaaggcacacgggcagattttcatatggctgcacatgaacaccactgggctaaaaataaagttcacagatgtcattttcaccattaggcttctgtccaggcatgggcagcttgccaagggagggcactggacggtaagcttttctgccagtgttcgctctctgcttagcaaacggtccctaaaatacagaaattttaacccagatgtcaattctactcatcagggttggggtcccctatttaagtagtccctttctagggatgactatctggccctattcttgggcagcgtggangggactgcccacagtgcttaa

SEQ ID NO: 298953 - DNA, 678 bp, Homo Sapiens
cagctcaacctttgtttaatggcatccacggaggcctcagggatggaggtgacgccttttggagcaagaagcaattatcatataggaggcattcaccacttgccccatgacaatgggacactcgaaatgtgcttcaatgattaaaacaacacagcgtttgttcaactccacctcgccggggattgacatgtgtttggcctctaaaacacatggccccaacagcttaaatcactttctctgagttgttcagcacactcatatgcacagactggacgatattcatgtgggcctcatttttgaccttggataggtcggccacatcgatgcagaccttagggatgcccagatgatcaagtttgctctttagaccataggtacccttgggggacattcttggtaaagcaaaacctgtagacctgttgtctacattgtccactaacttgtcgacaatatcatgggtgtgcaaatttaccacgcgctgttcttttggcggaccagacaacaaaaaaggggcgccttcccctctacccctggcggcgggtttttcacaaaaaatagagagaggccctcgggggaaattcttgttctgacattcaaatgtgtttaatccaagcccccctaataatctcaatttgtttcctatggaaaggtaaatgttaaaatgccacaaaacccatc

SEQ ID NO: 298954 - DNA, 524 bp, Homo Sapiens
  misc_feature (299)..(299): n is a, c, g, or t
  misc_feature (392)..(392): n is a, c, g, or t
ctgggaatgatagcttgtgaaagttccataactgttttcacgttgaacgaataacaatcacttcttcaaagcggaagattatgaggtcatgatcaagatgatggtataagaagcagccccctggcccggcagagtaactcatagtttaataacggcacaaaatgaaacatcttaccatacctattattgcggtcatctcaaaatttggattttacctaagaggtcacatggccagcacctaattcaacgtttggtatgcttcacaatcctatgaaaattaattggctcctttatattgnggatgcttaaaaactttgtggttcccagtgaggtgccatgattagcacctaaccggttctggcgttgtcggtattgcccctcaaatgctatcngtgggatggatccaaagattaaaatagagtgttggatctattcgtttaccaagcatggagattttttgccccgagggggtatggggcttgtttttttcaacagaaaaaggggcacgggcttcctcatttctc

SEQ ID NO: 298955 - DNA, 281 bp, Homo Sapiens
tcagtggaatatttgattcaattaggggattaggattccagtaaactgaaaccttgtccacagggattaccacagtgagatagtggaaaacaagtggaacagaaaggatagctcatgcctatgagcgttcaggcaaaaagagaagtgaataaatagaagtaatgagattaaataagaaatgatttcatagatttctatttccacagagccagaaagaaaaatcgaggaagatgagcaaatttagcaaaatagcaagaaagaagaatagggagatagagaaa

SEQ ID NO: 298956 - DNA, 796 bp, Homo Sapiens
ggattatttattacacttcggcggagaaggcatacatttacgaggacataaggacaggcgacctgacctgggcccaacctcgggacagagggcctgctaacacctgcctgcctacaaggggacctagacgggtacagcggcatgcaaactcctttcctttctatatccaggagacttggattgcatataagctgcttgaagaacattgagcccatgatcgatggatgggagaggcctgagcctcaggtcctgcctgaggacatgcacgctgtgcttactttcgacgttttcaagtgagccctagggccctgggaccaggggggtacggtactaatcaccatgaccggcatagcatgggcaaacagctggctaaaagcacgctccgtccatctgactgaaccacattgactgctgtgccaacaggtgtttccatgtataccaggacgccatgattaagaagatcatacgcttcctgaaggggcggtcctcccgggactcatgttcaggctctggcaccactttggagggtgctgaggccatgggttcaacctaaccagtaccacgttctctagacaagctgtgactgcaattaccgctgacatttctggaagaacagctcctgaaaccagttttttttggctgaggaaacctgggctattcctaggaaaggggggtacaattcccggggcacccaacttgatggtccgagtagaaacaactctcttaaaaattggcgtgggaaacggaaggcccctctcctagggggaacggaacatttattccgcccccgcaattg

SEQ ID NO: 298957 - DNA, 140 bp, Homo Sapiens
  misc_feature (99)..(99): n is a, c, g, or t
cgggcgccaaaggggaaataacacactgtgtgggtgggggcaccaaatatggtggcgaacaaacacgcgcccgggggtgtctccaggaaataccccccncagattaacttgtggggaataaggcacaagaggtttggaga

SEQ ID NO: 298958 - DNA, 277 bp, Homo Sapiens
  misc_feature (122)..(138): n is a, c, g, or t
  misc_feature (157)..(192): n is a, c, g, or t
  misc_feature (198)..(207): n is a, c, g, or t
tcttttgcccaaaaggaaaaacccctgtggggtggggcgcaaaaattgggggaaaaaatgtgcccggggggtctcccgggtttcacaaccggggttacttgggggataaaggacaaaggaannnnnnnnnnnnnnnnnctttcacaaaaccctattnnnnnnnnnnnnnnnnnnnnnnnnnnnnnnnnnnnntccaannnnnnnnnnacaacgagaaagttgggaagggcccccttccccacggagtaacccaattaaaattggtcggcaaaatatt

SEQ ID NO: 298959 - DNA, 508 bp, Homo Sapiens
  misc_feature (327)..(343): n is a, c, g, or t
tgggttccccccgcgtcccaggatttggccccagggtggaaatttttaagaaaccccttagggggtccagaaggtgctccccggaggccgggttcctcctggggggtccgggccaccgcccccaccagtgtttttcctggtgaccttttccgggggttttaccccaaataaaacccccccatgccttttgttaactccaggccccttattaaacactttttaaattccccgacccgcctttttagggaaaacccgggtatttaattaacccccggttgttttttgttgggaaaaattttaaatgaaaccttggttttaaaaaaaggnnnnnnnnnnnnnnnnnccaaaaatagggccgggaaattgggaaccaaattttaaaggttaaaatcggttttgtttccccagggggggtccttttttttgtaaccacccaaattttgatccccgaccaaaaccacccctggtttttttaaaaaccgcctttttaaaagccccctgggtttcc

SEQ ID NO: 298960 - DNA, 736 bp, Homo Sapiens
cctacagcagcagtcgagttctctacgcacatcccgccagtaggagactcagactcgcatctgttctccctcccctccgtgggagactttgtggaccttcagctccatttgcgggctttgcgtgaaaccttaccatcggacactatggccactaacgttcccgaccagacagagcctgggtcgatgaactcccgtgtttacattgagaatccaagcactcttgtggtcaagaaatctgatgaggcggcgatgcttacgacgtgtgcactgcttgcgcactgttctgctcataagggctatgcctgggatgagtacagctgatgtgagagatgccctggctgctgtagcaagagaggatgccagaccgaacgctggccaggtgccagagatatcactgcttgcgtggccggatgtgagccggtgccaaacacgtgtgattcgatcatgcagcggttgtgtacggctcctgtatagcatgcactatgactcttgacgaactattatgataggatgctcagtagccaacacgtgtagcctcagcggactctatcgctagctctgtactggccgtaaaaccgccaggtgaataggacacactctgcgatggggcagaagcggtttaaatatcagagggggcagaggcgatgttactgctctgggagttgattgagttgaccttacgccatttcgagagtgctgaccccaccaattaacagcgatttctggttgcaaacgg

SEQ ID NO: 298961 - DNA, 722 bp, Homo Sapiens
agtctgagcttatttattaagtactcaacatatcttatttctgactggtttcatactgatatgtaaaatcttgtacataggaaagtctgcagtacttttagagttggttgatggggctttattttacacacctcatattctttcggcccagactgcttcgtactctgaggcctataatctatgtttttaggaccactgacatttgaactgaatacacctctgacggagctgggggacacttggcgtatcgagacggtagctgtgggatcgctaggtcactggcctatcaccttctttttataagggcttgattacaacctgcgtggcgtcatcatccttttgatagagattgccaaagctgcggattgtgatagctattttggggcccagctggttaggcactgcttattgagcttgacgcggagtatgcgggatgcttattacccaatgaccaacttgaaaacgtctgctatggcatgacaaatgcaccgactactgttcgatattgttttctgggtctgcctctgaatggaaaggagtgccctttactcactttcatgtggtcacggacatgggttaagaaatccttcattatgggagaacccaggttgttgtaccacgcatgattggccggagttacctacgatatcaccccaaggggaggacctgttatgtggccttccggtttaaataaagtctcaaatggtgtattgaccgtgccc

SEQ ID NO: 298962 - DNA, 712 bp, Homo Sapiens
  misc_feature (373)..(381): n is a, c, g, or t
aatatcactttttatttaccacatccacgcaggaggtggatcgcaagcataatgccttaatcacttttgtgcgatggacacaggtcccatacttacaggccgggattttactggctgtatgctttgccgctctgaagcctagtgtgcctgtgtatgcatatttgctgatgttttcgtgcataggcctgaacatcgctccttattggcgttcggatgcttatggaatcttgcttgaatggaaagatgtgaggatgggaactaaactacatattctatggaatgcccttgatcataacagtaggagctggagattgctaaatcacagatcgactgtctagcatgtttgaaacgggggtgtatcaccattggtacnnnnnnnnnacagaatcaattgctcctgacactgtagtgggattgacggtttttaagttatgagcagatttcaggatagagcatggagattcagcggtctgatattaccttgatacatgcggcatcgccttaagctgacaaggaccttttaagttgtaagaggcgcagatacctgccgtgtcatagagccaaattttgcttaggggccacgcaacgatgtagcgagtagaaaactttgcggcttggccacggcaacaatctcccgttttgtgagtcccctggagaggtaaatttgacgtatgtcatctacttgttggagtacactggggtcaaggaactg

SEQ ID NO: 298963 - DNA, 685 bp, Homo Sapiens
tctttccatttcagactaactgaagcacagggctttgggcagtatgattaacgaaatttatgtcttttacacagggtgtggggttgacaccaacgattaggaatggcacctgaatgagctcaagaccatcattttatttgtatgattcttatggtagggtgggacgcttttaaatgtgatgttgtaatgcctaaaggggcttgtgttgtagaaacaggatttttaccgtcctgggaaaagaacgtgtccttataaaagggcttgaaagacttatctacaaaggctgggatataatccatgacagctttcatggggtcttttgttggctcgaaacttgtggtttacgagctcaacaagagcacattgggagaagagcgggtttccttcttagaaagtgtgcatatatctgcatggaacgtggatgggccatccttaaactctccttgaacgtattgtgcatcggctaccatagctgatttgcatggtagactgttgacccatgtttctgtgcaacactaggggactctgaaacttactggcgttttacaatgcgacacacatcactggttcaggagcacgggtggtttgtcttgtggaaaggggattttttttgttctagatgttatcacataagtaggcgctttttctaggattctggggcctgtacaggaagtgaagaggccct

SEQ ID NO: 298964 - DNA, 736 bp, Homo Sapiens
ttagtagcgcgcaatcgaaaaacttagtgctgacacatggcgataaaatactacatagcgatagtgtgtatagtcagcagttaacagacgtgtccacaatagtgccagacaacaatgagaggtgctagcccaaatattgacctacgactctttacaatgttgcatacaccaccaggagaatcatactggaccttgcagaggtgcttgctccttcctaggatgaggctttacatacttccgttcttacacagagccggtattctataacaagatatttggacgtaattcaaactccagcctgtttgatcttactgtgatacctttcacgcgaccaaaccggcttatgaatattttcctgcctctcatgtttaagaagccccctgggcgaactttataataatgtcgagagaaaacctgaggacgtaaacctgtctaaacccatctttattcagatataatttgtttagacgcttgacctgaggaggcatatgcctgacgtgagccctgttccatgaagtggattgctcagggaggttggtcgtaaccacccatgtttaaccagggtgctgacctccctgcttggaatctaccctgcctataaaagcccaatagccgaacacattcctgggatgaggggcataagaggtttgtaccatagccttggctaggcaaaaaatgatttctttatttttctgggagcagatttaaaaacacttatttgttttccctcacagtc

SEQ ID NO: 298965 - DNA, 689 bp, Homo Sapiens
gggaattcgcacttaatttgcaaacaaatcaacagatcgccacaagaacggattgcgttaaaggtccattgccctacaatcgcatttatataaaggcatttaaagcggcgccagcctaaagtccagaagaagcaccagctcacattgtcgcccttggaggaaatatgcttttgagagaggtatcattttcaggccaggcccgtgggctacagagaaaaacggagaggacaacccttcagggagtctttattccggattccaaactctcctggggcctaaacagtatttactctatgggaaacattgggggcggcctttacaaaaatgcccgccgtatcttaaacacattcgaggggggctcatccttcgttccagtcatgcccaagtttaatgcacaggtctaccctacaaacatggttttatatgtcgccaaaacttccctgggcccagggtcatggactggaggggaaggcagtgaattctggctttatgcgtcttttagggagctattctggggctatcagttgccccttggagcaatcgtgattttgggcctttgtacccagaccatgagaccccgggacagggctttcggatgattcctaaccgcatccccatttggtcctcaaaataaacattaaattgccccaatggcccttgccgtgataccaagggtggggaaatgcggg

SEQ ID NO: 298966 - DNA, 653 bp, Homo Sapiens
ccacaactcaacacacaagtttgtgagcgtatagcactgggtaagtcagatctggaaagatgaaactgacgacaagattgatagttattccaaagaaaggtgagcatttgactaagaggatggccattgtttcaagttccatgagcaacggggaaataccagtctcccttttgaacacatggtttgacaggaatagcaagatgtgggaggattgcacaatttacaaacaatgaacctaggtccccggttctcaataaaactttgccggttcgaccactcaaattttgaatattttcccaaacatctgggttttaacccaggcatcaagcttttaggggccttgaccatggaccgccctacacgttattttttgtcccctaaattgataaagttagggactgccttaattgtaacaccggcctttccggcccccggaggaagccggccccatagcaaatgggaggggggccacatttttgtaaaagggggccccctttggaaaccgggcttccccctttaaaaggaaatgtaatttttgggttaaatgaaacccgtgtcccggtaaatggcaaaaccccttcgcaggggttgcccgcaattaaaaggccttttccccggggcaaaaaaacagctcggcccttggggtgggacct

SEQ ID NO: 298967 - DNA, 779 bp, Homo Sapiens
  misc_feature (515)..(515): n is a, c, g, or t
  misc_feature (557)..(557): n is a, c, g, or t
cctcaaattacgtaaggtttaggccccataaaacctgtatatgcccctgcctctattacatttcctaaccagagaaatgtgtaaatgtcagtctttgctggagttattctgacaagatgtatttagggcctcccttttggagcgcttgccacataaatgtgaacatatcaaaatgagccttcgtgtgtgaaatttcaaccctctgacggatggagctgcagtctgtattgcacttcaactcccttttcacaagagcattgctctctttttctctttttctgcttacgcaatcctgcctcactcttcattacaacttccccttgggagcacctgatccagtgcttctggctctcatcactctattttgcctctaccgagagatctcatgcctcactcccagccacctctgcaagctcttactatgaaaactccaatattgctcactaaacacgtgttcatacttcaaacctcaatgagtcagcatcagctaataacaccctttcttcacattccanaactctccttcatctggaatccttgcttctctggtagccctnctatgaggtactcattgcatattgctgccctaccagacccaaggaatccagggaaccccattttctactgctatccctagagggccgggaaaaccaatattttaattgaattccagagttggattttagagtaagcaaagttcgtgccgtcatatgacccgaccatggattccaaaaagacaaagagaccttcctaatttatatcaaccaagcctggtgtaa

SEQ ID NO: 298968 - DNA, 691 bp, Homo Sapiens
  misc_feature (100)..(191): n is a, c, g, or t
  misc_feature (207)..(215): n is a, c, g, or t
  misc_feature (375)..(384): n is a, c, g, or t
  misc_feature (577)..(640): n is a, c, g, or t
atttttgccttaaaaacccaggggggggtttttttaggttggggaacccccttaacacaccggtttgggggggacacccccaccaaaaggaggggggtgnnnnnnnnnnnnnnnnnnnnnnnnnnnnnnnnnnnnnnnnnnnnnnnnnnnnnnnnnnnnnnnnnnnnnnnnnnnnnnnnnnnnnnnnnnnncggggggtttttcggnnnnnnnnncccattttaaatttcaagggccccttttattccccggcccccggttgggccttttttgggggggagtgggcaactctccctttaaaaaaatccgggtgggggaatgcccaaaaccccgccaccctttttgaaaaataggaaggtccctttttttaaaaannnnnnnnnntcttttcctgtgggtttgttgggccttttaaccagtttttttgaccttccgttttcccagggggccccctttttcattgtttgggccaaccccccaaaatggagaattttgagcctggcaaaaaacctggtacccttttgaggaaaaggcttttttaggggagggaggggaagtttttggctttggagggggnnnnnnnnnnnnnnnnnnnnnnnnnnnnnnnnnnnnnnnnnnnnnnnnnnnnnnnnnnnnnnnnttggggccgggttttttttggatgggtttttggggagactttaaatttaaa

SEQ ID NO: 298969 - DNA, 697 bp, Homo Sapiens
cccccccctgctgggcaaaatttggaacggtcctttttggccacacaacacccccaggggccagtaaactgtttctaaaaccctaacaaaggagtttggttctcgtgccctattaaaaagaaaaagtgtggtttcatggataaaaatgacctccaaaaaccccttgtgttgggttcccgcatcccctaaacactggtggtgttccgaaaccaaaaaagctctgggccaaatggaaggaaccccttttttcatttatgccgcgccttaaatttccatgtgcaaaacggggtttcctgtttttcagtgtcccaaacaaaattcccctccgcctgttgtttttggaaggccgttgggaaggggtccggctccttttgggtaaccctgaccgctttttcaaccccgtttgagggacccctggccattttttccagaaggtgtttttggggtctccaccagcatcaaattacggccaacgcccccttagggttcagggcaattacccctttgcccccaaaaaacgcaggtttgttttccaggaggggcccccgggaattgaaatttccctctggtctgtggaacggtagtttttattgaaagaattgtggcccccctgttaacttgggttcccccttcaaatgaagggccgctttttggggctttgcccccctggggaggaaaagtcccccccctttcaaat

SEQ ID NO: 298970 - DNA, 240 bp, Homo Sapiens
gcatgaaagtgatgggcgacagtgagggcactaataccgctgtggagacttattgacaatgacatgactattcgcagattagaccttgtatattaactaactagaatcggacaagcaagggttcatagtaccacatcgaacaataaaagatgctatacgaggagttgattgtctctagaacctgaatgagattacttatacagatgcctagaacataagttgtgtatgaggcctatgtac

SEQ ID NO: 298971 - DNA, 417 bp, Homo Sapiens
  misc_feature (179)..(235): n is a, c, g, or t
  misc_feature (238)..(238): n is a, c, g, or t
aaagatctctccacccctgcctctgcctagcctcccactgagccacacaaaagcccaggctgcagagagcaaaggcccagtctacaaataaaacgtgagcgctggcctggaggccagcattgtggtagcactgggaaaggagcagcgggtaaagatgacacaaaataaaacatccattnnnnnnnnnnnnnnnnnnnnnnnnnnnnnnnnnnnnnnnnnnnnnnnnnnnnnnnnnggnccacaagggctccaacataccatgccatggcttcccgcaaaaggtccctggccaacctcatggtggcatttctgctgacctccaagctggaactaactgcaacactacaaactagaaagtgtcctttctgttctagaactaaggccagttttgaaaaggggcattttggtagcttacac

SEQ ID NO: 298972 - DNA, 688 bp, Homo Sapiens
ggagttttgccttagtcaccctagctggactgctgtggcgccttcttgacccgctgtaaccttaaactcctgggttttagcgtttcacctccctcattctttcgggtagctgataaaacttgcaccctccagcgctcccttttatccttcccattttatatgcttggcagcgggttaatgacgttacctaacgatctccgtttgggcagctaggaattgcttccttaatcctaaacccggggggcgcacagggcatgcatttttggcttacctctgctccaatatttgatcgtgaaaagtcctgtgtaccacccatagtgatcaggtagaccgctttcattcgtgtataagctgcccttcgtgcaccatcttaggtagatgattagcccaaaccgttcacccttagctacttaagaaaatgtttttgcgatcgcagattcatgtacactcaaagaacgcaccttggtgtgcatgtgcgttaattaacaaacacctttccatttcgcttaaaacagatgcactatttatcagctcttgtatatcccaccgtaatatgcaagggccaggaacctggattacatatattgccaggttcttttaaacatttcatctgggttccaaggacttacagggggtggctctactttattttcctctatggcacatacctgattgaagaacgaaaacg

SEQ ID NO: 298973 - DNA, 706 bp, Homo Sapiens
tttaattatttgaagcgcaccaacttgaggcacattcattctcgtacattatgttaatcagtctggttgtggactgtgcatcgacgtacatgaaattctgatgaatccgccatagggactcatgatcatggttttgaaatggtggttgggagggacgcttgactatgggaagacagacgccgacggtactttgcattgactaataagagatcattactgtggatacattagacctttatacgtacacttgtcggagatgacagaacatacgagacgttgagaagtgatacatatgagttcatagaggataatgtgtagctgacaacttgtgtgttactagctagaacagtggagtttactttaagatgccaaacttgagttgagagcgcggacttctacctgtatgggaggagatagtaagcgggctaatgtcttactgacgtagatttcataaggctctcaagccagccatgactgtacttatgctacacagagatatgcgtaggatcaggagtctatgggactggtgacgtcataaatgccaatcctttgcgtttcgcgcatcagtacgaaatagcatgactggcattatggacttagtatagcacgcacatagtgtccctttagtagtggatgatacgagacactatgaaccacacctaagctcatgcattactgcgatgtgatctgcgaggagaattgtctt

SEQ ID NO: 298974 - DNA, 535 bp, Homo Sapiens
acaaattgcggtccccgagaattttatatggccttttctgccctacccagggaatttgctacgaaggcctacggcaacatacaggaccaccttattgactacgcctttgtaacaacaactgatgtggatagctcgtgacatatgccgaaagccaaacagaatccattcgtgctggacagataacagtaatacgcaagctaaaatgataggacattttaactacatcaacgaccaagttccagagccagatatttcattgactattaaacccttctactgggaagttcgagacacatttaaaatgtagcatggccctaaaaccaacattcttgtatttttcttgccatgacgaactcgttccatgcatccgtccattgattttttggacaagatctcgctctgtccgacggggtttaaagagtgcagtggggaaaatacagattactgcagactcaagatgcgaaggccgagcagatcttaccggcttagtgcatctctgaaggcggaacaacagaactcgtgccggaaactgcag

SEQ ID NO: 298975 - DNA, 532 bp, Homo Sapiens
tgtctcactcccgacctatttttatttgtcctccttggcctcccaaaggggggttgttacaggcgcgagccaccgcacctggccaatacttatttctaagctccgagcatgttggcacatttgatttggtttgctctttctttatctgtaggccatttgatattgggccatcattgaaagaggcctgtctttcttcttcttttctaaaaagcaatctaattgaatgacatgggctctttttttgagagatgatccgtagatccctaacatatttgtgtgtgaagtttaggacaattagctgaggtgtctgagcactagtacctacatttctgaataattttgataagatgaactcgcttaatgattttggagatagaaatgaaagaaaaaatagagctctataggagttagattaaaatatcagccttggaacatcatgaattattgtgatctccgtaaggattttaggctggctataaaggctatgtgccatttgtatgtattgaaaaaggaacattctcattgaaactgg

SEQ ID NO: 298976 - DNA, 687 bp, Homo Sapiens
  misc_feature (388)..(389): n is a, c, g, or t
  misc_feature (411)..(411): n is a, c, g, or t
  misc_feature (483)..(483): n is a, c, g, or t
  misc_feature (489)..(489): n is a, c, g, or t
  misc_feature (491)..(491): n is a, c, g, or t
aatttgtttaagttccttacagaggctagatattcaacctttgtcagatgcataatttgcaaatattttctcccgttctgtaggttgtaaacgctttgttgatagtttcttttgctgtgcaaaagctcttaggtttaattagatcccattcatcaatttttatttttgttgcaattgcttttggtgtctttctcatggactctttgcccatttctatttccagaatgatattgcctagttctcatccaaggtttttatagttttgggttttacacttaagtatttcacccatcttaagttgatttttttatatggtgtaaggaagaggtccagtttcaatcttttgcatatggccagccagttatcccagcacatttattgaataggnnagcctttcctcattgcttttgncagctttgttgaagatcagatggttgtaggtgtgcagtcttatttctgcgctctctattctgttccattggnctatgngnctgtttttgtataagaccatgatgttttggttacgggttggattcttctattattattttgagtgattgccctgaaatttagctttctttactctgtagaccaaactatattttggggttttttatggcccattatccttaaataggattcctccccctttgcacttataaagaccatttgtttgggactggtaat

SEQ ID NO: 298977 - DNA, 690 bp, Homo Sapiens
ctggtcttaaacgcataacccaaagggaaacctcaatctcattgtaacaaaaaggtgtgatttcagggggcagtccccacacccgtgctgggcccaaaacaggatcacactgattcatgacagtcccatggaaaccagggcccgctcccaacattcaagacccagcgaactatcaattttatctaaacgctcggtattatcgttataaatcaaaatgggtgatcacgaagcccaccttcacggagccttatacacttgaaatgaaggagccactctgagatctcctcaattccactcgcacgctgttacacttgcccttagaaagcgccatgacaaggaccttggataccctggacaccttgatatgatgtacacggggtggggataaatgtttgaagtgagagaccatgcccatttcgagaaccccattgatagacccagtctaaggaacccctcgcaactgggtacccttagttttaactaagatggataagatgaactatggcatagacaaatatggatctagatgtattgtgaggagaactatcctagggccaaagtccacagcagattgcaacccgggccaacactggggaagccagggtggcctataagggcccgaagccggaccaatgccgtgcgccactggccgtcttaagaaaggaaatcttgattgccacattactagaa

SEQ ID NO: 298978 - DNA, 216 bp, Homo Sapiens
  misc_feature (116)..(128): n is a, c, g, or t
ttgtttataatttaaaaacaatggtacacaccctctggtggagatggaacgctttaacaatacttggtggtgcacactttaaaatctcactagacacttcacctctgtcttgagcnnnnnnnnnnnnnctagggtactacaaaacaacctgccccaattgggaatggtaaaaatttttggggggagaaaagcaccgccccccaagaggggggtctt

SEQ ID NO: 298979 - DNA, 338 bp, Homo Sapiens
  misc_feature (152)..(152): n is a, c, g, or t
  misc_feature (205)..(205): n is a, c, g, or t
  misc_feature (230)..(230): n is a, c, g, or t
  misc_feature (242)..(242): n is a, c, g, or t
  misc_feature (254)..(254): n is a, c, g, or t
  misc_feature (257)..(257): n is a, c, g, or t
acagcgtcatattctgatcaacactaagtcaggagcaaatgcctaagaggacccttgttgttccctgctaggactccctgcttttgctccgggttacaaccgctacctggttaaccctcatgaagcttagcaccactctgccttgccacatnctgctgtgtccttcaaggctcaggattaagggccacctctccaaggagtcctnctgggagagtactgagtcccacggncctatgtggaantctcaaatagtnctncctgctagtaacaagcgccctgagtacttcttgagaaagtgttatgttgcaagcactttacaagcattattgattcacaca

SEQ ID NO: 298980 - DNA, 534 bp, Homo Sapiens
ttttaggaatgacatttattgtttgttgtcttggacaggacctccctgaatggagggagttttgaaagcggccttctaaacctcagatgcccctttccgtcatggatgggctacgccgcgggtaaaaggcccctttcacttattggcaaataattgcctgcaactggcaccgtaattatgtgcaccaactggtgctagactatacttttgttgcttatcggtgagcaggaggactgaagctctcataatcaagacctgtgctattttaaagcaatttattctatactcttcctaaaaagctccactcacgactgtttgagagatttagaggtatctataggatgaaagaaaactcctatttcattgtgtccaaacaacatggggcgttcagaggagcacaaatctgcgtgttgcggaccatcgcctggggaaagagggcctgatactgatactgagcccgtcatggaggccctgaccactgacagtctttcatactgcaccagatcggtgccatgctagtcgtgcacccagtgt

SEQ ID NO: 298981 - DNA, 692 bp, Homo Sapiens
cttaacccagcttgttcttaagcctagcgatccttctaaatgaagactttcagggccacattcattcattctcataaatggacgaaggatataaaattgcctctgctaaccctttagggacctttggactccaagacatcaaaaacacacgggttgggggttactcaaggggcctagcctgaagattttcaaaaacaataaatctgcctttaaaaacctgtacaacatctttttatggaaagagtttacgtttgctgaacacatgataacttacccatgagtttcacctctccagactgactgcacaatagaacttttcggcttgaaggggagaacaatgtctcaacaaaaggcttaaaaggagctcgggttcactgctgcgggaatactatgggactacctttatggatcttgaacgggactgtatgggctactctgtctgagccatagggcattccgtctatgttacagcacggcaactagatgggtacaaggcctttcttacgctatgtcggaagtgcacaccctaggaaaaccctcagtgcccactacacctagggaccagtgtgccatcatacttccatgctagagccatgagtgctcgcacaagaattgtgaccaaactgttcataagaaggttacccggggcctactaaaattcccactgtttcctgtattaagctcgttccccc

SEQ ID NO: 298982 - DNA, 330 bp, Homo Sapiens
  misc_feature (73)..(83): n is a, c, g, or t
  misc_feature (211)..(211): n is a, c, g, or t
ggaaaaaattttgggttaagaccattggggagaaaacatttggaagccaacccggttttttgaaaatctgggnnnnnnnnnnngaaggggggggttttaaaaagctttttgtgagtcgggcaagttttgtgggttaaaagaaatacaagccctcttccgggaaaggtgtgcaaaagactgttgggagtaaggccaaaagagattcgggganaaaattaggagaccttccaaagtggggggaaagcctttgtaggagggggcttgggaaagattcagtcagtagggctaattcaaagttttataacaatttggggtttttttcttaatctc

SEQ ID NO: 298983 - DNA, 696 bp, Homo Sapiens
taaagggggctttgggcaatttatttttattaccacctattatttaccaaaccccccattccgggatatttacattaaccatttttggataaccgtggtgttacaagtgtgccaagggtgtgtagagtggaatggttattaacaccatttgtgttggatttgtgaacctcgggaaggttttctggggtaattgaactctggttattaaataaagtattttcttccaccaccttattgaggtggttggccaacctggttggttgattgaccttaattattaaaatcttggccaccagttcttagttggtcaaagaagcacttttgccgggcgagaatacttcaataaatttcttaagttggattaacccggcgatggctggaatcactttctttggggacttctttcacctggtaatcgagtaacgctttgaagaaatggaatggcttttcttaaggctccttctgacactttaacacagaaaagctattcccttataactaattttggcattttccttcttggcattgctaagaaatcggtggtggtgaatttattctgaccgaagctttgaagcggattttgaacatctagagggcaggggttcaatttttcacttgcactagtaccagataaacagaatcgggtgggtttcgacttcttcttcatggaaccgttttaaagttgcctgggcgggt

SEQ ID NO: 298984 - DNA, 404 bp, Homo Sapiens
  misc_feature (390)..(390): n is a, c, g, or t
tttaaatgatccactaaaatggcgtaatgtcttaaaccggaagcacagagataatctattccacataggtcaaatatctgatccaagaggcataaaccaaaggcagttatatcagctaaatttgcagcagtaaaggataatttagggaatgatttgagagaatatcctacatttcttcatacatcccaactgccattttctaatggcatgggttccatgaacagggatgcatagaagtcattcaaagatttgttgaatgatactgaaatatgaatttgcatgaaatggacagagaaaaagatcttacatttgtctgagaactaccttgtattaaaagtcattgagaaacaaggagaaagagaacccgttctatattaccagattcagaanaaacaaacaccaaa

SEQ ID NO: 298985 - DNA, 685 bp, Homo Sapiens
  misc_feature (347)..(347): n is a, c, g, or t
  misc_feature (394)..(394): n is a, c, g, or t
gtttacaagtggttattgggcacccttattttgcaaggatgggtgtaggcctcttggtaccgcaatgtacaaaaccacgaaggcccttgcccgcaaaagcacattaaccgggccaggcacaaggaccacctgggattttcggtggtggtgaatgcaatggggaaaacaacaagggccctttccagggaaaccaccggttggtttggaggggcaaaagcccaagccccaaggttaaagctcaccttgctttccccacttggaatgggccatttgggttgaaagcaaaacccccagttcttaaaggccctgggtgggaaggggtttttcccctgcttggaacgctcggncttgcgcactaaaaaaggcccttccaaactgattttgacaccagcanagagattttcgggagcccacaaacaaccccaaatttttcccgccgggccgcttaatttcctgttgggattggggcccacaaaaaggctttaagcttcttttaggttggggtccccacaggtatggtgatggccacggtggttgtattatggagcccccccctggactaaaggctcacttaaaagaggggccgaaaaacaggcccaagagggtaattttgcttcactttagaatcttttcggcggccggaaaaaaattccaaaaccgtcaaaggaaggccatctcacaaacc

SEQ ID NO: 298986 - DNA, 661 bp, Homo Sapiens
  misc_feature (46)..(59): n is a, c, g, or t
  misc_feature (83)..(83): n is a, c, g, or t
  misc_feature (100)..(108): n is a, c, g, or t
  misc_feature (123)..(200): n is a, c, g, or t
  misc_feature (222)..(277): n is a, c, g, or t
tcttggattttagtggtttcaccttccaattttggccacacaggannnnnnnnnnnnnnaaaaaaagggtggagctctcttcntcctttgtacaaacaannnnnnnnnggagtttcccctctnnnnnnnnnnnnnnnnnnnnnnnnnnnnnnnnnnnnnnnnnnnnnnnnnnnnnnnnnnnnnnnnnnnnnnnnnnnnnnggggcctttatccttcatatcnnnnnnnnnnnnnnnnnnnnnnnnnnnnnnnnnnnnnnnnnnnnnnnnnnnnnnnnataacaaatgggttataactctgtttttcccaaataatgggggggaacgatgttggtgtttctatggtcgttttgtaggcttcgtgggatggacagtatccttgttgccaatggtaaacaacaggtgtcgggggtgcttctatattactggcctggtggggttctttattttggctgtctagctccgggtgtgatttgctgcaccgtgggtgactatgttggttactagatgtcttttggtatataatataagacatataaatgagggggttctcttagagaggtgtttcagcgtggtgggtctttaaaagaaacgctggggttggtggtggctgcgtaatacagaactttgtggggtgggcggtggtcttgttgtgtgcttcg

SEQ ID NO: 298987 - DNA, 373 bp, Homo Sapiens
tgttttaccaaacccaagaaggaaaaggttttccaaaggtctattaatttaaacagggtttggggaattggccttcttttttgtccaataaataaaaaattgccaaaacgaggtcatttcataaacccccccctttcaaaccaaaaagattttttcaacatatttagctcccccaatcaattgggccgcctcccccactttgaatccccaaaaaagttttttttctccaaacccataaccaaggtcttttccaattttcggcaaggggttttggcttaaaacaggtcttttaaattttttgttccccataaccccaaggataatgcttcttaatcaaaataagggggatacaaatatccaaattaattgttag

SEQ ID NO: 298988 - DNA, 693 bp, Homo Sapiens
  misc_feature (221)..(221): n is a, c, g, or t
  misc_feature (281)..(281): n is a, c, g, or t
tccttcctttgctctattggacattacagaaaccaatactatgaaaagctgacagcagtatctggattaactttttaaaaacaatgaaagcattttacagaaattacatttcagatcgtgctggaactgtgttcagaagatatcctcagagggaatctggcctgagcaccatcatgtttaattgcctcctcctgtcttgcattttcctcccagcccccttnctaccccttagcagagggccaggtgagggtgcttggggcccatgggggctgggagtaaanaatttaaatgcggcaacaactcccaaaaaattgatggggcgtgcacagtcaaaacccccaaaaatgactccttgtaaaatgtgtttgtgcttatttaaattaaaccacaaggcccttccctgaacaccctggctacttacacacacttacattgaaatccgggtgcacacagattagaggggtgggactttttcgttcttaaaattatgtccaaagggttttcttttcttattttccagggagttgggttttcttggaaaagtcttttcttgggagaaacaggcggtttttctccacccagtgttgatacatttcggacccgccggaaaaccaatttttgtgggcgatacaaaacaggctgggtttacttttaaaatattaacggtataaccgctttactttaacaggtccg

SEQ ID NO: 298989 - DNA, 620 bp, Homo Sapiens
gattgaaacacgagtcaagccacagttataaaggttcgacacgtacagtgtataaactaagtgttacccattgtgcgcccaatttcgtcatagggcctgtgttctgggtgaccttaatgaacttctctccgtgtaacagtactgggaaaaaatgttaaatgacatgtgttagctagatatatgtaggcacttactatgatgagttcggaaacagcgagaactgtgcatcttttaattatggcggcacaaaacaatgcttgtggtgcctgtttcgggacgacagcttcacaaaagcagatctgtgggccaactttgctgtaaacatgtgccctaagaatacaaagattgggttttgaatgctgcgtaagcatactatagtcccttgcagttttaaaatactgctttaaatcgggcggaattttttcttcatatcaaaagtaaggtggtccataatatctaaaacctgcggaatttcaggggatgcggaaaagttggacttaacccatacgcgtttttttcagataactggttataagaaacccaaattaactggggggttaaaaggccctttaagggaattggaggtaaaaaggagtccttgggagaaaaaaagttctttg

SEQ ID NO: 298990 - DNA, 662 bp, Homo Sapiens
atgtaaggtaaatctttcttttttcatcagtccagccccactcagaaaggtacggtacgtacagtgtacaaactaagctgtcaggattttgctcccatttttctcatagggcctgtcttctgggtgaacataattaactcctttgggggaacaaggagtgggaaaaaatgtttagtaacaccagttagcgagataaatcttggccatttctttgagggtacgaaaacagcgagtaatgtccatctttgcatgaaccgcacacaaagaaagtgccagaggctgcacaattgtgtcctgacggttaaacaaaagcaggactttaggccaattatggtgtagacatatggacataatatttctaaagattgggtataaaaggccagtaacgacactatcttgctcagacagtaatataatcactgatttcaaactctgggagaattatatcttcgggttcaagatttaacgtgggaattacttatatgacaccatgccgttaatttctaggagaagatggaaaaggttttttttaaaccccttacgccgatttttatcaggggggagggtttataaaagagcctcccattaccctggggttcttccagggccctcgtaaaaagaatttggccgttcaaaaaggaagacctctgggaaaaaacaat

SEQ ID NO: 298991 - DNA, 667 bp, Homo Sapiens
gtaaatcattgattgatgcacgagtcaagccccactcacaaaggtactatacgtccactgtgtacagtaagctgtacccattttgctcccattttcgtcttagggcctgtcttctgagtgaccctaaagcacacccatccgtgtacaatgactgggaaaaaatgattaggacgcctagttagcgagatccatgtatgcacttattattgtgagttcccaacatgcgagaaatgtcgcatcttctaatgaagcgcccaccaaaccgtgctagtgggtgccgcttatggtgctaacggcttcacaggagcagggctgtgtgccagactatgctgttaacatatgcgcctatagaatctagagatgtgggtttcatatgccgcgtaacgacactatccttgctctaacgttaatatattgactgatttgagactctgggccgaattgtattcttcactatcaacatgtaggcttctccagtacttatcatgacacccgcggagaatttcagggagatgagagatatcttggcgtaaaccgttgcgtcggtttttatccagtgtactgtttcataagaaaccctacatcaccttggggagtttcatgggcctttaaaaggactggtcgttaaaaagggatctttggcatgcaagaaagtgctatggtattt

SEQ ID NO: 298992 - DNA, 635 bp, Homo Sapiens
ggaaggtaaatcattgatgaagccgcagtcaagcgccactcacaaaggtactgtgcgtccactgtataaaataagcgttaccgattaggcgcccaatttcctcttcgggcctgtacatctagtgtcccttagagacttccatcgctgttcaatgactgggaaaaaatgattagtaacgaccagttagcgaaatcaaagttagcacctttattgtggtaacaaacaagcgagtaatgcgcatcttctaattaaggccacacacaacaagtgctagtgggtgccgctctatggcctgacagtctcacatgagcagggcgttggcgagaatatgctgttagaatatgcgcataagaatcaaacgatggggtttatatgcggggtaagcaccctatcgtgcttggacggttatatatgattgaatgagactctggcagaatttattttcactatcaaaagtagcttgtgcaaaatatcagacaccagtcggatttcaagagatgaaaaaaagtttgcttaaaccgtgacgtgactttgtcaggggacgttttataagaaacctcacataacttggggttttaatgcgctttaagtggacttggtggtaaaaggagggccttgcttacaagaaagtgctt

SEQ ID NO: 298993 - DNA, 706 bp, Homo Sapiens
tcaatcttttattaatggcacccagagaaacgccgcgaaatgattgaagaaatcgatgtataaaaaacagggtgttggttgtgcaccaactaacatcataaacacatgaatcagcgtgtgatctacaaactctttctcttattcacatggtgggcatagatgcttataaacgcgatgttataagactaaggtagctagacttgcagtaactaggtatttaccctcctctgcaaagcatgtcatcatatccgcagactagcagcacttgtgtacaaaagctgcgaaatcatccataacagctttaactggctcttatgctgcataggcttgtgaaaacacgtcaacaagagcaaaagatatttgatttgacggacttttcagaaagcgttcatatatctgcacggaacgagaatgttttaatattaaactctttgcgaacatattgttcatcaacttacacagctgaacagcatgcgatacttgttacgaaagatatttgtgcagtattaggggagatttgtaaataacttgtgactttaacatgcaacacacctaaacttgttcaaggaccaaccgttgatatgattaaagccccaagcatatccttttggttcaggaagaggtccacaatatggtggccccttttttcttagaaatatttgggaacccttaggcgaagtacgcaaatggccacttgggcgcattt

SEQ ID NO: 298994 - DNA, 716 bp, Homo Sapiens
agacgggatcttttctcaatagttcaatattaccgaaattgacctcacaagttacagctacactggaaggtaccctgaacaacatggctttgggggagatgagagtccagagaaaagcaggtttttgaatttaccaccatcttagccagagtattacatgagctcacagctgtgcttataatgcacatcacatgtttgagggagtcatgccatatgtataaacttaaataaagcaaaccgcctccaatacactgggtgtagacaagagacactacacaccagggtctggatgctttagacacacacaggtgtaccatgaaggaaaacactgcggcgctgtgttacgcatgctaggatttatgtcttattcaaacatactgacgtcttggaaatacaatttcggcgagagtttggggaatgagttactcggtgcagacctaaggaaaaagattacctggtgtgcaggctatcacaagttgtgtgcctgacccacggcatcacttttttggtggagaggcttttcgagaacctacggcgtggttttgggaacagaaaccaaagatctacctgagggcgtgcccacagtccttttggccgagaaacaattaaaacagcgcagccccgtataaggctcccccctgcctttattataccacgcctccctttatataggtgtacaattaatccgcgaccggtttcctttttataggggaaaa

SEQ ID NO: 298995 - DNA, 698 bp, Homo Sapiens
  misc_feature (561)..(561): n is a, c, g, or t
atgaggcttctgccaggaaagattatgttatatttatgaaagaatgcaactgtacatgcctgtaagccatttaaattgaatgagagtgacttaacccctataattttttaagggcatcatttgggtgcactgcccaagccactgttaactctacccagatgctcgaaagctgtacacacaggtgtgcccaccaagcccagaatggctatggacccctaagctgctggactacacttgatgggaaattccctgtaatagccataagcatcaagaactcctactacaatccatgccaagcccatgataaaaactttacccgggtggttaacactcttctcagctatgactgaaagcaaggacgatacactttcgacgtgttctggagggctcgctgaatgcattagaaatgtgcccattctgagggctcgtgactgacatgacaggatcctacactatgctcttcttgaaggcgctgcaaacattagatggcttgaaggccaccattatatagctggctgcaccaagaattagcactttaccatattgcgtacataggacagncatctttcgttcgatcagccttgaacatgttaacggcacaagacatggctgcgcgtttcctgcccgatctttcatgccactggatcaagtattgtagagctgactgcaactccaaggacttcaccatttagtacctt

SEQ ID NO: 298996 - DNA, 669 bp, Homo Sapiens
cgatgtagctttttgagacccagactggggggaagagatggagcaaaactcactgacagctacggctgccgtttagatgcaagtgaatttccttagtctgccaagtgaataggagaacagaagggcaccaccaatcccggctggttaattgtataatatagatgagaagaaattttactgtctgagacacaatgtgagtctaagacttgaaatcgggagtgagcgcgctatgtctgccaagtgaggggatgactggcaaagaatcaaggaccctagacacaccacaggatcgtgtgttaatgccagcaaaaaacacagcacagtcgataagcacttgtcactagatgggtgggaactccacatatgaggaataaggttcctctcagccgtccatcagaatatataggagacgtgccatcaagattgtcagaacaaggctgtctgagtgcaaaatcgaatttatgaatgggcaaagacagtttgcctacgtgagacatttgattacaggcttaacagatccactttttagcaattgataatagaacacccgttttagcaaaatagacgtcaatctgtccagcaaaaagggaggagcagatttgttgaagcatttactcccactgataatgttgtgaagttgttctgaatgcaatatgggaatttacaaaa

SEQ ID NO: 298997 - DNA, 782 bp, Homo Sapiens
gccgaagctcgttacaatatccagcaggaaagatacacctttctttttttagacagcagggcacactgtggtccccactctagaataaatgggcaagaacggggcactgtgcactcaacactctgagctcagatgaatcgccgatactagccgtgcgtagcacaaaccatagccaagtgccaccatgttcggcttagagataaaacgtatgttgtcgagacgaagcctacctgtgctggccaggctgacctgggacgccagggctgaagcagtgcacatgcttgatcctcccgcaatgcggtgatgacatacgctagccattgagtgtggccagagaatcagtattcatcacagttgatatgactggccgcgtaaagcgagccttggtcacccttctctctagggaggaaacctgactttccaccggtaacatgtatgagatgcgactaacatgggggtgctgagaatacacacccagaacgttctatcttggggctttacaagttgattgtagtaatggtacaagaacagagcctcccagtgagcctgatgtaacaaaaaagaacctgtgacatacctttgtacaaggatgacataatggccttgattgggataaggaacacgacagaaaatccgttataatactccgtggaaatggggggtacccttccaagaaaccagaaaaaccaggcttctttgtctggctattccccagccccggggacccactaatttaaaacagcggcactcccagggactaaaactttaccaccgtagggggg

SEQ ID NO: 298998 - DNA, 831 bp, Homo Sapiens
  misc_feature (249)..(257): n is a, c, g, or t
ctacccgacatcaatgattggagaaacactgcactcttcatacttagacaagataccctcccttctgacacccccttcttggttccagcccacctcctggacactcagggccctacctgtccgcacttagggtttgtaaggtccttcgcatagaccgctgacaggccctcaaaatgcgcaatgataaccctaaggctgatcaataaatgacatattgccccagctacttaccgtgaagggcaccatgcnnnnnnnnnggcttccaccacttctctccataatctgcgaagggttctgttaccatgagagcttgctcgaatattcctttagttatttgggcacccggtcgcacgctcgccaagtccatgtgcgattcttactctttggggcatcgtatggacctcgtatgtatctacaagagaaccgtccgcccccaccagggtagcgtggcatgaaaagtacttttgagaatacttctgaaatggtttgtggtccaattgttctaccctggggcagcccctttggcgcaggttttgttttttggcccacttttggggccgtgtttacccacatggcattgcaatagaacatacgggcttcccagttgtggaaaaaatgttggcctcccaaatttccaaacacgttcctctgccggaaactctatggattttgccgcgggtgggtcatatcaattgggggagattcaccctttcgggtctttggggaaaactggtcccgttttctttactcgaaaacctgggcctgaaccttgtggaattcccctattaggggcaccactcttgggtggggagggcctccccgggtttccct

SEQ ID NO: 298999 - DNA, 684 bp, Homo Sapiens
gccggtgaaaatttttcaatagtggaacaactggagcacgcaaaaagatgggaaaaggcttagagaaacacacggggtgtagactgggcaccggctttacaccaagacacaggaaaaagcaggggatagaactattgctcttgcttgtacacattttaagctcataggctgcttaatagcttgtaaaaagaatgatgtaagccgactgccagttggcagggcactaccaccttatgaccatcctggaaccatcaggtcagcgtagcaggcgttttgcatgacttatgttcataagcagctaacaaatccatcacacgctataagggccatgtggttgggttggacatgggccacacaagcgtaacaatgcagattggtctgtgcttgagctcacgctctatagagcgggccggtaagtcgatggaagggagggaattcctggcagacgcttagggcacaactttaaattttaaacttcaagtgaaagctatttccccagttcacccccgaaacttgtgagcaatggagggaattggaaataacggggcggccccttgcaagaacaagaagggggtttgatcgccgaaagaaaaacttaagcccggggattatgtttggttcacgatggtttcgcatttgtcgccgattttcaagaggtcttgggaaccttccatgaacctgagg

SEQ ID NO: 299000 - DNA, 725 bp, Homo Sapiens
tgatagaaagaaactggtattaacactttttatatatgtatataactgctttctttagagcaaggagaggtataaatgacatgattttgccttttctgccaaagacttattgaagcaagatagaatacatgcggacttttgttgtaaagaacatgaaggacaacagaggataataatattacagacgtgccttaaccattgaccaacacataggcgtgcaaagactcatgatgaccacttgctaagacataggtgttctggactataagacaggaaaggactgaaactcttactcatacttgctttaaaagttgagaaataagaactttgcgacatctgtttcacatgaataatgcctaacatagatcttgtccacgatggaggtaaagacattgattaactttctctttaccagaattaggtttagggatttaacaggtggatactctagctggctgactggactctctaatacaatgagactatggattcattatatagtaaggaattgcattgtccataaaacttgctcattgtcgggtaaaaagcaaccgatgttaaaggtaaaacactataatacacaaggagtaagtagcggttaactgatgcaatgtgactcccaggttacactgagagaatgaaaacttttcagatatgagttttaaaacctacagaaaccgggtattcaaatgggaaggggaatactaccatgatttctgtgaata

SEQ ID NO: 299001 - DNA, 272 bp, Homo Sapiens
  misc_feature (207)..(207): n is a, c, g, or t
taaggtccccttggaaacaactaacctaaagtcctttaaatgggggagggtgacttccccttacacaattggggaaaaagtgggccctgtacccaggagttttggggtaacctgtaaaaaagaccaaggcccttagcaggagaattagaaagatcctgaggagggttagggccaaggtgcagccctaccttggcgacttccataaanaagtgccaggagaaaatggagctctcccccccaaaggtggacccctgggggccaaactctcaaaa

SEQ ID NO: 299002 - DNA, 690 bp, Homo Sapiens; identical to SEQ ID NO: 217947

SEQ ID NO: 299003 - DNA, 718 bp, Homo Sapiens
  misc_feature (618)..(618): n is a, c, g, or t
taagaaatggaagctctacgcagagacggaaagtgagtgacgcagaatacgatctttagacagtgcgctgcttgtgcgacaacgatgatcatcaactgcagaataagctttgggcgaaaccttaccattaatcactataggcaggagcgagaccaacatgacagagacgctatacatgaactgcagtgtgtctatggggaacaagaacactaccgtggtcaagaaagcagatgtgcatgaaatcagtcttgaggaagttatatacgaaagctgctatgatcataatgacagcgcctacgtgcactatgtgagcgagagacatgcgcgtcacgaggtcaccagggagaatgggagaatggatgcggctctggttctaaatatgaacccgtatgtatagacggaaggggaccgtggcagcactaaagtgatacgaaacgcatgggacatggactgccacagcttagactcgtggtacgactttcaacgaggctattagtgcaggatgggcagctaccgaacttactgacgttctcttatgctatcacatagactgtttagcaccacagatagaatagtgtatgagcaggacattattatggtgcagagtgctatcaaatntagagccgactgttgctaggcttccagagactatagcagaaggggagtggcacttggcttcataatgggctgaaccaactaaaacacaatctggaatttt

SEQ ID NO: 299004 - DNA, 708 bp, Homo Sapiens
  misc_feature (100)..(146): n is a, c, g, or t
tttacatatgtaatatatgttttaaacagcattttttaaactcctccctcctttcttaacgtgtcatttttctgattacaaaagtagcacgttctttttnnnnnnnnnnnnnnnnnnnnnnnnnnnnnnnnnnnnnnnnnnnnnnnctatcttgccgctcataattacttaacattttggtatatttccaaatgaaaacaattattttcctgtattttacaattactatggcatcatgctccccttcacattataagcatttccccatgtttttaaagacaagaataacaaatttgattaatagcatattattgtataattagatgtcatgcaattatttaaccaatattcaactggatatttaaattcttcccagtgttttgcttttctgttctttttaatcctgcttttctagttcttagagatttggtctggcatagatctttctactcagaagtagaagatactgtactggaaatttcttgaccctaaacctaagaatgaacaatttggtcctacttttttgattcataatcccattagcatgtattctgtgaatcctaaaacacaaaagtgacaaggacctctgaaattttcactaggttgttccacaggggcaaaatacctaaacttttacttgaaaaggtttcaaatttaagaaaaggctgtaacctttggtccctatgaaatccaaaggttaatctcacc

SEQ ID NO: 299005 - DNA, 342 bp, Homo Sapiens
  misc_feature (118)..(155): n is a, c, g, or t
cggggccctccctacatttttggggggtattaaattttgtttttttatttgattgagcggtgcgcccctcccaaaagattattttggggtggtttggtgtcccccccctttttttgtnnnnnnnnnnnnnnnnnnnnnnnnnnnnnnnnnnnnnncgccgcatttttttgtggtttggggcggaaccggcggcgcttctggccctcttttgggggtggggcggcgaatatttttaggtgttgccgtgtttggccccaccgccccaccgttgtttgggttgtgttgttgccgcgcattttggagggttttacaccctttgttgggggcgcgcccacggagcgg

SEQ ID NO: 299006 - DNA, 704 bp, Homo Sapiens
  misc_feature (390)..(390): n is a, c, g, or t
ttttttcgaatgaagcaatttaattacccagcagggacagttctacaggtttatgtatgaaaagggcaaatgcatccagattatcacaagatctatttcatttgtaagcgcccctgtggagcctgcacatgggtgacgttaccgcacagtgcgcaattaaaaaagaaagaaagacccacccgaccaaacgatgatattctagtggtgaacatggtgggctgacaccgcttctattgaatacatcaatgatacaggtgattgcgacaatcccataaactcgccgttaatacatgtgtctgtctgtgaagacatttcacgtgtatatccaagtcttatagaaggtagatagttttaaagagacggcacgcttgcagtggtcaccacattggngattgactacttggctgacgcaatgctgcaagcttgcactgctaagaggaatacatgcagtttagggcccctacagttagcttgggaagtttttcgaaatattatctaacgctgttgaatacaaactgcatgtctgtgttatccatccccccataacgggcccctggttgaagaagcccccgtgaaggccctctggagaggggtaaccactggggtggggaaaaacccggaatagggaaaactttttacaatttgtaaggcaccccttccttaaggttctaaaataattgacacagtggaaaccccctcgcctt

SEQ ID NO: 299007 - DNA, 486 bp, Homo Sapiens
  misc_feature (59)..(73): n is a, c, g, or t
  misc_feature (106)..(114): n is a, c, g, or t
  misc_feature (377)..(387): n is a, c, g, or t
gggcaaagattcactttatttattaatttttctccaacattaggataattaaacccaannnnnnnnnnnnnnnttagggcaaaaattaactggaggaccgcaatannnnnnnnncccctggggaaaaaggggcaaaggccaaaggatgggagggggtcaagctggaacttaggagcaaggggggggactttttcctttaaaaattttccctgtagaagctctttgtgaagggggagcttaagcccttatgggtggactttcacgccgaaactttgtgttttttcaaaaatggtttttttaaaatcaggtgctgcttaagcttgaagagcctgcccttggtgccctgtttgggaaaactttccgggaggtttcccgannnnnnnnnnnaaaaacctttccacggtgctttggcccttttgggaaaaaaggtttttggagggcccaacaagggggtgttcaaaattcacactttattaaaaggggggg

SEQ ID NO: 299008 - DNA, 649 bp, Homo Sapiens
aatacagtccaacgctatacgttatgccctacattacgttgcagggcatcctatgtacactgagccaggatttctaaatatacaacactgtgtacatgaaaagattcctatttctgcaacattgacttttgggagcagcatactgacagattcacgtggaatgactaatcagcatggatgctggaagaccaaatatgttagtgccaagcacctttgaacatgcatgtaactgtgacacgcagacggaaccacccattgagttactgcctatagcgattggcccaaggacattacacggaccttgaatctatataggcccactaacggacacagtgccacaaatagcgacgggtagcgtccagtgtcagattcccaaatcatgcccctaagccaggattgggggtgtactcatccgaccctgatcaaaacagggccagtctaaggaatggcttggacagggcgggtataggtccatccgtgcaataagagatgcattgaaatgtaatactccttctttatgttcccccaagacaatgggatacttatggtataggtcagactaacttcttagaatagaagaaggcacagggtccaacatccttgagccttggcttttgattggaaccactcaagtaggcctttatattac

SEQ ID NO: 299009 - DNA, 730 bp, Homo Sapiens
  misc_feature (449)..(512): n is a, c, g, or t
  misc_feature (562)..(570): n is a, c, g, or t
  misc_feature (638)..(648): n is a, c, g, or t
  misc_feature (659)..(667): n is a, c, g, or t
gcaggtagaggctttctagaaaattcaaaccctccgcttggataacggtgattctgaacaccagaaagctggccggatcacaacccctaacaggataatcatctatgtacggcccctcaagggtgcccccagggaggcgctcccaagtcctctcatgactaggagcacccctttgctgataccctctagccgggctttgacctctatgcgtggcgtgataaggttcttggtggccttaattcctaactttgggataatgggaccgcactttccctttagaaccaaaaggggcccgggcaattgcgaacccaaatccaagcttgttggtccccgatccgctctaatgggatcaattggcacccccttaaatccattttctgacaggtggcttaactttcatgcaactcggccatttttggggccgcgcttttgaagcctagccccggggnnnnnnnnnnnnnnnnnnnnnnnnnnnnnnnnnnnnnnnnnnnnnnnnnnnnnnnnnnnnnnnngcccttggcccaacccttttcaaactgtatattacccgggctgggccccnnnnnnnnncaaatattaagaaaaaccccggcataaatggccttttttcccccccttgtttaaagggggaaaaacgnnnnnnnnnnnggaagggttcnnnnnnnnngggttttcagagggggggctcttaaagagccccccttttttttaagggtgtttgttcccacaa

SEQ ID NO: 299010 - DNA, 726 bp, Homo Sapiens
  misc_feature (557)..(557): n is a, c, g, or t
aaaacatttattatactgaaatgcgtacatcctgctattcaaaaaacaaagccacaaattcgcgggtgccgtactttatatagcctgatgcactcggacaaacttacgtccaatgccactcagtctaatatcaagactggtaagcatctaagtatttttaccccgcttataaaacccgatgaggcattcagaataagcacacggccttgaatgacatttattgcttcatatatcttgagacccacaaaggaatgctaaatagacaatcaaagcttttataacacacgccttcaactcacgtttttccccagtgactggaacagaaaacatgtgatcacacgaaagcaaaaggaaaaagtcttaaaggaaaactctgtggctataggatctataggcgttacagatattttcaaagcgaacgtgaaaatagatcgtgcttgtgttgagcaaaccattaacctgctctatgaattaaacatacaggtcaaagcttttactcactgaaagacacttgccttatggagagagttctacctaaaaatgcttattgtctattnttttgccttgacacaatgacgagcaaactgttcattctcaatctgacgcctgggcttttggcacaagtatcctacaattcaaatgtgattgttgtaacacaagaatttttttcgcttcacccaggccataaaaagcttgttattgaatctggcaagaaaaagattgaaa

SEQ ID NO: 299011 - DNA, 795 bp, Homo Sapiens
gttttttatgacatacatttttttggggaacaataacctgggaggtttttatcacatgacttctcagtgggggacattaaacggcgcccgatggggaaggggcgtaaggaatggtcaagtgctaatggaaccaggttttggccacggtcatgggcccaggataaatggggctgttgaagagccttttttactcaaagaggattttcttccacgcactcaaatgtgggggcccccggtgctaaatctccaagccctaattttcaggcgagggatggttagattccattcatttccaacattttcttgtggactgttttccctttgggtgagaacattttccagcacgacagtgcacaggggggcctgaaattccctaaaccctgtaatacaaacgtccaagaacatggcctggagggttctcaacaaagtcctttgttgtgtcctaaaggaggttcaaaggcgatggcctttgactttttttggacctttgagggtggcttgaccgttcactcccttttgcttaggacacccccaggacttgggttaaaaaacaggccatattgggaaatcttttttccaaaaattttgggcacccaaggtttttgtaaaaaattccacacgttgataaaattcttcaaaggggcccccgtttggcctaccccttttttttaaaaaaagggccgggtttccacccggaaaacttgggtgggttttaacccggaccggttttaaccaaggaaaagaaattttttcacaagaaaagcttaatggggggcttttcccaacacaaatttt

SEQ ID NO: 299012 - DNA, 803 bp, Homo Sapiens
aacgttctttattgcaccccaagattgaggggaagggcagtccctgacaaacgtctggcatatctaatattactggacagtacatacccccataaacatacaaaagctaatttcagtttacagagtggtcatttttaatgtttgatctgaccaaccttcctaggtcagcgcaaccaaatgatggaactcaactggatcacactgcttctgtccctcacatgaaagcgcatggcacaaaaggtgcctgtttcaattcacactatacactcatagttaaaatccatgccaggataccatgctgccttgagaagatctactagtgccaaatgggcactcaaaggaaaaatccaaaagtactttcaacatgaaaacacatcacagtgtggtaggaaactgtctgataaaacactggaacccagatggctctgtagggatgtggggggagaactgtacctttaacatctttctagatggcttattttccggtacttcacccctaaggaccactcattgctccagacgggctctttcgcacctttaagagttggacagcagacctaacctagtggtgaccttttcttcaggaacctaatttttgagatctgggtctttatagaaagttccaattttttgccatcttttgacgttcccattgcccacggggggcgaatttcttacagccgggggaccccgcagtttgagaacaaccggcccttaactagaaataaaacttttttgcattctaagaaggcaaatttttgacaaaaaccaaacattgggggttggcccgatgctgggacccg

SEQ ID NO: 299013 - DNA, 796 bp, Homo Sapiens
agtttactaaacgtaaagctttgattcaagacaggggctcgagcgcactgacgagattggttctaccgaaggcttatgccgtgaaggctggggcgaaccgaggctcatgagcttgcgtaccgaggacatacactcaccgacactcataatgactggtggccagcgcgatctaaaacatactccggtgcttaatatgattacttgcgagacccacctgttgtaggataggcacgcgcttctggctcagaaatcaccctcacagtccctcacaggggggaacgtttcatcacagcccatcttgctgtggcgcacatgtgctcagtgctcgatgtgacacaagtgcgaggagttgactgttagccaggacacattttagactgggtcagaacccgtacctgaggacttagcccatgctgccatagacagctatggcggtgagacagcacatactatctacgatgtaaggagctcaagggcacaccctggcccatgggcagacatcttgctatctagagcttgacaagcctggaacctgacgaggcacacagcaagcctagctactgggaacctcttgcagccagtttgacgatattgagggttttggaatgtcaaatcaaaacccatgttgtaatagagcatatgggcgaggggggagctatgctaagccatttgggactttcagttcgtagaaccaaggcttatttgttagcttgacaacccggccagttttttggccatgagtttttggcccctggcccccaggcgcggcgcacttgtgaaggacgctggtcctccg

SEQ ID NO: 299014 - DNA, 676 bp, Homo Sapiens
caaggcgcattcctacaaagatgctaactttagtatgtataaccaaccatgcacaggtagagctgcctcagagctgactcaaaactgctgggaacgctttggtaactgggggctccgaagcctaaccaggccacattgcccgaggaatcaaccgcgcaaccctttaggttggccaaggccttggtgcgcataactccaggaggctttaaggagccttacgtttgcttacgggaaggggcaaaacggcaccattttgggagctgggagcacctaagctcactgtgcatggtgagatcgccttaataaggagtacagagatgggcctattcagatcaaattcttgctctggacaaacaaggaccctaggagcgggtccagacgtactctaaagctagcagtactgcctgtccaacaggatcctgggagggacagcatttgtcgggagctccagagtacaacgaggtacacaactctaatgcagggcgcctgaggactgccattacaggccccagcatcacagaccggcaccgaggaggagatatgactgctgcctccaaaaagaaaagtcccggaggaactgattatcactgtacagtaccactggcgagcactgaatgcatatgttatgtaaagacataacgtcctacttgtaagacaggcggaatacccatgctca

SEQ ID NO: 299015 - DNA, 671 bp, Homo Sapiens
tgattacatactcagcatatatgcccttttcataattgggcgacacaattgctgctcagggcataaccctggggttcaaatcagccttatctcttcttatgcccacggagaggccaatgctgtcttcgatacatgggccaaggcaagcaagcgccactgtggtgacatgagtgacctgcagtagctcagacatttgcctacccaagcctagaaaggacctggttacagtccccacagggaattcctttagttccaccaggtcaggtgaagtgcttactatatgatgaacacatactgttactggatgccaaaggattgtgagccatatacacgccctcgttctctgtataaccttgctatgatccacactgtcgtaaaggcttggcactaagcgaagagctcgccacacggaagcctgtcttggtcgccgggacaaagagcatgcctcattactgcgttaagagcagggctgacgtctacaacctgggattgttttggcatgacgagggtgaggcttgcaggttaggtagacttcctgacctcacaggtcaaggcgtcagcattatctcctattaagcctgccttgggaagcaagcactgcttttttgttgaaacaagggagagtaatatattcaccttcaaggcttaccccaggtacaatttaattttcg

SEQ ID NO: 299016 - DNA, 684 bp, Homo Sapiens
ttgcgtttatggacgggatattataatactactaaaagtctgccgccttactctagacatgatacgctttaaatgcaagagctcttatacatttgtcctctggtcaaaacgaacctttacttctatctaggagtgccactcatgcaacattgccaaatgcctgtgcatcaagtgcttgctgggcttaagcttccagacccatctcagcttttggagcaagatctactacctagactaggcctaactgctctggtaccttcatggttgaagccctatcacatagacgcggtgatctatgttgctggaacttacgcagctaccatagcggcacacgctgcatgcacattttcacgaattagaagaacctatgtactccgggccaacattcgtgagagctttaacgacaacttctttagaagcttctgtacttcattattgatattcagccccccgagaatatcaatgtttgaaagcccttttgcgtttacttccattccatgccattatgctgtgtcggaaggccttcaatatctgttgcctccactgccacttgaacaagaaccatccatagggcatcaggaattcatgtaagaatattttcttctgttagaaaggttacataaccctggcttaaaaggaaggcacctgtccttttcattaagccaagtgccctaattcgaggta

SEQ ID NO: 299017 - DNA, 535 bp, Homo Sapiens
  misc_feature (110)..(110): n is a, c, g, or t
ttctaagaatgtaccctagtcccaagtcattctgattagagacccagccacgcactaatgtttcctaaaaaggtaaataaatggtatatggtgatccttgtggtcaattnaagcagccctacttcacattaggtaccaacgtatgaaaataagaaaccagtccggagagataatagtagaaacagtttcaaagacataataaaatcagaacaccatctctgtagttcatacaagttgtggaagtgttttatatttattaggctcctcaaaacaaatataagctgtgtaataatgactattaacattttacagaagatgaaactgagttacagaagaacaactgccgaatgacttgacaaaacctacacagccagaatctgaagctaaatgttattggcttcaaagacagtactctttcttctttaaagtttttttcttacttttagaagttattgttttattttgattagggcaataatatatgaccattgtagaaaatctcgtaaaagtagaccaacataaaatataaaattaa

SEQ ID NO: 299018 - DNA, 653 bp, Homo Sapiens
cgtagatacttaccatattatattaatggaagcactttgcatggtggttaattgattgaggaaatgcatgcattttagaccaggtgttggctcttcacccaccacccatgaggactgctgacttggcttgcgatctccattcagtgtctattattctcatgggaggcgtgagacgctcttaaatgtggagttatcagcgtaaagcatggttgacttgctacagcatgtattttacccttctctgccacatatgtgtgcttatcgtccgtcttagcgcacttatttacaaaggctgggataaagacattacagactttattgatctcttgtgacatgagctgtgtttacgagactgacaatgcaattgtgccaagatggctttgactctaggaaaaggcatactccggcttgacgtgcaggtcatcattacatttttggcactaacttttgatgattgcaaatgaaaaaattgacgccggtaacacggattctgggctttggaaccccgccttactggccttgtttaccaagacttgattgcacgtccacgtgggaattttttggcgcaggaactttttttgaggaaggtccacagttgtgccccctcccttgtttttgggcccaacacagacacagtggaaccctggggtttc

SEQ ID NO: 299019 - DNA, 702 bp, Homo Sapiens
taaggcgcccttgcttggcttaagctactcaacgcaagtgaatcctacccttcggacttcataaggggtggttttccacggtgcgagcggccacacagtgcgtacaacatgccttaaccatttcggacgtgagtgttacgagccctcaaaacatacgcgttggctggtctttcttgtaggcacattgcagaactcattttatcactcccataatggacgatggcttggtgggggtgcatagagatgtctctgttaaggggccaggccacccctggtttttattaataaacggttcaagtttaggaccctcactcttaaagaggctgcgatacgaaatgcgggcacccctctccagtgatatccaaaagaaggaacaggatacctcatgacccgcagacaagggagtgctatgactccgtgtcttttaacgccttcgccaatgaattaagatatggtttcaacatttcgcaagaaaactaactctatcctctaaattcaaaccttttttgctgtgaccccggcaatagggaatagggaaatgcccctgccaaaaccagttaatatagaacgagctgctgggagacctcctcccaccgcaataaactaccgcgttagaggccacaagcttcaagccggaatttattttaagtgcccacaagggaccataaaaaccgtggcccaaaacgggatccccgggcctca

SEQ ID NO: 299020 - DNA, 665 bp, Homo Sapiens
tcctttattccataaacaccgggcaccaagtcgcgcgggtttattattcactcactactcggggggggaaatatacttttgatgtgtgtggacaggaggaaggaaatagtcaagaacctttctgctccttccacagccctagataggggtacagcccctcagtggctgctctaaagactattttgccaaagatccatgttttttcaggaatgaaaggggcccactcccccagagctaaccccaaaatgtattgacccttcaatgcatggctagattccgatggcttacgacatgggctttgaagatgttttgccttaaggaaaaaacattttccaacatgccaagcccaaggggtccatggtatcccagaagattaataatccaaacacccaaggaaagggggctcgaagagtttctacctgagacccaccatgtcaattaaggacgcgcatagctgttaacttaatacttattctggaatttgaatggggagtaaaaagttctccacactttgatttgtcaagcctctagcccttttcttgtaggggaaagccatatgggaactttctttccgaaatataaagctaccttagaatccgaaaaagggtgccaaacctcctaagaccttaaaacattcccatattttcctacccctttttcttaaa

SEQ ID NO: 299021 - DNA, 799 bp, Homo Sapiens
gatgaatacatattcaaagagacctcacctgtactgattgggtgcaagccatcacgtaatcctgtgaacgttgagcattttagcaaggtggttgcatcccatggcccaagtgttctgcaagatacactgagggcacccaaaaggagcgttgttaccatatctgaccagagccgtattcgaacagacacgttgataccactaaccccgaccaggcaccagacgggagctaaagatcaagacgctgtagcccataatgttatcatcagagatcgcggtgcactattacaggaggcgctgggacccttagattaaagcgttcgcaatctgggttgagctccacctgtgaatcccttctgtgtggctaaagtttcagctcggcatgaccacttcactagctgtggcttgtgtgcaatccatgtttgtttggaacggcactcatggttctaaacgggggcccaatgtgtataggttggggtggcctatagcggcttgcactgctttaatcgccgttcacgcattttacgttaaagcagctaaaattctgagtggcggcttccttttggaaccttcccccaccgctttttgcttgcaatcaataaaaccaggtgtttaaattgctttttgactcctccgggcgggtagcttttttttggaatcgaaaggcgggacttcttaaacccactgggttggattggtgaagatcccaggatttctggtgtacacctagggattgcacctggacggctcttgtccccaagaggcacagggacccgtttatcgcgcccagatgttgtctggg

SEQ ID NO: 299022 - DNA, 780 bp, Homo Sapiens
tgagtatctatatacacctgcttcaagaaacctcctctgatgaacaacaatccaaagtgacattaaatgtggaacctgtcatcctccttaccagggccttacctcccatgcctcaagtgttcaccaagccagactgctggcatcctagatgcagtaggtgacttacttagcgccagccaatcacagagactccttgagttcgctacacttctttaggctatattcgggagcgaaagagactttatcaccatggccaaaaccattgctacatagatcctgaatcactacttgcactagccgctgctccacagtagattattacacctgccattctcaagaggctctacctcttgacctgtactgctggctatagtatgggtcattctatccactacactacattcagatagtaggcaatcagggtacctaaggcccgacaatcctggtaataaagaggtggaccatgcggatagttcggatatccatatacggacctggagtggattggcactttcctccctgcattctgaacagttgctccaaattcaggggagcccacttaatagacccatctccaaccttgtggctggagccacccataccagactggtgggacccctttttgcgattttgtcgccaggtacattcttttggactcggagagggtgaaccctaaagctcttagggggaatgggcaatatttgaaaaacccaaaggaacttttgggttccactttgagtcctagggcccctggggcccaaaaacgtctttccctcaacc

SEQ ID NO: 299023 - DNA, 812 bp, Homo Sapiens
  misc_feature (414)..(662): n is a, c, g, or t
  misc_feature (778)..(778): n is a, c, g, or t
  misc_feature (797)..(797): n is a, c, g, or t
ttttaaaaagtgattttatttctatatactagtaatgaatgtttgaaaatttaaaaaccactaccattgacaacagtagaaaatatataaaatatttggtataaatataaaatatgtccaggatctgtatgctgaaagtggaaaaaaaagcaagaccaaaataaatatacagctatatcatgtttgtggcctaaagacaaaatattgtgaggatgtaaattttcttcaaattcatctatagttctaactcaacagatatactagcagaattttttatagaaagcaacaattctaaaatttctggaaaagcaaagtagtaatcaacacgatttttgagacggacgaagttgtacacactatctaattttaagacttcctatgattaggaaagtgtggtatttgtgaatggataannnnnnnnnnnnnnnnnnnnnnnnnnnnnnnnnnnnnnnnnnnnnnnnnnnnnnnnnnnnnnnnnnnnnnnnnnnnnnnnnnnnnnnnnnnnnnnnnnnnnnnnnnnnnnnnnnnnnnnnnnnnnnnnnnnnnnnnnnnnnnnnnnnnnnnnnnnnnnnnnnnnnnnnnnnnnnnnnnnnnnnnnnnnnnnnnnnnnnnnnnnnnnnnnnnnnnnnnnnnnnnnnnnnnnnnnnnnnnnnnnnnnnnnntaatatataatcttcatgacattgggttaagaccagtgttcttacattgcacatcaaaagttaaaaaattgattaagtggatttgatcaaaattaaaaatttttgctcaaaaaaancagtgttcaaagattgaanagaccagtcacagct

SEQ ID NO: 299024 - DNA, 798 bp, Homo Sapiens
cacaagacagttttattgagcgagtcttttgctttatctagaaaaaccgtcccatgatcagcaagaggcgagtgttaaattactaactccagagccagaaaaggctgggcaccaataggctcctgaagcttggaggcctgtcttctagatgacacacaaatccctgtgtagctggctgcagatgatattggggggacctggactcagatgcctcaacttacacaggagaaacatgcaaatcccaatgcataggccttttaaggttttattgcatgagagggtacatacggcacttttccataaacggaggcctcaaacctgtttacttttacaaacaccgtcccagtgatagcctcaaaggcatagaacttatcgaccacctcagtgacacctgagggaacaacctagtttaaagggggacttttacccgtggggaccctaagacaggactgagcttgttttttcgtgaggatagccagactggacacccaacttatcaaggggttaagttggtacaccgcccctgacgagggggacgttttacggccgaaaggctttagcattgtcatgttgtttatggtcaaacagtcttcacccttatggaggtcccacattcacagggattttagcttcgaaagggtttatgctttacagggcacactcgaggatttaaaagggattcctggactcaaccgttttttcttttcagctaaaagaaggtgttgttgtttaggcggcccacaagaaaggggccatctccttctgggtttaaaacaaaaggcgggtggctagaaagcc

SEQ ID NO: 299025 - DNA, 387 bp, Homo Sapiens
  misc_feature (119)..(133): n is a, c, g, or t
  misc_feature (336)..(344): n is a, c, g, or t
atttattacatctggcctttagacattattgccggtaaaaagttttaatgaattttggcgaaaaacccccggtttttttattcccaagctccataacaagaggcaggagccctcccctnnnnnnnnnnnnnnnctttgggccaccctgggaggggcccacccccggttttttaccgcctatggggggtccgcgcccaaagaccggctgggcccccatttgttcccccgggaagggggggtaaaccgtttcccccgccccttggcccttgggggaaggcgaaaacccccctccaaaaattaatttggtgggcccccccctggggcgagacaattttnnnnnnnnntttgcccaaattcttacgccccgggggatcacccattttaaaa

SEQ ID NO: 299026 - DNA, 529 bp, Homo Sapiens
  misc_feature (188)..(197): n is a, c, g, or t
tcttgcagaaagtttttaaactctttatggggatgtcccagaaacaatgcatttcccagatttacacctttgcacgaaaatcaccacccgctttctaaaaacggtaaaccagcccgggggtctcttttgatccagaatgatgttactgttgatggagaaggcgctccccccttttttctccgccgccnnnnnnnnnncccaccatgcccggtgtttattttcctttccgccgcttcaaaaccaccgaaggcaactttagagtcagctctttcctgaaaatagatcctccttctccaaagggggggcgctcttaatatagcgggtgccaacccttttgaatttttttatgcccaacggcttaaaggtgatatatggggaggctatgcttgtgggaggttcagtccattttggaggggcacgcctcacttcaagaacgcgtgccggttactctgtggacatcaaaatgtaagggaggcgggggcgttttctctttgtggaaaggcactttccgattcgcgtgtgggattac

SEQ ID NO: 299027 - DNA, 521 bp, Homo Sapiens
tttcagggtggtttctagggatggaaggttggggttgaggagcgagtggacaatacttgggcatttacaacacccattgaacattgaataggggagacgtggtgtacagttcaatacatttggaaaacaaagagagaggtgcacttgaactcgtggccgaaagtctaggggatagaatttataaacacatacgcacttgctgtaactattgtttcacacagtgtacctacagccgtatacatgttcgaatgagctataagcatgtctttttgtgactacgagaaggatatcccaatggcggaatgccctactgatggcctatttaccgatgacgattttcagaatatatatctcagatagggtcattgtaggtaagtgcaaggtgacacatcttgttaattcataataagagcacagtgggaagaactctagctacagggaagtttacaggtcatgcaattgcccatcattatggaggaccaaaatggtagcgcaaagcgcaggccattattcggagtctg

SEQ ID NO: 299028 - DNA, 515 bp, Homo Sapiens
ggggtcacaaaacccccaatatggccttcggtaaaaacccccaattgttgtgggttgggggaggcctttctttcaaacggttcccagagggtttaaccctaagggtgtggccttaaaatgtggataatcgcccccttttttaaatccccaaggtaatcacccccctgttttattgttggaccatgagaaccgcaggtcccttcaacaagggcatggggaattccgttcccacaatttcccaaattttgtgataagttcctctgtctccaaaaagacccccgcctttccgaggtggggtgaagcctgcagcttcatgaaactgcgcttaggcttagcacacccttggtcaaatcaagcccgccccttttgcataaaatgaacagcctgtgccccccttagcttttttggagcttttctgtttggcaggggagcaaaagcctttctgggttttgaacacctaagtttgtttgggcaaaggaattttgtttatggggtctcaattaattaggacccgg

SEQ ID NO: 299029 - DNA, 518 bp, Homo Sapiens
gatatttgctcatgtcaataagcggcttacggtgggtgtggccaaaaagagtcgacaaatctaagtgtcactcctaggtaaggcccagatggacctgtgttacccaggggctttccactgaagtcggagggcagaacacctttgtggtttaaaaaataattattttgtaggaccctctcttttaacagaacattaacaacttggcggcacagtaatttacaaaacaaagggggacatcgtataagtcaataaactaaaaggggcttcgttaaagaaagacaaactggaaagggctgtcacaaacatggtaagttgtgcgcaatcatcacttgattgtaaatataccacataacctgacgttatttgcaccatccatgcacaacttaaggcggctgatggagtatattttgcgaaacctattgtgtaggacaaagtgctttagctttactgacagatgtatgtgtgcacatcaccaactattagcaaaatctagggtttttggtatacacggaagaggg

SEQ ID NO: 299030 - DNA, 704 bp, Homo Sapiens
  misc_feature (415)..(571): n is a, c, g, or t
  misc_feature (665)..(665): n is a, c, g, or t
gcattcacttcatgtgactttaataatctttgctagagacagtttaaaaattattggtaaaatagaaatgtcttcaaaacttaatttagatatctgggctgaattagtcaagcaggtcagatactattgtctgctagatgtattaggataaaaaagtttgcttctgtaatacttttaaagcttgcttatctcatctgtaaacctatgtgtcttgagaatcaagcctttggactaaccccaggcattgcccttcatcctgggatacgcatctggtgcataattaaaactgtttacctcctagattcttcaataaaaataagagttaccaagagttcacattacaattaatgtatgtaattaaaacattacatctattgctgcctagaccaccttctggctatacacaaagtgtatnnnnnnnnnnnnnnnnnnnnnnnnnnnnnnnnnnnnnnnnnnnnnnnnnnnnnnnnnnnnnnnnnnnnnnnnnnnnnnnnnnnnnnnnnnnnnnnnnnnnnnnnnnnnnnnnnnnnnnnnnnnnnnnnnnnnnnnnnnnnnnnnnnnnnnnnnnnnnaagaccaatccatcagcttgcaagtgaggccacgacaaagccagccgaagagaaaagggtgagcaacttgctcatcactctctttgtcttccgngctggaaggtttctttcttttctcctgcccttggcatta

SEQ ID NO: 299031 - DNA, 262 bp, Homo Sapiens
  misc_feature (108)..(121): n is a, c, g, or t
aaattccctttcggccccaaatgagaacgtttcccctcaagggggacacctggggttgtgtaaccctcttcccaacactggaggtttatttcccaaagcccttccccnnnnnnnnnnnnnnctgggggggtgccccgggcccacatttgggtttggggggcaccattattggggcctccttcatcatcaagggagggcgcaaaaacaattcaccaaaacccagggggccccttttaggcccataaagggtatggtgtttttt

SEQ ID NO: 299032 - DNA, 238 bp, Homo Sapiens
agaaaagccaattcattcggggtttaaggccccctattgggttgagtttaggggaaaaaaaggactcaaaaccccggatgtgggggaatgataacaaaacccttttgttagcattttaaccaaaaaatttttctttccttccaacaaaaaaacccagtgatacgggttaggcccaaataacaaaaaccccccactgtgactggcgttttttaaacaaacaaactgtgttttgaacaat

SEQ ID NO: 299033 - DNA, 676 bp, Homo Sapiens
tttatttacataaattaagagacagagtgcattatatgtaacacaagcactagctccgtgtcaccatatgttccgacacagaatcgacatcttgttatattcagacatgattccgtctcaacagtctttggaaatggattccataacatactcgagattgccttaataaatattgtttacattgaaaaggctggactgactttggtgttcaaaatagtcagaatccaactttgtgatggatacgtgcaatgtacaaaacgcaccacaatttgtggttaaggcagggaaaacaccagagagattagagattctcagcggataactatccaaggggcacaatggtccattagggagccaagatcacttgaggcagcatagttctgtgacacagatagagggagcagctataaaatccaactggcgtgatccaagggcgctcaacgacaacagaaatgtggagagacactggggtgataaggaagggagtgaacccgtcacaaaacgaaggctagatgaggatggcaaagctcaaccaatatgtttccatgtgaagaatacattgtacggccagtctaaatccatggaaggacaatacacgtggctgctcagagtaggacgcaactaacctgtggggaagaacctggaagataaaaaggaatggtcttggtaagggaat

SEQ ID NO: 299034 - DNA, 789 bp, Homo Sapiens
  misc_feature (407)..(407): n is a, c, g, or t
tgagggcagagttctgaggaacctggtagagaaggatagactccacctggggctgggcagaggtgggcttcagctccgtgttgagcaaacagctcccccaaatgagtagggtctggacctagccgtggcctgtggcctcaggaaggagttctcactttcctgttttccaagactgaagttctgcttaaaattaaaatagcttggaataaacaagttccaccaaatgacaaaggatttgggagctgctctatatgcaaccttttgttatccttatagatatacattcttatccatcacgagacttttagaattaaatgactttgtccctttcatgataggaaagcactagccatttagctgctatggctcctaataggcactggggcatttaggaaatagagtagcanaattgacaccatttaatttagcaaaacctaaacaaacacccgtccttcaccaagtccctttgcccagttgggagtgaggaaagattcacagtatacaaatgatgccacagaaaattgtcactcttacctctaggaataaggggcacaacttgctttgcttgttttgaaccagtttttgtgggggtgggggacacaggtggtgttttgcaaataaaaaatgggtgttgcacaagaacggggtttttcttaaagtctggagcagctagattgctgtaaggcccactcgaggagggctctggtgggttccttattggtccgggaaacagggcttttatacaggcttgagaaaataccctgggacctggtatgaacttctacctcg

SEQ ID NO: 299035 - DNA, 322 bp, Homo Sapiens
  misc_feature (51)..(51): n is a, c, g, or t
  misc_feature (134)..(134): n is a, c, g, or t
ctcgtgccgaattctgcaagcccggggatccacttagtctagagccggcgncaccgcggtggaacttcaacttttggtccccttttagtgagggttaatttcgagccttgccggaatcattggccataagttgnttcctgtgggaaaaatgttatccggtcacaattccacacaacttaccaacccggaacattaagtgttaagcctggggttgcctatgagggagctaacttacaataattggggtgggctaactggcccgttttcagacgggaaaactgtgttggccagtgtattaatgaaatgggcaccgcccggggga

SEQ ID NO: 299036 - DNA, 680 bp, Homo Sapiens
  misc_feature (499)..(499): n is a, c, g, or t
acggagcttgatgtagttaatacaggttttactacggaccttaggggagacactcacctagggcttctagagtgatgagagtacttgtatgagccagcacgcccgttccataatggtttttctacaagagggtttatagaagctattactcttataggcaaggtgaggcattcgaatttacattggggaagtgatatccaactctgaccgaatctatactttggaacgataaccatgggcggggcaacgaataaaaccagagtgcttctcttgactattaaaagtaccttaaactgagctgaaattctaaaaatgcactcgcctgtgattcatagtttaataagatggtcaaaaatgaaacaatgttcctaatacaaaatgaacaagaagggtgcgccatacgaaagagcttgaatcttcgtgacgtacactaatgttttggtagcacggccggagactacagctcataatactaatgttgccatgaccttgagactgnagtcaaactatccaccatttggactttatttggcaggtctcaggtactgtaccccctgccgattagtgctgcgggtggctgcaataattattatggccccaccctggggcggaatcggttttgtacattactgaggggccaaagggaattggaggaacccggggataatagttcctttgga

SEQ ID NO: 299037 - DNA, 642 bp, Homo Sapiens
aggtgggagaaagaccccaaagacggttttattggggggccaatcatcacccggaagggaggaggggttgaaatattacggggattctcatgatgagcaggaacacggcttaataagggaggaattggatagaggcaaaaactggctttgggacctggggcacccactggaaggacggaaaggtcccctggttcaaaggaaatgaaataccttggccactttgtagggggcacagaacgaacaaaaatttgtaaaggtgggaccaaggaatttgggttttaataaaatcaggaccttattgcttcctcgatcttccctttcactaatagagggtgtaatttggggatgaggtttgcccaagctgttggcgctattcaccacggccctgggatctcttggggaccttttggtggggaaagaaaaaggttgaaagaccgaacccgaacgtaacagagtcgaatccaaggcgctagggtgggtcgaaggttcaaaaggcctgggcagcagaatggggtgaacaaaaggtgggggcccaagggggaaggccggtttcaaacaaagaaagggctgggagccctttcgccagaagaaccggggagagccttccccactattgcggcaacgggggacagggaagttgac

SEQ ID NO: 299038 - DNA, 698 bp, Homo Sapiens
  misc_feature (612)..(622): n is a, c, g, or t
acaatttaattgtttactatattgcgcgccattggtaggaataacacaaaccttccaggggtggtcacacaagtttactgagtgttggggaagcacttggggaacataaagctttggacccgctggttgtggtcacatcaacagagcttaacgcgtttgaaagtttatcccaccgctcctgaccgtagatgtgaacaggaatacggcagtatgcacacctcgcgaccattcagtatccaccactccatggcgcagattgactttgtggtcctcaaaggtattcacgtcttggaatgaatgacgcctaggcgtggaaccaccgcggaactgtataaacagaccacgatctcagccggttattgagcatgtgctcgatgaacaaagtggagttcttctatcacacattccaagcctggtgatataagcagtgagggtgatatattaagatgtgcaaacttgacgactcaaatgcttttagagcggccaatcaccattccgggcatcaccgtttggtccctatatttaggagggcccttgcggggtggggaacctaagttaaaaggtctttctttggggaaaacccagaccatggccgtatcacacagaaatacnnnnnnnnnnnataaatgcaaaggggccccgggtacatatttaaaaattccaaaaattaagaaaaccttcccggctgttttaagaag

SEQ ID NO: 299039 - DNA, 654 bp, Homo Sapiens
  misc_feature (377)..(377): n is a, c, g, or t
  misc_feature (504)..(504): n is a, c, g, or t
agtaatttcttgcacacattgtcattattgtgtccagtcctgcatggtactcaaaagatgttattttaaaaaaaagttgggcgtgtacatataatgcagctgatctgggtatgttgttgacaggagcctagtgcacttcttgtgaattttgatgaccctgctggactttgtaaacttgaaagggagtgacacgtcatgggtacttagctgccattgattgcgggtaagccaataagcgcgtgtcctaaggactacacaccgctgtgccagtatcggttctatgccagccgctcgatgccagcctgggcatgtatctgcccacgagtgatgcctgaccctgacatgcctgttcccgtttagcaagagcagtaatgctnttagcgcatgcaggctactcgtacaaagcgagattatatcaactgcttccggaaggcagacccatgtcccctttccgaagaacccactccggtaagaggtgaagttcttccttttaatcgccacgcnggtatatccccaagagcagcgggcctccccccaggcccattaaccatttgggagaggaggccgaatacagatccttcctgagagcccggattccagtggcactttggtgcacggggaaagggggcgggtttccctacttccacggttcat

SEQ ID NO: 299040 - DNA, 702 bp, Homo Sapiens
  misc_feature (141)..(413): n is a, c, g, or t
  misc_feature (650)..(650): n is a, c, g, or t
gagtgattttgcctgttccgcatttctgtaatgtgaagcgtctttactataaaaatatgcatctatgacaaaagactcggctggtaaaatgaacatttttctttaaaaatacaacgtgtcggctactgcgtaagggataannnnnnnnnnnnnnnnnnnnnnnnnnnnnnnnnnnnnnnnnnnnnnnnnnnnnnnnnnnnnnnnnnnnnnnnnnnnnnnnnnnnnnnnnnnnnnnnnnnnnnnnnnnnnnnnnnnnnnnnnnnnnnnnnnnnnnnnnnnnnnnnnnnnnnnnnnnnnnnnnnnnnnnnnnnnnnnnnnnnnnnnnnnnnnnnnnnnnnnnnnnnnnnnnnnnnnnnnnnnnnnnnnnnnnnnnnnnnnnnnnnnnnnnnnnnnnnnnnnnnnnnnnnnnnnnntcaacagagtgcaagacatcgtaaggagagaccattccgtggtcacgggcagagatagttaaggtctatacagatctcaggcaggtagtcagggctgagttgcgggtgcttaggcggaagctttgcagaggtggttgataacgagcctagacactctcttagagcaacgtcaagacctgatttcccatgaggcgatcaggcggcctgagaaacactgccaagatcgacgacacgtgnggcctcagttttgcctatttagagggtaacctgaactgggggacaagctaaa

SEQ ID NO: 299041 - DNA, 279 bp, Homo Sapiens
  misc_feature (164)..(183): n is a, c, g, or t
aggtggcgccccggggggtttaatatccggtgtgtaaaaggggcactataattcgcgccccgccgagggagcccctctccgataaagtattgcgctcgcgggaaatatggccaaagttggtccaccttgtgttggcgggagaacagggctccccccgctctccnnnnnnnnnnnnnnnnnnnntttcctttaccctgccgaggggttctttagcccggcctgtggtggagttgtccccaaaaggggggaaggacacacccccccctcccgcgataccat

SEQ ID NO: 299042 - DNA, 690 bp, Homo Sapiens
ttactgccagaggaattattccttaagcaagaatattatgcttcaattacgtttccgtgctcacgaatccattccgctacttaacacaaaaccgacactgtgcgctatttccctgtaaagaaatacacagttaaagaacggaatgctggaaataattggcccttgctgaaaattctttttcccagggaatctcaaagattcctcagagtgaatatttcactagacctgctgggtacagctggggctagcccaatgccttatctagggactcctatactgtttgctagacccggacttagctcagcacttaaggaacagagattccttaccttgttgtcctgagtttatacagcgcgagtgctgttttccatcatgaatgagattcatcatgtgtagatagatctctgtgtgaactacgaatttcactgaatgggccgcgtacatcttgtcatgttacatagcgaatcttgccccgactctgactagcataaggcagataatgctctgcgccattgcagacgcgtggggtatctcttagtttgactgggacaccaccgggcgggtcatctcgttacgtactttttagggcggttagacatgggaccctgacacatggtcattccgggtccagccggacttggggtcggttattttccattccccctttaccagaacgttggcggtcctgcg

SEQ ID NO: 299043 - DNA, 676 bp, Homo Sapiens
ggcacggatagatgattttgttatcacaggagcaacccattgctgaaatcacatgaacagtgcagaatccggccgataatggacctagacccgaccaatgtgtaagataaagtggctacctcaggcgaggtcagaagagaatgttgaagtcgcaagacttcactgggccctgaaagtgacttactgcaggcattcccttcagttacagacctcaaggtgagaatgcccgtacgcaaagcatctcttctttctccgcataagcgggcgctctccatcactgagattcggcaataactggaacacactggctaacgatcggtgccgctaacgacatcttaccatgaatctagcaaattttaacagtgcctattgatcaggcaggtatcagatctcgtagtcccttgatgcatgcaagtaacttgctcttggtacgcgccagtttgagtggtcctataataaacatgcgcacatcctcctgcagcctggtgctggcaaagccttattgtccattcattcttagggatttctggccccaccaggttccgagagaagtgggtcataggcccaatcctattagcggcggcgtacttctttcacatatccctagtggaggacagcacgaataggttgttcttttcccagtggataaatatccagtgggaaggtaatttgccct

SEQ ID NO: 299044 - DNA, 710 bp, Homo Sapiens
  misc_feature (363)..(371): n is a, c, g, or t
acattcttttgaaaggcaaagaaacttttttctttcggttgactgccccatacaccggaggtacgtggtcaatgttggtcatacaaataaaagtctccacacctttttttctcctacatgccaaggtcctttaaaaagacactgtagaacaaaaagaaactccccaaatacatgaaaaacggtttttccatgggttaacaggaggctcaggagcccgtgttcacatattttgttaccggatccacctccgtaaaaaatgagcacgttatatgcacactgagccacccccctcaggtgctttgactttggactttaaggcgatgccttgaaatctttcaaggggcaacaagcctttctttgcannnnnnnnngggacacacaacccctggcgcctttaaagaattaagaggcaaacaagactgggatcaatattaggttcataacaaccgggaactttgcagaaaagataaggctaccacgacacttttgggcggcaagaaaaatactgtcgttatgcacaaagggactgccaacaaaggtcctaaaccaaatctcaaccccttaaataaaccatgcacaccattaatctggtctacacgttaaaccctggaaacacaacctacattttcaaggtttgccggtttccacccacttaattttcgagattaggggccaattctaactggtgttatattttgaacttaaaaaag

SEQ ID NO: 299045 - DNA, 788 bp, Homo Sapiens
cagagcttctaacatcttctgataagagaaagaaattctaggagatagttataattataagccagggcaatattagaatggtatgtatgggaaaaacataaacatgtgttgggcagccaaagacagaatacagtagatgtctgttattttggctgctcagtattccttctctccttcttttaatagttccttcccattttacccctctaccttcaccttttgtgaagaataaattctcctttgtgtagaaccaatcagagtaaggccctatctccatcctactcactcttaacaacctaaacgatgcatatttaacctcaactatgctaagagtctacatccagagcttttaaattggagacggaggaatggctctttttcctttgaattgcaaatgtaaggctctaactcatgaacttcaactagccacattcctcatcatgtgaaggagccattgtcaaacacaggatcaacacagaaataagagatggagggatggaaagagtcatatagctatttgagtcccagattctgtctacattcctgacttttagaggtttgttatgggagctgataaagtctccctttttgattaagctattttgagatgagtttgccacttgcaactgactattgcagagaaatttaagactcacaatacttacatggtccttttttaagtaggcaagatgttttccacatgagtctggagtaagagggtaccttgagaattttctgatgatgatccattaaaaagaaactaatctttcagacagaagctcataaga

SEQ ID NO: 299046 - DNA, 669 bp, Homo Sapiens
  misc_feature (470)..(470): n is a, c, g, or t
  misc_feature (579)..(614): n is a, c, g, or t
  misc_feature (616)..(616): n is a, c, g, or t
  misc_feature (638)..(638): n is a, c, g, or t
ttaatgcttaggcaaatctaggtaacactaaccaatataagagaacgtaggttaaatatggatttttgctgacatgtcggccttcttcaccagatgggaacaccagagaggctgctttgctcacgtttatctttgaatctgtatgcctggaatactatgggggttcaaaatttactgaatgaatgtttcttaaactaatttgtcatgcccatgatacttcataaacttggtttgttattcaaatgtttgttatggtcaaaggtagcgagccagatgctgagatagtcttggaagaggataggtgccaaagtggtggataggtcataagaatgggaaatatttaaaaataatcttggctgagtcacagatttgggggcagccatacttggtagtactgtaagatgagctctacagaattaataaaattcactgtgtagaaagatagaaactcttgcccctcaccccacctncctcagttggatgtatgttcccttgaacaagcagaatggtacaaaagttaagagcatgaacacagggtcatgatgggttgtgcatactgattccaccagtggccaactnnnnnnnnnnnnnnnnnnnnnnnnnnnnnnnnnnnngntcttcacttataaaatgatggnaataacagctgcagccctacttgacttgtaa

SEQ ID NO: 299047 - DNA, 687 bp, Homo Sapiens
aaccggatttcccagcattgggccgtggggtccactgatggaatgatggggcagaagaagctgtctcagctgtacaggaggggaatccgcctcagaacatatgtcactccaacacggggcattttgccctctggcgctcaattgaataaatctgacctccttgcctttcactcagagatccatgtgatggagtctccaagacggctggcatagacaccttagaattgcctccaaaagtggaaattctgttgtcaggactgatcatttccagttagaaactgactgcgtggcagacaatgaagactcaagatcaaagattgctacccttatttgcctaaaaccaatctacccaaatcccattagactaaaatacatatttggtcaatctgcagcaatgcaaaaggattgagcctcttcacccctttagctattaccggtggcatgataactttgcaatgtcaggtaaccgaatatgcctcatggctattcatatggttaagaatactggccttgttacacgcgggatgtataagttgccccaaccgaaaatccattgaacgtcgtttttttcaagccattatttgtaaagaatatggctaggaaccaaaatgatccaaaattgtgttccatgttttattgtaggactcttaactttcaaaagttttgagggtcacacacaaaaaagaa

SEQ ID NO: 299048 - DNA, 794 bp, Homo Sapiens
caagggcattgattggtacctttggctgcaacataaggtgaggtgggacatgcacctctgaacgaatcgggctacagggaacgagaacactgggcaacactaagcttagaaacccttcttgccggtaaaactactggcggacatgcaacgagaccatacgtattctctatgaagcgttatgatgcacgaccgtcattactaactttggtgagtttgacactgggtgagtggaacatttggacgcaggcaaaggacctggcaaacagccatatcaaagcagatggctgctatattcacatgcctgagccagacattttgttccgcttgaagcttttatagtataatgactgcgtggctcccgatgatagacacacggggccaacgttcaatgacatgaaacacttaaagctcggccaccggttgtcacaggttgtgggcacgggcttaatgttaaggacaaaagaggaacgcgggggtttcatgggggattcttttccgatggttcacacaccacattgtttcttgagaacgaagggggaaacatccaggcggggggggaaaattggaagtaccccctctaaaaagatggcgggtgagcccctaacggcttgtcacaaaatagtaaaaagcagccttccacttcgctgcttagaaggtgataaagagggaaacagctcctttaaggtgggagggaaacccccctccgggggaaaatgccctcatacaaaagggggctccccttattataggggggtttgcgtgtctaaaaaacccccggtataaggggtttattt

SEQ ID NO: 299049 - DNA, 733 bp, Homo Sapiens
caatctctatggaaagctgttgaatgaatacgtaacaattcttgttacattcaacgtgctcccgagattgttcattttcagctcctgtcatctcattgcatttctccttataatagcctcagtggtcacctcactgtactgattcaagctggaaattccattcattggcctggttacgtaggtacaatgcataggtgagggatgctctgtaccactggaagacaatgctgacttacccttaaaacacgttccgtagaacggtgtgctaaacccgcttcataaatcactcttaagagggcataatggaaccgtttgttctttagtttcgctccatgaggctctctatggcctattcgtgtggccatgctcaggatccttgctaggatcacaaacgggtgccctgagatctgggccagcttgctgtgccactggtctgcacagggactcatgggcacagcctgtggtgaggatgagacaccggccatgccacatctgtgagcacaccacccttctgctagcccggagggggttgcctacaccgacgccgataatcctccgatgactttggccaagtgactaaacttatgtctgtcgaccaagattacgctatacccacaggtttctgtatttctatgagagaagaccttgggcttgctctgtagacagcttgtgcaaacctgaatggcacgtcgccgacaataaactccgtcgtccgttaaccccggggcccttg

SEQ ID NO: 299050 - DNA, 517 bp, Homo Sapiens
attcttggggggcatctgatcttattctattgccacgtcacgcgctacccggggaagtaaggtctacacctggcccctccctacgctgccggctccttctagtaaagagacacatatttgactggctgaagacaagaccaagcccacttggcaccatgacgcagggcaattgatcgcccagtctctcttgaggaatggaagcgcttggtgcgggctggcagcaattcctgcattctgagggcagacttaacactgtaagagcggcctggctctatacttggggacatggtacatggacactgaccactcgtgatgcggctcgtggcatcctgtgtaggaactccaccttcggacttttgcttccagaacatgaatggtcagggagggacttgtacacacagagtcactgccaggcagaggaggagtatacaggctacgtactctgaccatgctgacgagaccaaggtcagtcctttggttgctgctagaagggagtgccaatgacttgctttgcccg

SEQ ID NO: 299051 - DNA, 680 bp, Homo Sapiens
taagaccctcagcaatacatggagaggtccggtaatagtcaaaccacatttacgagatgccacatagaagacggctgttccaaacccaaaaggacgaatggatgaaaagggagataatatttggttggtgacacttatactgatgcaagttatccagctgtgacatgaggtctctgcaagcctggggctccagaaactgatgacccggatattccctcttcaagggtgaacggggactcgtaatgctatgctggtagaaagagggtaaaaaagaggcccagtaatacatgactgagcagtgcttgaattataaggccgcgggcgtcactattaaacgctaacgagctcaggttgatgaaacgttcggcgcgacttatacagaagggctcaggaatggggattgtaagggaattggtggggtgaacactcgttggggacacatgccccatcgaatggcggacacggcaaaggctggaagggtgaaaagcctcgtaagaaggccggcattgaaagaaacttttgcgtgaatgagatgattaatcccaacccaaaccttttttgacacaccatgttgggagggcctgtgcaggcctttttgtgtgtcctcgggccttaaaggaatacgcgcccattttttttagatttccagaatctaagaggtttgggttgaaccccacact

SEQ ID NO: 299052 - DNA, 600 bp, Homo Sapiens
aaatttgccaacacaggattaaaatgtgtaactctttgcctcttactctcctctctcctctcaataaccaccttccatacacacctacgtgcataaacagtggtgaacttgtacaaaatgcacagcttttagtgggcacgtagacctcagttgaaaactcagttatgctgcttactcagtgggactgtctgaaatcactgtcttttctaaaactcaagcttcttatctggaaaaatggaaaaaggccacaccattggattggtgggaacattaaaacctaaaacaattgacttctctttccctctatagattttccccagcctctgccaagttctaataattaaggcatattccaatattgccatattgaggcaggataaggtgtgtttattaacgggtctcttagaatgtgaactctgtggagatctgcgagaaataaagaagaatgccactctctctactcaaagagactgtgagggtcttcccttctctaaagccatagaagcttgaggggtccccggaatatcccacctatcctggttcccagccttgtaaattctggccctttacatgaatgctttggccccaaaggaatttttg

SEQ ID NO: 299053 - DNA, 537 bp, Homo Sapiens
  misc_feature (460)..(460): n is a, c, g, or t
  misc_feature (514)..(514): n is a, c, g, or t
tatacttgcagctcacacattatttcgcatgtcatcaactggcttacgagtgggtttggcctataagaattcgagtaaaacagagcgtctctccaaggaaaggcccttgtggtcttgtgtaaccaggggcttgctgtgagagcagaatgaaaaactcccttgttgtgtaaaaaataattatatggtaggaccttatcttttaatctaacaataacgactctgcttcacagttatgtatcaagcacagggcggcgtcatatatttcaacagactataaggggcttctgtactgaaattcacactgaggaggtctgtcacaatcctgataagttgtgcgcaattatcacttgttgagaaatacaccaattgccgtgacgttgttggcacgatatatgcacaactatcggcggctgattgtagagtatcttgtagaaccgattgtgtaggacactaggagatngcgttcactgcagctttatggtgtgcacatttcctactaatagataatactagnggtatttgctatacacagaagag

SEQ ID NO: 299054 - DNA, 534 bp, Homo Sapiens
  misc_feature (506)..(506): n is a, c, g, or t
tacagctcctgcagaatttttcatgtcatcaaatggcttacgttagggtatggcctacaaaaaaacgagtaaataaagacgtactccaaggtaaggcccttttggactggtttaaccaggggctttgctttgaggtcagaatgcaaaacacccttgttgtgtaaaaaagaattaatttgtatgaccctctcttttaatctaacgacatcgaactctgcgtgacatttattgttcaagcacagggcggcatcttctaagtcaacaaactatataaggcttctgtactgaaattcacacttgagaggtctgtcacaaacatggtaagctttgcgcacttatgacttgattagaaatataccacttaacgtgacgtttttgcaccatatatgcacaacttatggcggcagatggtagatattttttgaaaacgatagtgtaggacaacatgagatagcttcactgatactttatggtgtgcacatcactaactattagataaatctagnggtgtattgtatacacggaagaggctgg

SEQ ID NO: 299055 - DNA, 551 bp, Homo Sapiens
  misc_feature (136)..(178): n is a, c, g, or t
tttgacgccattcttcggcctcagtctactgagcagctgggactacaggcgcccgacaccacacccggttaattttttgtgtatttttaggagagacgggggttgaccgtgtgtagccacttgatcttgtgacctnnnnnnnnnnnnnnnnnnnnnnnnnnnnnnnnnnnnnnnnnnngtgagagccatcgaactgggccgccactgatcgcgtgtaaggactctgtgcgcatcgtgtcgctgaattcttacacaacccttcagctgagactctttgctccattttacagatgcgggaactaaggctctacgaagtttcagaacaaacacgaaatggtggctccagagattccaacgcagacccatcttgctctagagactgagctattataccctacaattgacagtgcaggggtttgggcaagccactttgtttgccaatcacaacaagcaagaggggaccctttgtgtgaaggagccaatgaggacacaaatgggtctggtaagagactggcagaacgcccaaaatgggcagagactgtgaggtgcga

SEQ ID NO: 299056 - DNA, 682 bp, Homo Sapiens
  misc_feature (559)..(568): n is a, c, g, or t
tccatttattgcggatgcattcacacaatgtgtgatcattggagcgatccattgtgagagaaaaggatcaggtgtccatgaaatttttagcaatggtagattcacagaacatgctagctagctggcagttttacctctttgcgaaaacacagaattatagctacacctgtaaacaaggaatctacttttgaaacgattagattcataactgaacatacttatagcctagaactctctccatccacagatggaggtatacgggatcactgatacattctcttctgaactttagatattgtggatccctatgtcgtagtggacacgaggagctcgtggtcaaagcacagctaggcatcgtaccttaccatacgccttaattaaaagctttgcccatttaacttcattcgcgggagtaaatgcttccgtggacaattgtactcgggaatgctgaagtagcttaattggagcctcttgctaccttctcatgaagggtttacatccgcattatctcatgcttttctttcctcggttttggtggggtaaaggctgaaaattaaannnnnnnnnncgaccttagggggagcatggcctttgtcccagaagtaccctgttatgcccgtcccacccttggttagtcctttggtggaacacccctacccataagatttattggggggtcccc

SEQ ID NO: 299057 - DNA, 689 bp, Homo Sapiens
gcagctcttgattgtagccaaagttttaaacattggtttgaccgatcaaggcctccgtgactggcataccaagagggggaatggtacttggtttattgaaagagggcacacccacagaaagtttacttggactgccagcctgaaccaaactgcaagaacgagaccggttttttgacactccctacaggcatcttaagcgaatggaagcttgccaccagactggaatcaagactcctctgcgctgtataaatattcccgcagaagaatgtaagccctgctcaccttgttgccaacaaaggccattggcccattgctggatgacatggtgtcacaggcagcgaaccggcgatgcttttttttctctgggtaaaaacatgatcggtcccaagaggcctaggcccacatactggcatgaggcgcatgattgcacccaaatgggctaatacttgctgtaacatctgatacaggactcacaccgttatgtgtttaccatacagagggcaagtgccggtcctgtggcttgaaatgcctcccatctgcaccagggtaagttctgtggaggacaaccatcaggtacttgctgagacatccaccatcggagatttcttaacttgcccaaagttaaggagaaatgataaatttttttaaaactcttcacaacttgtccccgccaccagcgatggccctct

SEQ ID NO: 299058 - DNA, 706 bp, Homo Sapiens
  misc_feature (659)..(659): n is a, c, g, or t
cgggaaaaatattctcgtagaggaatctatcacacactgctgatacaggctgatctatggatcggggggactcagttgcgacaaaaggtggccttcgcactagttaatggagaactcggtccaataatgcccatagctgcccaaaccaggcactgaccatgggactgccccatatgtgaacctatgttgccttcactgacactggtggctttgataaccactgccgtagttgcaaccttcttgcacaagaagactgctctaaaaactactcagatgacatctctctcagaggcaggatattcttcactatccgactcagtttctcctttataagtcatgctataggggtttagcccctgagcaagtgcactttacatcgtaaacagacttttctcactgggaaagtgagcgaaagtatgcgtcttatgggtaagcctacgatatgttaggtgtggaacagacgtccacttatctgctgatagataacatcctggttggcgtgttccgaaaggatcctatgaaaacacggtgaatctcggggcttcttgaagtttccgaggcctttgaacatgccatgtttatgaccccgagcaggtgggcttttgttgaaggacctgttctagatctgggttgaaaaacactttttggtgccgcttctnctcggttccttatattctctacgaaaagaagtttggaactaccgggg

SEQ ID NO: 299059 - DNA, 741 bp, Homo Sapiens
  misc_feature (529)..(529): n is a, c, g, or t
tgcacacaattattttaattgaccaaaatgacatggtctttaatagatagcaacagatcaaagctaaccttggtgaggggttacctccatcaccattgtaagagatatcaattcatgaaaggatttcaccataagctgtgtaaacatttcagctaagggtaaagagaaagttaaggttgttttcacactgaaattcatagagggctgtctaaatgatgtttacatggccacgcaaaaatattggtctaagaactagcctggaagcccaagcttatgaacaagtggaagatgaaaataacacatagtccatactgatcacatcggggaacccatgacatatgctagctatgccattacctagggaacccctatttgtcgtcatacgcgactctaataatggacctatagttgcaaagccagtcatagtcctaccaaattcaagagaggtccctcattgactcggggatgtagtgtggaccccatgtcccccacaccaaaccagatcatttgtggtaagaaagcaccaccngcttttgtggcactgctgtaagaagcaataggccggcacccaccagagatgttcttgtgcttgtgaacaagaccgagaaaaattgccttttcatcaagtaataaatcctggccttaaaaaacgctccagtgattacccactgggggataaccaggcgaccaccatcatggaccccattttttgtcccaagattggggatctattaataacaa

SEQ ID NO: 299060 - DNA, 688 bp, Homo Sapiens
attttaaacgctttcattttattaataatcacagttctaagctatagaaataatgttccagagctagagatcatctacttacgactgattattacacagacatgccaacgttaaatggacaattcacagctcgatacagagagacactggtaataagatgtataaatcagggttctatcatagcacacacttgatgttaaagacacgaaaagcctaccgtaggctggacaaatacttgagagagcccctgactgcatggaatggtcaatttcgctgggtcacacacagagagcagcactggctttaccaacttactggcaaaatgtgtgttatataaggcaaaggacgggtggctacagagaaggggttcgaaccatgcaagagcaagaattaataggtactaggtgtgctgtaaacaagtggctgcttaatgttcggttaaaaaggccatgagaaaactgaccacgataggcattggtttaagggaattaaactctgaacttatgaacaaatgcaggaatcataacatttttaaaaatgggttttggccccttttttggggcaccacaatccacaaacatttgctcttgtcaggaatttttaggtgggcccaaaagtgggacccttttgtccttttggttcaaagagggtgtagataaccccctaatgttcttgtttaaacactgtt

SEQ ID NO: 299061 - DNA, 792 bp, Homo Sapiens
aaaaagcttattgaaatgcgtgtagatagactatcgtctccgtaatactgatatggggcatgccacatggagtcttgtgctcttaaaatgaagagaagctttgctagcactttgttcaataggaagaacattatgtctatttgtacaaataaagcgctttaaaaaagtttatagcttgtgaaacggtgttttaaacgtttccagcctgtttggatgcccccaggtggcgttgcggaccttctccaattgtcagtctggagaacgggatgacctccatagcgggtttggtcatggaagaccaccgggattcgcaagtggaccaaatcatgccactatcattaccattaggagtacatgcttgcgagaaaatgccaccctgggatagcctgcattgagagggccagcgggagcactcgtaatgcagcgaccagatccatactgttcagcacagaagcctttaaatgtcttattgtcattgtgccaggaactgaactgccgcccttatgggatgcgaaaaacctagagctgggagtcatcgcagaattaaagcgtcagaggcatttccggctacccaccaccgaataagaataaatttggcggtcttgtaagactccggtcccacttgacatggctaggttgaatactgttcctcgcattcaatttcccaattcactctaatgctaagggatagcacacggttgcctatcaaaggattcttccatttacaagccaaatcttgtttgcgccgttggagaccggttcccaaccctctttataatgaaccatttttca

SEQ ID NO: 299062 - DNA, 685 bp, Homo Sapiens
gtatgcaaagtttaatgataaaaagaagtgcgaagagattggaaacgatcaaagacactcaaggttggcaggcatgattgaatcttcacatcagccaattttagaaacgcatgttaacgcttcagacttgcatgcgctacttcctaaggtcatggatccatgagacgcacttaacagggagcccacatttacacatacactagcatctgcggtacgggttgcacaattacaaacgccctagatcaggtcaccaacatctggatagagcatatttccacataagctgtgacaggattcgttaatgccttatgatctgtgtaattaatagatcctgttttatctaataaacccaagttgggcaacgaatgatatggcgatccttctacctcaaacacacatggtttatgatgaagacatgattgtaaatgccaacatgtatcctgacgacagccctatataagccacagatgacaagtgagaaaagatgtgtacaagagactctgcacacagggtcacattttttggaggctaaagttactaaccagtggcacgttttagctcactctatgcccccaggttgaatttgtcctcagctaaagaagacataatttcaaacaccaacagcacgggagatgtccaattttgccttgttgatggacctcttgaggaagttaaaccagaaaat

SEQ ID NO: 299063 - DNA, 797 bp, Homo Sapiens
  misc_feature (212)..(263): n is a, c, g, or t
  misc_feature (265)..(265): n is a, c, g, or t
  misc_feature (462)..(462): n is a, c, g, or t
  misc_feature (510)..(510): n is a, c, g, or t
  misc_feature (598)..(598): n is a, c, g, or t
  misc_feature (604)..(604): n is a, c, g, or t
  misc_feature (683)..(683): n is a, c, g, or t
aagtcagcacttcctttttaatggatagtaacaacccaaaacagttttatgggcttagggaaggggacaaggtaacaacaattgcagttcaccggcgactgaagtttcccagaatgcgggacaatcagggctaaaacctggacagtcccatacaatcagggctaaaacctggacagtcccatgcaaactgggatgttctggacttgctattnnnnnnnnnnnnnnnnnnnnnnnnnnnnnnnnnnnnnnnnnnnnnnnnnnnngnattgtgtgtaaccctcccccaaaataatgcaacagcctttcagtatccatctttgacagaggatggaactacaggttgaagagactcagataacttccttaaattcacacaaactgggcataaaggagcctgcatgtaaacttggttccgtctgatgtcagagggccctttctaccctccatgcttgggatttatcngtcgggtcggtgaactcactctctcacccacccactcaccacatattntcagagtgcagaatatatgctatgccaaggattggattatgatgattcagaacaggctcttgtatattgtaatttggaagcccatgantagcanggaaatagtgttcaagaatatcttaaataaaattatgggaggactgaactcttacactaggcccaacggacaagacaanaccagaatggagtaacttctgcttggtgcacgcttgtcaaccgaactttaaaagggcagcttttaaaaaaatgaaatgccccgccgctattgaagggggccagttacttgacag

SEQ ID NO: 299064 - DNA, 689 bp, Homo Sapiens
ttttttagaaaactgccttaatgttttagtcgttggaaaaaataactggggcaggaaaaaaatgaggtgagcttgggagaagatagactgagtgccacccatgagaactggttgctcctgtggtagggaacccgcatgctaagagcaaaaaagagccctgtgaattgaagccagacgcttcaggtcaagtgagacaggttatggcaactaccaaagcggcgaattgccttaagcgagaaaccaattgctatctacttagcccatctccatgcgggacacgattacatggggtctgaaacgggtagtatggccctctatcatcacaaggagtgacacaacggggagggaaaaaatgcaccttacatctctctggattgccgaatacacttgctcaggttacaaaacacatcacgttctttgtggattgcaagtttaggcaaatcaattatgcggaaatactacttttttgatggagcaggtttatgattattggcgacatacaataaggggcagttactactcagagctgtttccggaataaaatggaaccccaaaactgtaaccttgggcagcctccttacaccggtttttttggagagggcaatataaaaaaattgtttctcaagggtttgccaacaattttggtcgattaaaaacatggagggggggctaaaccaagaaccttttta

SEQ ID NO: 299065 - DNA, 682 bp, Homo Sapiens
  misc_feature (525)..(525): n is a, c, g, or t
ggtgtattcattctaagaaccatcatatttatgctgatgccaaacaaggcttccaatacatgtaggtgcttgagactttcggtctcccatgagaacagggcgttcacattcctgttttcatacatgcaagcagcagaagtgatccctgtgagagtcaaactgtccctttatgtctagtggagaaagtagtgcccatttttaggatcggcacaatgctgtcgcttgatctcgcttcttgtctgcgaatcccagacttaagcggaacatgccacactgtgctctgacactacgtttgcagtcatgctgatatcccaggacgtgagcatactgttgactcttgaatgtgtcatgcatcgtgctgtattctatgagactaacatctgttgtaaaaaggcaaccagctttttgtgggggttgcagcatgccctacggtccacgaggcatttagtagctcctctatgctacggcggcacactgtttttagtagcagccaaccgccgtgatgaggcccttaacgttttttgncaaccatgagcccgtttttagaaatttaataaaagtggacgtcctcgttctaaacggttggagacttattaacaaggcctcttctaattcttttggccgaaatttgtccgtttaaaaccttcagggaggatttcctccggccttgaacctccttttt

SEQ ID NO: 299066 - DNA, 229 bp, Homo Sapiens
  misc_feature (116)..(168): n is a, c, g, or t
ccccccgggctccaagaaattccgcccaagggttttccaaagtgtgggttttcctttgggccacaaaggcccccccattaggagcccgaaactttattaaaatttttcccccgccnnnnnnnnnnnnnnnnnnnnnnnnnnnnnnnnnnnnnnnnnnnnnnnnnnnnnctgggcccccttaaataggggtgggcctctccttaaatttggggaaagtaaaaccaggttt

SEQ ID NO: 299067 - DNA, 596 bp, Homo Sapiens
  misc_feature (81)..(90): n is a, c, g, or t
attatcatttaaccatttcctctaagtccctatgggaactatttgtggaccctgttgaaagccccccctagagttatcgcnnnnnnnnnnagattatttgaatattttattattggaagggaagagaaattaagcacattgatcaaagaaatgtatgatcagaagacaggctggtgctttgacacaacacatttaagaaaagcggatgaataacctgttgatcttgatttgattttggatattctcatggctgggtgataggataacaaaggctacgttggaagtcttggggggatgaagttgcagtagaaaagtgtttacacgtatgaggaacaaatgttttgttaagggcaagccttgcatcaggtttttacagaggagtgcgaaatgatccataacagatataagatgatgtttcagagccttggacttcgagttggattacgttgaaatggagcaggtagattcatgattagtttctttgatttaaaaagtgtgcataatatttggggggacggtatatgctttaccagtaaactatttgggaaggagagggtcattggaaaattgacaagtttaaaaaagggattttgtgg

SEQ ID NO: 299068 - DNA, 700 bp, Homo Sapiens
  misc_feature (373)..(424): n is a, c, g, or t
  misc_feature (509)..(509): n is a, c, g, or t
  misc_feature (590)..(603): n is a, c, g, or t
tcagtagctgggaccacagacgtgcaccaccatgcccagctaatttttcttattttttgtagagttaaggtctcctgtgttgccgggtttgtctcaaactcctagtcttagcaaccctcccacctcggcctcccactgggaggtgtgagccactgtacccaaccatgtactttctgatttgttgtaatgagtacatattttatttatactttattcatttttgagaccaggtcttgctctgctgcctaggctggcatgcactggtatgatcatagctcactgcagcctggaattcctggggtcaagcaatcctcctacctcagcctcccaggtagctgggactacaagcatgtgctaccacacctgggctaannnnnnnnnnnnnnnnnnnnnnnnnnnnnnnnnnnnnnnnnnnnnnnnnnnntgaatcctaggctcaattgattcttctgctttggccttttaaagtgctagtattacagccataagccaccatgccttgccaagtnaatgttgatagaaaaatatttgaggtgtgataatggtatggaggtacatttaaaagagtcatttttaagaatgatatgaannnnnnnnnnnnnngagacgagtttactttgcacccagctggatgcaaggtgcaatcttgttaatgaaattccgctcccaggtaaaaaatttctggtaacctcccgtagtg

SEQ ID NO: 299069 - DNA, 615 bp, Homo Sapiens
  misc_feature (475)..(475): n is a, c, g, or t
aacttaataattttttatggagaaaacatcagagatgctcattctgtctaaacatctaattccgagagagaccagagctcaaaggtagaaacattcagctgccattcgatgcgggcataaacttggacggaccatgttacaaaactgccacaacactacacttaaagacatcatttttgtatgtttctaatgactattgccatctaacaatcatacaattcgcctctttgccctgaaaaagggcaactctacgaacacctgtgtctaatagcgctatctatcatggatctgtgcaaagatagcaaaagattttgattatattattcatctgaacaatgtaattgaaggtcaatacacccgcatcatgtgctgatatttaacagttgagacaaaatgaacaccttcgggaaataatctaccgcgtgggtttgccaagctattacactatgagagaagcattgcttgtcgaatgccnagagaccaccccaacattcaaagactcaatactcttgaagcacggaactcaaaaattcccttgatgaagggtattttaataccgcgttaaaagattttttttgtaacaaaacacttttttggcgttttacaactttatgg

SEQ ID NO: 299070 - DNA, 686 bp, Homo Sapiens
tgccaaatttttattgtctaatttcaaaggagagggaatatcttcttttgtttaatttcttaaaactgcacagggggcaaccagtggaacttataggatagcatattccattctttataaggacggattattgacagatctaatttttaacaattagaatcatccttggcgtcaggaggagctgaagttcttgttacctaagggctcaagctgaggccaggtgtccatatcctcgtgatggaaaaaaggaacctgactggcttctgtacttcacgtggccctccatgaaggacgcggcagcccttgacttgacatgactggctctgaacggatcgaacgatgtgctgcgcgtgtcacacactatcctgaacacagtgctgttgatagaccatggaggctctaaacactgtgaggtgcgaccttgcacggcgaccgaccaccgcgtaaaggctgggtatcttgtctatgggacggataggttggagtattatcatcaggctggcttttcaagtttggggcctacccaaaggtcaattgtaggggagggagacgtaaaagggcattttatttcttttactagtggcaaagccccaattcatttttctaggcccaaaatgtttcgcccagaacataaccccgggtttgtgttacaagacttaaccggacatgttactaaatggccttta

SEQ ID NO: 299071 - DNA, 699 bp, Homo Sapiens
ctcccaaaaggtttatgagatacaaacaaagcgcactttattatgtcactgcctgttatgagccctctttatacagatcgggagagtcaaaattgagcctgccacaaggctatgggttcgttggaaagaatggatgggcactgggtcccaaggtgtaagcgggatgtagattcagtaagagctttatgggtaccccgattcagtgaggacggttgggacatggtcattagctacgatctgaacaagggccaccttcatactgggtgactcccctgcatatatgcggaggaaatagattaaatagtatacatgctatgggccctgtccaccgaagaaactcgcgctaaatgattatggggatatgtacacatactagcctcctgtgaagacatttgtgcattaaaagaattacatgagtgttggattgactttggataaagtgcctagaggggctgtttttaagctaattcttacagcccatatcagtatatggtcggtggagtttaaacgattaaaacctagggggtacctattggtcctgagcttgacctggccacttttgccgttttcgagtttaactccgggtaagaaattgcaacaagagggccaaccctttggttacgcctaaggaagggtttctaagttttgggacccctattttttggggcccggacaccccttttgcgggttgtaaggggg

SEQ ID NO: 299072 - DNA, 667 bp, Homo Sapiens
  misc_feature (531)..(531): n is a, c, g, or t
tgcctgtgaaaggatgacaacgtgggtcagatgtcaatgaaggggcatgaccatatcgggccggttttacaaaactgggtgcagtacaacttgccccgcgtgttcacgagcctatgaatgcgtgctcacacgactaagttaccggcttcttgtgtggtataagaccgggccaagggagagtgccgcgttctttcgacaccaatggcaacccaggaacggcttcggttacagagctcgacctgtgcctcaatacatgaatgcgagatttcctaaaatcccgtgcccaacactctactctttgtacaaggtttctcgatgggcagcttagcactggccaaacttagcctaccaggaaaaacaaacagaatgtgggagggaggccgctcgtaaatgtgaagctgggctctaccttggttgggtacagaaccctctcttgtgccttggtgggtacgatggcgataccaggggtcctactcgtacccccattcatatacggctgagatccttgttaaccggatgaaaattggactnttccctcctttttcactaacactggccctgccagctgtgcttctctaaaaagaaatacgcccctctgggacgtattggatctggtcagagaagcaacttggcccctccccacgtaatatggtaatctcacgagcac

SEQ ID NO: 299073 - DNA, 832 bp, Homo Sapiens
gacggctataaagtttcatacttgatggtggcaagctttgtttttgagacagtgcacagctagagttactttttcctggttgtgatttactacatattccctcaaaaggagggaaggggcaatggcctctttgtgccattaaatgcgtgactcattgggacatagaactgtggctctataaacgcaggaactgtttgggacaacctgaccactggtgatgaaggcctatcctcgccccaatttaaaccgtccatcccccgcaatttgtatcccagaaggtcatctgtttttgaatgcccccatggataaattacacttgtcgaaaattgttataagcgcactggatgtctcaaacgattaagcccggcacctgcaaagcatcagagttgggatagttgttatactgcatgcaaggggtgaccctggtctcaaacaggagtgataatgacttggctgtgcttctatgtgaccctctcttttggaaattgtacatgacgacctggagtaaccaaggggccagaagttagcaaaattttcttattaaaagcagaacaaattggttcctgtcttttaatgttgtggaggggagacctcctttaacccttgtggggatactttcttggcaccaaggaccttccacaacaccagtggctattggtatctttccccggagaactttcagtcagactcctttatttcgttgtgggtttgtggacaaagttttttaagggccgggttaaaacaggtctttcgggcagtgtcattttccctgaaaaagaatcaaaccctttccgtggggtttgtggccgaaagaaaaatcttaccgggctgg

SEQ ID NO: 299074 - DNA, 347 bp, Homo Sapiens
ctttttcctttgtataaaagattgttcctaaagggttgctctccgaattaaatgggtcaagtaaatataagaaaggcgcaagcaaaagtgcctagtaaaaaataacgccccatctgttattgttactattgttttaaattctagtttccttacccccttaacatacattttcaagttatacaaaagttgaacgtttccctggagattccaaaattctctgagcggtttcaagagatctgtcctattcttcacctacacacaaaaaagtactaatcatcacacacaggctacctaagccacctgaccttacctcccattagctgtccctgtaccatctaactaaaatg

SEQ ID NO: 299075 - DNA, 461 bp, Homo Sapiens
gtgcaggtagagcctcccaaaaggtcagaattcgttagccatgttttaggcggctgcgatacctagggtgcaccaaataacaatatttgggaaccacatattttttgcggggagggaaaaggctgttattgatagggtggagctttcccttttgtgcctgtacaggggagaactagcaaagcaaacgttacatataacatccaactatactttatgaatggaaagggacaaacactgcttgagctctatgatacaaaatgggtgaacttgatgttcctaggactaagactgacatttaaacatgcctatttttacatcgaaagcctatattttctgacccacctcgtaaaacaatctgctttcatgagagcaacaagggttcgcacattgttgtataaaccagcccacagaggtctaaaacagtttttgaagtgaaattaactgtcttgggtcctgggaat

SEQ ID NO: 299076 - DNA, 713 bp, Homo Sapiens
aagtatattattagaagctcagggcagagaggcaaagagattcttgaaaatcatgctctttgaaccggacgcttccatatcccaaacgacaaagaaaatcacgacattaagctgtcgatcttcattgactttctacaattgtaacgccaagatgagagccttctcaaggagccgttataaacacttagaaactgactcgtataaacaaaatgttgaccctattcgacagaccggagcttcgtattggcagacatgtagaacttatgtacataagctgttaaatcattcatagcatatttttagtcgctctgttgtcgcatagggcccgaaagcaactagcttagcgagtgcagataggttgtcgatatggctctccttttcagaacgtgagcatgtattttctgctggatcagcccgtgacgaaggctaggtagtccgcatttaatcattttacactttggcactgctttgagatggttcaacagaagtcctcacacccatgcatcattttctgtagatcggatccagaccttacaagatatccttgcaaagacctcccgtgcagtagcaccttatgcaaagcctctgggaggatgcgagaagacattggtaagacctgcactgacttgacacctttgccacgcatctttagaaaaatgtggtcaagcagctagtgcctgctttgaaactaattgtccaatttttggccatga

SEQ ID NO: 299077 - DNA, 676 bp, Homo Sapiens
cagaacaacccttttttaaagtcaaacaaggaggggccagggaaggaggtgagggcccgaggagcgccatgctaattacattaaaaggctttcattaacattccaagaaattggcaagacaggacattgcattaagtgttgagttggactcaaggttgggacactccattcttgaaaaaacttaacagcttcatagacccatgaaacgaaaaaaatccgggttgaaacactttggctgaggtgggctaatcaactgtttacagaggaccttagatgtcccactatgactgctcttaggcatttgtaacagctgcctagtcgttatacacagaagagacacgcggtacttcttatctgcatagacagatctatggtaactgtcaggacaacattggaataggtaacttgtaatctcgtcaagctatattgatcagttctacttcaaaaggctgaccagggtgttcgcctgcagtgggatcaacgaatgttggactatgctatgcaaagtgtaatgactgccgaatccccgggcttgatgggggggaacattccacccgtaggcattgggaggttcttgaacaaaacattaattttttgcatgttaaaacagcctattcaatgtttacttttaaaaggagcaaacagattgcccacatataccccttatcccccatcc

SEQ ID NO: 299078 - DNA, 664 bp, Homo Sapiens
ggggtctaggggtgccgtccatgctggaatagaacatctggtctcaagtgttcctaagacactaatctttcaaagaggtgtcattacacgcatttacaccatgccagagtaagattaaatactgctagaccagggatctggcatggggggtctaaactcaaaatcaatctattgttttactacgatgcgaacgctctttttatgtgagataagtaaattcttgctgtgtcttacatatactgagaattgatgcgtgttccttatcttgatcattggttttatgaaatatatctacgttctggaactactggctcgtaaactagcatgaccgcttggtctgactccgaatgcagccgaatgacgagacatgccatattggtcaggacatagggacgagaacatgggagctgggctctgtggcctccctggttctaaactgtaattatcaccagtaaaccctagttgttgttgaggccaattttttatgaggcttggtcccactgggattcgcagagtgaggcctttggccccgggctgtggtcaaggttgggttttcattcaaaaaaaggtgggggcgtaatttttgtctgcgaaaagtgataaattcctggcattccggaaagtgtcttggtaagacaacccaggtgttttttgggttagtaat

SEQ ID NO: 299079 - DNA, 585 bp, Homo Sapiens
  misc_feature (170)..(180): n is a, c, g, or t
aacacttgtgttgatcggatgtcaacctttgtggctacataatgaaatgatggatcccatgcacttcaactcttcttagggcatgagacccacgcgttagcagcatgcgagtgttagtggaaatacctgcagattttgggccaggcatggccgctctagtctcgagatcnnnnnnnnnnnctttaaagatacaaaggctttattcatgtgggatacctaaaatcaggatgagtcttccatgtacagaatatcaacggatctttaaaatacctctatatgctttttgagcaaaatatttacgggctaagtttttctggatcttaaacaacaaaatccacttattttattagccaaaagtcgaagattgaaaagacaccgtcatattggtttgagagatcagtcaagaaaacaacggaaagcatgtctttgaagtaattcctccattctcaactgctaattattcaacataaacccctaggtcatagattaccgttctattcttattaaatcatattgaacactgtaaaagaagaaaaaagaccttttaccccagaggcgggatcacctttttaagtgatccatcat

SEQ ID NO: 299080 - DNA, 664 bp, Homo Sapiens
tgctgtttccatttttctttccaacaaggaacagctgagcacagagaaaacagggagaacgattaaagacatatatgttttttcgacaaactgttggctttacaccacccaaaaacaacaacagttgcataaagttttgagctacatttgctcttccttattctgacgcgcggctgggattgtttataaataggaagttataaccctagaggcggcttgacttgcacgactcaatttttttaccctgcttgaaaaagcacgcctccttacaggcaagctggcggctctgctctacaaaacctgtgaaatcgtccatagcacctttaaggtgaccttttgtggcctagcgcttggagtccacgagctcaacaaggcattttgtctcttgaaaacctctccttagagagagagtgcatatcttcgcaggaaggtgaactgttacctatagactctgtcgaacgtatgttaatctgctatcacactgagagcttcgtcgctgtcaccaggatccgtgcagatcgctgatttgcattgctggcccttttatgcacacccttagcgggtaaggaccccgatagatgggttcgccagggcataatttggttaaggagtttacacattggagccagttttgcaggtttttgaaactttccaggaacgaaga

SEQ ID NO: 299081 - DNA, 256 bp, Homo Sapiens
  misc_feature (167)..(175): n is a, c, g, or t
  misc_feature (182)..(191): n is a, c, g, or t
cgggcccagaaagaaaaaaacaggtggttttggcccaaaattggcacacaaaggggcgccggtgttcttcggagttcccagcccggggaactttttggttataggcacgggtgttgtaagattttatttttccacaaacaattctccgccgctggagcccgaaagtnnnnnnnnntccctannnnnnnnnncccaaaaattggggatagcgccccctcccccgcggtatatcgagctaaatgccgggggaaaaatt

SEQ ID NO: 299082 - DNA, 721 bp, Homo Sapiens
gaacattcttttaggggcctaaccccaactttatccctttgtaaaaacaggagtttcttccccattgtgaaggcttgggaaacagatccggggtccttgctttcccaacatgaaaatgggaacccatgacaccggcctcttttacggacctgttctgggggaattgggccttgaagacagtgtgtgaggcccgagggtttttttgtcccttcccctttggggcagccctttggctaacacattgtgtcttaaaaaggtggaccgatgttagagagctattcttcctgagatcagtctgtgcggggggctgtggcttatgaaatcaaagctgaggaggggatgtaaatactgcgtctgtcagcgtgggagggccactgcccacttcagttgggcaggtgagggtcatcctttggtgccaaagccccatgacataaagagccccggactactggcttgacccattgcaggagccggaagtcctactcaaaggttcaagggaaaactttttgactgagttttccatttatttttgcttgaaggggagatgcaagccctcttacccttaagagtacctttttgggactggagctgctgcttcggattcctttctcgaaactccaaatatctccccccctggttttgcccacaaaatttggccctcgccctcttgtaccgggccccgggaccgaatttctgtacccccgggggttccctaacttta

SEQ ID NO: 299083 - DNA, 719 bp, Homo Sapiens
tttaattttattagctttttctactatttatccgcttgtttaatacatcaagtctttaactgtttttctcccagacaggtgcgtattctctttaacatactgatactggtgcaagagccgattgcattcatataaattacatatgtatgccaaccactctgctaaggactcatacgctcaaaatctaagcttaaatgaccaagaacatctgcactgttgtcgcctctaacaaatccagggtatacttggttttttgtgagagaagccgagtgatccacagctgaattacctaactaaatcctatcataccagagagaagttccacgaccgcccatgctcctcactaggatcctaattgccaaaagtgtcacggtgtgactatacatattagaatgtcttcatatacacgggttattgtgcatgacgcttacgtaaacggaagggaacgccaggcagctctttaagcatttgctaagtactgttgagtcaccaagtgtttgtgggacattaccctgtcttggccttaaggagaataaggcatgccccaactttgttatgacacaaatagaattaggctgtctttataatcaacttttcacgatcctaagactgttctaccccttgttttccgattttgaaagctctgaaagaacacgcgcttcgcattataaaccgttttgctacaaatttcccatcgagagtgttttatcttaaacgcg

SEQ ID NO: 299084 - DNA, 695 bp, Homo Sapiens
  misc_feature (508)..(508): n is a, c, g, or t
ttttttctgggaagaaaattggttttattagagccaatactatgaaaatattatgttctgggaggtaaaagaaggtttacctcccaaagtgggatttgagtagaaaactatagaataagtagctagggtaagtaaaagcaagggcagcatgtgcaaaggctcagtggcaaaaacaagaggaagtcttgcaagagctgaaagaagggcagaggagctggcttgcccagggcaaggaggggtgtggtgccagtgatgctgcagagaagagcacagacagactaggcaggccttgagaggaggctgagggttctggcctaagaaccctgggaagtcattgaacagtttcagcagagcctggtgacccggtcaggtctttgtattttataagagggcctttgttttcacatcttcttatattttccataattatatgaacaattcgagcaatagtatttggtttccctggattaatccggatattggagacattcacatacacatttttatntggttttttctgaaagatgttagtccagtttgctccagaataataaatatctttcactctcatttggataacagaattatcaatatatttcattctcatttggaatacttctgggcacctgactttatttagctaggaactaaaataactcttgtcttggcctatgatggggaatgaacagaagacc

SEQ ID NO: 299085 - DNA, 520 bp, Homo Sapiens
cagttcacactgtgcagtacataacaacgaatagtcgaggcctggttttttgcctttcaaaaaattgacttgaagaggtgtcacaccttggaaagggctcaagacgctctgcgccccgaggggttatgaagacaagtgtgcagccaaagcacctctgcgttttaagaaagaaaccttacgcaggaccctttattttgatatggcattaacagctcgatggcacattgatgtacaaaacagaagggaacgtgctataatttagaaaactacataagttctacttaaagaaatacgaacagaataactgtttccgaacctggtcagtcgcgcacattcaacactcgggagaaatgtacacattaacggaaagctgtttataccacttattcacaacggttaagcccgaatggggggattcttatgtaactgtcctcacgaccgacacattggcttaatttggttgttcagtaccaaattcacttttgaaaaaaggcagggttttttattacttgaagaaggg

SEQ ID NO: 299086 - DNA, 537 bp, Homo Sapiens
ggtttgtaacatggattcccttcaacaatccattaaaacaatatggatggaaatcacgcagtatttgcaatttactacttaaaggtaaggatatcatggacaaatggtttgctgatcctttaaatccgtcccaacaagaacaaggattgttctgccaatgggaatgagggcccactggtcacggggactccacatcacttgttatgagcaaggggtttagacaatgaagacccaatgggtttctccctcttccaagtctccgcggtgacgggcatattctttgggtgtcctggcaaatgatgcctcaagggctgccccacacaaccggggctgtgtgtgcactcatcacattttcgtacatggaaggaaactacttggcccttaaccccgggaagggtcccctttttcagggccgcattgccagactttccctttatcaaattttgtagctgggaataaaggggtcaaggaatggtttatacccccctggtcccacccccgaattggtttaaaggggttcttttcaacggttgggtg

SEQ ID NO: 299087 - DNA, 536 bp, Homo Sapiens
tgttaattaaacaaattattttcatagagcacattttcacgtttgagattgccattgtgcgaaaataacacttaattacttataggtatatattagtggacagatggattttgaacatattgagtccattcgggaattaaatcttaatttacaggtgggtgtattttgatacatctacggggaaacttgaccttaaatgggacttaggtatattcaaaatcgctccaagcgtgtcttcctaggttttagaaattcataagtgtgagcgatcagcatttccttagtttagaaagttcctcacatattgtatcatcaacacgaggtgtgtactgtttatacatggtaagatttcgaaattaacagatgctacttcctcgagacctttgataagggaacttagagtaggcccctatggcaatatttcccaaggcaaaattgtagggctgagcattatcggattccataaagggtgtatacctttcaggggtcccaacctagaagggggaaagtggttctttcggctaggtgttctgggg

SEQ ID NO: 299088 - DNA, 539 bp, Homo Sapiens
  misc_feature (321)..(321): n is a, c, g, or t
aaggcttatttattaaatcatttatacactcatacatatagatctgagacagagggctattaatgcaagacatgctgtacagtactgggggaaaggtcatataacacaaagcgatgtcgatggaatgcatgccataattcaaacaaagaatgccaagtagttgggacgacaactgaccatcaacctgcacaggtacccaatcggatccttccatgcaagcacttgatacacaaaatgcacattgaactgctattatcatgaggtaggaagccgcctgacatgaacctccaaattggagagtactccttcatgagccgccgnggatgagcaggtacttgtataataaaggatgggttggacctctcatgaggaacacgctccctggagaccttcacataggcactctgctggttaccacaatatccaccaactcccacgcaaaaccttctgtggaggccccaccgcagcagttgaagttttggcacctccaaaaggtttctattattgtaaactaaaccagcaccccatgaagctttttt

SEQ ID NO: 299089 - DNA, 325 bp, Homo Sapiens
  misc_feature (151)..(166): n is a, c, g, or t
acaacccccaaaagccccaaatttcttggaaaacccctttggggaaaacccatgggaaaccctccgtggaattgttaaactccgggccaaaaaccggaagaaaaggggttttcccaagcctaattgttgcccttgcccagtttttgggatnnnnnnnnnnnnnnnncctctttcggaaatgggtaaaaaacccttgtggggccaacgccaaacagtcccgggggtgtttaggaagccttcaagaatggggcgaccccctcttgtgatgctctctgggaagctttcaatccccagcccccatccaaagttttcagccgagtagggg

SEQ ID NO: 299090 - DNA, 682 bp, Homo Sapiens
gcggaagtatattgaactggaactagacaatgctgtattccctggccgaatggcttctgaatgactccatataggaaggggctcatacagggtcattttgactcagtatgaccctccatctgcgcctgttgaggactgaaatagcacggccctccatggacaggttctgcaatggtattatctatcgaaagtaactccccctgatggaacctctaggacatccgagccacttggcagggtgagcattatccgaacctctgctataagtgcagtcgctacctgtgtctcagcgcactgatcaggctgttaactgggactgtggtcattatacacgatgcatgccctggttgaagacacacccctcaatgaatggagctgtccactgaacgttagctgaccaaggcccttgatctattatgtagagctgacaggcatgtcttctctgacagaacaggacgcatatctttgatgacgtccaagctctgttgagggaccctctaaccgggtgaaggagggcgtcatagacaggctgctggccgggaggtttagctccccttgctctaatccctatcccaggcaggcatgaaataaactgtttttaggaaccgccgttacgtcaagaactagcctttgttgggcaattttttggaccgcccattcgggttatccgaggcccccggcc

SEQ ID NO: 299091 - DNA, 542 bp, Homo Sapiens
  misc_feature (50)..(328): n is a, c, g, or t
  misc_feature (332)..(372): n is a, c, g, or t
  misc_feature (453)..(453): n is a, c, g, or t
ttttagaatatttattgcatcaacttacaaatttaaaatgctgacacggnnnnnnnnnnnnnnnnnnnnnnnnnnnnnnnnnnnnnnnnnnnnnnnnnnnnnnnnnnnnnnnnnnnnnnnnnnnnnnnnnnnnnnnnnnnnnnnnnnnnnnnnnnnnnnnnnnnnnnnnnnnnnnnnnnnnnnnnnnnnnnnnnnnnnnnnnnnnnnnnnnnnnnnnnnnnnnnnnnnnnnnnnnnnnnnnnnnnnnnnnnnnnnnnnnnnnnnnnnnnnnnnnnnnnnnnnnnnnnnnnnnnnnnnnnnnnnnnnnnnnnnnnnnnnnnnnnnnnnnaagnnnnnnnnnnnnnnnnnnnnnnnnnnnnnnnnnnnnnnnnngctgacacataccgcagcattgcaaaatctgaaaactacccactactggttaccaatttcgacacaccccgagacaccccnttctgaatggttccattttgggtggaactctcagcgaccggccttttacaaggttggagccccggcattgtcatccagagaagaggaag

SEQ ID NO: 299092 - DNA, 606 bp, Homo Sapiens
  misc_feature (167)..(393): n is a, c, g, or t
gtcctaaaaggggggccccgcagggggaggcttactaaaagggtgaaaacgcaggcttggtttaaggcgaccgcgatttttaggataggcagaaaaattagaattgggaaaattaaaagggtaaagggaagggtaagggttgatattgttagggggggtcgggcccnnnnnnnnnnnnnnnnnnnnnnnnnnnnnnnnnnnnnnnnnnnnnnnnnnnnnnnnnnnnnnnnnnnnnnnnnnnnnnnnnnnnnnnnnnnnnnnnnnnnnnnnnnnnnnnnnnnnnnnnnnnnnnnnnnnnnnnnnnnnnnnnnnnnnnnnnnnnnnnnnnnnnnnnnnnnnnnnnnnnnnnnnnnnnnnnnnnnnnnnnnnnnnnnnnnnnnnnnnnnnnnnnnngggggggcctaatggccgctttacagggggaaacctgggtcccccttattaatgaacggccaacccccggagaggcgggttgggaatggggctttccgcttctgggtactgaatcgtgccctgggccttgggtggggggagcggttaagtcactaaaagcggaatccggtttccaccaaatagcgaaaccccggaaaaacatggggccaaagg

SEQ ID NO: 299093 - DNA, 687 bp, Homo Sapiens
agtttgtatttatttttacttctgagcacacaccaaaaattggaagccggcaacgctttagaacattaaacttaacacaggggttgaatactatgcccatgaggactattgtgtacagaggaacttgtctttttaaaaccaaaagaggcctgttggttcaagaatgttaccctgcttaagtttatcgaacgcccatctttcacaaccacgcatcttgaacctgctgtactgcgttcctcatgtacctgaagagaggccttatggaatgcatctgttacataaaggacatctgggacttttgcaacaatacctgggagaaaggagtttacaaagttgaccagaagggcgagagccatgcctttttgttattaattggacctgaaaccgtcctgaatgctattgcggcacgtgtggtccaccatcatcatctaattcaatttatgcagcccctttttgagaacctttaggagagagatcttatacagcttagacaggctaatatgaggcttcggctttaagaggtccctggagaaagttacgcccttgaagggcaacttgagcacctgggtgcctgaaggccattttcttaacggaacttgggttcaaggacacccaaagatgctgacaccgccctaaaaccaacctggaccacaagaaccttcttgggtgtttaaggatgaaaattac

SEQ ID NO: 299094 - DNA, 676 bp, Homo Sapiens
gctagtaaacacttatagcgatacagacctgggacccgaaagtttaaaataacagttataaacaacagtgctgcgtattcagcttgtgttcactcaaactaggattatggatgtacatgcgcttaaaagcttttcacaggaaatgagcatcattgaaacgacattctcaatcattatgcaattagatctgctacattctgctcagcacaggcattctttgttgcacgtttcaaagcccgtaaggacgctctatctgtaaaggagattgttatttcccgaagaaaccacatttgtgaattgatatgctcaccaaagcacactgccaagggtagcttagctctaacatcagacctcatgaagtgaacccttggattgcgaacccagtgaaatcatttactgaaatggatggtgcacagaacactttatttccaatgaaaccttagaggtcatagttttgtgcgctttggttaaagcctgtgaacaggtcctaggcccaattactgcaaacagaggatcccctactttagagtgttgtcacccagctgcacctccatttttgatcctttaaggaggggtaattttgggcttgtgggatcatgccatggctcaccctgtttgaaatgggatccgatcccaatttcctacaccttcgaaccttgtggataccgtgtaaagc

SEQ ID NO: 299095 - DNA, 592 bp, Homo Sapiens
ccttatgtttattaactatctatatgtatcctcaatgccccctctttttatttaattaagggttgtattaacaaatgttttttatgccaaaagataaacaatttaattggtatggtctacgggaaggcctcagtatattgatctggaggtaatggtgttgatgggattttaacacattgggggtttttattgggtagattataaaaaggtgtactgatatgaacttacaataggatgatgtcacagtctcttgtgatagatgatttaaacttaaatggagggtgcaaagagattatatgttaacatattaatatcatttgttgatgaaaatgtccatcaggatatagtgagaaatatacatttagtgagtgcaaattagttgtgtcattaagggtattatgaaaagagaaatggttttggaaagaaaagcgattatgcataaccagtgagaaatttcactgccagagttatgcgtgacatgataatactggtaaaagcataacttttcagaagttatgcacgtttggtgtataagggatatgcactaaaataaagttgaaatgagccttttaagagaatactagctgagttg

SEQ ID NO: 299096 - DNA, 509 bp, Homo Sapiens
  misc_feature (105)..(225): n is a, c, g, or t
accacacccgggcctgggagcttttcaatagtatttcatgaaacgcttgtttatctttttgcggctaaaggaacattttactgcatgaaggaacacttccgagtnnnnnnnnnnnnnnnnnnnnnnnnnnnnnnnnnnnnnnnnnnnnnnnnnnnnnnnnnnnnnnnnnnnnnnnnnnnnnnnnnnnnnnnnnnnnnnnnnnnnnnnnnnnnnnnnnnnnnnnnntaaaatattaaaactatgcttggagtggttcaacgcaccctgttattccaacttctttgggatgttgcggtccccaggatgccttctaaattagggacgctgtaggtttaccgggcctcctttctatagtgccatataatgttttccatacttcacccttgtgccctactctggcacttcctcaaagttatatttcgttgtacttaccactcgtgctgagttcgccccctttttacacggggtttccctttgagcaaccacattctcactctaactcttcctcg

SEQ ID NO: 299097 - DNA, 685 bp, Homo Sapiens
  misc_feature (516)..(516): n is a, c, g, or t
ctacattattcccgattggaaaaatcgaccagactggaaagaagacaatgctacacgctggggagcccgttgcgtaaaatgtaaagtcacaaacgttgcacaattaactgctgataaaatgcagtcagcactcctgtgtggtgagccccgtgtacatagggaagaaccggctatccccgcattatgactgagagtcagtgccttgatgcccagagtcagatggcgcgtgcacctagctggcaaactagcgtcacaagactcatcgtgtgtaccaagaccccgttgatacggctgagctggtacagagacgcctgagtgtgtggcaagagcttacccagtccaggagcgtgactccacaagaccagacttcacttattctgggagggcctctcagactagcatatatgttttgttcatattcatttgtcgcgtactaggtctctggagctacactcaatatgtgagaacaatgtcacagacaagactgtgcttgagatcataatagtgaggacatgntgctcagagatgtacatattcagagattggaccttaacagaagctatctaggaagatgagacatgagacagatcaggtgaaacaggaatgcgctcggtctaagcggttactccgccgagtgtagagtactgactgtatagcaaacacctatacggctggattacacatt

SEQ ID NO: 299098 - DNA, 527 bp, Homo Sapiens
tttcaattaatacaggcgctttttagtgaggcttgccgtttaaaggaattcatgaattttagacagggtgttgggtctacaccaacgagcatgatttacagggggggacgctttcgtacttcatgaaatatttacagtctcaacaaaaggtgagaggctgtttaatgaagatgttttaagcttacagagcatgccttgtactaacaggtttgtgaccgctcctcgtgggagcaccactaattattgacagccttgcagcaccactgtacaaaagctgcgaaatcattcataacagctctcagccgctcttgtgatgacttgggcttgagaaacacaagctcaacacgtgcaggttgtaacttgagccgtagcttcttcaaagaaagtgagcatatgtctgcatggaaggagaatgttgaagtgttcatctaatagggaacgtatgtctaatagacataccaagctgaaaaggaaggcggcctgttccccaaggaaaatgtgcggaaaatcggtgcttttgcacgtgc

SEQ ID NO: 299099 - DNA, 798 bp, Homo Sapiens
  misc_feature (44)..(341): n is a, c, g, or t
  misc_feature (563)..(563): n is a, c, g, or t
tgagataagggctcactcttgtgcaggttggagtgcagtctggnnnnnnnnnnnnnnnnnnnnnnnnnnnnnnnnnnnnnnnnnnnnnnnnnnnnnnnnnnnnnnnnnnnnnnnnnnnnnnnnnnnnnnnnnnnnnnnnnnnnnnnnnnnnnnnnnnnnnnnnnnnnnnnnnnnnnnnnnnnnnnnnnnnnnnnnnnnnnnnnnnnnnnnnnnnnnnnnnnnnnnnnnnnnnnnnnnnnnnnnnnnnnnnnnnnnnnnnnnnnnnnnnnnnnnnnnnnnnnnnnnnnnnnnnnnnnnnnnnnnnnnnnnnnnnnnnnnnnnnnnnnnnnnnnnnnnnnnnntgcagtctaggtggaaccaagggactagaacctttccaggaagcctgggcaggtgggacaagcaacaagagggccaagacagatacagtcctgaggatcacacccctagttaaggggtgggcgggggtggtcaatggaaggcaaggctggcgggttctaaagagcagccaaagaaggaggaagctttccacgaaggaagattttgggttaagggaggtttanggaggggcccagtccgaggaagattggaaagatccccttggtgttaggaatgaacacgggaacttagtgacctttgtcagaaccactggagggtatttgccgcttggcaaccacacataatgggttttaaaaaggaatgggaggttagggaatttagccctgtgcccccccaggagaacccgtttcagggcacagtggttttcaggatgttggaaatttttaatgtttgaggaga

SEQ ID NO: 299100 - DNA, 522 bp, Homo Sapiens
gtttttccatctttggcggtgggttttttgtcaatatagccgaaaaaacggggggccggaataatacagggacttttgccctctcccctttagctttccttttgtccagcgacacttggtacctggaacaaatgtttacaggattcccaaaatgccagtgcttttttaggaaaaccttttttgctttcacacttaaggcattctactattgccgctggcacgccagacttaggtgtccaaccaaactctgacatggggggattctcaacgatttattaggtcccttttaatacaccgcctgcgaaaccatactgggtattagaagaactttacttgtcatggccggacacgtttttgttttgcctggcccactagctgtttctgggctctaaataaacgactcaggggggcggggacaacagctgggcatttaaagttgacttgacctataatgggggcgcttagaaaaggaagggccggtcttgactttagtttgaagaccagccttatggcacgtgcgtg

SEQ ID NO: 299101 - DNA, 678 bp, Homo Sapiens
gcagctgttttaactcactagaactccattgtccagttggaaacctgttatacaagacccaaatactaatcttggggtttgtggtttacacaatgcagtatttgtaagaggttgttgtaaaagtccagggcgtgagcaggaacctgctgctgccgcttccggtttgagcagacgtgctcttctaccctgatgatggccccttcttgaatgaaacgacttctcctgcgaactatcaaggcgccgggaggatcagctctgccagtgttggggtcagcataggccctaaggtcctacaggacacaagacccgataccggaccacgtcagagatgggcgaagctttcacccatcctggaggctaatgaacatcccctctcccaggtgctgttttatccccaatgttggacgtgagcctgttaagagtctttttcgcccgggctaaacccaaccgatcttcactctcctgtgcacgggggagttctttaaccaagaagctgggaatgggaatggcagtatccccgaaggttcagctgtttcaattccgctttaccaggaatgggccgccgggagaactccattggggccagtttttttatacttacaactgggtctcttgcccaagatagggggccttacctttttctcccttttttccgctttaaaaaggacaaagttaaac

SEQ ID NO: 299102 - DNA, 627 bp, Homo Sapiens
  misc_feature (13)..(13): n is a, c, g, or t
  misc_feature (25)..(25): n is a, c, g, or t
  misc_feature (46)..(47): n is a, c, g, or t
  misc_feature (62)..(62): n is a, c, g, or t
ggggttctggatnccggcggcgggngttgagtgatgactggacggnnctggttggaaacggnctgggaaaattgaaaagttattttggtatggaaaatgaattaagtgttttaaggggtggggttaaaaaaagggttaaatgagttaaaattaaagagaaaaggcagacagaatgaaagagttgttttgggttgttttccggtgaagtaatttaagtccgaaagtagtacgagtttttgaaatcagtttttgtgtgttttgaggaaagtagagttaatgttggtggcattggcagaattttttcaacaggcctgagaaatctggaatgacagccttaagttggttctttgttatttgtggattttgatttacaaggttaatgagaatattttggttaattgtttggaggggtataccctgagcttgggacagatacttatgggaaatgaatttgttattagagaatgcaggagggacatatggtttattcaccaacaaggtggttgagtatggcattttgttgggatatgaagaaggggagaattgggcaaaacaagggtttattggaggaattaatgttggataaataagtggcggaaataaaggtagggcgcttctttgggaaag

SEQ ID NO: 299103 - DNA, 539 bp, Homo Sapiens
gatctgcttgcacgcgagtttttttaatgtgggctcaagcaaacacgggcacctaagaaaaagagattctcctaaaacgaacacctgtgttgtttacaccaccgatgctctgcaccaaacctgggtgctttttgtgtgtacagaatggaaatgtttcttcttgtggacgaagctggtctagggactcacgagatcaatgaacgcgagtgactcaggctcctcaagtgttttgactataggcgggagcacagcacatctagaagaaatatgtatttgggtattataaaacgatttacaaccatgcgttgtctgtaggaagcacgattatgcgtcacgagggctcggtgattcaaactcaccacaactggcaggagcattgtgggaggagcactaaatcagagaggctgctgactacagaattgcccgcaaaaaagggaaggatacaccgctttagcgaacagtttaaatatgtgacatagcgggtcactaactcttttttgagatgtaaacaaaggataattttaaaagactaggggatg

SEQ ID NO: 299104 - DNA, 691 bp, Homo Sapiens
ttttccagcttatccctttttttatgtcatccacggagaaaccggggcaagaggaaaggacttgtggattttaaagcccatattttcaaaaggcttttttcaatagttccgggccttggacgtcaacatgattgtgaaatatttaaggtaagactcaacattaggttacgccttctttgttaaaaggtgctctggacccaccccccaggttcttcatcctttcacttaaaaacgttaagaattgggttgtttatttggcctattccaaagcgttgctgttctttatttctatccacaatggagactttgacccattatcacttttgtttttcactttaaacaacaccttgaatgctatggccggaaagggctacaaatatacatttggtaaccaagcggaatacacagactttttagtttacaacttgcaccttaaataccactttacggaggtgtgtcattagtggtcataggaattgagggctattggccgaagtttgcataggagtttacatttttaaaccccatataccacgggctcttgttgtttgaactcgaaactaccattctggggaggccattttatttccagcaaatggtgtaaattccattcttgaaaaaattttgatgggaaacttccaaaatttgaacaaatgggttaaagatgtttttaaacaaatggctttgcacc

SEQ ID NO: 299105 - DNA, 686 bp, Homo Sapiens
  misc_feature (240)..(240): n is a, c, g, or t
tttttcggggtacaaaagcatattggggttaaatggggaacgggaaccgtggaatgattggttaggaaaaaggagtccactactctcactgccaggtggaagggatgacattccgtggttccaaggcccaaaccgttaataacgggtctatgacccaacacgaccgattctgaaattggagagcaacaccccctgtgacacctcattagcataaacataggtgtggaacaaggggcccgncaagacaacagctgacgctacacattgttgcgaaaccctcagggtttggaagcttcctacaaggatccagggccaagacctgatgcatcgtttggtatgcaacaccctcctaagaatgcttgtaaacacatgtatacagcgtgaccttcccaacactgtgtttctaatacgaatggaatgaaaagaccataccggctcctgggctttgccttatcactcatcaaagatctccgtgagctgtccaaatattaatattgaagtgttgtatttatgtgtcagcgctgcatgcagagctgccggcactgagtcgtgcatgggcttggcttactctcacgggataaggggttggtccaactttcgttccattacaggaaatgtacatgcattggtgaccctgacgatagctagcccacacaggtcacacgtgtttatggctggcctcccca

SEQ ID NO: 299106 - DNA, 677 bp, Homo Sapiens
cttaatcacacatcattaagggaccagacaaacgcagattaccaaaaagctatcatatcagggagctgccttcacacacggttttgacccttaccagaataacagatatctatgaatgtactttgaaaatctaatccatcgccaatgatcacctatttggagactatgtattatattaaagagcaaggtactattttgacatgaacatatggggttcatagtcagccaaccaatcaagaagcttatacactagtatatgggaaaacactgagaaatctgatcaattgcactggatattatttattcttgcctttcaaaagactcacgcatacgactgtgattagcctggaatagttgctattatgtacaaagagtggtatagtgcaatacagtcagggctcatgagcattctaagaaccctcatgaatgtaccagggtaaggaacccttggaaactgatccgccttgatgtgaactagcgatgtttaaatgaacgtattgcaatagacaattgttgaatcaggatgtctggtaagcacaatctttccaaatgacacgtacaagctagatgccaccactggacaacactgggtgaggcaggtgggctataaaacactgcgaggtggtccaagcatgtactcttttgctctgcttataaaggaaatcttttttctccct

SEQ ID NO: 299107 - DNA, 693 bp, Homo Sapiens
  misc_feature (573)..(573): n is a, c, g, or t
  misc_feature (587)..(587): n is a, c, g, or t
  misc_feature (618)..(618): n is a, c, g, or t
  misc_feature (683)..(683): n is a, c, g, or t
agatggggtcttcctgtgttgctaaggcaggtctcaactcctggactcaagggattgtccggcctcagcctcccaaagaatcgggattacaggttagagtcactgtgccacacccagtatttctttttaactacttctcaaagaggaaggcttccaagtttagggaaggaagttcaggggtgcctcaataacacaatggtggtcatgagcaccaacaggaggccacactggggtgtcaacaagctgcttctcatgatttgctgaagacaaggaaggtataaaaacagaaaacttacatgggcacatgtgagttttacgggtcagctccatgggccaactgctccatggcgttttagtgtaacaaagattgacctcccatcagagttgctgttgagacttctgagcttcccagtcacaaattccttgctaattaattattctcaagagtgattattacgagtttgactttaaaatgatttcttgagctcagtcctaaagcagcctgcagcgcacccatcccacttcccaggccattcaggacaacagagaagcctcccatcacagagcctattnccatacaagctgtnctcacacgttcttctggtctcaaactttctncagattatcttatgcattcattcgttacatgctcgattaccattggtgagcatcttttcatgcangctctggtca

SEQ ID NO: 299108 - DNA, 756 bp, Homo Sapiens
  misc_feature (642)..(642): n is a, c, g, or t
  misc_feature (677)..(677): n is a, c, g, or t
gtgctttctgttagaccttctattgacacgcctttcttctgcaggtctgctgtggtttgctgggggtccactccagacccttttctcctggatatcaccagtacaagctgcagaacagcaaaggttgctgcctgctccttcctctggaagcttcatcctagagggacactgacctgatgtccgctgggattttcctgtctgtggtttctggtgacccctgttgggaggtctcacccagtcaggaggcacagggtcagggatccgcttgagaagacagtctgccccttaggggagctggtgtgctgtgctggggggaatcctcctcatttggatcagctgattttttcagagccggcaggcaggaaagattaagtctgctgaacctgagatgacggcttcccctccccgcagatgctgggtctcagggaggtgagagctctttctgtaagtctttgactatagctgctagatttcctacagggaggccctctccagtgaggagggatctaaagaagccatctaggcatgatctgccacagctgcttttgctgcactgtggtgaattctgctcagtccaaatgatccagtcttcttagcactgtcaggggaaaactaaagccacagtaatgatgggcaactccngcaccgggaacataatggttccaggtccactacangactgttgtgttggcacacgcgattctcgctaacgggtcttacctgcttggcccatggaagtgggactgcttggcgaag

SEQ ID NO: 299109 - DNA, 708 bp, Homo Sapiens
  misc_feature (227)..(227): n is a, c, g, or t
accttatttgctttatggccaaggcgggaaaacaacgttactgctacaaaaaagctactcggacatgctttagctgataattgtcccccaaatttacttagtctcaaccaacgtaagccttttgccgctatatgaaagtttataaccgaccacatcgggtttcaaaaaaggggtgaacaccccctttggagataacctttaaaaaacactctttatgaccttgtaanattcccaccttctaaagccctctcttggtttactatatgaaatatgacactgaactataagaaatgtagaaccccgtggtatagaggtggaaaagattttccttgcctttttaattcttaaacaatgtttcaagacaaatatcgaagttgacattggtttttttgtttgcaaagatacaaattctcgttgagtgggccccattgatctaaatccactagtttcggaaaaaccccccgccttgctcctcacaataaagcgggattgcccgcttttggacctctctcccaattaaaattcaattatttatggagcgtaatcccaatttgaaaaaaacctggccttaacgagacaaatttcttggtagggctcgggtcacaacccgggattaagccttgggaacctgaagatctgccccaaaggaattcccccttttggctttcgcttaaagagacctttataacctggctctccaaactaata

SEQ ID NO: 299110 - DNA, 696 bp, Homo Sapiens
  misc_feature (506)..(506): n is a, c, g, or t
  misc_feature (634)..(634): n is a, c, g, or t
aaagcccttaaaacgtctttcactgctgacatttaaaatgtaggtaggatacttttgttattatcagctcagcaaatgatttctttatctaaaagattattagagaaggaaagaaacatttaatatatgctaagaaacaaagaaaatagaaaggcattattttccagataagctcactgtcagttgatgctgggtgtcaacactgggggtgacccagtctgggaatagactaaaatgaggcccttccagccctgggggctatggctgatagggaagggaaataaatacacggtgatcccattggccacgtaagtcctttcttcagaggcaccgttgaggtagaggactaaagaattgcttaggaagaaaacagaatgtaacaccaaagttaactgccacagcgattctttgtctctaaatgtacagttctttcctcttgaccaagcaaaacacaactccagtatttgatttctgcaatgaaacttgggcattttatggcaaatggngcatcttttaaaaccacaaaatgggcattctccccctaaatagcttcttaaatccattgtagggagccatccctaatatttgccaccattttcttgggactaggaaacaaaaattattcaaggggctngcattctagagtggggtggagtggaacaagagcttctagacagggaaatggaggcttcaccc

SEQ ID NO: 299111 - DNA, 672 bp, Homo Sapiens
tgtgttggcttattttaaaagggcaccatattaaaaaagggctacaagatccagaatgggtatgttttaggtacaagggggcgagcctggcttcaaaaggtggctggaaaaagggcactggggcgtcatttccggatgtttaactgtacacaaggcggttcacaagacggcttaaaacttccattggggagggccccttacactaacactctttaggaactgaggttaccgcttttgaaatcaactttgtgtttacagtaaaagatacatgactgtatttaaaggtttggcattacccaacgaacttacgggtgtgggtttcccttcccaggcttagttgttcccggaaaaacgagggggccaggctggtgaaggtagaaaaagcttggcttaagaggcagccaatctgggtttatggctaagttcctggttgaagcttggaggccagccccctctgttccaggataatttctttgtgaaggaggggtggcaatgggtacctggcggtattggagggggttgccttatacggggttgcccagtgcacaatgttgatgggttctgagcgagggtgcccgctgtcccccttgggttttttttgccaaccgggcttaagcaagtgaggcggttttggaaccaaggtgagactgtaccacaagggcaaaccgtttg

SEQ ID NO: 299112 - DNA, 273 bp, Homo Sapiens
cttcaaactcttcaacctcagaccccatgggagtgccctcctcacttctcacatggggtggatttttacggctcgcttcttcatcagaaatccccaactatggccatcctcagacactgcctgcggcctgcctgcagcactgccttgcgttactgcccgtcacagcttttgtacatactttgaagcggacctttctcttcatgttccagggcggatcctgtgtgatgaagccaccaagttcttcatgcactgtgtctgacaagaagtcaacaa

SEQ ID NO: 299113 - DNA, 692 bp, Homo Sapiens
taccggttcgagtgaaaacaagtgcaactttatttcaaacctgcaaggataatccctctcggggggggcaactccaatttagcatttttccctttacctttatgtaaaaagaagagtggaaaaattactgcggtcaggacctttcctttcaaggggaaaggctggctgggcttcccaaggctcggggcttcaaaagccttaaacgggccaccgtctttgaaggcacggtccccggagtaggtccttcccagccttacggaaaggcccaggtctttttaccttgccaaaccccttcaaaaacttactaagggtggccaagccatctacctaatgcacgaagaaagggtacatgaagcacaattgtgcgctgcgccttatcgggtggatctccttagcaggcaactgcttgcaatgacttacaaagaccgaccgggtaacgcacttcctgggttacgaacattttccccgggtctattaaacccccaggttgttgaatacccccacggttgatcaagccttccttttaaggtgcagaaccactttgtgaaggggaagcacgtggcctattacccttttttaccgccttgttaacaagctctacccccgacctttttgtgtaactttccctagataacggcttgaaggccctacaaaaggccttatttataccctttcccgaaggtttcacccac

SEQ ID NO: 299114 - DNA, 484 bp, Homo Sapiens
  misc_feature (388)..(428): n is a, c, g, or t
gaggtctggccccagcatattgcaggggcaggaggattaactttatttaaagatacagctcaccattatttacttttcaaaaaaggaagttggatgtgatattttcacagtcaaccttaaatgacccatccactccattggatcagacgccttctgaggtgtgtgttttgcagccgccccaccctgatgagctccagcgacagagttcctcatatcagacccatgagagtggccttttatggaaggagcagccggctggcagcagctccctaacaatcctgcaagctaagatcctctcgaccgagcacaggagagaattcaggggcagggaggggcaaacatttactaataagagggcttgagaagatttaaagtcctttttgggggnnnnnnnnnnnnnnnnnnnnnnnnnnnnnnnnnnnnnnnnntcataaatactcttttctgaccaaaaggaggccagcctagatttctgtcaccaaca

SEQ ID NO: 299115 - DNA, 792 bp, Homo Sapiens
gttgattgaaaagaatgcaggctaaagatgagcggaggatgccagatctactgggacggcggcattctgacgaaccctgtgtgatcaggggaggaggagacgctccccttgaccactgcagggggttctggctgttactcctctaccttcacacagaaagacctgggggagtgcaaatgcccgaagcagggctcatggctgccgcgctctggcgtgcccagaccatgcttttctcatatcccgcgggccggtatgtcctactgtacagggcctccgtgcccgcccttgctgactatcactagctgagaagagacttcttcacctgtgccaggcaggccttgactctgccacttcttttggttcagctatgtggacccctgaacgtccaagactcatacccgggagacattaaactcggccgtgtaaaatcgagtgaccatccgtgccagagaccatattgtggccctggggcgaaattatgccggccgggcggaccaacctttctctggtggtcggcccccccgtggggaatccatttttgaaaccttacatggggcgttattttcaccatgagcgatacatttctgtcgaaatttccttgccctacggggcccccgcttaaaatggcggcgcctgcccaatccgagctcctaaaagagttaattatagggagccccacaaacgagccttgagcaattattgggccgggccctactccccttaaaccgcctcggaaatcgaggttcccgaatcccttgacgcaatgcacaaagcgcgcccaggggtgggtcc

SEQ ID NO: 299116 - DNA, 324 bp, Homo Sapiens
  misc_feature (54)..(115): n is a, c, g, or t
ccgaagccatttcccctaatttaaaatttcccttttatccctttcaaaggcccnnnnnnnnnnnnnnnnnnnnnnnnnnnnnnnnnnnnnnnnnnnnnnnnnnnnnnnnnnnnnnggggtggttaccaagtgtaaccattaaacccgcaattcctttaaattttaaggagggtgaaaattccttttcccgagggagggcccttcaaaccagggaaagccaatgggttgcccacattttggtgggaaagcggtggaacacaaatttgtgctcccgggcctataagggtaaagccccaccaattatagagggcactaaaccttgat

SEQ ID NO: 299117 - DNA, 680 bp, Homo Sapiens
  misc_feature (576)..(576): n is a, c, g, or t
  misc_feature (622)..(622): n is a, c, g, or t
  misc_feature (646)..(646): n is a, c, g, or t
gtttcaaataagacatatccaggtagctgaaagcatgaaaaataaactgcgactggccatagattggcgaacataatgtttctgacacattccacatttaatttcggatgccatgatatcagcacaacgcaggggggaaacctaatgcctttgggaaacctgggctttctgacattgtgactgagggtgcatacttctgaggttagcatgccctgctgcttgggactcataggggattttgtgtcagggtagcatctattcgcgaactgtccgggggaaagactgagcccgaggaaatcccatgaatgatatgtttgtggcggccaggaagcacgatcaagagttatctagaccagacgtgtcttacgaagggaggcctaatcatgctcgtcttcagctacatggagttgtgcataaatggctgacactttcctatatctgtactcatgacgcgagccaatggactcagacaatgagggtctgaagaatctgagattgacgtacattttgtgcagaggtgtacatattctataggccgtcaagaccacatcaggctagcaaggaaagattggcctngagccgaattcatgcaacctgcggatccactagagctagagcgccntcagcggtggggtgctgcagcttntgttcctttaaccaaggcttatttcgaactcggc

SEQ ID NO: 299118 - DNA, 748 bp, Homo Sapiens
atcacagtgacacttttcacagcacatcccttcaaaggtagtcaccatttgtgctggttaaaggtcctagaggggactacacacgcaccccaaaaaatgtttgataaactctaaaacaagattgctcttccacaaaaactggggggcgaacctcacccagacacactaggggcctccttcacacctgtgcagaaaactaatactgctcctgcgggctcatccatggagtcaaatttatcgactgcaattaacaaaagccccctccctttttcacaacctggggcactaggcatcgggattgctaattacctcgtgtggcaacatcccaatatggttaatggcgcgtcatgccccccactcattgaacaaagggggagcaaccactctagggcaaactttctcccaagcactggaaataggagggggaaccacaaaggaaagggccctgccattaataggcaaacatacaaggggagcatcaaatttcaaacccccattagacttgggggaaacatggagcagggaaatgaaaaaagcaaagacggagggggagtgtgtttaccctaaaagtaaagacaaacgggggaagcccctttccaaagggggaacccaagcgataccttcaaaaagaacaccgccctctaaaaacatgggggaaagaccacccctcaaggggacggggaagactatacccggtccctgaataaaaaccacagaggggcacaaccacaaatggaaaagacacgcg

SEQ ID NO: 299119 - DNA, 707 bp, Homo Sapiens
atggctaatgagacgtgctgtttaattaataacactgttggtgttcactgaactggcatgcgcaggtacgtttaatgaattgaaccccacatggagactgagaggagctcaatacgtatgcggatccagcttatacctgggatatggggcatggggatggtgtttacctatgaactatatgcatgtttagtggcacaaaacagcacaagggtttgaattcatgcactctttctgtagaaatcatctttacaagctgggtgttctttttgcgcagatgactaacagacaggcagcgtttttgtgcaaaaggcctcgtgctatgacccaaggatctgatgtttaacagataagttcaagatctcaaattcaatactaagtttcaagtagaatgggggctactcactattgagagatggaagcatattgactttgattgagggaaaaattcttcccgtgattaatattctgctggaaagtccaagcaacgattccttttaaggggggagaatggataagccatagcgttacaattaggattgagttttttttgaccaccccttttaaagccaaagtgttcggtgataagggccatctctattaagttcagaaaggccaccccaaaattggggagaaaggtaaagggacatggggaccaaggggagacaacaaatgggttttaaaaaaccacaaggggttttaacagtctt

SEQ ID NO: 299120 - DNA, 536 bp, Homo Sapiens
agggcatgcctttgaagccctttgctggaaggactatatgacttgtattctgcctgcagatattggtataggcttggacagcctagggggacaatgtgtcgcactctgaagccgtggagaatgtaaggacgttacgtaaacgaacagtcgtactggtatagggggatgccttgcaatattccggtgtgctccggaaccagatcttcactcacaggctaatgttgctgcaggggtgaactttagggattcatgctgtgagttgctatttagagtggtagaatctttgtttctaatagtttctttgcgagctaacatacgtggccatctatgtaaaataccttgtgatgtttgatgtaagccttatggcggccaaaatgcacatacctagcacagattcactacaaataaaaagcaatgaattaacatactatcagaggaaatgacttaaccacatagacattagtccaaaatggatgaaaagaggagttacaaaacaaccagaatatgccataaaatggcaggattaagcccttact

SEQ ID NO: 299121 - DNA, 524 bp, Homo Sapiens
tgtaagtaggcatttttttattaggatataactgttcctggtgttcttcaacatgtgttgcctttgtgttaatgaagaatctcagagccttttaaaaggtccattgccctatgcgccaagtattatattgatttggatagatcaagcactgttaaacagtttatcaggttggaaaccgtaccttaaacaactccagccggttgggcttcactcggactgtgtagatgtgctgcttcatttgggagactgtggactgggagaatgtatataacggatttctaactggtagaccacgcgcattttcaagtggtccagaacactgcccttattataccattcatgagacgggctttttgagcccgtgccaccttgtttatatacttcactgagatgcacatgcgtgacacttggtattcgaccaccaagatcattctgttcgcacatgtgccttggacttacattgcaattgacctggctgagctcatgtctcatggggtgtgagaacatgtcgtagatcaatgcaa

SEQ ID NO: 299122 - DNA, 682 bp, Homo Sapiens
tgtcatattcataaccttaactctgcactccaactaggcatgggagggaacatggaaagacatggaactcctagggaactggagggagagctcaaaaattctaggatactgcgagcaaatggggcggaggggcgcactcctgagctacagaagggatgttctggcggttaagataaagcacaagtgacacttgtttgcagagatcacagctagcattggagaacaacttgctggtcttgccattcctggaccccaaagagataacggacctgacaatattgaggcctacatcacgttgccaaacacctgatgactgacatgctaccacaaagttcggcacccatttgaaacctgagtaccatttggctgaggcagctatgttgggacatatgccagtactctttgatgaagaaaacgatctatcttatatttatcccctcaactgacttggcaccaattgcctggaggcagagaaaattccccctcttgtcgcctaacaccctgggatggtgctgtgaaagcaagaacactttataaccaaaatctttcttgtttaatagggacaactctaacaaattctaaattggttttgcccctcttctgggaacaagtaaaaggaaccccgggccatgtgttacggttaactgaatttttcacataacaaaggcgttttcacctaggt

SEQ ID NO: 299123 - DNA, 694 bp, Homo Sapiens
  misc_feature (355)..(355): n is a, c, g, or t
aggggctcaccgcgtcttatgtttgccgtaaagagggaagcctgtgactatgttccagtgacccttcagaccgatgaggatttggcccttatctccgatttttacctcgagaaaactagggtcctgagtcccccaggaatatggtgtgcctacgaataataccatttgcgatgttcagacagtaactactttgggattgatctgacgacgacgtgagaccccttcctagacctatagatagccacggccctgttgttgactgaaagttcacgctcggtctcaatcctaccacgtacatgtggaggctctctgaatgctctcatactggaacctgcctcagggcgcatgctgctgngtttacactatcgccccgcattggacactatgctacaacatgatattgggccttgccactgacatatggacaaaagcgctgggtcacctagccttatgggggaacagtccgcgacgactggcccacgttctaatgcctcaaattgcttgagagattttccttcaactgtccccgggccaagaagggttatgtaaaggtacctattaaatatccgatgtactagagaccttgttgttatggacgcacttgacccttgtggtatggggttatttccaacctttcacttttccggtaacaaagttttaccccttccttaagaggaaattcccaaataccccg

SEQ ID NO: 299124 - DNA, 675 bp, Homo Sapiens
gggtccaagaagctgctgttgactcaagaatgggcccagaacacgacagtggtgatgctggcgactcagacacaccagagaagctgccaagcgcttcctttaagggaaaagggggcaactcctgacctataataaaaacagccagatgccgaggttgctaatatctgcggggagaacacagagcccatctgtgacattttgaagagggaagcacgacgtactggcagttttgctgtcacatctcacacttgatcacaggtggcgacacgaaaaaacagcgcctggacaggattctggactatacgcggatttagcacctgctggggtctcggagcacaccctgtgcaggtgagggcgatcacctcgcacatctattcagttacctttgaaccgtagaaaaggaggagcgtaatacatcttgatatgatcatgcacgacgtatttctagttttttgcatatagcagacatgttgggaatgggcaccgcaaaaacacaatactactaacgtcaggtagtgtctgtttttacacccttggggaggtgttcccccactcttattgtacagagaggtccagctgaaaaggaacccaaaccggtcttgcactatccaaggcggtaaaagtttaagggaaaaggccctggctggccgggagagtcctttcattggtgtggga

SEQ ID NO: 299125 - DNA, 694 bp, Homo Sapiens
  misc_feature (152)..(277): n is a, c, g, or t
tgagacggagtctggctctgtccaccattctatagtgcagggttgcgaacttggctcactgcaacctgttcccgtccagttgacgccattctctctgcctcacgatttcggtgggggtgggaaacaaagggacgctaccacgtgcgggtaannnnnnnnnnnnnnnnnnnnnnnnnnnnnnnnnnnnnnnnnnnnnnnnnnnnnnnnnnnnnnnnnnnnnnnnnnnnnnnnnnnnnnnnnnnnnnnnnnnnnnnnnnnnnnnnnnnnnnnnnnnnnnctggtcaaaggctgctactcttatatataccccctacccctccaaatcttccgggggaaagctctgcattattcctactacgagcccctgtacataccatgaaatgtgggaccataacagctttacacttttttgaaaatagctgctgctcgggctacaaaattgattgtgaagaaggacttgggccataaggaggcgcctgtggactatggggagttcatgcaccccttcttttcccaaggggctgcaactaagaaaagtatggcgtgggggctcatgggctttaaacaaggagggggagggggttattcccaatcctttgtgggtccaaatgggcttttatttttagaaagtaattgaccttgctttgccccctttccagaacaaaacaggttaacctgggcaaaatttcaatgc

SEQ ID NO: 299126 - DNA, 694 bp, Homo Sapiens
  misc_feature (230)..(238): n is a, c, g, or t
ttttaggttattgccgggttaatgtattttgttttttggtcatttaaagtcgccaaacattaaggggcctcagcaaggaaaaaatttgtcacacctcacctagcggttttcaacgacttatgacgatgggtgggaggagaacgagtttttaacttgtatggtgctttttcagaatagcttgtacagggcttttattaaaaactgtgaaaaactgttaacaaagctctggnnnnnnnnngtgtaaagtggcatttaacgccgagaataaggtgtcttggcgaattcatgtagcgccgggggactcctcaaagtagtggggaccactcccctaagatactaaacgttgcgaggtttttattaaagaaaagggcacagctttttaaggtgaggacactgaagtttctgacttaaagggcatgcgctaacgagaaattttttgtcttaaaccttacgtatggagtgaagaggatggggtctctaaagagagggggaaattagattaattgcgtttaatttaattggggggttttagtgggagaatcctttaacgcggaacgcatgaaggaattggctcttttgaaagaagtatgggttttgtataaagcccaatttttttctggggcttttatgtgcatttttgcttttaacctgtagggttatgatgttcaaaagtgggggggtatggtggcgtttt

SEQ ID NO: 299127 - DNA, 695 bp, Homo Sapiens
ataaagcgtttcttttcctaagcaacaccatacagggacctggccaaagcaccaaattgggcatgtcctgacctacaggagcttaaatcgcccagatctggcctggcttaaggaaacagttttcttcctgatgccctgttgggtcactatgcaaatccggcgcgcgtgccttgtgtacacatctctgtgatccgcataaacgaagacgttcttcaccatgcgcatggttctgttcactgacagcgtcccatgctggacatacggcacgttcttagaaccaacctggttgtcaagcatgggctgcaacatggcacttgatgagccaccagcctggaacgagtgtctctggtcagactgtactgaatcaaagctgggacagacgcctttccttctacatgacgcccagcgatgatgttgtatacttatgatcgacagaaactcctcgagtactagggtcgcctacagaatatgggaaatcacggcccatgtcatggacttactcaaggaacgcttatacatgataaagcttgctcgattattctgtggccgcgtcagacggacagggtgataaccgctccacctacgatttgattcgtgagggaattcgcaaaatctggttgtataccacggctcattagaaaacacctttaatgcatcggggtttccgaggccccaatcacccaaggctttttccc

SEQ ID NO: 299128 - DNA, 699 bp, Homo Sapiens
acggggtttgcacggcggtaagacagggttaacattacacccgcaggggatacacctccctataactcatgagagagttgggattacagggggagccaccgcccccgggcaagattaccatgcttacgccggcctgtctcacagacacaagacatattgggctgcaggaaactagaattgtggtgatgtcagccttacacgggggggatacacattcagattggagtgtggacctatggtggctcagcaaaataaagcggaaaataactctctactcactgcattacctcatataccacagaatactatatgcttgacaggccttaagaacctagactgattacatgggagagctaatctcgtgtcttttattgcagtgcactgtcagcgtacgccaaatgagaacacttgctgaacaggcggagaacgtgaggtgatacgattgtgcggcccggaaccttcatgggaacctaaagaaaaacgagtggtcgttgctgacgtggccgactttataacccagggttgagacctttggtgtggagattagcaggaggaaacatttggcgcacacgcttctgccagagggaaacacttgggcaaaaatcggctttctcctagaatgttcaacacctgttgccccgggggccacgggtaatataccgctcgcaccatgttgagcctcccattttgctttcctta

SEQ ID NO: 299129 - DNA, 182 bp, Homo Sapiens
gaaaataaaccggccctccataaaaattttaaaccggccccccggggtttttgaaatttaccccccctttgcgtgaggggcccaaaaggttgcacaaactgccctagtccaaaagttttaattttttcttggggcggggacatacttaaaaaaatcccgttaccaggggtgtaacctctaaa

SEQ ID NO: 299130 - DNA, 619 bp, Homo Sapiens
  misc_feature (132)..(141): n is a, c, g, or t
  misc_feature (303)..(319): n is a, c, g, or t
  misc_feature (370)..(411): n is a, c, g, or t
gaaatttttgggaaaaacccctgggggaaaaaccaagtggggacccccgtggggaatgtgaaaaccctgggcgaaaaaagggaggaaaggggtttttcaaaggcctatgttgtccttgccagtttttggggnnnnnnnnnntaaagacctctcccgggaaggggtaaaaaaccttgggggggcaagccaaaaaagcccggggtttcttggaaaccctagaaagtgggggaccgcccccttgtaagccttttgggagggtttcaatccccaacccctatcaaaagtttacaacccagtagggannnnnnnnnnnnnnnnntcaaaagaaaaaattgatattgtgggattccccccccagggaccccggggnnnnnnnnnnnnnnnnnnnnnnnnnnnnnnnnnnnnnnnnnngggtgttcgatagagaaagccccccccgccctttttcccctgccagttccctgggggcagagaacagctttcctgaaaggatttaggggccaattcctcacccccaccctaaattttaaacggtttgaaacccttggggcccttttttggcagaacagaccctgcccctgtaaagttttttaaaccaaaaaaggcaggggcctccccc

SEQ ID NO: 299131 - DNA, 722 bp, Homo Sapiens
  misc_feature (489)..(543): n is a, c, g, or t
agcggaggggggctttcttttctttaagaaagggggtgcgtgggggcctttaggccagtttaacatttcttcgcccccaaaacccgcgccttccaaggaaaatttttccccggaagcaagccatgttatagggaggcccctgtccaaactcgtgagggacgaagatcttaaagtgtcccgccaaaagcccctattggttcaaaggaaaccgcggggctttggggccctccaaattatccagctcaaccctggttgggaagggcctctctatcaaccgtctgttgtacagggcctgggccaaccaattttcccctgatctcctcacggaaggctctgtgatttgcaggtttatgttcaccccgtaaaaggaggggtgaagtttaacccccacttcctggtgggttttgggaaaaaaccccttggcccagcccttgcccattagatccgctaccctgggggcgattgtagcttttccatctggattttaannnnnnnnnnnnnnnnnnnnnnnnnnnnnnnnnnnnnnnnnnnnnnnnnnnnnnngggttcaatttgctctctcttggcaccccacccttggcagcatggtccccccagcccagcttagactgtggcaatttgttgagtcataaacatttactgacccctgttgcttgttgcccactggggtgcttttcccttagcttttggaggcccccaaaaattaacttgttaccccgtcg

SEQ ID NO: 299132 - DNA, 524 bp, Homo Sapiens
ttttattttacgtttgcttttccggatccaactgggaattttatagattcatacggggcctttctatgcttaaaatcccgtctgcgacagggttatactgcgtctgggaaaaaggacacctcctgccttattgagcaccttttccccaaacccttttttacgtgattgtgaacacccgctcgtgccaaattatacttgggttacttgttggagagcggtgcatatgaacaggctagagtagaaaacaggcgctttgtacagatttgcattatatgctgttcacggcaccagacgccttagtttattcttcagatgttgttgtaaacagaggatccgagaaatgagcgttaccgtctcgttccatgatcacttcactttgtgcccgaggaaacagtgcgtttatattcactgtcgcagctagaccctgtccggtgaacagggctcatcacctgcggttggtgctatgcaaaatatcctttcctttcaacgtgaacagtatcttgtagagtgcttttacgcggagg

SEQ ID NO: 299133 - DNA, 465 bp, Homo Sapiens
  misc_feature (95)..(95): n is a, c, g, or t
  misc_feature (112)..(164): n is a, c, g, or t
  misc_feature (183)..(183): n is a, c, g, or t
  misc_feature (185)..(185): n is a, c, g, or t
  misc_feature (286)..(295): n is a, c, g, or t
  misc_feature (355)..(355): n is a, c, g, or t
gccgggggtgtttgatattccgttgggtaaagggcacctaaaactcgccccgccggagaaacccccgcgaagtgtgttcgccctctgggaatttngccgagatggaccactnnnnnnnnnnnnnnnnnnnnnnnnnnnnnnnnnnnnnnnnnnnnnnnnnnnnnttccttaaccccgcaaagngnttgaagatcttacagggggtggggtttcccaaaaaggggtaaaggaccgccccgcctccgccagaaccacatgggggggcctttgcttttggtggaagacnnnnnnnnnngccgtggcgaatgtgggctgtatacgtgaaaaactccggggaatggaaaagttattcctnagaaaaaaccgtggtgcaatttcccttttttgcaggaaaaggaaaagaccttggggagattaaaagggggggcgggcatagaacttgaaatgggggcgttttgtgagggc

SEQ ID NO: 299134 - DNA, 684 bp, Homo Sapiens
  misc_feature (510)..(510): n is a, c, g, or t
gttcaagcaggctttatcaagaagcatgcaggggctacagatccaacgatagagaaccttgcagggccccatacattaattctcagaaatgccgactgcatgtgaaaagcccaaagaccccactttatggacaagcggaggcatagactcagacgacttctgcggtgggggttatgtaaccggcacagcctgacaatcttcaaaaaaactgaatcgcatgtcagaccgctttacagccgtctctaagcgaaaggagcaggcgcgtgctaccattatggtagctaaaccgtgactttgacctctacatactgagcacacaatatgatcctcgggcatgaaggggaaaacattactacacataaggcttaagaggagttagaggtcatttctggagacattatatgggccgacactaagaaaacttgaaggttatggtacgggctacttgtgccgaagcatagggagtcctcctagttcacggcacagcaacaagatgtgaacaagccgttntcaaaatatctttaaagtgggcactatagaaagcctcgtggccaacaccctgggagcagtgtgcaataatctcaaggggggagattgagtgggtctacagggttagaccatctgtgaacacaaggggacccgggcctataaaaatccacaagttcctgagcggattgtccccat

SEQ ID NO: 299135 - DNA, 702 bp, Homo Sapiens
agaatttttatatctttcgcagcactctgaggcaggcgcgtccggagttcatgcatgatctcattaacaccagagattgggctctcaccgtccttcttaacatatagatgatttacgtgatgctgtgcaccttctggacctatgatggctgttggcgctccatgcatcatgatgtaaaccagagacacgcaaggcacgatggtagacgccacaggtgatggacccctcctctccttaggggttattcctggagtgactccctcctcttatcagtacggatgctggcagagcctgccagcctttcctctgtgctgtatgagccgacagcacgactcatggcacccctccctgcaggacagggggggaatggagcccctgtcacatggagctggacttgatatgacagcgctgatctggacatgactaggcttatgctggagggggagccagcggctgataggcaggccacactgctgctcatccatggctgttcagctctgaacctacgctgtacttgtagaaaatgtgactcactagccaccacgagggctacagaggatccgtaactatgccacaggtgcgctaggcacccgtagaagagcatgcatttccgtatcaagttgattacaacaggcagctgcccactaggtcgacagtttctatgcgaccaatgcctgacatttgttttaggctacgagcctt

SEQ ID NO: 299136 - DNA, 636 bp, Homo Sapiens
  misc_feature (91)..(91): n is a, c, g, or t
  misc_feature (108)..(108): n is a, c, g, or t
  misc_feature (164)..(164): n is a, c, g, or t
  misc_feature (265)..(283): n is a, c, g, or t
gcttaggtcatctgttaactgtccaaaaagtgacgtaccctccacactgtgaatgtttaagggccaagagaaatttcaaaactgttcagcncttgatgaaatgaaccncagcatctgaagtttgatgtccttagcccagtgccagaaaggaatgacccagaganctgatgttgttgtccatggacctgatgtttcttatgagattccaagtagaaaattttattagattttgaacacttaacggctggataaggacaactttctnnnnnnnnnnnnnnnnnnngtcatatgtggcaatactcttgtcaattaacatattaagtttggattgaggtaagtaatacttgaaagtgccattaattaataactcagagcatgaaaattatttgattaaaagctcaatgaggctgggattacaggtgtgaagccccatgtccagcccatggttttcttttcctgcttctagatcatgatcgttcttctctctgcttctggattgagactacttcttttccctctactacgatgatgcctttcacgagacctgtatcttgagtgacttctgcttcttgagggctttctttgggtttgggtcggcccccaccattttcagatgaatgtatttatttattgaga

SEQ ID NO: 299137 - DNA, 685 bp, Homo Sapiens
taagatgcggtcgaaaactctaatagctcatcaatactggagagagaaaccacatttacaaaggactaaggccacactgagacgagctggagtgtagacaactagctttcactttgtcacttgagcattcggaacaggcaaatgcaaatgattatcaattcacataaaatacgaaggctttttattgagcagacgtcttcactaagaaggcctgccttgtttctacccatttcattccactgtccaaggaaacagggtagttatttgtctcttaagtgcctcaatattcgaaagctgattattccagatagccctatggcagcatatactagtgcacggtgcttggacttttatcatcataaattgctcttacaagttaaaaacaaagtaattaattaaaagccctctgtgtccaaaaaatgcattgtgcacctgcatgcaattttgagtccactggcacgggagttatacatccgaggactctattccttcatgtaccaactgctgaccaggtgtctattacatgccaagtactgtgtaggcgtgaacacatcttacttgcctaacgcataactagtctcgtacgaagcatggatgagcccttgggacttcgaccctccaactaatgtaagactcgatgacctcccaggcatatacccgtatcttgagacctaactctatactg

SEQ ID NO: 299138 - DNA, 570 bp, Homo Sapiens
  misc_feature (73)..(84): n is a, c, g, or t
  misc_feature (174)..(182): n is a, c, g, or t
  misc_feature (213)..(227): n is a, c, g, or t
aaaaaacaaagtagggtttttttcctattatggggcccggtaaaaaagagagagggggccccccctctaagannnnnnnnnnnnatttccaacgaaggaacccccccttttacgttttaaaacacaagttgttttctccaaaaagccccccccgggattcaggtgttgttcccnnnnnnnnntaaagagtttttggtggggagaaaaaaatcnnnnnnnnnnnnnnnacataaggctttttccacaggggcggcggttggggcgggtaataacaaataaggcgcccccagtaggtaaattaccaccctgttgggtattaagtatgagaacaacttatccaacttttgttattataaaccacaaaatttgttgccccggccacctttgtaggaaggccccccacaaaagcaaccaggagcaacaagtgggcagcatttcctaccggggggaatattttttgtagttattagaagccattttgcacccagcgggtgttctataaaaatttgttggtaataagccactgttgcgatcccccccgttgaaaataaacatttttcctcctgccgc

SEQ ID NO: 299139 - DNA, 780 bp, Homo Sapiens
  misc_feature (696)..(696): n is a, c, g, or t
ttgattgaagaaaccctaaaaccggcatatccatgccggaacccctccctccggacaccccctgttgacaacacgccaacctactggacactcagggccctacctgccgacctcaatttagttaagtgtcatatgaagagaccgctgataggcctcaaaatgtgatttgatgcctctcaggcccatcgactcgcgggaacaagtcccttaccctcctcggggaagcagggcccattatcgtgagacttgccacactgccatacaaaagctgctaaatcatccataacagctttgagccctcttttgctgccttgggcttgcgttttacgagcttagcaagtgcacttcgtgagtgactggagcctccttcccacaacgcatgcttttaggagagtcgaggagaacgtgctggtccttaagaccatgtgaacacacgttttataggcttgcacaaccactaagcgatgggggacaggcaccaatgactccgggcagcctttggagagtttgacagttacttgcagctgctgacgctacatacataagtcgttgacgtccacggacagacagtttgttatgacagggattattttctcgtgaagacgttcacaactatttgctgcggagcctttctacgtttagtgagacctctccaggggtggaacctggaccctgggcacctttttggggggaccnactaatgtcgccttccggaaaatggcctggtcaagctcaccaaagggcggcaactttggttgagaagaacctgccgcttctttc

SEQ ID NO: 299140 - DNA, 681 bp, Homo Sapiens
tttttttaaactgagacttcgtgcccctcacctctgacccacatattttagttcagtaagggtttgggcaacgtctcttagaacataactcatgtaagaaaacctgtgtttgtagagtattacaccaaagcagttatctcctgattatttcccaagatcactctggttacctaacagagcaatcatgtttcacctttacgtatggaaaatattaatcctgtataaacagagccaacagtacaatgaattcctacatatccatccaatttggcttcagcagttactaactcatgactaatatttcatgtattacacccctacgcatgccccccacatacactttcaagcaaactccaactatatccattaacccacaaatacttcagtacgtacctcttaaataaggacttaaagcgctatcagtatcatacactgacaaaattaaacaatctgtctttaatcgtgtattgaggcaaaataacttgttatgctagggaagcaattaaactcagctaggttttccttgatacagagtaagagtaggcacagcacaaatgccttcacttgctatatagttagggccataatttcaagttcttacctacaagccatttgtgatagggtctttggaattgcttttaatgaaatgcacattacaagaccaattttttcccctcagct

SEQ ID NO: 299141 - DNA, 669 bp, Homo Sapiens
  misc_feature (213)..(214): n is a, c, g, or t
aaccgttctttactgtattccaccgaaggggccaattatggaaggaacggatccaagagccttagggagctatgcaacacgggaatgcaccacagggcacttgtcgatcgaagactgggaattgccaccaattgttcagaaaactatggatctgatcgccttgactgcccccgggataaggatgtgatgggtcccccaaattgaaggggcagnnaactttagacgtgccctagcagggggcaattacagtttatgaatgccaccgtcagttgatactgactgcgtggagcccccgaaggcgcggcttaagcttagaacatagtgtgcttattcaaatgagggcgtcccaaatcttagaaacaggttggtcaccctcttccatgtgaaaggctaactattaccccttttcttgacccgggatggaaaatgggctgtcagaatcccatgctcctgaggcctttggtggataaaaaattgcgggggattaaacgggaattatatattgacccatgggacaattaattgagatccgttttttaaagggccacagcttctccatgggccttgaacaaggacccgggattttcccactcccctccagggtttatttattgctagggctctaaaattttacagaatttggggaggcccccaaatcgaaaaaggacc

SEQ ID NO: 299142 - DNA, 738 bp, Homo Sapiens
tacttgtttagaaagtctgaagcatatttttatgaaacagcgttcacttacaaatttcccagttgccgttgtgttccccaggcttaacagacggcctggattattctactctagggcttgcatactcagctcggacactaatcctgctcatgacgcttgtgttgaagggatttgaggggacccttcaggttgtgattaccgccggttatttgcacttgattgttcgacattgcatgatgtgctgggagccaggcccctgtgttgtcactaatttgcagtatgggtgttacagggctcgagagagtgcttctaaaggtggcccccatatacgcaatcggcagaatacggctgaacctactagagtttgtgtggatagagggaggacactgatcacccttgctctggctgtgtgccaccacaggggctgatgtaatacgctgcggatccgtggttgatgaatgaacttctaccctggaaaggagcaatccctgtattcgtggatccatacgccttcctggtgcacgtaggtcaataacaaggcggcttaggatctgcttgccccaccgtgacagacgtagatgcacttgaatgctactgaggagccctggacgtcgcagagggttctgagggcaccctgacttgtacgatcaaacctttggccaatttgtggcggcactgtggttgttgaccactctatgacttcacttcgttgtggagcggaaaatcaccttaaagggg

SEQ ID NO: 299143 - DNA, 331 bp, Homo Sapiens
ctatctatgcttatcaaacacggggggcctcacaaaatccgggaaccgcaaaattcgcttaaaagtggggagattttccagaaccacccagattttgggctttttgaaaaaaatgaaagttttagtaccatggccccagaattttttctctggcaactttaagctggagcaaaaaaccccttgcccgttccagaaagggacatgccctccagccagtttggaaaagcccccaccttaccttcttattatcccaaaaacagactcagggcttaactcatttaggccccttggcgggccccaaaggaactaaagtttgtcactctttttaagg

SEQ ID NO: 299144 - DNA, 791 bp, Homo Sapiens
  misc_feature (617)..(617): n is a, c, g, or t
tatatagaaccaccagtataatgttaaatagaaatggcaagaacagacatatttgtcttattactgatgggaggaggaaggtacccaatctttcagcattaagtatgattgttagctgtcggtttttcataaatgcttgtttaccaagttgaggaatatcccttctattcctagtttgctgagtgtttttatcacaaacaaatgttgaattttgtcaaatggtttttcttcataagttgagataatccatgcgtgttttttgtcctttattagtagattatattacattaatttccatatactgaaccaagctttcattcctgagataaattacactttgtcatcgtatatagtcattttaatatgctgctagattcagtttgctaatattctgtcaaagatttttgtctatatttataaccggtattggtctggagttttcttgtgttatctttggttttgaaatactggcctttgagaatgggttaagaaagtgttcccattgatcctatttttttgaaaagtttgtgaagaactggcatttaaccttctttatattcaccagtgaagcccatctgcctaaggttttctttgatgaagatttttttaaaggttcntctttataattaatccaatctttggacttaccggttatttcaaatctttatatttttcttgagcaagtttagtaattatatctttctaggaattggcccttttattttagggtccataatccggtgggatattaatgggtaatgggtatcccctaataacctcttcaaaattgg

SEQ ID NO: 299145 - DNA, 723 bp, Homo Sapiens
  misc_feature (521)..(521): n is a, c, g, or t
  misc_feature (548)..(548): n is a, c, g, or t
aattatctctttattgagacatgaacacacagctcgctgttcgctccaggaaacacaaccttcacgagtgcaatgctcttctattgaagctaatgaatccccacagaagtgcactcactcatgctttgatctttaaaaaacatactggacaggatgatgaacctccctacccacagtatatccctttttcactattgatctacgacttcccaagaggctcaatgatcacatgctgtttttcgcggcaccaccaccttaacagattcacatgcgcatggccacacctcatgcagcccccattgagtactataacttgcgacgatgacggagagtctttcaacactatctcatggcaccagagaagacttcgctgtaagtaatgtgtcacaaaacactgcaaggttttatacaccataataggcagagccggctgtactgattgttgtctcatgaatgaggcgtaccctgaaacatgccatacagctacacctccacaataggtctaaaaaataaacgccgtnacaatgcacgatgctatgacaacttgntgcattgaaggcactcacggcttaacttgatgccggccactcaagatgcaaccttaccttaactcattgcaggaaaacatcccctgtcaactctctccaagctagccaaagactaaaaatatacaagtctggaacacccttttgcaacttgtattgagacctaaccttatgaaaa

SEQ ID NO: 299146 - DNA, 783 bp, Homo Sapiens
acaaacactgcactgttcctagggagacaacctcagggcccattattggaatcttccacttgcagatagttcaacttacccgctccaagcagccacgttgaccagcattggggtcggaaataatctgtgtatatgacgattcaggacgaacattagtatcaaattaaaggggatacctgatcaacaaatgaatattcgtgcgggctacttaccgtaggagtgcacaaggggttgtttttgagaaatgacatttaaggttcctacgatcggaagctgtgctgattacatacaagcttggtgaagacagtcttagctttttgggcgcacggttgcacgctcgcgaagttaatgtgaccatgtgaccttctacagcatctcagtgaacagtagaagtgactaccagagagccggacgccctcaccaggtgacgttggcatgaaagaacttttagcatacttctgaagggtgagggtcaagtgcttcctagctggccaggcccattggccgagggcggcttttggcccctttcgggggggatgagaacacaagcggaatggaaggcgactagctggtgccaatttggagatactagtcctttcccaatttccaaaaaaatccaatctggtacttagacaatctgctccggggggacatttcattggacgaagtcaccttgggggcggagagacaccctgcgcgttttctaacacgaaaaactggggctgaaccacctggattatgtaattgtggtacacaaggcaaggtgtggtggttttcccacat

SEQ ID NO: 299147 - DNA, 683 bp, Homo Sapiens
aaaaactatcccatatttattcagaagatcacaaaaaaggcaaacacaaaactcttttcttacctgtaaaagtgaagttccatactatgggctcgatacctcacatttcagtcgtggcttcaggattccctgagagaaacaaaatgtacaggtataggtctccatcatacaccaatatatagacaaatgctttattgctgagtaaaaagataaagtcaacgaaatcccacttttgaaacagactttacacaaaaatgcggcctagttgaatgcttgcaagagcttgaccaaggaggcgagtggcacctttcttgccttcaatggctccaaggacagggaaaggcttaaatttgcttgcgaacttagagttgaactgctcgggcatgtcggtgtgctggtgggctttaaaagagtggttagaatagttgggctaaaatggctccctggtacttaaaaaattgagagaggccgttataaaagaaaggtttcggtgatgcctataagtgcccgcgactcccccacaattatcgggcgggatactgaaccaaagaactgggcaacaaactgcacgaggagcagaattaaactgccttttgggtttgcgaaaaaaacctcttccccatcttgcgcttgggggttaaaaaaagaaactagggaaccgggggatccccgggaagggccgg

SEQ ID NO: 299148 - DNA, 315 bp, Homo Sapiens
tatatccagacagattacaactttttgactttatgaagcatttattgggagggaaccccattggtaggcaaggagcatttgcacaccggaggggatggatggagaggtatattaagggtggcagccccttcctggataaggagggccactggatccttatattttaaggccaaggctgtgttggtggaaccaccggttaaagttggatttacacggcaatcttgtgccaggtcaaaggaggggcaatggggaccggccccacttcggctcctatataaaccaaactcggaggttaaggattggaaacaatttgaa

SEQ ID NO: 299149 - DNA, 527 bp, Homo Sapiens
ttaacatgcttattaatgggtggaatcagagcacatcccattgccacggcacaagtgttaacactgttaccctaagattctccagcctgtgcccccacccatccatctgacctctgcctttatggtaaatgacacatatactgcactgactcaggacccactccgactccaggtggcacactgaccccaccccgtttcatggttgcacgttctactttaggaatggccacgccagctccgggcgggataccatgcatgcttcctggaggaagacccaacaccttcaccgccccatgagtaccattctttggagtcatgcttccagacctgtgaccacttataatcaaaatgtaaagatctgctggaggatacaaaacacagattgtatggttcaaaaaagaatggtctgtgatgactggtcacacacgtcctccctggatatgaggtttacagcaacatctctgacctgccacgaaccaacgcttttctctgtgcatcgaaaggcaggccaagaccgcttgcctgcc

SEQ ID NO: 299150 - DNA, 672 bp, Homo Sapiens
  misc_feature (306)..(306): n is a, c, g, or t
caacctggagaatctttattaaaacaaggtctactcaagaagaaagctgaggctactacagagacttctactgcaagctgagctggtagcattaggcacggggtggcaacactttaacatggctagattcttcggagttaaacaagggtcactgaaacaaggagttttgctagtgaccacctaagcctggatattattcaacagccttggccagtggcgcattatgtatcacaagaggggctgtaaacatgcttagaagaaaccccaaaaggcctccgcctgtagattgaatcactctgacggctncttcatgttggtgcgcacgctaaacacctgttcctataagaatccaagtggatggggctgcagcatgtcatttcctcatgccccgcacaaattgtcgccccaggcctgttgcctgtcctaaagggcttgcaatcatgtgtcctccatttggggccacccctccgtctttttacaaaaggccccccaaacccttggggttgcgctgagggaatcctcgccgctttcgcggccttttttttaacacaaaaagcactttttatgtaatagcaacgggaggactttttaaccccccgcagagggggtgggaggcccccccgaattttgggccccgggccaaattggcaaaacctagcctggttttttact

SEQ ID NO: 299151 - DNA, 692 bp, Homo Sapiens
  misc_feature (478)..(478): n is a, c, g, or t
atggggcaggctttgataactctctatgtcctgcaggactaaggaaaatcatggtaaatgtcaatcttcacacaacagcggacacatagggctttagaaacagtggatatgaagaaagcctccatcctttttcaacattgtactgggtattccaactccataagaacaggttaactctataggtgctgtacaagatcatagattatgatggaacgacttcattttagaacgatagcacaactgtttttctaaaggtcactgacgggaagcgaagaataaaatctgttcaattgtatttttaaacatatcggtattctcaacaaacggccttttgaaaccgcatcacttttccatgatcaaatgcaaacactgtatttcgccgtagaacaatgatcactgctcacaaagatcaagctcagtgtcccccgcccctcatcgacatcattatcaacttaggaccctggcatctactgctggnggtaccggtgacaatatgtcacacccctcatggtgatgctccattcgcttaaggtgcggaatcacccctagcaccttgatcgaggatagcctcacccttgcataatagttcgatcccagggataattacaaggccagcgttagcggcatcggtacggaccctcgccaaaaagcctgaattgaaggttgctcgaatccacgggtgctcggggccc

SEQ ID NO: 299152 - DNA, 101 bp, Homo Sapiens
agcctgagccaccgacccgcaggaaagtccttggaattggtaaatacgcaatttttgctggcagctacctgccaggttataggttaacacattactcccaa

SEQ ID NO: 299153 - DNA, 782 bp, Homo Sapiens
  misc_feature (549)..(549): n is a, c, g, or t
  misc_feature (597)..(609): n is a, c, g, or t
  misc_feature (672)..(672): n is a, c, g, or t
tccttgtgttttattttccactctttaaacttgtgatcagtaaatacattaaaaacaatcttcactaattgagacaaaaacatgtccaatgcctcagctacgttttgtaactttctctgaatatctggggcactttgttggataaacatcatgttagctatcatcaaattttctggggcttctgggtcaatatccatttattctctgaaagcttcaaagacttgttctaagaattccaaagcaaccctcattaggcttctgcttgaccatcctggaccttattgaggctcctttgcttgggcactcccttgcagaggctgatcaaaatgcagttttgatagtgttcaaggttagatctatctccagtgtttatattccatcccaggtcagaggtgggaactgcaatctgagcagctgcccttactggattactgggagagtcagtgtgaataagatcagccttttccttagctttttctaaaaccattctttgtttctctgaagtcaacaaaatattgagcaaaattggggtgcctgctcaagtagggntctgtgtggcaaatacagaggagaatagattcttcatatgccttggannnnnnnnnnnnnaaaccggtccttccataaacattaaacttctcacaaataggcatattattttttaattaaatnggttgaagaggagaaccagaataaccccgataaatctattggctggctgtggcagaaccactccttaagcaattgtatgggaaaccgctctaaaacacagggattccccg

SEQ ID NO: 299154 - DNA, 534 bp, Homo Sapiens
tggtttttctcccaattttttaaaagggggacctttcaaactgggggaaacccttaaggaacttttggcaccttttttgcggggcatcattcccatcatgggcggccaaacacaaaggattgggccgcggaaccccaaggccgttccctttttaagcccaaagggttttgtgccatcccggatggtgggaattcaagagtgttgctctgctttctcgttctggaggggggataccgcttttgggcttaggcctcctcaccgggggcaggcacccgcagcctacaagggtgtcttaccactgggttaagccccaccactggcagttgtgccatcaccgtgattgtatcacaaaagccaaacattttgcgagggcggggggttcgatccctcgtatgggggacagtgggcctctatggcagccaacgtgggccgtggcaaccgggaccatttgggaacacccgcctgatatgggggaggggttccctttcctcgtgggccgcttacgcagggaaagaataagacacacgccttctc

SEQ ID NO: 299155 - DNA, 498 bp, Homo Sapiens
aaaaaagggggcccctacaaaaggggcgagacgatgaaggaaatttatgctccttacacagcgggtatgacttccatcatgggctaacaaaaacagaggaatgggcggaggaaccccagggcctttctcttagtctcacgggagggtgcgcggccttcaccggtggtgtgataagcataaggcggcccagctttcttgacccggagtggtaccctccttagggaccaggggttcttaatggggggctggcaccccttttttacaaaagctgcttaacacggcgtaaaaccctcccactgcccttttagccccttgcgcgtgtgatacaagagcttaacaatggtcgcgggggcccgtgttttgaccctctgtctgggagagcgggcgtctttttgcatgcagggtgagcggttggaccccgaaccttttgagaaccccagcttgttctggttcaagagtccctttttttggtcggtggttatcgggggaaagtgtgca

SEQ ID NO: 299156 - DNA, 524 bp, Homo Sapiens
tgtttgtaatgttttttgaatactgagacacaatgggttttttaggaaactaaccacctttgttcaaagccggacaggattgatcccgtgatccggacaaccagattgctccaatggtgtaacaaggctggggctgtgagaagggaagtgagtagttggagaggggcccagttttattggcaccatcaccaggttgtgccccttgctgccagcgggtgccaattgggtgtactcaactattacaatatggatgagagggcttatgagctatgtcacatgcaagggcccatagagctcatagcctgtggggggaccccaacttcctgctgggtggggccaggagtaacttgcggatagctgttcctaacctttatgacactggcacccaccctggatggactgccgtcgtgtgacactgctagcattgggtatttgttaggtccatgccaaaaccaggtgctttttaggacatgttggggagatggacacattaactcgctatggtcaggttcgacatcacactt

SEQ ID NO: 299157 - DNA, 663 bp, Homo Sapiens
agtatacaagtttattttaaggtgttcatagggttaccaggaggataggtcatattaatctctcgggatgtgggacattgagacctatgaagctttaattatttgtatacgagcatgcccttgcatccttcgaaaccttatctcccctgaaatatgtctgaaacttgagactaacacatatatacatgttcaactggaacaggcaggtactggaattatttatcaatttgtattaaactttaaggtctgagatacatgtgctgcccgagcatgtcaaatacacaggtctgcatgtgccatgcaactttgctggactgatgaccccatcatctacatcgaggactaatcctaatgctagacctaccctagaccacataccctcaacaagcggcagagaatggtgaaactctgcctagtgtctatgagggcccattgtcagaatccacatatgagagacaacatgctgagttatgttttgtgtgagagtggaagttaccttggacccaggctgaaggttaggcacgacctggatgaatgtgaactcaccctccagatgaagaattttttgcctgagcctttgtgtacgtggattaaggcgggtgccattattcagagtaggtggttctaaaaagacaaggttcaagtgggccaacggattcgatt

SEQ ID NO: 299158 - DNA, 646 bp, Homo Sapiens
tctttgggcgatgatgttctacataacatacgctttattactgagcgagggcttcctactctgtaaaacccaaccgccgggtttggccacatgcctggtccaccagaccctgtgaacgagccgaaaccttgaaacaactgggccttgtataaaatgcattctctcagggaagccgcaggattccccacattgagtcttacactatccatgctagctacaggtgaggttagccaaagcacttgcctagcctgtccattactttccgaagacacggcttaaactgagcacttcaggaacgcagattccttaccctttgttcttagcatgataatgaggcatcctgtgatctatcagattgaagtctgcaattggaaaagggccattgtggaactagaaacatcactgatgcgccgacaacatgttgcccagagccatttgatgccttgctcccagctgactagctaaagcaggagtatctcttccaacaactgaccccggggattaccttctatgatgggccgcaccccagcgatgttggtttcgttctcttatagcgggtatttgtgggacgctgcacatgggcactcaggcccagctgggctcgattccgttacttttgatcaccttttaaaggagcgtgagggtg

SEQ ID NO: 299159 - DNA, 424 bp, Homo Sapiens
  misc_feature (278)..(278): n is a, c, g, or t
  misc_feature (309)..(309): n is a, c, g, or t
  misc_feature (328)..(328): n is a, c, g, or t
  misc_feature (336)..(336): n is a, c, g, or t
  misc_feature (407)..(407): n is a, c, g, or t
tttcatgtcattctcagctggttgcaatgatccttgcatcttgaagacactaggaaaagtgatcaaattgagcccgcttacagatggcaaacagatggggaagccaggattgactaatggaccctagggcccagagtgaagcaggtcctgcagcctctatggtgctgaatgaagacacctgcaggcaggctggctcagctcagcgtgtcttgtcaactgcatggacaggcccacaggtcacaggcaatatgcaatatgttgaattaattcccttcaanagcctttggatgcagaggagaataaatgcantaataaccttgagcagcanttgatttnctatggccatttctcagctcagccagctactacaagtcaagtgggttggagtttgctttccacttactaanttttcaaagactttaaa

SEQ ID NO: 299160 - DNA, 251 bp, Homo Sapiens
gcctaaaacttttggagttccccacccttttttcaaaacaaagtaagatcccccgggtattttttattttagtaaaccccctttttaagtgccagtttcccccccggacctttgagcccccattttttgaaaaaaatctccccaaaagcctccttaggaaaaatttaccttttcccccctcttaaaagtatcccaaaataaaaagtgggaaaagggttctttttaatgttccaaagcctcccaaagggccc

SEQ ID NO: 299161 - DNA, 741 bp, Homo Sapiens
ggtagtggcccattcaatgcatttggatatcttgcgatgttcaagatgctcatttacacgtccggtaagaaagtctcctacacacggatcactctgtggtttacagaacaactgctctgttattttgaaaggcccttttgtgacatcactcctagatgtggacttgatggcaaaatcccaaatcgggaaatgctcgggggagatatcctgaaatattctatgtcaatacttgtccctgtcttctcacagacagtttgaattggcatgcccaattatcagaaggatagcaatggatcatctgcagttcttgcttgtgattcaatccagcgaacctgctgttcgatagacgagcatgggcgctacctgatgtgaaatgcgacttgattggcctatttggtaggagtaataaaaagcatttcgtgcatacagatcatacaatagatctgacctgaaattgtcactgcgcggcatattgcggaatttcacatatatcgcaacacatacacaaggtaaaccatatggtggccatataagttggccaaaatcccctttaatgacaaattctttagggagcctaatttccactggaaaacccaaaagaaacagcccttgattaaataagtttggcaaatttaaatgtggagacgaacacatattgtatataggcaggccactctcctcgtttatgaactactgacaaaaccccttgttcactcgcctttagacacctcccccctaaag

SEQ ID NO: 299162 - DNA, 545 bp, Homo Sapiens
  misc_feature (435)..(435): n is a, c, g, or t
tttaaaccctgcacgtgggcgggagtttttattccaccaccccgacaagatattaacacccggggtacgcggtacttacagaaagggtcccaccccttgctccttcattaagggcgggcattttacatgagcgggttccccacgcccaaagagggaacggattgctccacgctcgcgggttaatacattcagcaagcggctcatttattaaaggcgaaccatccacataaccctattccccgctttaatagagggccccatggacgaatttccctcactaacaaaactttttatagaaagacacgctcgccttgaacttgtctaaacatagggttatataaaccaatccattatcattattgttttaataaaggaaaagatttcacattgacgggttgttaggtggggataagcgaacccccttgttgtagtttntgaaggaggggcttctttgtgagtccccaaacttagaacaacgcctggaatggaacagggactaaatacaagggacaaaagggggagcctttaattcccaggatctgcgg

SEQ ID NO: 299163 - DNA, 440 bp, Homo Sapiens
aaacacaccctcacgacgggcccagcggaatagattatatattatcgcccgcccaagaagggagaaaaacacacggggcgcgctcaagagggaaaagaaaacagcccaccacaccacacaaacatatgttggtgtgactaggagggcaagaatgactagggcctacaattttttatctccactcacgaaatacaacacaacccgatttactggtctcaataaatagacaagaaaatgtcaaattgtggaaaagtctggtaaaaaaggggagaggcccgcggacacccggtttggtgcccaggagaaagagatcggggcggacccgaacccctggcttggccagaggtccgacagaaagaccagggcttttaaagggaggggagggcgctttgggcagggactccgcaaccgcgtgggcctcagggctttatcctcagaac

SEQ ID NO: 299164 - DNA, 649 bp, Homo Sapiens
tcattttagcacaaaactaggcgagtcgttccacaacttagggcttgccaaggaaaacaattacttcgtagtcagggtcgtcgtgctaaattcatgtcaggggccagagcaaccccttttacttagtgtttgactgcgagaggctgccaccatgccgattcttgtgtgtgaacaaagatgaaggacactgcccataacaggatgccagatgtgcagccctccgagatcacagagcctcactgcttgaccccggagcctcgcctgtcagttactgccttcacagaacggtcacaggccgcttgcccagaccgtggccctgcaactgcccccagaggtgtaacttatgcacacatttcacttccaaaatcacgttgtcaaggatcaaattctgcaccagggacagtgaaaggggctgtcaacctcagtaaggcttataacaatcctttaccgggacattctccatgacaccctcattgggttccgaaaaaagccttatgccctaaaaagcctaagcccctgctttaaaggccccataggaaagggggcctcaatagccccgtgaacaacctctcaagacccttgaaacccacaggacccctccgggtgcccccttgctctcatttagccgatttaacggggtgcgcccgct

SEQ ID NO: 299165 - DNA, 651 bp, Homo Sapiens
agaacctcattttattaaacaataaatacagtcagaccacactattgtgcttgacaggggaaaccatgtactccgtatcggactttgtctggtagattatctcaggtcccaaaacagttacctcccattcaatctatgactgagagaggcggcataacgcagatccttgcgtgtgaagaaagctgcaacacctgtggtttaacaggagctcagaggtgagtccttctacattcaccaactctcccactagacctcccaccatatcctgtcatgctatttccatcaatcaactgtcagaggcccattacccagacagtgcccattcaactgtccacataggtgtcgatttggaacacatatcactgcaagtctcaccgttggaattgactaaacctgcaacatggaaagtgaactatgtgttctaccgagtcccgatttaaaaaaatctttgacagaaacattaataatcacgaccttgctgtaaatccatagaatagtgctagtggccgtaaaaaagtcttaaccaactcctctaagtcgcccatggagaaggggttgctgattaccctttcaacacaagccctaagaaatttggatacacacggacccacagcgatccgtttggcctggtggaccgattttctaaggccg

SEQ ID NO: 299166 - DNA, 380 bp, Homo Sapiens
  misc_feature (95)..(95): n is a, c, g, or t
  misc_feature (117)..(117): n is a, c, g, or t
aaagctatgtaatactgcgacacattgcccatacctaaaagaggtcatgctggttggggtgccctagagtctagcaggcccttaatcaggtaacncagaatctcctagttttagcangttggaaaaagtattgaaagggcaggagtgggcctaggcttctgggttcatttgttgccaattaattagtccattttcacctgctaataaagacatacctgagactgggtaatttaagaggaaagagttttaatggactcccagttccacatggctggggagacctcaatcatggtggaaggcaaaaaggagcaagtcatgtcttacatggatggcagcaagcaaagcgagagcttgtgcagggaaactcccccttataaaac

SEQ ID NO: 299167 - DNA, 673 bp, Homo Sapiens
  misc_feature (148)..(159): n is a, c, g, or t
atgggattgcagcaattcattatgggaaagcttgttttattgtaaaaattaccaggttgtgacacatagacaagaagcatgcagatgccattggaaaaagggtgcgcggtgacttgcttgttgcaagggagccacagacctttaattnnnnnnnnnnnntactagcattttttgttaagcacaatgaaacaatgtttgcctgccccctctggaggggcatggggaaatttgggaagtgatgaaaaatttatgttggtttcacgagtagatgcaggtcaaaatcatgatggatcactgaaatttcaaagggtacatgtaatcttctacgttttgttctgggccatacacaggatgatgaacaatcgtctgccttttaacacgctggttgttactgcttgccccaattgtggtagttttttatcaaattatggccgcctcactgtttttaggttttccctcgtgccgaataacatgcccccgggggatccactcaaagtagaaccgcccacaaccgggtggcgcgccagcttttgtgcccttctcgcgagggttcacccggagtttgccgtaattatggtgcattggtgtcccccgtgtgaaaaagatattcagttcaagatgttggggcaacatacgattccggaagaataaagtggaaaaaattgtggaagcg

SEQ ID NO: 299168 - DNA, 700 bp, Homo Sapiens
agaggggcgaaacgtcggttaatagtggcagcccagttaacacgtggcatactgatggcgaagcatttattaggtgacattcaggatgagcttaaaccggggtaatcttgctatgactgttatagctttcgattctgaaaagaggacttagagctcccactaggtgtcagacccgaagcactgtgtcctctcatgaataagaccgtgcgaccgatgtaaatgagctcctcacgaacgaaacctgtccttgttcaacccataaagctttggattaaaatcgactatatgaaatggatgtcttccttggatataccttatcacatatagatggatgcacattgatggaaccagatcgcaatggtcgttatattctgctactgaacagtatctgtgatattccttgtcaactatctggattgtgaacgcaataaacgacctcttactcttccgtaaggtctctgaaaactaatagatgtcgatacgacttaatatgaggcccccatggcacaggattcacatcttgggcttatactagagaagcagatgcgggcacatggccgggctcaacatttgagaggaagtttggccactccgccattagcacacgaaagcttccacgattttagaggctaacttgtggacagaaatgttttataggcctgcctaaatgttagaccacccggcgagggaggatttttta

SEQ ID NO: 299169 - DNA, 695 bp, Homo Sapiens
  misc_feature (221)..(221): n is a, c, g, or t
cacactcacccgcgctttaatgtcttccaccgaaggggccagttattgaataaacgggtcgaagaagctgaggcacctatgctagaaggggattcaccactgtacacatgacgaggggagactaggcattttggccaatcgctcgcaatacacaggatctggggaccttgtctcttcctgggataaacatgggatgtggtctccaaaacgggggcgccagnaaccttacacgtgtctagacgaggggaaagtaagttttctgcactgactatttaaggttgaagctcgctgcgtgtgcgccactgaagagtcaagctcatcgatgatgaccttagtggtgtctattgatttagggactacccaaatgctagaagcaggattgtcactctgctgaatgtgaatggcaaccatctcaccccttttgcaggacctagggctgataacggggccgagacaggataccgctgctgcatatgcccctttgagtgagtagaaatactggggtgttttcccccaggaattgattattttgaaccccaacgtgcaagtttctttggacgcccgtttttttatcacggcgcaatggtttctatagggacctttaatgaggaaacactgggtctgttccaaaaccctttccccggttctttaattgaaggacttttaattttccataaagaattggagtgcctcaa

SEQ ID NO: 299170 - DNA, 663 bp, Homo Sapiens
  misc_feature (393)..(393): n is a, c, g, or t
ttattgcgcactaaacatatgtgacctatttagggatgtgcaggatccattgaactgttctgatttcaagaactattaactcaactctgccttactctatgatgttggccaaagaggtccacataagatgattcttttcttgggaaggttaaacggatcgttggcatcgtttacctgacatttactattaagcttctttggacaagctagacataccgtgctgagacctgacctccacgactgacaaagagcgcagtgctcgggttaatgagttacatatattgaacatttagagctactggataccactgggagagcgtgtcagataagctgccattcttgtcattagcttgctgagcaccaccgcatctgaatggctatgtcacgagctgnagacttgcctcatgtggaattgtctgaggcgcctctaacaagcatggcttgcatgatcgctattgccatgtgtgagcttcacacttaagattgtagtggcatctacagctgttacctgacggtgataaaattttgttctactagcaacttgcttcactttaggccggtgcgctcattccgaaggttccggggtttttggccgatgtggaggaataactttcaaccttgctggcctctccatgaaggcattatctctgccctgaacgttcc

SEQ ID NO: 299171 - DNA, 698 bp, Homo Sapiens
  misc_feature (621)..(629): n is a, c, g, or t
cttgattggctaaacatacaacttatagaatactccagagaaaacatgctacataaacgtcatcgttagatccagtggaagaattcttatctacattaataatttgcggagggaattattcagaaagggtgtttatgttatcagacctcaccatgagtttagggtacgtactgtgcctggtggcacacagcccgggagaagcacaggagccaagtttacctcctaacactgttacggtcacctactttatattcccaagtatagcactctacacagacaatgagagagctcaatgcctgtacataaggcccggttctttatgcagttcagtggctgaagcccatcttacctacacagttctattcacaaagaaaatcctggtctatggagcttctaggcgcatacttgtttgaacagcaaacacaagtccttacgaaaattcactctccacttaccgaagccttgcctgactcaacctttagaacaacgggttttcttcggttgagaagttcacctcagcctaactttacggggatttggggttctttaccaagcttgccagagtaggtttgcatggaacccattacaagaagggtcatgttccttgaagctgcggccggnnnnnnnnnctacacaccttggctatggaaaaaggaggcaattcccaaacgattgtgttgaaaatagcgcctagaatt

SEQ ID NO: 299172 - DNA, 557 bp, Homo Sapiens
  misc_feature (21)..(21): n is a, c, g, or t
  misc_feature (175)..(175): n is a, c, g, or t
acagaatgaaccaagtgatantttacctgttacaacaggagcacgagcgacacaagcaaagatatgcggaaagccaactgagaccactatcatgaaccaaccttaaatactgccagaatgctactacactttacccaaaaagcttgaacactttcgccttgcaacttgctacctntaaggcatcaccaacaaactatcgaatcccttctgggttaaagaagtggcattaccaattcttacgaagtgactgctactttgaaacacttacttggacagcggtactgccaaaacaacactactgcaaaaacttaaacactcaataaggcaacagctgccgtgaggtcattaaacttctggagaacagtacagagcggtgaacagcgagacagactccagctaatgagagtctggcccgcctatagcggctgacatgccagtttcctgtactacgaattcgtgatacgcacgaactgtgaacatagctgctacagaacaaacacacttgagagatcgtcagtatatgacacccgccagctttagtatagattgagaacata

SEQ ID NO: 299173 - DNA, 626 bp, Homo Sapiens
  misc_feature (39)..(39): n is a, c, g, or t
ccttctccaagccaacaattagtggttttttcctcaccngacggcacacacagaggcggggaattgtggatacaaattgtgatcccccaccaacggacaatatttttacgttgttccccctctgagcgcccaccccagcattacactattcaaaagcctacaaagaaccctctcttcacttttgcagcaattctataacaaagaagcggggtacaacaaacatggcgaggcaaccactccttgagcgttgaatcaacactagggggcgacccacaagctagagacactgtggctcaccagaaaaactaatggttgaagagaacctcttgtacctcccaaacacctaaaaagacacccatgaaatttaatcactacaagggaaatacaacattttggccccactctaaaaacactaatgacccttctcactaaagaggaagaaaacgcccacccagtattataacggtcgaataatcaaccgaaccaaaggccaagatttggaaaaacgaggcaaaacgcttaatttaaaaaaacaagggagtttccacacacgaaatgtttgcgtaggaaatcgaagacatttaaaggcgggaaaaaaatacttctcaaaccaaaaagggaccaag

SEQ ID NO: 299174 - DNA, 801 bp, Homo Sapiens
tgcagagcatattgatggaatcgcacgaactggaggcaggatgatggacgacatgtatcctgttcagacagcgggaaggcttcacaccatcgctgatgtgaaaccggtccatcagcttgagatcctgattgccaacatattattactatgaggagctgagaggctactaacagcgtactttgttgccacaaggcagcctgtctagctccaacaagaacagtcccctcctcggtcaaggacagatcgctatcgtctgccttgacagagttgtatgcgtatggtgccaaaccatacatgacaaatactaggagctgttacaatggctctggctagttgtacacctgctcaacatgtgcgaatcgtgtcctgactggctactccatgtgacaaagtgtgcatatatatgcgtcgaaggctagtgtctcaaaatgtagcttgatgctaaccacagtttcctggtcctccacctcctgaacccataggctctttgtcaccatggattctaggcagcctttcgactctttgatacctactgacaatttgttgatctttgcccctttatgcggaagggccacgggtgattcgcctttgctcaagggcaattgtttgggttatgcagaagacacacatggtttccacttttctggggcttttaaggactcttcaccaagttgggggtgcccctgggcagcctttctttgggttcccaacttattacggcctcttgaagtggtactcccccagcctttaaaaaagggtacaattttttttaaaatcagaattctggccctgtaaccaaag

SEQ ID NO: 299175 - DNA, 752 bp, Homo Sapiens
  misc_feature (738)..(738): n is a, c, g, or t
atcacttgctctttgtagcacgccattgtgaagaagcgtgttaggataaagggatgtttcagaaacaggctgctgggtctgcaccagcaatgaagaatagcagtacgagtgaaccagtgaatggcactagcttctgttattatcaaggcctgctgatatatctataaaacctgaaagatataagcctgaggtgacttgactagaaggtcatgaggttgaccataatcggggaccagagttcattatcttgaggcttgaggcatttgtctacaaacgctgcaaaatcatcacataacatctttgacttagactttaggtggcttgcgattgcgtttacacgcataacaagggcataatgaacagtgagttgaacatgcaccagacaaagtggcctatatctgaatggaaggtgaatgtgttaatcataaactctttgggaacgcaagtttatggacttccacaagtacaaagcatggtcgcttgttcaccaaagtttatgtgcagcaggttgtgactttgtgacttactggagtattgttatgccagacacataactggtttacgaccacgaatagatagggtcctggacaccgaattctttttgcttgaggatgcatacaacaattgagttgccacttattcctaggggtatcttgagaacttttacacgagttaggagggtggaacattgggggcacttgcttaggtgaaacgaaactaatagcgcattctggaatnttgtaactcctcag

SEQ ID NO: 299176 - DNA, 499 bp, Homo Sapiens
cgattccccgggaaacaccctccccaagtaaaacaacaggttgtggggtaacacaccaggtttcttgtttctatctcaagaagagccccctttcatttttcaaggggaagagaagcaccctctttttatttctcagtcgttccccagaaggtctgtaaaaaccgcgttatttacaatttgtcaaaagctcaaaaagcctattctgttttttgcacgtccttgcaagggtcagattcagtttccggagcctcacatacgcaggtgtcactgccgtccccgagccgggcatgagccattcagcgcccggagcaacaatgtctctcggccagtgatgatgtgaaaacttttaaaccagacaaaccccttaagacagattttcattctgtgagtaacccagtgttacacattaaattctgagggaaaaggcggtattctcaagtaagaacatttttcaagttgacgggttttacaagctaacctcaaacccaaaaaataacat

SEQ ID NO: 299177 - DNA, 720 bp, Homo Sapiens
  misc_feature (51)..(51): n is a, c, g, or t
  misc_feature (62)..(62): n is a, c, g, or t
  misc_feature (88)..(88): n is a, c, g, or t
  misc_feature (255)..(255): n is a, c, g, or t
attcttttcttcttatctgttttgtctttgttactctgtgtttgtgtttcntctgtttctantctattcttggcgttgtgtctatcgntcactctctatgatctgtgctctcttctctctaatctactctatatcgtctctatatgacaattcaaggggaccgacaactagacgctgtgcatacgcgaccgcactgtacagacaaggcaaaggacgtctaggaacgcacacgacgacacttgcgatggccgaggnacagcgttccctaagaccaaagacgtgtccgtaccccgcgagaataagcagcgggacactcaccacggagcctggcataattccttacacccgaaggccgggccctgcataccactaccacaaccataacacaacgaggcgtggaacacactcggaattaactctgctacacttcagtttgaagcccctgatcgacaacaggacgtgcagaccatgtcccagggctggcgtgtaaacaatcacacgaggccccagtgaggaagacaaaaatgcgcgacccgaaaatacgcgaaacctcaaaaacaggggccccctcgccagagacaccctcaaacggagagagggcgcaacctaacacaaagacgacggccgaacaagaaacaaccaccaaaaagcgcaagcggaaccggtggctcctcataggcggaagaggtctccccctctgttacacaagcaggagaggcg

SEQ ID NO: 299178 - DNA, 725 bp, Homo Sapiens
cacaaatgagaatcaattggtagattggacattcacaaaagaactggaacaaaatcatcttggaatatttactacattgagttaaacacctacaacccattgaagagaatgtttaaccctctaaccagcctatcactcgctttcagcggcacttgcgatgattgaaacagcttccatagttgcgtggaacaaacagaacatctttcatcaggggcggaatgaggcttgaggaatcctgagggaatggattgtttacaggactgcacattgcttgcagattaggggctatgacctaggatacctaagtgttgaaggtgatcctaaatcagcagactgtttgattggctacaatctaccaggtttagaacagcattgaggtgagggagcccgagaaccttaaccacctgaaactgttgtatggatgtactaatctgacaagtacacagattatcgtaagacttgtgaactgtagtgcgtgaaaacaaactttggtgcgagtctgaagtactgacattgagctgggccgaactaggtgtgggaaccgtgtatagtactctctgatgccagaccagcgacgctatgaatacaagaggattcagatttgtttttggaaacttgagctatttcgctcggtgcactggctaacacctgtagccctacaagttctcgcgccgagatgggatcaagctgaacgtaaccgcagactcagtgttgtgtgttctttt

SEQ ID NO: 299179 - DNA, 693 bp, Homo Sapiens
  misc_feature (50)..(50): n is a, c, g, or t
atgcctgtaatctcagcctcccgagaagctgggatacaaggcacctgccnacacggcccagctattttttgtatttttagagagacggaagtccaccatgttggcgaggcgggtctcgaactcctacccccaagttatccgcctgcctgtgccctccaaaagtgttgggattataggcgtgagcccccgcacccagccctcatgtgaactattttacaagtgtcaactgttaaaataaaaggaaaaaaggaacactcttcctttcacacacacaggggtggaggcccagttccggaagtgcatcttgtgtgatataccccctgtctttaagctctgtgttaagtgctctgtgggggcggcaggacacctgggccagtgcagcaggtccccccaagctccccagcctacactccgctgcctaggtgtgaggctcgaacccccccaaaacttgatttatcagtgttttttccccccttgctaaagtaggaaaccaaactccgggggccctgttaagtttgattcaaaaaacaaagggcctttaaaaccctttgtccctttaagtcaaaaagggcgaaaaaactggcgattttagggttgctccacctggcttgggaccggactgacttgcatttccttccctaatcagaatttttaaggcaaggataaaatcaatcccggatggtccccctgccc

SEQ ID NO: 299180 - DNA, 580 bp, Homo Sapiens
  misc_feature (137)..(146): n is a, c, g, or t
  misc_feature (159)..(242): n is a, c, g, or t
  misc_feature (274)..(282): n is a, c, g, or t
  misc_feature (382)..(390): n is a, c, g, or t
aataggcccttgggtttgcaccccaaaaaccttgggtgggaggacccccggttgggtttatggaattggtgcgggaaaacacaattggggggtgatattttttggttaacaacaccagttttttcaaaaaaataaannnnnnnnnnttaaccggggtgnnnnnnnnnnnnnnnnnnnnnnnnnnnnnnnnnnnnnnnnnnnnnnnnnnnnnnnnnnnnnnnnnnnnnnnnnnnnnnnnnnnnccactaaaattttccccttttttcaataaaannnnnnnnnaacccttttttttgtttgcaattggagaaaaatgaccacccttagaatttcaataaaatttcttccactggtaactggggaaagggaaaaaaatttctcnnnnnnnnnggggcccaaaacaaaaccccccctgggttggaaagggagggcctttatattcttcttttgggggacccacctggccaacagggaggcaggcccccgttcctttttctgtggggggaaaaggggaccttttttgggggcctttccaattgggaacgttgttttcttggttccagcagaaggtccccaaccc

SEQ ID NO: 299181 - DNA, 483 bp, Homo Sapiens
ggcactgctattattatatgatacaaatttatgttagccattttaaatctttattggaacacggtataaaattacattgaccaattagttgataggctcaaaaaatttgaagggtatctattatttgccaggccctgtgccgaaggcttgagaaaaaacagtgaagaagataaacaactaaacaagtgatactatcgtaagaaaaatttacatatagctagtaggaaaagcattcatatagggaatataaagcaaggtacccaaccaagccaaagaaaatcaggaaggcttcctggatgaactgttatctaaggtgacatcttaagaggataccgtggggaaggctcagcacactgtgcaatctgggaaagaagtgtggttcagtaagggctagacaaatggtacaactagggagacaggagataccagccgagaggtaggtcatagaaggccctgggtaaatcatgttagagtaggattacc

SEQ ID NO: 299182 - DNA, 796 bp, Homo Sapiens
ccaaacagatttattgaatacagctaaatcctatatacaaagggacctggacctgctgtttcaaaacgtgatccttgctttctcatttgttgatggtcggcccatagagcagttgaaagcaattgactcttctttcaacagaaaggtgccttatgcccattgactgagtgcgctaactactggaacgtgagtatgatctataaggctgttaacataggtaggatcctggttctatgacaggctgttgaggagcagatttgctcatccagaggtcattctgtgcagtgacaccgggatgccatagtgttattggaacataatgtccgcgttctaggattgtagacacaccacaggaatatcactggggtgagaggactgcttaggtgctcgctgggctcgaacagatatgactccaaaatgctcatatgacaaggacccttgggaacctcgattaagaccttgagagtccgagcccaagtattcgacaacggagggaatcgggattgtgacttacaagtgctgatgcaaagtcgtctacatgctacctcacgagcactatggtttagtactcattggcagcttaagccaaatttcgtaggagggatggttcttgcgaatggaacggttctgagtggagtctgcaacccggtaaccctctcaacgtaaatgctcttttcaaattccaaatgtctggggtaatgctttgcccaaaggaacagaataccaaaaggcttttttaactcccgggaacgggaaaacgtgtttgggccacccaattcccaatgaattgttccca

SEQ ID NO: 299183 - DNA, 627 bp, Homo Sapiens
tgacaaagaaaacatttattgacggggtattgaacgctaggaacaaggcttggttcctttggggacgtggaaagacccctcccttggaactctgggagatgtggtttctgggggaagcccaggcgttcagacacctagccaaaaaaatggctgggccactggggacctacaacttgcaccctttatgtttgatcctgcccccacagcttttctgggacttacactgcccatgctttaggctcaggtaggttgtggccccaaacaccatgttacttaagtcctacgtttttacttgagccagttgctgcctgacatggttgttatatttcttggcagcggcctgttgcgcctcctgcaagtattcagttttcagacccactttcccgcccttgatgtcatgaaccggctcctttccggtcataacccagagcactccataggcgaggcttgatcccactatgaccgtacactggggcctgtcctctacattccaaaacagaaatagtaatgagctgcactttgtccatccccttctcaagcttgttctctctaattgaaggggtgaccggttctctttcctggggcccttgagaaaatccaccccctggggccgccttttgacacagg

SEQ ID NO: 299184 - DNA, 498 bp, Homo Sapiens
  misc_feature (77)..(77): n is a, c, g, or t
  misc_feature (107)..(107): n is a, c, g, or t
tactatgcccagctgagaagcacactttgaaaatcaaagccctagacagtggagacttttcagctcgtttacatgtntttcattaccttatctactgtgctttcggnaatcaaaagcagtctcagtaggctacagactcatattttcaagttctagtaaaagtaatgtcacttttagggataatgtattttattgaagcctcaaaaagtgagctttgtagagaaagataactgatactttgggagtaggcagagttgagttaaaattccatccatcattagctctggaccctggcaaatatttcacttcttagggctacttcttattatggaaagccgttatacaattagcttgaagtgagtttaggatatttgacggaaagacctacccattgttttgccccagcgtggtggcgtgagggtagctttattatggtgcccttaaggtttgtagtttgcagactctgcaatctgtgaaatttaagagaacgtttttaaa

SEQ ID NO: 299185 - DNA, 363 bp, Homo Sapiens
tttggaggttagccccccctttaacaagaaagcccagggtggggcttccctatttccaagttactctttccaaattttcttctaccccggttgttaaaggtccctcggtacccgaaatggaacctgattttcccaagctcttccaagggggttctcctacgaatggcaccgccttttggtttcttttccccttccccccaaaatttattagggatttttcaaggcaaagtcttgccctttattttttaatttccccgccaagtttccaggggttttaagtgaaactgggggcattttaacctgtggtcttgccaaatctttgcaaattacaaagcaaaaaggtctatttattcaaaatctgtc

SEQ ID NO: 299186 - DNA, 563 bp, Homo Sapiens
  misc_feature (149)..(161): n is a, c, g, or t
cggagggagccttgctttgccaccaggggggagtgcaggggtgccaaatcagttaactgaaacctccaccttttgggttcaggggattcccctgcctgagcctcccaggtttttaggcttcccggggaaagtcccccgccccacctaannnnnnnnnnnnnagtaaagagggggtttcaccttgtgggtcaggagggtcaggatcttttgaccttgggatcgcccccccttgcccttctgaaggggtgggattacgggcttgacccaccacccctggccataaagtgggcgtttatacggctcttttgcaactttaaaacaaatgtttttgtcccaaaaaactccttccttctgtaagctttttttgcggccacaaactttggcctccagtttggcccaatctttggaatgctgggcccctccggggttaagaaccctattttggaagtgccccctacccccggaggccgggttttaagcaagatttcctttctattggcctcccttgggcaaaggttctttttttaaaggctattgcgccccctttttaagaaaggtgttcc

SEQ ID NO: 299187 - DNA, 292 bp, Homo Sapiens
tatgtaaattctgagtaaaaactagtgacactggtctgtagttttattactgccctctttaggtttttatttttaataaccagaataacaattttaaatgtaaaccagaaattaaggtaggcataaattctgctttaactatataggtaagttataaatgaaggtaaaacatttatttacaatagtaagaagatttttcaatatttatctatggtatattcaatttgaaagagaaattaatgttctttaattggaagggccttcttcaaaatggtttaagaaatcaaaggaa

SEQ ID NO: 299188 - DNA, 693 bp, Homo Sapiens
gaaactcggtgaatctttattaaactagggaccaccccagaggaccgctggggcggggacagggtctccacgatgcaagctgcgctgaggcaggaagcacgggagggcgaggggtcgcatggctgcaggcttgggcggtcaatgattgtaactgagcacagggaccgctctggagccaacggcaaagcacaccttctgcatcagcccggcccactgatactgtatgttttgcaccaagggctggaaccagatcttgaggcggtccaggaaagactcggcctgcacgcgtatatgctgggcctgttcctccagttaggcgagcacatccgacacctgatgcttcaccttgtccaggcagtacaggatccggctagccatctcatccatcagggtgcgcagtcgctcatcccaggactgggcccgctcctgtagcagctggccagacagggaacccacaatggtggcccagacacataactgatacaacaatggccccaagggctcgcagatggcgcatgaagacatgctcagcgccctcgtgtgacaccgactgatacactgacacgctcttttagaggttatatggaatctcgtagaaccccttacacagcttgccatagtggaaagctaggagcgcacagaacttctggagcctgtgtcccgacataggcagcaactggtcaaagtacttga

SEQ ID NO: 299189 - DNA, 687 bp, Homo Sapiens
  misc_feature (341)..(349): n is a, c, g, or t
  misc_feature (563)..(563): n is a, c, g, or t
  misc_feature (628)..(628): n is a, c, g, or t
tatttctacagctctgttaataaaatagtactatctttaagtcatgttattctaaactttcataataaaactaatattattcacttacttagagtattttaattaaaaatccacttcatgtacatactttcatttaatctcacaacaacctatacctcatgacttctattgcacacatgaagatatcctctttgcaatgccatggctgcatccatccagaatgctatcttactactggtgcatttgatctccactacacacaggtgactactctttccttatctgcatgactaactgctaatttattttcattctatctctgtagtgggtctcatatctannnnnnnnnaactcctgttatttctacctataaaccacttaaataaagtcccagacaggtctctcatcagccatttccagcactcctcactcatgccagtttatgagatctcatctttgtgtgaggtccaaacccttcagagacttctcatcacccattaatatctttcccagtccacagttgtctagtctggttaaaacgctcactcttttctttgtacctnctgattacaagccacataaattactacaagaaaatgtacctgattttcctattcacctactcatnatttatcctatatggagaaattctcactttttcagaaacttggcaaaatactcccatct

SEQ ID NO: 299190 - DNA, 696 bp, Homo Sapiens
cagtgtgtactttattttgagccaatggttcacataacaccaacctacttggtgtgggcccacagttcaatcacttttgtgaaatcacatggggcccatttaggtttgttccagcagttcgtggccttaacatcagaccttgacgtgttgtaaagcgtatcctaagggtactgacggaagcagagtacagggacaaggaagtatacacaactcttgaccacacagaatatatccattcatggcgaataatgatcatatgttctccaaaggttgtgactactcgtgagccatcatttaatggtttaacttccactgaaccagttaaacggaccagcatccccacggtgaagtatctcttgctctatgaacaagtgacaatcttcaataacacattctgcactctgggtttaacctatggaggtgggatataaaacctgcaagctggcggactcacaagacctataatcgacggcaccactttgagcagccgctcctggccactctagacagggatgagttctagctttgaggccctcgggtcataagccgtttctttgtgagaaggaattcaccttgccattcacccgacttgccaagtgtgaggggtaaaatgacagacgttggggggctacatcgggaaacacacccgatgaataggaatttccatcccggccgcctaataggatggggaccccc

SEQ ID NO: 299191 - DNA, 537 bp, Homo Sapiens
  misc_feature (144)..(190): n is a, c, g, or t
  misc_feature (235)..(247): n is a, c, g, or t
  misc_feature (430)..(441): n is a, c, g, or t
cgggccccaatatattctcttctatagaagagtgttggagatggcgcccagagaaaagtatataaacccgctttgtgggggtctttttttatttcagagggggaggagccacccgccaattaatgagggaaatcgcaagcaacnnnnnnnnnnnnnnnnnnnnnnnnnnnnnnnnnnnnnnnnnnnnnnntgttattttattgtggggagcccccccggaactttatttttaatnnnnnnnnnnnnntaaacgcccccggggtgttaaaatccccccctcttttatccgcccacaaataaccccaggtaaataagggcagaggtgtttggaaaacccgggggggccataacccttccccccaaaaacaaaaaggggggggttgttttgcaagggcaaacccaggaaaatgtgctaaaaacttgtttcctnnnnnnnnnnnnaggcaccaaccttgggtttaatcccagtccaagaaaaaataagttggctttaggcccaccaaggagggggggagtttttgttttcctgtgccccca

SEQ ID NO: 299192 - DNA, 539 bp, Homo Sapiens
atttttggcttaccaagattcaacatcattgcttatacgatctttcatgaaacattaaattggtgttatcaatgttaaattctgtcctcccaggccctatctgctaaataacaggctggtcttgttaatttcatttcctatttctttgtctactagagagttgtcactgagaacctttcctcatcttgatcccccggtaattagaacagtcttctacattaccttggttatccacttctctattttcgcagcccatggcaaatcctgaattctctgatacttgtaacatttaaagctgtcacatgcaacctaacatttggcaattacaaagagacatcccaaaaaatatcttttaagaaacagtaatatcattggaattaatatataccttccaataacaattgcttttaaaagagaaaggtaagttcaggttcatttgctgtttatttgcttgattcccaggaggggaagagtaattttttaatattatacctcccattttcaaactttcttgaataaatatatgtaaatgtaaaaac

SEQ ID NO: 299193 - DNA, 481 bp, Homo Sapiens
  misc_feature (253)..(253): n is a, c, g, or t
  misc_feature (311)..(311): n is a, c, g, or t
tgagccaccgcggccagcttctactggccattctttctttacactcactaatatcgtggattacagttggactccacttgttcaaatctgggagacctaatgcagtttgacccttatgaattgtatttatcagaaatgctcttctgtagaatcttaggtatctttatgatggtagcctaaggcaggagattagaaatagagtaggagaagaaagcttttccattttaagatgctattttactttgacattatngagtagtgaaatcaagctcttattaagattaaaacaggaaaagcaaatggggcctttnttttaatctcactaaattattagataacaacccgccctgcaggtttttaagggaaaatattttagtaaaatattcaattttctcatttaaaagccagagccatttggaaagctttttatggttcaccattttgaagacaccaaccccccaagataaaattggtggttcct

SEQ ID NO: 299194 - DNA, 296 bp, Homo Sapiens
  misc_feature (156)..(167): n is a, c, g, or t
  misc_feature (196)..(256): n is a, c, g, or t
ccgtggtggaaacgaggccccttaaattcgcgcccccgagaggggggacactccccttcgaaggtaaattgccccccacgcgggaatatagcccagcgtgtggcccactggtgggcgggggggaaaagagccttcctccctccccggggagaggannnnnnnnnnnnctctccttaccccggcgagggggtttttnnnnnnnnnnnnnnnnnnnnnnnnnnnnnnnnnnnnnnnnnnnnnnnnnnnnnnnnnnnnnaaaaacacatgggggggcctttgccttttgtttggaaccc

SEQ ID NO: 299195 - DNA, 677 bp, Homo Sapiens
  misc_feature (470)..(470): n is a, c, g, or t
  misc_feature (538)..(538): n is a, c, g, or t
  misc_feature (572)..(572): n is a, c, g, or t
  misc_feature (586)..(586): n is a, c, g, or t
  misc_feature (616)..(616): n is a, c, g, or t
  misc_feature (636)..(636): n is a, c, g, or t
ttattttcaactactaagcctagaggtaattgttcacatcaatagacaagcaaaacagtctgtttacataggaaaattctctcttagacagaaaagatctaaaaaagtttgcatacatggtgcatctggctctgatgtgatgtggccagatgaaagctctccactaatggggtcccttgtttgcttcttggggagaacgtcttttagagggctagacatacagaagggatatctgtggccttattagactacagtacttttgtttctttccacagtattcctagaacactttcatttgtgaatgcacaaattacctaggtctccatgcatctaatggctgaagccagggaacagagctacctagcccagaatccaggaggagagagtcttggaattgatgaccaatgagctaaagcgaggtgtggaaaaggcaggagctgtctctttcctgaacactcaaattttaaaanatgttaaattgaggtataaggaaagcctcattctccttggaaagctactgaactttattctcattaanattttgtgagagttaaatgtgaagatatacgcanactacttagcacangtcccgtatgaattaggttgtcaataacanatatcctttccgatttgagngatttttgttctgcataaaatgatgactctatataggttta

SEQ ID NO: 299196 - DNA, 679 bp, Homo Sapiens
  misc_feature (210)..(210): n is a, c, g, or t
attggggttgtgctatatttatatacccaaaccacgagcccattgtattccctctcgtcctacacatcattggggggctgatggacaaatcgtacagagggagaattactatgcgtcagcgacagactgttctgacgtgaacaaggggtgtaacatgggacacacatagatatgggcgtgctggtcagaacctgtctgcgtggactttgngagtacacatctgatgcttaaccgatcacactctgttccatgacttctacgagagcgtatacccaggggcttgcttaacagaggggcaccgccccacgacccaattttttcaacgccttaagcaataacccttgccagtgcttggactagaccacatggggctcattttggcgtaaaccccggacagaccttaaagtctttttggtttaataaaacccttagttcccacaggcaataggaggattaaatcccgtgtccttggtggactcttgggaaataagttcattcccaacttaatccttttaccaaatcctttttgactgtttaaaaaatgtttcacccaaactaattggggtttttgagcctcaaacccaactttattgcttaaaaaattttgaaattgaaagggctcccccataccaaattttgacatttttccttttggaatttccaaaaagcttttcccttg

SEQ ID NO: 299197 - DNA, 825 bp, Homo Sapiens
  misc_feature (358)..(358): n is a, c, g, or t
  misc_feature (432)..(432): n is a, c, g, or t
  misc_feature (448)..(448): n is a, c, g, or t
  misc_feature (502)..(502): n is a, c, g, or t
ataatttttaataatttatgtaagcattaacatatttaatcgggaaaaatttattttcaatgcataaacatatggccgagacatagtgccacggtggtaacatgtcatagcgcaataatatcttatgaagagcaacacagcctttgtacatgatcagagaaagagagacatattcttgctcttcagaacgcctctattaatgtggcattccacatgtgtaggatccctcaagggactaacgagccatatctgactacttaattgtcagtagatacaagcactaatccatgtcttcgaagcttttagaaaagtggaagagttatactgttctggacaataaccatgtattgcgagagtntatactatattcgcatggctttcaggtgagagacttgatacattcttcattaacatgcattggcacatcattcntgagaagacatgtgtnacgcaatagaaactcttcggaccacatttgcttattggaccgccgaacaaccanggtccatgtggaagtttatacttaagaaattttttcgctaagccagggttcaagggccgattttgggtcgcttcaaatagacatgattaaacattttagaacctcagagaaaaggtcatttattgggccctcttaacacgggcattgcggatggggcgtgggtgcgtaacatatctaaaaattccgacgtggccattttttcaagtgggcaaaaaaatttctttttgctttggtgggacctcaccactgtgtataaccgagggtttgggaaacctcataggaaaagaatgttgcggcaaagaacctaaaagaaaaactcggga

SEQ ID NO: 299198 - DNA, 703 bp, Homo Sapiens
  misc_feature (293)..(293): n is a, c, g, or t
ctcccaaaaggtttatttgtcacatttaaaggtcaaaaacaaactcacagttccagattggtgaaccatattttcatatctatacagccagtttttagacttttacaaaccgatctattcctactaatttatctgtcaacactatcccttatgtcaaaagcaacatgggtattaagtcggcccgttatcagaaacagtatcgaatgtaagttatcgtgacttcatcacttgaaacggtcgaaataggtgcctgctaggaactggagaattaccaagcatgtatccaataggtnttgggggcttcatatacactctatacgaataattggccgcacagactgtccatgaaaagtggtgagcatatctaacaaaacaagactcatgggaagacaaaacgtgagtgataggatcccaagaggtttgttaagactttgggtttaaactgcaagacgggctttaatgtgggtaagcacagaacacctctcaagtaaaattgcagtcggaggggtcctgataaattagtgacgggccccccggttctcataaaatttgaacccgccactttagggaggccctggtttttaacaccgggttggtttggtcaccccgatgtttgaaccctttttttggcgatatgcggtaactttgaagggttaacccccaaagtcttatgtcctcgggaaaacatttcctgtttatgagg

SEQ ID NO: 299199 - DNA, 710 bp, Homo Sapiens
  misc_feature (316)..(316): n is a, c, g, or t
tcaagattaaagagagactcacacgacagagtgatgctcccaccgtacaatgcagtgtctcaaggcacgatctatgctaactacaaccatgggtctgggttaagcagaagctaagactagagtttcgagtatacagaggataccggtgcgtgagcacaagctacaagtttatttgtgcattgttagtaagaacaggttttatccacttaggccagacgggaccctgaatcttgaacttaagagagacaccttatgaggccacaaactgtgctaatattcaagacagcaccacttgccagacgcacatatagacacnttattgccattaactgcaaaagacacatgaaatgaccctatgcttaaacgctagaaaacagtgttcttaatactgaatgccagagagaaatgagatttctagaactatcacttgactgaggagatgcatattggagccatgataaaaccaagaacacgcgcccgattggaactgacgttaagggccacaatcagaggataaatattgcgcgtgcagtcagagatgctgaattcccagctgagtattaaagcatcttgctagtaattacataaacaaagctacatggcaacacattgggtttcccttatatgaacacagagggctgggagtttaagtatcaaaactttggtaaatcacctttgttccgtgaaaaaaatgtttcccccggtgtaaa

SEQ ID NO: 299200 - DNA, 797 bp, Homo Sapiens
  misc_feature (244)..(255): n is a, c, g, or t
ggttaggccccaggtagaggcaaacttgaaatgcaaccccgttgccagggactggcctgaaactctgaaccaagacatccagaaaaagttgcatcgttattctaaggagagaccatgcatgggaatttccataaatccaacaggcagcccggccatggatggccatgacatggtggccttaactggtaaaagcttctaaatgaagctggcaggcagatatatcactgcagtattccgaagaagnnnnnnnnnnnntctcccacctgaagaaggggaactgcactttactgaatgcagacctctgtctctggtgtgcacctcctatgagtccaaagatagccaggacttcacaatgctagttattatcattgggcctggcaaaaaaagcattatgggtcatgcccattcactgattcttaacggccctctttattaaaaaataaggccataccttctatgaaacagctttaggagctcaaagcagaaagagggtttacgaaaagccttggtagggataagcctgagttttaaattgctcagaaatgtgcgaggtggctggaaactgacccgggaggaggaacgtgaacctatttaggccaggaaactagaaattacgagctccaacaggaaacatttgtgtaacagttagttttcaaattgccatccattgaccctccaccgggcggctgggaatggacaaaccgcctttcaatgcaaccttggggaccagccctcccaggcgccaaagcaagagctggacgtccttttcttgttaaaaaactaaagcctagaattcg

SEQ ID NO: 299201 - DNA, 801 bp, Homo Sapiens
  misc_feature (88)..(96): n is a, c, g, or t
  misc_feature (378)..(378): n is a, c, g, or t
  misc_feature (448)..(448): n is a, c, g, or t
cggcgcacaaaaagcagaggccatgtgtgcaaagagatatatggttaaacaacccagagctgttttcacgtctaggggagtgaaggcnnnnnnnnntcgggggagagcaaaggggggtctcccttcgggaaaagccagggtcccacaattccaaattgccacctataactcctcccttggagcgagatggaacaacacgatctattccgtcctagaaattcctaaaggagtataaagtccagctcagctcccttggcttcgcttggagccacctgaatcacgcgatgtctggcactctggtcaggactgcccatttacaaacacagaagccccacagctacaggttagggcttgagccatactggggtttgacagtgngtgcgaacacgaacctaagagcgaggctgctttccatcccccggcccagggagcctgtccaatctcctcntgcaaaattacagaaggccgggggatgcactctaatgtactctgggcgagacgcgggggacggcagacacgttatggtgccctcttgtgacgggacaaattaggggttggggcacacctgtgacagaagttgtgctcacagggaaaatggtttggccttcaggatttcacccacaatttcgaggcccaattgcttcaaggttgaaatgcccgcggccccccaaaaatggggggaacccctcggtatattggctggggattaaacgcaccaatttcccttttggaaatctggcgttcctccagcttttaaaaaacctccaacccgcctggaaagagctgttttggtttttgcca

SEQ ID NO: 299202 - DNA, 698 bp, Homo Sapiens
aatcttcattgaatattaattggaacaccaatgcaatatgcgcaaatattgaggaatattgggtgaagagaacacagtgttgactttacaccgacgggtaagggcaacgggggtcaaagcttggaggcgggctactgactggggtaaaagcaagggatgctattaatcactttaatgacttgcatgaaaactaaccatgcattactgacaagttcattctagcaaccctcatcagaggacactgcatccttattgaagactagtctaatacctttcaactggtgtccactggggcttaacatctatgacaagttcttctaaagaagttgctctgcctgcaccagcctacaaagttatttgagatctttgaggttggcaatcatagggaaaaggtgtgcaagctcttgccggaatgcggcagcccgagggatacactatttgtagaccgatcgtcactgcctggcagatcagcatagggtgccttctggaagcaaagatctagctcggctaatgccgaaatcgctgtcccggggaaacactgtttcgatcgcacgccacacagcagacgccaggattcgtacctgtaaagcggtgatccctatgtggaagcaactacactaaggcggtcggtcctaaccggtttcagttggaaacccgcacgacactgcctacgaattgtctacggcgggggggcgaga

SEQ ID NO: 299203 - DNA, 685 bp, Homo Sapiens
tattttttattgggcccctggttggctggaatcccttggagaggaccccaagactgatcctgggcattttcttaagggcaggccggacttggaagaggttgatgagaaagtctcgggcgtgagcaagtaccaggttttgccgcttacggttatggcagacatccactgctgcccaggtgattacaccaacttgaatgaaacgacttgtattgtgagctactaaggggtggacagaatcatgtctccaagtattggagtgatcataaggactcactccttcagtgcaaaggagccgaggggtgaccacctctgagatgcacatgactctgtcataggctgaggcatattgcgcagctctctcacagctggctttgttatgcccattctggatggtgagctccttccgagacatattttttggctcctcacacgcagacagaggcttgatatcccgggtggggagcacctctttctttggtggctggcaggcgcaattggcaagaacctttaatgttcgatttgggccctgggagaacgggaggaaaatggggctgaaaagggggccatttttcagcttacccgggacctaaacaaggcacgggattagggataaatggaagaattgggggtgctttttcccggtaaggctgtatgggggtgaaagaggatttttctaactccgggg

SEQ ID NO: 299204 - DNA, 649 bp, Homo Sapiens
  misc_feature (169)..(177): n is a, c, g, or t
tgtgcgagggtccgcttttgttaagtaggggcagcaaagccacatctaaaagaagctcctttgttgtgtgggggtctcaccccacctagaaaaaggggggagcccccgttgtctccttaatgatgttaagggagggccccgtgaagaagacaatctgtttgttgtcctnnnnnnnnnatgagggcggcataaacccacatcagtaagtcccccagtgggggaatacagccccccttctttgatgaacgggggggcttcttgtttgctatgaaaaacaaaaggcctttcgttggggggggagttttctcctcaaccaaacacgttggggggggatgtttgttctccacccccgaaggaaaaaccgctcaattttccccctgttcttcttgagctcgtcctgggcaagaggaagtcccccggccccccactaaaaggtgttatggctgttttcgcggctcgggtacaaaatttttgtaggggggccaaaagggtttcaaacaccccctttttgggtcaaaaggggggtgatgcaagtcctgcatcctcgggagttcatggacccagcccctatcttgttggtctcgctcctccctaaagggcgccccttttgatcaaaagagggggccaaagaaataaaaaaagatggtgt

SEQ ID NO: 299205 - DNA, 651 bp, Homo Sapiens
ttttaattaacactcgcacacccaagataggcagcttgattcaagaagggaaggcaccttagagagcggggggcttttacaccagcgcaagtgaaccacggaagaaggagcggtctatattcataaggtatctctgaatattatgagaagctgaaatgctcataaatgtgatgacataagcctaaggcaacattgacttgtggcaacaaggaacatgcccatagtgtgggacaccggttagaaagctgtagccttgcccaggttatataccaagctgcgtgataacgcagcatccaaaggtgctagtacttgaactttgacagcgatcatgaaatataatatgtggcaaatgctgacttgcatttcttttggaaagtgtcatatattgcatccaggtgaatgcaccacatgagctgtagggaccattgccaatttctccatactgagagcgggggatgctaccattgattgtcaacagagccactctgcaccactgtttgaatatcaacaccatactgttcatgacaagatagtgtctgtgctaggcattttctcttcaaatactacaccaaaatgccgcttgtacgtgctgaccccatcaccattgaagcctttgaggtcatcttctttaggacaaaacaaggtggataa

SEQ ID NO: 299206 - DNA, 687 bp, Homo Sapiens
atttattttatcttggatgtacaaaaagtaaactccaagtgaacatcaaatcaaatgtaatacttttggccacatgactggtcgatctttatctcatagatacaacggatcatatgaactgtagactgccactaccacgctacttctgtgacacataaggaatgtcctatttgcctatctatctgaggaatgttaaatagagaaaaatagatgataaaacaacctgtaggtcacaggatcccgagataattcctctggtaaaaaacatctgaacagcaaatgtccaatctgtaataaaattgtttaagggccaagtcaagtacacttgtacttggctgggccagcacaagaaaggtaacagcactttgtaatcattttgcttttgtaaattttccggtggacatgggccctttgcatataaggcaaaggaaccaaaaccaaaaactgttaaggcaggtgtgtgaaccctaacctgggaggtcagagggagatttttcagggccccaatattttcataaaagatttctttacagacccgtcgtttgaaaattacatagccctggcgtgtccggggcccccgaatgaataaccctcttgtttttggggaaacacaatacccttcggaacaattgggccaagtaacattcacagcccaaattattaacaaaaaggcttcaagtttttttt

SEQ ID NO: 299207 - DNA, 710 bp, Homo Sapiens
  misc_feature (631)..(640): n is a, c, g, or t
ggtcttgattggcttaacatttaacttatagaatactccagagaaaacatcgtacataaatgtcatcgttagatccagcggaagaattcttaatttcattaataattggcggaagaaattattgagaaaggttgattatcttatcctacctcaccatgaggttagggtactaactgttgctggtggaacaagtcccgtgagaagcataggaggcatatcttcctacacagcactgttcggctacgctgtttatattccaaagaataacactctacacagacaagtgggctgcttcatgcatgtacagaaggcccggttatttatgcagttcagtggatgaagcccatcttcacataacaggtctattcacaaaaatcacccgcgggctctggggcttctacgcgcatatttttttgaacagcgaagcaaagtccctaagaaaattaacgcttcacttacagagtccttgcctgactcaacctttttaacaaccgggttttcttggttgagaaggtcccctcagccttactgtaggggggtgtgtgtttctctaccacgcatgcaaagagaagctctgcgaggactctcattaaagggaaggttctttctttatgagaggggtgcgcgcggnnnnnnnnnnacccacccaatattgtatatgaaaagaagtgggtccatatcaaattgttttggtgaacataaagagaaag

SEQ ID NO: 299208 - DNA, 138 bp, Homo Sapiens
  misc_feature (72)..(87): n is a, c, g, or t
gctcaaacaatcctcccagctcagcctatgagtagctgggcctacaggtgctcaccatcacgccagacaaannnnnnnnnnnnnnnngtagacacggggtcttgctactgtaacccagggctggtgttttgctgctgt

SEQ ID NO: 299209 - DNA, 722 bp, Homo Sapiens
tggcatggaaagtaatgattgagggtctgtatcaacatctttacgggcaaaaacgaaaaggggaactttgaaaccatttcacacagggcatgggggctgagctctgagcacaaaatgaagtgcattaataaagatcatctaaaagtccaaaactacgcgatcctgaacatgggtactctgtttcctttatccagatcagagctcatgttctaggcaggcattatgacacgtactctttctcaggaaatgcaaccacccactaaaacctgagccatatgacgggtcatcttaagctaagtttgatgtttctggttggagcacgtgcccaattgttaacccaaacaggggcaggccaattctcttattaactggctggacagattcagcatccaacagtatctgcagagaccattgtaggcttaaattattatggactaccttgaacttactatcagaatggtccaacggcgcaagagtaaatgtttggacaagaatccctttatggaagggggtaacttcgccagaattttcttaggaaagtaaactccccggtgcatttagggtgggaaggaaattactggtagagcgattgtaacttctggctgagcgtgaattaattttttcagccgttgggcctgaggcaattcttataaaaccaaggggttttagggcttgattttttaaatcccatatcttcccctggggaacacttttttttaccg

SEQ ID NO: 299210 - DNA, 511 bp, Homo Sapiens
  misc_feature (178)..(186): n is a, c, g, or t
cccccgtttaaaaatctccctaaaaaccttttttaagggaaaatagacgacagggaaaaatgaaaaaaattcttggggtttccgctctaaaaaaacagggttgagggcccttctcctgatccattttagttattcctataaaagcccccgcgccaaccttagtgttaattaaaggccnnnnnnnnnctctggttttatattttagaaccccttaaaaaacatggggcaacataaaatctttaaaaccctctcccttctctgggaaaacattaaataatggggccttagtttaaaaagacccctatgattttgcccaaagttctaggtattaaccttgggggtttcttggaccttaaaacaaacccgtaaattgaaccccttttaattatattcccccggatggggaatatggcccctttcccaataaaaccccctgggtttccccgaaaatggggaccatttttaggccaggccttaaaaggtccccaaggtttacatttggaagggcctt

SEQ ID NO: 299211 - DNA, 790 bp, Homo Sapiens
ggggctcagactgttgtccaggctgggaccgaacatatctgcccaagtggacctctcaaagtcatgctcctacgggcatggactacacgcatcaacaccactcctgggcctgtttaaatcccgataaacctagggccgggcatgacgcctctatgacacaagtgctccctggctggcctacaacactatcttgctgtgctgattgtggttctatcaaaacaagctgagggtaacagctacagttgggaaacggaagtgtaggcttcccccaccagcttaggcagcagaattattaaagggctaggacggactggtcctccactaacgagcagctctatgaggcccatttaatttctgcaaatttcactggcatgcacctgttgtttggtgacatttccactttagagcacggccaggacttgttacgtgaaatgcccacgatcccatccggctagtacccaacctttacccctaggttatagtgtacagttttttttggatttctgcacatacgatacctgttatagagaagcaatggccgagactgcgggggcgtttattacccttaaagttgcccctttgagaagactgggcttgaactttacttccttggcacaaattataaaagccggctggctggttctggatatgtttaatctaggcccaaaccgaattctatttgcgcgggagaaaccccccttcggtatataaagcccttaaacaggaattttccaacctttaataggggtagggtgggccgaactaaacagtgcgggtgaaaggtgctctt

SEQ ID NO: 299212 - DNA, 688 bp, Homo Sapiens
cccaactttgaaaccgtttattttacccccaggtagggggggcccaaagggaccccaaaactgggggttgagcttttaatggtcatcaaggaacgctttacaaagatgggccttaagaccttcaagcaggtcaagaacatttcgtgaggggtcttgaagcgcggaatcgatcttattatgtgaaagtgctaaaacattcttggctcatggcgagataaaagaacttgtgcacaaacgcttgtccttcgtaaataccagggttcaggatatacctttgccggaaaggcatgtggttggctaccataagattcaccaaaaggctctcagtgctccgatcaaagtcaaaaatttctcctgcctatggtttgagggtataatgagcaagaatcaaactgtggcagacgccctttagaggacatgtgccgaagggtcaaacttgtggggagaagaccgactatttataaggacaattattgggggtattggcctttaaggatagacaaatgccctaaacccacgtcttttacgtacaaaggtagaagcagggcccattggcaaaatttttgggttcaccagaataacagagttactgccccccctttctccaccccgtggaaaagtgaaggaacaggcttgagatattaggggttttatggaaattttcatcacaggtgttgattaaaacggg

SEQ ID NO: 299213 - DNA, 332 bp, Homo Sapiens
  misc_feature (112)..(120): n is a, c, g, or t
  misc_feature (170)..(170): n is a, c, g, or t
ccgggccgtccatgagatttcgccccaatggccgagggacatggcggttttcacattaagacagagattctgataaggctttcttaagtaggacggtcgctccaccagcctnnnnnnnnntgggccttagccggactgccatgacttcgagaaccacgggtcagtctggnctgagtctgagtagctggctttcagcagaactttcatggttaaagcatcgaccggcgctggggactttttttaggcggcgttatgcatgaaaggccaagcagccggctggcttttgtaaggcgggctcggtttgttagggcccacggagggcttcagtcact

SEQ ID NO: 299214 - DNA, 659 bp, Homo Sapiens
  misc_feature (119)..(127): n is a, c, g, or t
  misc_feature (135)..(168): n is a, c, g, or t
  misc_feature (184)..(192): n is a, c, g, or t
  misc_feature (198)..(206): n is a, c, g, or t
  misc_feature (210)..(218): n is a, c, g, or t
  misc_feature (510)..(519): n is a, c, g, or t
  misc_feature (571)..(581): n is a, c, g, or t
gggtcattgttgaacgtcttaaattgttgcgacattgaacgttttgaaaagtttgtagaaattacaaggtttttcacggtgcgcggatgaacacctattaaaaagaaaaagcgtgcaannnnnnnnngatatccnnnnnnnnnnnnnnnnnnnnnnnnnnnnnnnnnntgttgttttatgaaannnnnnnnntgtttnnnnnnnnnaagnnnnnnnnngggacaggaccttcgtggataaaaattttttttcattgcccgcctggggacccggggctcttcatagggggatattcattcccccggggctgaggtggcctaaggcaaggattttacacccgttcaaaaagaaaattgtttttatgaggagccggattagggttttcacggaagacgggggataactcttgacaccctttttcttccatcttttttaaccccgggtgttcgttgacaacatcaaacagtgaggggggggttattcttgggctcccggcgaaaaatgtcccannnnnnnnnncgggttccaatttatcaaaggggcaccactccccggagcataaaacatatannnnnnnnnnngtgggaagggctaagtgccccaaccgagcggacataaagggcctttggcccccttcgggaaaaagaaacctcccccag

SEQ ID NO: 299215 - DNA, 535 bp, Homo Sapiens
  misc_feature (385)..(385): n is a, c, g, or t
agattaaggaggcagcttattctcttcgaaactttggaacatctgttatgtaccaagtcctatacttattcttgacttagatgatttcggaaacacacattccccaaatcaaacacttttcatggttgtgagctcatctttagaaatgcttctgagacagtatagaacaggggtggatctgagtctggccagctttggagaatgagccttattaacagagagttattaattacaacacactggttttaacctttccaacactatgaagccacaagtacagaatgttagcgccttgatacacaacatggattctgaagtcagactcacttggctttagataatatggtatgagcaaccacgggctgttaaacctaggtaaactttntcttcatcataaggagggtgttgcagagatcaaatgagaattaaatttctactgggcggcacaaagaaagataatcaaaagtcagattaggggggagtggtgacctttttttagtgtttcaacatgaaagttaattcttataggaaaaac

SEQ ID NO: 299216 - DNA, 681 bp, Homo Sapiens
agaggacgcaactttatagaacaggaaactggtccaaaccattggacaaagcaatatcattgaggggcggggggtgtatttaaaatttataaaggctaatttgtactgtttccagacaacgagtcagtcatgctcccctaaatggcccccgttaacagtatctgtagagacttcagcatttaaaaaactgtttctctagctcgcactccacctgcacaggaagaccaatgtaaatcctccttgaaaggctcaccttcatggggcaggatcacactcacggatccctaagagccattgttccctgaacatttccggttcaaacaaagtaataatgtacattaagtgccttttcttaacgggttcgtgacccctattatgtgggacacctaggtccacatgttccaaggactgtggattagtacaaaatctggataatcaacagataccgctaagaattgcacagagaaccgcgaaaggtgtcggtttccagtgtggccacgacgaggattttggggtttggggaaccactgtacgcgttgtgaaaatatgaccacttctgcagattttacacgcttccaataggccaaacctcggtgacaatgccggccccttcgagaaggaagccaaaataccaaaactttggccggtgtttgtacaaaaacaaatcctcccatctttaaa

SEQ ID NO: 299217 - DNA, 627 bp, Homo Sapiens
  misc_feature (138)..(151): n is a, c, g, or t
  misc_feature (311)..(320): n is a, c, g, or t
ccccaaaaaccccaaatttttgggagaggccctaggggaaaaaccctggggaccccgctgggattggtaaatcctggcaaaaactggaaaaaaggggttttacagaggcataatttgtcctggccaatttctgggttnnnnnnnnnnnnnnccccccccggggaaggggttaaaaacacttgggggccaaccccaacaagtccgggggttttttggaaagccttaagaaggggtggccccccttcttgtaatgctttttgggaagcttccaatccccggcccccttccaaagtttgcacccaagtaggggnnnnnnnnnnggcccctcccaaagaaaaaattgttatttgtgggactcccccccaacggaccccggggttttttgggagttttttcccccaaccaattaaacttttttttggaatttgggtctgggaagccccccccggccttttttccctgccaggtccctggggacaggtaccagctttcctgaaaggaattcggggcccatccctcacccccacccccacttttaaaccggtttaaacccattgggcccctttttggcaaaacaggccccggccctggaaagttttttagaccaaaaaaggcagggggcttccc

SEQ ID NO: 299218 - DNA, 498 bp, Homo Sapiens
  misc_feature (87)..(114): n is a, c, g, or t
  misc_feature (370)..(378): n is a, c, g, or t
  misc_feature (383)..(393): n is a, c, g, or t
caattcccggggggacattaaagaaaaattaagggcccccaaaaaagccctcctcaaaaaatcaaaagaggcgggatccggggcaannnnnnnnnnnnnnnnnnnnnnnnnnnngggcccgggcatttaactttttgggaaaaaaagggggaaccccccccgttttttattccccggaaaaaaattttccaagggaaacttccctgggaagacaagggtttttttccaataaggcccccttccaccaagaaatctccaaaaattcccggaagttttgaaaaaaagaaagccttgaaaaaagcccgggtggaaattattcccccctgttttaaaagagggtttttggaaatttaaaaacttaatttccaannnnnnnnnaatcnnnnnnnnnnngggggccccaggaaggaaaaattattttgaaaatgaacccttaaaagggctttaaatttggaacctttatgttaacccgttttttagtttaaaacaggcccttgc

SEQ ID NO: 299219 - DNA, 448 bp, Homo Sapiens
  misc_feature (90)..(101): n is a, c, g, or t
  misc_feature (170)..(184): n is a, c, g, or t
aaaggggttagggaggttgttaacaccacccccgtaaaaacctgtccccggtggggggtgttaataaaaaactgtgggaaagcccccccnnnnnnnnnnnnccttttagaggggaactccgagcccctggaaaaagaactcccccccgatatttctcacaagtttctggnnnnnnnnnnnnnnnggttggccggtttaaatttcaccaaacggtcccattctgggacccattttttaaaaagggtcctgggcacattgggccacccaaaggttttcaacaaagggggtggcccctccgggggcccaaaggagggcccccttaagttttccaaggccggggaaaagggtttggttcccctcaccaaaaaaagggtttaaaaattttgggccatttttttaaaggccaaacccatgtttttcccccccggggggaaattcaacaaacccc

SEQ ID NO: 299220 - DNA, 540 bp, Homo Sapiens
atatacattcagggcagacatttttgcacatcacatcgacacgtcacggttaggaactagcctacataaaatcgcttaagccaggtggtcctccaatgaaaggtgccagagggaccttgggtacccagagacttcccagtaaagactcaggacaaaacaccactgcgtgtgaaaacatgatctacccgaatgaccgtctcttttcatataacataatggacttgccgggtcaggcatttacaaaacacaagcgtacaggatgaagtctaaaaacctaacaaggcccttttaacaatatctgacgtcagacctctttgacattgccgccctagtgatcacaatctacagttgctttggaaataccaaatcacgggacgtatgttccacaaaagttaacaccttgaaggccctagggcacttattgtttgtcacctgtatttgaggagaatgcaagctgcctcactttacctttatgctgaaccaatgttctggcttttagaaaacctcaaaggcaaggtcaaacccctacattggcggccg

SEQ ID NO: 299221 - DNA, 689 bp, Homo Sapiens
acagatggtgtcttgccaagtggtctatactggtttatacaagggacataatgcggagatccagaggaacacgccaaaagtgctgcaatatcaggaatgatccagtgctcacgcacgacacggaagttcatctggatcttgacggcaacagctgatcggcatgcacattaatggagtccagtgaatcaggaagaggacttctatggattgctccgtcttgctgtcacacaaaggacccatgctacatagcaccgtaggcccataacagcgattgtagcatgtggaggaatgaagggcccgttagagatggttcctgactctaccgggctgatgctaatggtgctactttggcgaaacatactcatgcaccagcttagagtgggatcttaatggtatgattcacggggtgaagctccgtttgcatgcgtctccacagaagctttccatggatctgcatggcacgtttagactggacgccgggcatactttcggagatgctgatagacactggctccaggtgccaagtacctgggaaatagatgcctgtggcaccatgaggtgagtacactacacttaggtcagatagctatcttaggctcaactacaatgagagctccttattgagcacacgctttcaggaggctaagcggtccgattggtagaagtgctggcacaacctgtctggggag

SEQ ID NO: 299222 - DNA, 557 bp, Homo Sapiens
  misc_feature (480)..(481): n is a, c, g, or t
cattggcctaaattgacatgcatccacaaatatatgaacagggcacagccacctggtatgaggggggtcccacatcagctcctttttttattcatatggggcaaggatgtaaacttaatctatgtcgggatttgtgaacccgtttaccacaaaggaggagagagtggaacattgttattaaagagatggcagaccgaatgacatcgaaatgtgcccccaggagtaaaggcaaaaggccgtgggcggcaacccaagcgagtaaacaggttggttgagtataaaagacaaactgcaatcagagataggacgggacccgggccatacacagttttgggagtatatactttggaaaggataaggtaatatgggaccctaattttaaaagttttggcccacaacccgtttaaaactaaccagttccaaattaaccacatcttccaatggaagtttttgttggccaacacttacttaacaaaaaannggataaccacggcacttttcaccactgcttaattttttgtatatatatcggaagaagaaaaaaggcctttctccct

SEQ ID NO: 299223 - DNA, 763 bp, Homo Sapiens
gtcatttatgcctttaatgttacgcgaccaccactgtgttttattgaccacttatgacgatgcttaagacagaggcgactggattacctacacagttgttcaccaaagacgaactggaactcatagtaagagtgtggtcccaaaaaactgagaacacgggctttgttatttccttatttactcggggagacaccatacacaaagatgaatgctgacttaggtagaaatgggaaagacccaatggtggcctaagtgttttaatataacgaaactttctctgtttgaagattgcatgtagacaacagcgtaacgatataatcctaactactgaagaaaatttctcagtgttatacgctgtacatgttcactgatatggcagagattgggccagaaggacttttcttcatgagaccagcaccgtaagtgactgcttaacaggagtatgaaaggaaattgtgctcctcttgccacaccacttggggatgagctctctataagaggcacactatgtgaaactataaggctgactaaaagacatgtatccttcttaccatggattgctaaccaggtgttgtgggaggagcaagcgtctggttgtctaaaaacttggagggttttggccgataagccatgttgctctgaaggggtaaaaaggcttaataacccttctgggttcggttgaaattatcagttccaggggtccccgggctctatttaggtcaaaaatattccttcccagacccaggggttttctttaaaaaag

SEQ ID NO: 299224 - DNA, 600 bp, Homo Sapiens
  misc_feature (248)..(248): n is a, c, g, or t
  misc_feature (286)..(286): n is a, c, g, or t
gcttcctatttgacccaggcttgagtgcttaaatgcaaccgcggttcactgtacccgctactacctgagcgtaagaggccctaccagctaatcctcccaagagggcgggattacaacgcgtgactaattgtgcccaacattggaaactttgtgaggtgggtgactacacagttgaaagtaattatttgttctactgaagcacatgcccatgctcctgtttgaaaaacttctgattctttagaaccctntgagtcgtccattctacacaggcagcccataggctctntactgataatattctacgaacctaagatttatgcttgtctagacggtctacatccttttgcgaatgttaaaatctatggctccaggaaagcctgcgctgtataagcaacaccgaatcagttgtagtgggggtttataaggaactgaaattttttagttgcgtacaaataccaaattttttaggtcaactaagaataacctatgttctcctattaaaacccttgtgatgtaaccaacacctcctttttgcacaagcgcttgagggatgggaacttcccaaagtccaacaatcttttcttgccacattttatatgc

SEQ ID NO: 299225 - DNA, 676 bp, Homo Sapiens
ttttttattaatccctacaccctttttttctttctctgtttcttattcaaaattgcaggcggtttttttaaaaagtaatcctctcctccctaaaaaaataaaaccaaatccccactcctcatgttcgaagataatccccttcccctcagggcccacccccataatacaaataatcctaaactatccccattccattttaactccttcaccaactatttacccctcttcctcaattaagtttcctttcttcactttattccacctcttttttcaaactttctccaatactcaatcaccttcctactccctctttaatgcaaaaccctcttatttcctcaacctgccctaaataacttctacaacacctttttccaaaaaaactttcaccccccctctttcaaattctctctttctgcaattattgcattttcccttattatctttacttattcccctatcctttcccgcattttctttttaccacaaatactttccataaccacttcacttcttgctctttacatcccctccctctctttacctttccccaacacctacctctttaacaaactttacatgcccaatttaccccttctcgcctgccacaacgccccttttcgtaaacccctttccctctcgccccaaatctccgactcccctctttccgtcccctcca

SEQ ID NO: 299226 - DNA, 680 bp, Homo Sapiens
  misc_feature (491)..(492): n is a, c, g, or t
aagaagtacgccgttatttccttgtatagcaaagaaaactgcttaagtcgtgtgccgtgaggtgattagtccacgtgaccaaataccacatgctggaaccactcctccgagtgttgcttgacatgaaccttatctggggctggagcctcagcaggagcagatggggtgccagcactcacaggggctgaagccacaaaggcagagggctcagccaagaaggcctagaccttttgagcacgcgtgagggtgtccatcgcatccacagacaacggcagggctcgaccgcacccgttgacgatagtatgcagtgctgatgcacacagtgcaagactatctggacacagactctgagagcatggcccacacgcttcaggaagcgataatgaatagctctctctgggatataaaccacttcttgaacgatgaggctaccaacggcgaacacgtgctgattgaccagcacaaaggagacatgtcgcaggcccccccgnnagagcacagcttggtttacccccagtatgggcccaattcccataggggcaggttccccaccattttgagcgcgccaactgacacttcttaggggtaccccaaccttgaaaaaggtgggcctttcgaaccgagcacaagttatgggccgtcctattccttcaaccatggctggggtcccgctccgcccc

SEQ ID NO: 299227 - DNA, 686 bp, Homo Sapiens
atgctgctatttaattgcacgacgtgagggtgtttgcaccgacaccggggctatgataatcatgacggaatgaaggagggcagaacccctccctctacaacagaggacgactggtgactacactgactgtctactgctgcatgcacatggtgagaccttctacaaggcaggggccaccacttcaggggtgcgaatacacggggtcgtaggacttcatatgaggtgaccggcacaggcgatgccagtgcagacatctacgggttctgacagcgtggacttccataaggacatcttgacctgccaaggctcagcgttgatctggaatgagcagaatgcgggccttatcatatgagagaagctcatagaaggggctctggtccaaattgaaatgggcctcgaaacaggcaattaagtctaactccacgtacaagaagaagttgcccccacctacgatgtgtttgtggcatgcatcatctgtacagcgcaggtagcgtatatagccatggtctgtttgttgacttccccacggagagttcattgcacgccgtaaaccctataattcactgtttagggaatgggtgctgccacaggcacggatagccgtccttcactgaaccggcggtgcgaacacggtcaggacaccgccttttgtgatgaagagcaacggcctcacatttgccaaattg

SEQ ID NO: 299228 - DNA, 701 bp, Homo Sapiens
tagaatcgctattttttctcctctaggggggcatgcaaaaattttattcgcttatgtcttgattctccacacgagaattttccttaatttgcacaggcaatggaaagttggttataaataaatatctgtgctccccttaaacagacctactgagcatttatacttgcaaaaaaaattgagttttgattggtacgctttctgtttttgtttccttaggaacacgaggttgaaggaaatatggtccgcatttgaataaccccatacacccacgattataagtcgccctataaagttttccagtttcatttattcagaattttatgacataacttgaaagccaattggcttcctcttttttagaaacataaaccaaagaaaccttattttggaagacatttttctgcaatattaggcccaattgccctgtaatttaagttgaaattttaaccttttggcgagcccggtcgtgaattgccactctatttaaaggctgttgggccaaaaacctgccttaaactcaccttgaggccttttttcaggcctatggccaaaccgcgtttaacttcaaacacatcccgcttcttttataagttaaaaaaattctcgtggctttgcaacagtgagcaaaataaggcaatgtattccggcctctaaacacggcgggggtggtcccccttcttctggggaatggcggatcttcg

SEQ ID NO: 299229 - DNA, 406 bp, Homo Sapiens
  misc_feature (137)..(163): n is a, c, g, or t
  misc_feature (199)..(254): n is a, c, g, or t
gaaaattaaccccccttaaagaaccaaaaaatttaacctcccccgcgtttccgccccttttaaaactaatgaatcccccggtctacaaaaattcggcacaagaaaattgcctttaataaaaatgttggggttggaannnnnnnnnnnnnnnnnnnnnnnnnnnaatctaaaaataaaactttaaaccgacaacggcttnnnnnnnnnnnnnnnnnnnnnnnnnnnnnnnnnnnnnnnnnnnnnnnnnnnnnnnnggacctcggaccaaacaacgggttcgggccccccccgaacgcgtccccttgacaacaaccgggaaccccgggctttcccctttttaccaacttcttccaattttaatcttcttttattttttgaacaaaacccggtttgtttgaacaaagtt

SEQ ID NO: 299230 - DNA, 459 bp, Homo Sapiens
gcactatgtagattgttcacaactcgtacatgcttaggtgataatgctattaggtatcatggcccactacagtaatctaatgcttacctgggtcaaggcatgacacatatctctacgcaataatatgacagaagcaaccaggttttctccgccgttatctgtcatccccagcctcattcagactgtgccgtattataatagagcactctgaaatgtggagcacccccatcttttgcatacgcgtctcgttagtgaactcatgaacagcacatggtcaaacaagcgttgtccgcactgcgctactgcaggattcgaaagccttaactgtttacccagcggtgcggtatgaaaccaatatcagctttaaattatctaaacgcaccacgcgtttgacatgcatattttgaaggacttataccacccggcaaccgttagggcaggccccggacctcatgtcgc

SEQ ID NO: 299231 - DNA, 191 bp, Homo Sapiens
gcactttgaaacttgttcacctctgatgcagggggaagttgttatttgattaagtatcaaggcccactactgtaatttaatgctttgctggttcacagtatgcctcaatctatgcgcaataggaagacaggacgcaccggttggaaccagaccgaccatgcattattcccctcgttcagactgtcataaat

SEQ ID NO: 299232 - DNA, 475 bp, Homo Sapiens
cgcggtgataaagaggctgctttgcagacccatgggtgggattgtcaacagcaagcttgctattcttctacttgcataagaccaggctaatgctcatagccatcactctttatttgatcttatgacctgcgttgggaggagaattgctaaacgtactctcacagatctagagaaagtttccttgtgtgaacaccgtgctgacgtctttttcgatcttaaggttaccgaaagcatagacgtcgggcacagttcccgattcagtttttatctggttggctggcacactcaatctacatgggggtcgtttgtagctattgtacttctagatgcgtaccaaatctaaactggtcgcctttttccccgttcggaatggggagtaattggataactccccggtactggactgttgccaattcatgcttctgcagattggttattgtggatgtggggaccgtccttatctatcttcccgcgg

SEQ ID NO: 299233 - DNA, 551 bp, Homo Sapiens
cgatcctgacgattgcccaaataaactatatactgtgtgtccctatgtacctgatacttctttcaaaatgctacggactgtcaatggggaagagatctaattgttgattgataccattcataaatttctacactttctatcagtaactggtcatttatcctattttgatgctttacaagtcttctgacaggaagtccactggtttacaccctgaataaatacgttgtggttctgcctgagccctttttggtgcccttggagacctttgcactgtttttacattgttgttagggcttatgaaggattctttttagagcttacctcgtgaatgtggaccgctttggttttataatactaaagcttccgtcacctttccaatgttttaccgcgcatatgtcgtttaatatttatctatacgattacctccctgtatggtggactctgtcgttgcgacattaaacaatattttctatactggtctttaaaccaaggtttctatcatcaacatttgtgtggagcttgactaagcgttatcgttctctgtgtaagcg

SEQ ID NO: 299234 - DNA, 516 bp, Homo Sapiens
ccaatctttcgtgtggtttcctggcagtgggggagctactgaaaaaggcctgtccacattttagctggggtttctcctacctctttagcttccctgtcaaagccccttgcccttcctcggggaacttcagggcaacatgggttttggaggaaactgcaatttcttcagccttataattgttccgctttttccaagcattcccgagggctggtcttctccattgttcaatcaaagctcttgcttatccccctggccctaaagaccaaggaaagcattggctttccctccgggaaagatctctttttactccccttggcctgggcctcttccgtctcccgtcaggccctattcgaatttcaggtttttgtcaccctttgtacctctggggggtgtccgggtctataaccaccctaatcggtgtttcttttccctttattaggatgcccccatacttccttttcctcggcacaatttggtctctgggctcatccgctaatgtcatatcctgttaacccg

SEQ ID NO: 299235 - DNA, 510 bp, Homo Sapiens
  misc_feature (152)..(225): n is a, c, g, or t
  misc_feature (273)..(281): n is a, c, g, or t
  misc_feature (319)..(465): n is a, c, g, or t
tgcgagatagagccagagctatatatagacctatactctgttctgcactagcccttttcttgcccattccccatatttcaaataattttcttcttgcctcttttgctgttttctctattaattctcggaatcttttaaacctggagctccannnnnnnnnnnnnnnnnnnnnnnnnnnnnnnnnnnnnnnnnnnnnnnnnnnnnnnnnnnnnnnnnnnnnnnnnnctgttctccctgtctaaaccttcttttacccccccttggctcctgccnnnnnnnnncttggtctctcctagcgggcctccccctcgcacggcgnnnnnnnnnnnnnnnnnnnnnnnnnnnnnnnnnnnnnnnnnnnnnnnnnnnnnnnnnnnnnnnnnnnnnnnnnnnnnnnnnnnnnnnnnnnnnnnnnnnnnnnnnnnnnnnnnnnnnnnnnnnnnnnnnnnnnnnnnnnnnnnnnnnttattgggtttcccctttttcctttccccccttctttgaggtggc

SEQ ID NO: 299236 - DNA, 428 bp, Homo Sapiens
  misc_feature (37)..(37): n is a, c, g, or t
  misc_feature (105)..(275): n is a, c, g, or t
ggttaaaaaataacttggttaacaaaaatttaacgcngattttaccaaaatattacgcttacaatttgtcattcggcatcaggagtgcgcaattgttgaaaggcnnnnnnnnnnnnnnnnnnnnnnnnnnnnnnnnnnnnnnnnnnnnnnnnnnnnnnnnnnnnnnnnnnnnnnnnnnnnnnnnnnnnnnnnnnnnnnnnnnnnnnnnnnnnnnnnnnnnnnnnnnnnnnnnnnnnnnnnnnnnnnnnnnnnnnnnnnnnnnnnnnnnnnnnnnngaggtccacggtatcgataaacttgatatcgaattcggcccgaacaaaaacaaacttgccccgcctgacttttttgtcccctgttttgcaagaatagtattttgttacaaacccctagtttttaaactcttcaaataaaggggccatggtttt

SEQ ID NO: 299237 - DNA, 162 bp, Homo Sapiens
agatgctatcactctcagtatttctaatattgtgacatatttatggtattttaattttggatgcattttggctttctactcaacaatgcttagccttttaaaatgttttgaagttattagagttggcaaatgtgcttgaaagtaataaaacaatttccataa

SEQ ID NO: 299238 - DNA, 525 bp, Homo Sapiens
atctaacactctatcgcaacctgtccctcctcactcaatgggtctagctcaggacaccaaatcgaaatatataaaaaccttaaggacaaccgaggccgataatatcgagcttttccgcctaaaacaatgatgcgaagccgaacacaagcgactggcgacacacatacatctcgacagctggcgaaaactctaacatgacccaaccaaacgcccgtgccaacaatcgcccattcagaagggggaaagggagataggaggccctaacagatcgcccaaggcaacggtagcacataccgaaaggaacatattaaaaaaccagccggcctaaatcggaaaaatccctgataaatcaaagaaatagaccgttatatggatacaggttggcccagatcggcacatggcggcagcaacaacattaattaatgctttattgtcggcgggtgtaacttgcgtgaaagaactctaattatctaaagggtggaggcttcaccctaactggagggggcctgaaataccttgttttta

SEQ ID NO: 299239 - DNA, 177 bp, Homo Sapiens
  misc_feature (46)..(90): n is a, c, g, or t
ccccggcttcaggaattcggcacgaggcccaataaacaagctattnnnnnnnnnnnnnnnnnnnnnnnnnnnnnnnnnnnnnnnnnnnnncttggaatgcaaatacattaacagatattgtggcaaaaaaacacaaaattcatttaaacatatttaaaaagataattttggaggcag

SEQ ID NO: 299240 - DNA, 515 bp, Homo Sapiens
gggggaataaaattttcctgcctatggaaagggggattcagtattattttaggaaagccttggccgacacctggaaagcatcttttttggaaatttctgctaaagaaaaataaactggtggggatgcctttcgaaggattactttggaggcagaaaaaatggacggggccgcttacaagggcaaggctttatgcttggtgatgcgattctgctggaaaacctgaagaccctgcgaatatattctacgctggagaagcaaactgcccgtctccttgataaaaaactatgctccctttttcttctgctaccccggaagatatcattttgggcagagctccccctcctttaaaatatggtaactttgagtctgggcaaaagaaggtcactttccattttaaaattttaagccactcttattttcaactcatacattgcctttctctaatttattgaccaagaatactatcggcgttaaacattccactgtaactggtgcttaaaataatgcgaacatc

SEQ ID NO: 299241 - DNA, 281 bp, Homo Sapiens
tttggcggggtttttcccatataataaccctacagaaagaagttggcctccaaggttccttttggttgaccagaggttatttttccctccccggttcttacacccacgccggcccaagaaaagtgcccccccaaaatctgtaatattgggagcgccccccccttctttttctgagggggggttataatttgaaaaatgaattgtaaacaaaaagcatttaccttggtttgggttccggccccttttatcttagaaaagatttttgtatagaagtttgggaa

SEQ ID NO: 299242 - DNA, 360 bp, Homo Sapiens
  misc_feature (41)..(89): n is a, c, g, or t
  misc_feature (111)..(133): n is a, c, g, or t
  misc_feature (151)..(191): n is a, c, g, or t
  misc_feature (301)..(311): n is a, c, g, or t
tcttctcaccctttattttgtggcctccccggggtttcttnnnnnnnnnnnnnnnnnnnnnnnnnnnnnnnnnnnnnnnnnnnnnnnnnaacctgcttcttggggtggggnnnnnnnnnnnnnnnnnnnnnnnagtaaagaatttttatgnnnnnnnnnnnnnnnnnnnnnnnnnnnnnnnnnnnnnnnnnaccttttttttcttaaagaggggagagcccccctttaaagagtaggtgaccccccggggccccgccgctctttttgtttccccatccccctttggtgcttaaaaggcctnnnnnnnnnnnacgcaggtttccctcccccaaatggggctttgtttttaacaatttgaag

SEQ ID NO: 299243 - DNA, 489 bp, Homo Sapiens
  misc_feature (50)..(63): n is a, c, g, or t
  misc_feature (154)..(182): n is a, c, g, or t
atcccccgggctgcagggaattcggcacgaggcgagtattacacagcgcnnnnnnnnnnnnnngggtgtggacctcactcgcgggccaaaaccgggagagtgcaaatcttggtcataccattttacatttttaccaactcacaatactgttggnnnnnnnnnnnnnnnnnnnnnnnnnnnnnaaaatcctccaatttacattcttttgggtccttttttcccacagatatagatttacttccgggttccgagagaaagacttattgggggtgcctgagcaagactgtctttaagattcacttggtggtctcatccaataaactcctgggttttcacataaagcgcgcctctttattgtgaatttttttcatggaactgggttcaatttcagaaaaatattaacggggtgatttccaacgtcaacactgatccttttttttaaaaaaccctccaatcaaagcccagaacccccgcaaagatcggtccttc

SEQ ID NO: 299244 - DNA, 547 bp, Homo Sapiens
  misc_feature (404)..(404): n is a, c, g, or t
ccgcgggctgcaggattccggaacggggccgatacgttttatctgcatgtacctggcgcgaacagcgatggagaccggaactgcatgctgcaagaatcgtcgagaatgcagaatttttgtggacttctctttgctaaagttttaccacactgctgtgcttggttttagaaggataatactggaggcagaaaaaatggaccgggcagcttcactcggctggcctcaatgcttgtagacgtgattctgctgcaacgcctgaggacactgggaagatattgtacctgaagaagcaaactgtccgttattattgaagacacactatgctaaattgttgttgtgttaaccagaaagatatcacaagggtcagagcaacccttcctccagaacatgttgactcttggggntgaccaaatgaggtcactttcattggcatatcataagccctcatatttttaaaaaacaaattgcgtttcttaaaactatggccaagaactttatcggcattaatttttcagcgccgttcgcagtttaaaaaaacgcctcctat

SEQ ID NO: 299245 - DNA, 133 bp, Homo Sapiens
agaggtttaactacactagtatagagcatcgtttagtaaaggtttgttgaggtttgttgttgatttgtttctacttacacgagatgtcttcatttttaccctcggtcttgaaataaaattttggtgcatgttc

SEQ ID NO: 299246 - DNA, 515 bp, Homo Sapiens
  misc_feature (372)..(372): n is a, c, g, or t
ctcgtgtctgattcgctaggttgtgctcaggcgcaaatcctcttgtgaagcatatggtgaagacatggactcctataagtccagagtaccatgcgtgtgtcccggtacgcgaagagccgcggtcgctactatccagcggtctgcatgtttacgcccgctatatgattgtctactagtaatgatcgttataccgcgactgtcttttagtacagtgcagtcttacagtacaacgtcaccgacgatgtccttgaactggctcgatatgcataagaccacttactggaggagcgtgttctttatggagaccttgcgcatgctatttttgagagacaatgaatgtaggctcttatgcaggctactaattcaggtcgnggagctataacactcatgcacacataggtgaatgggaaggatcgtcaacatgttactgtggccatgatcctggaatgcattgtgtatcagaaggtatatactctgaccgctgtcagtttgttgaatccagcggaactgtactt

SEQ ID NO: 299247 - DNA, 397 bp, Homo Sapiens
ctaaataaaaacagttatcagtaaaataaaatgggcaaaggaaaaagttggacaatcaaaacaggaatggaatagaaatagggataaatcaataaaatgggcgagggatataaatcagcaaaacaaggggagggtaaaaagaccaaataatagatgtaaagaggcgcaaattcagtcatgattaaatgagaatgagcaaggtgggcctaagggattcccaaaacggtaaaagaggaataagagccagtatggggggggattataagcagatatgatatttcagtgatagagacaagcaggacagtctcaatggttaaaatattgaaaagcatgtgtgacaatggtaaataggagtagagaaagaggaaaacaaaaattaataaattgtgtaaagtct

SEQ ID NO: 299248 - DNA, 434 bp, Homo Sapiens
gagggggggccaggtcgccatatcgagctatagagagccagagaacaagcgactggccacagcgttacaacggggagagcgggaggactatggcgctaacgaacttagtcgcatagcaccacatacccatttggcgagctagcgtaatagcgaagaggcccggaccgatcgcacttccaaacagtcgcacaggctgaagggcaaaaggcaaagtgtaagcgttgatataatgctagaaatcgcgttgaaaattcggtaaatcagctaactaataaaccgatatggcgaaatcggcatattccctaaaaaaacacaaaaatataccgacatgggttcgtgcggtgtttcacatgggaacacgaggacacaatgagagagcgggcgctagagcgggaaagggcggttttggggccggggagcagtaaagcactacg

SEQ ID NO: 299249 - DNA, 436 bp, Homo Sapiens
tggctcttgcatggggcccaataagaaaatcttttccggaaaccctcacaataaagccttaatagccctttttttgttaaaatgccaaagtaggttagcccaaggccccattttcttttgttaaaaaccaaattcaaagatttaattcctgctaagaatttaaaaggtcggccaacccattcatcataaaatccaaataatcttgggacccatttatctagtgattcatcccccaatctgttgaaaaagcataatataaatggtgatgagactagaccctaatggaaatggttaaaaaattcccaacccccaggggggggaatgcctttaaaaaccctaatgggaaaaaaagctggtaaaatttaattggtcaagcaattccctccaataaaatggaaaaacctgaaccttttggaataaaaccaaaatcccgccc

SEQ ID NO: 299250 - DNA, 462 bp, Homo Sapiens
  misc_feature (12)..(12): n is a, c, g, or t
  misc_feature (406)..(414): n is a, c, g, or t
ctagtctcgagngctatcatttattctatattggtagcttattctgccagcgcccaagctgggggagatttttattaaaaataactttggttttaagaattccaccctcaatttttaaatactttccgttaagaacatttttccaagggcaagtacagaaaatcttaagtttggaaacccaatccattaaggctccttttctatttattatatcccctcaaacaggtcaagatttttcagattacaaaaataaagtcatgtgttatcgctcagaaggcaacgcttttactatgagactctaaacacattacctattttaagaaacacccgctgtggaaaattggatccattttttgtcaaagtgtgctttaaagaacttaattcttttcgacaccgccaaccctcnnnnnnnnncccgcaccccaattttgccctaatggggaggcgattcacaattcaccg

SEQ ID NO: 299251 - DNA, 253 bp, Homo Sapiens
  misc_feature (166)..(166): n is a, c, g, or t
  misc_feature (175)..(175): n is a, c, g, or t
gggatacccccggcctgtctgggatatttgcaccccgggggcgagcaccttgttctcccggttctgggagatattctgcgggggtccttaataaagaggggggcgcgatgtctacaccggcttatatatcaaaaatatattatatggggtattataggaccctttnaaattgtgnggataatgcgagagggggcttattgggggcaatatggtgtttgttaatgtgcgaatttttttcaagattatttccacg

SEQ ID NO: 299252 - DNA, 382 bp, Homo Sapiens
ttgttagcttgttcagttcatggaaaatgtctgtcataacctaatgagcaaatccagtcctcatcgtcaaactaattttccacatcagacttactttctatctgacttcattcttcaattccagtaagtaccttaatacttacctgtaacaactatctcctgtctgaatccccatgcttacataggtaaacactgatgaggcatggatacttgccataagcctgtctcctgcatttcttacagatattttgctctctttacctttactgatctttccctcaggagcaatgtactttaaaaataattcggtaagatctgctacacaaaagtggacactatccagttgtacaatgcctgaattcaaaatatcctaacccaggcc

SEQ ID NO: 299253 - DNA, 348 bp, Homo Sapiens
  misc_feature (175)..(184): n is a, c, g, or t
catctggcctggcctgaacttttagaattcaatattaaccattttcccctagtttattccctagagctcttcacaaagtatggcttgacttctctgagacagctagtgataagaaaaatgaagtttattttggtataccactcaaaaagattgtgaaaacaaaatggagattaannnnnnnnnnccaaactctttgtaccacaattttaagttgaatagctgacttcctaggcatggataagatcagttctatcttatcttctgtcctagtaatgtgtctgcagtggaatccccattgcttggcttctataattgatcttgaaccttcccaattatcattccctgaaa

SEQ ID NO: 299254 - DNA, 635 bp, Homo Sapiens
  misc_feature (267)..(310): n is a, c, g, or t
  misc_feature (444)..(444): n is a, c, g, or t
  misc_feature (539)..(539): n is a, c, g, or t
  misc_feature (545)..(545): n is a, c, g, or t
tgaactaagagaatattctacctaggagatgtaaatgtgttgtattaaaattttgaaaactaattttgctggatatgctaattttcattattaactatacttggcagctgttaatggtttgggggcacttggctaatttaaatcttcctcttgattatgtttgtgatttctcatctggtgtgtgatgactgaatttgtagtatggtttatttattgttagagaatatattctctcatggaatttgactaaatgattcaggggattannnnnnnnnnnnnnnnnnnnnnnnnnnnnnnnnnnnnnnnnnnngaaggaagtagaattttccttttatcaggaacttgtttttaaacttgtgactgaaatatcataaatttgcttggcaaatttattgtaaagggtcttgggattaatagattattttaaagcctccacactgattnttttccttagcagacaaggtttttaaactaatcatattttaaataacccagtatatgcctctgaacatgaatcagttctaatttctgcactctgntcattntaggaagtgcagcctgtggtgcatacaataatttattctcttggttaagtttttaaaactggaattctggctcatctcttgtaagatgta

SEQ ID NO: 299255 - DNA, 578 bp, Homo Sapiens
  misc_feature (129)..(144): n is a, c, g, or t
  misc_feature (481)..(481): n is a, c, g, or t
caaactacagctggctgtcctattcttagcccacaatcccttcctccaggtactttctccccttagtcacacagcctctgaaaagggtttgtgtcccaacctaccagaaacctttttaaaaatctattnnnnnnnnnnnnnnnnagttttatcaagataaatcctccataccacgggatgggcttttacatttctcaaccggaagtttgccatttcaggctgaatctctgcaatcaagattccgtttatctcacttggcttcctgagccaggactcaggtgtactctcttccctaccccaggagcatcttccagcagcttccctgacctgcttgtacaaatgcccccttccagctgcagagccacaggccacccatggccggcagtggtgtccctgcttcctgctatcaagggcagagaaatattaaagttcaatctcagaacaccctgttatctggtcaagaaatttttaaactactttntatagtaaaaaattaatatgaacacagtcctttagtccccaaaccatccacaccgaaagggaaccgctgtcaacagtttcttacacattcttctaga

SEQ ID NO: 299256 - DNA, 369 bp, Homo Sapiens
gccttgggcagtggccctgacagataatggccatcattatcatctaaaatagctgcagcaaaggtagactcctgtgtgaatcggtgtccctaggtgtgctgcagctggctcacactggcaccgtgagagcctttgcaagccaagtgttcaaccatcaggagctgacatcagggcttttgtctttttggagagctgttttgccagcacaccactttagaggatacacttcaactgggaaacctgaggaggtattaggaatgaaggtgtggacaggttataggaaaccacagggaacagtgacctaggggctcgcaatgttggttgagggctgagggaagggagctctgtccaggatcagcaggagaatct

SEQ ID NO: 299257 - DNA, 373 bp, Homo Sapiens
agaaagagagttagacagaatgaccagtcagtggagcagtcagaacaaacacatttattgaataagttttcagtcttatattggcgtggttcgtggtgctctaaaacgatggcaataataatgccaaagatcactgatcacagatcaccataacagatataataatgaaaaagtttgaatattttgagaattactaaaatgtgatgcagaaacataaaatgaacacataccattggaaaaatggcaccaatagaattgctctgcgtacacagggttgccacaaaccttccattagtaaaaatcacaatatctgctaagcaaaaaatgcaatcttattatattagctagagctcattgagaaataagagtggta

SEQ ID NO: 299258 - DNA, 315 bp, Homo Sapiens
ctgctccatataaggaggccaaagcttggaggatgtagattattgctgaaggataccagattggtggcagagtctgaattccccaggacttaaccatggtgtgtccagctcttcttacagaaactctcaccatggccaatgtcagcacaaggctgaggcccttactagagtcaggtcattgttggtgatcctttaccccaaatctcagaatctcgagatttgctcagaccctgtgacatcatagctaccctttaccttgtcgttgattcttcatttagtatttcttttctatagttaagttcttgtctctccctt

SEQ ID NO: 299259 - DNA, 419 bp, Homo Sapiens
  misc_feature (365)..(365): n is a, c, g, or t
gttccttaacaggtgttaaatggcagaaaattcccaatagattgatcagcacttgactttttcgtagtatttcccaccagaataacgtctgtagaagctactctatccaggatagtcctgggggatctctggcagaatataaatatttctgctgtgtgcagcagcagctgtagcttaggaggagcaatgggcgtgggttttgtggtttccttctgacttttcagggtagctcatcacttcgaccaccttttctttttagggacaaacagtgacttgagtttttgcagaccagccggcttagttgtgtttggagtttcccaatatagtctttgcagaaatgtgagttggtttttacgttgccgcanaccaatcatctgcattacaattggccttagtcctggaaccacagaggtggtttg

SEQ ID NO: 299260 - DNA, 142 bp, Homo Sapiens
tcttttacctttatggaccttgcttggaaaattccggctctgcctttgggtttaaaatttaacccgaccccggggggggcctttttttcccaaaaaacaacgtggggtttttgagaaacttcctcctctgattttcccgggg

SEQ ID NO: 299261 - DNA, 140 bp, Homo Sapiens
gggccatctttttggggggcttggtttccacccccaggggcgtttttaacaaaagcccgggggtttaacctcctctattggggggccccaaaagggcgcccccccacccacctaatttctaccgggggttttttattaaa

SEQ ID NO: 299262 - DNA, 107 bp, Homo Sapiens
cggcaccagatggcatgtttggaatgtttggccaattttttaggtggaaagtcccccaaactttgggttaatttaagggggggcccaatttttggaaaaaacaagaa

SEQ ID NO: 299263 - DNA, 135 bp, Homo Sapiens
  misc_feature (76)..(84): n is a, c, g, or t
taaccggaccttgaaggggactttccccaaggggcttttcgccttaggttaagcccctaaggggaaaagcctttannnnnnnnnggcccccaattttaaaagaggtgtttattaaaagggggggaaagacccggg

SEQ ID NO: 299264 - DNA, 184 bp, Homo Sapiens
  misc_feature (126)..(135): n is a, c, g, or t
tgagacttggcaagacttatgaacccattctaaaaaaaggttggcccgttcaaaaaccccatgaaggtttgcccaaaggttccaaaaaattaaaaccttttggggaaaaacccccaaatttatttnnnnnnnnnntttggggtcttttttgagcacctttgggggggaaaatctcgaaaagggc

SEQ ID NO: 299265 - DNA, 160 bp, Homo Sapiens
  misc_feature (24)..(24): n is a, c, g, or t
  misc_feature (29)..(29): n is a, c, g, or t
  misc_feature (42)..(43): n is a, c, g, or t
  misc_feature (85)..(85): n is a, c, g, or t
  misc_feature (107)..(107): n is a, c, g, or t
  misc_feature (111)..(120): n is a, c, g, or t
gagtacgtattttcagtgatgggnaccancgagggtcatggnntcatgttggggaagaaatccaaaggtgtccccacctgggccnagacttcatttccaattggtgnctcnnnnnnnnnntcctgggaaattttctctattgggccccttgctattcccg

SEQ ID NO: 299266 - DNA, 457 bp, Homo Sapiens
  misc_feature (14)..(14): n is a, c, g, or t
  misc_feature (24)..(24): n is a, c, g, or t
  misc_feature (39)..(39): n is a, c, g, or t
  misc_feature (44)..(44): n is a, c, g, or t
  misc_feature (92)..(92): n is a, c, g, or t
  misc_feature (126)..(134): n is a, c, g, or t
  misc_feature (149)..(164): n is a, c, g, or t
  misc_feature (228)..(244): n is a, c, g, or t
  misc_feature (297)..(417): n is a, c, g, or t
tcgctcctactgcngcggccgttnaggtacaaaaacctnggttnctaaaggtgttgggcctaatctaaaggggggcctaaaaggggaggagnggccttttttgcgccgagggggttaaaaattttnnnnnnnnnttcccaatatccaannnnnnnnnnnnnnnnccctctcccaaaaaattttttccccccccgtggggaggttttatatacaaaaaagaagtggggnnnnnnnnnnnnnnnnnaaaaatttggggtttttttgtgagaaaaggggccccaaggggttttttggggnnnnnnnnnnnnnnnnnnnnnnnnnnnnnnnnnnnnnnnnnnnnnnnnnnnnnnnnnnnnnnnnnnnnnnnnnnnnnnnnnnnnnnnnnnnnnnnnnnnnnnnnnnnnnnnnnnnnnnnnncctcttttttttaaccccatagggtgggggccccccccac

SEQ ID NO: 299267 - DNA, 122 bp, Homo Sapiens
  misc_feature (21)..(21): n is a, c, g, or t
aaaaaccaggccattattttntttgggcaaagaaaaagaacaagggcttgggtgggcccccgtttaaggggggcaagggaaaaaacccttttagaaaaaaagccccccaacccccatcttgg

SEQ ID NO: 299268 - DNA, 310 bp, Homo Sapiens
  misc_feature (57)..(137): n is a, c, g, or t
  misc_feature (181)..(189): n is a, c, g, or t
  misc_feature (224)..(250): n is a, c, g, or t
tataaaggggcaaacctgaggccttggaccttaaaaccccaatgccctgagggaaannnnnnnnnnnnnnnnnnnnnnnnnnnnnnnnnnnnnnnnnnnnnnnnnnnnnnnnnnnnnnnnnnnnnnnnnnnnnnnnntttaatggccccacaaaagagggcctcttttttgccccgggggnnnnnnnnnccttttttttggggttttccaacgaaaaaacctcnnnnnnnnnnnnnnnnnnnnnnnnnnntgggaaaagaaattttttctgtgtgggcggagaaataaaaaaacaaacccacccttttgt

SEQ ID NO: 299269 - DNA, 245 bp, Homo Sapiens
  misc_feature (98)..(168): n is a, c, g, or t
  misc_feature (177)..(191): n is a, c, g, or t
cctatcaggaagcatggtcaatatgggctcccctaaagaaactgggtggggtttaaggccccattttaaatggcccaggggggcccaaagaatatttnnnnnnnnnnnnnnnnnnnnnnnnnnnnnnnnnnnnnnnnnnnnnnnnnnnnnnnnnnnnnnnnnnnnnnnggggggtcnnnnnnnnnnnnnnnaaaaattggcgccaaaatttttcccaaaaagggggtggcgcccaaaaagaaaga

SEQ ID NO: 299270 - DNA, 222 bp, Homo Sapiens
  misc_feature (65)..(128): n is a, c, g, or t
  misc_feature (166)..(175): n is a, c, g, or t
caccatgatgggaagcccttctttcaaaaagggggtcgaaaactttggaaatttggggccccggnnnnnnnnnnnnnnnnnnnnnnnnnnnnnnnnnnnnnnnnnnnnnnnnnnnnnnnnnnnnnnnngtggggaaaaattttggggggttttttattggcccaannnnnnnnnnaaaaggcacgggggggctttccccattttccgccccccccttttttc

SEQ ID NO: 299271 - DNA, 237 bp, Homo Sapiens
  misc_feature (36)..(36): n is a, c, g, or t
  misc_feature (44)..(44): n is a, c, g, or t
  misc_feature (50)..(50): n is a, c, g, or t
  misc_feature (52)..(52): n is a, c, g, or t
  misc_feature (85)..(85): n is a, c, g, or t
  misc_feature (141)..(141): n is a, c, g, or t
catagttggagcttcccgcggtggcgttcgctctanactagtgnatcccngncttgcagattcgcacgagtgggcatctgactancagtatattttgagtatgctgcactaaaactcaacatggatttttgatttaatccngaaaaaagggggcccttgtttttccaaattaaaattaaaaacccccccgtctaaaatttttggggggggtttccccccgccttataaatgtgtaaa

SEQ ID NO: 299272 - DNA, 128 bp, Homo Sapiens
  misc_feature (17)..(17): n is a, c, g, or t
cttgcaggggattttcnggacgaagcttcaaaccgggagaggcccgggatctcacaatattggaaccccgcgcggggggggccaaaaaagctttaaacccttttaaacacgcccccaaaagagaggga

SEQ ID NO: 299273 - DNA, 466 bp, Homo Sapiens
  misc_feature (115)..(128): n is a, c, g, or t
  misc_feature (151)..(192): n is a, c, g, or t
  misc_feature (260)..(307): n is a, c, g, or t
  misc_feature (312)..(322): n is a, c, g, or t
  misc_feature (357)..(357): n is a, c, g, or t
  misc_feature (389)..(398): n is a, c, g, or t
  misc_feature (400)..(408): n is a, c, g, or t
aataacaaaacagcctgttggaggaaaacgggaaaaattttttaaaaccattttgggcccttcaggacctttgggaaaatttttgggccctgggggcgcggggaaaacccctccnnnnnnnnnnnnnnaaatttccaaagggccctttttnnnnnnnnnnnnnnnnnnnnnnnnnnnnnnnnnnnnnnnnnncgcgccgaaaaacccccacaacaaattttttgggaaagagaggtcttcccggcgggcttttttcagannnnnnnnnnnnnnnnnnnnnnnnnnnnnnnnnnnnnnnnnnnnnnnnaaacnnnnnnnnnnngggggggaaaaggaaggaggagaacaaaaaatttncccccttctcttcttttggcgcgggccccccnnnnnnnnnncnnnnnnnnnccttctcttatgagagattataaataaaaaagggggcccccccaaggggggggcgaac

SEQ ID NO: 299274 - DNA, 341 bp, Homo Sapiens
  misc_feature (20)..(20): n is a, c, g, or t
  misc_feature (184)..(194): n is a, c, g, or t
ggtctacactgggaggtggnaaaggtcttgacgtgctctgaaccttggcccagttctcatccttactttttgcctggtaaagaaaaactttagccaattaaccttgccagggttttttgacaaaagaccatttcttgattgggccccccccggacccgaaagggtcaggaggccctcccccaannnnnnnnnnncctttttttccccggggaagggatgggggccttaaaaaccccctggggggccccccctttggtggtcccttttataaacacttggggggcgcctttttccccccccgggcgggggagaaaaatgtggcgcccccctttttcccaaag

SEQ ID NO: 299275 - DNA, 461 bp, Homo Sapiens
  misc_feature (27)..(27): n is a, c, g, or t
  misc_feature (149)..(162): n is a, c, g, or t
  misc_feature (182)..(195): n is a, c, g, or t
  misc_feature (263)..(272): n is a, c, g, or t
  misc_feature (281)..(299): n is a, c, g, or t
  misc_feature (306)..(324): n is a, c, g, or t
  misc_feature (362)..(407): n is a, c, g, or t
cctggctttcttgcaaattaaactggnctgggataacttaaaaaaggttttaccccccccttttaagtttggaaaccccgaaggggcatctttcccacagggggacaaaatttggggaaaaaagggcctttttggggcccccaaaggannnnnnnnnnnnnncccccacctcttttggaagnnnnnnnnnnnnnnttccttttttttaaaacacccaaataatgtgggggggtctttcccaccccctttgggggcccccttcnnnnnnnnnnccccacccnnnnnnnnnnnnnnnnnnnggggagnnnnnnnnnnnnnnnnnnngtcttttgttttaaaaaagaggcgctttccaccccgannnnnnnnnnnnnnnnnnnnnnnnnnnnnnnnnnnnnnnnnnnnnncggccattttttattttgtggcgggggacacccacaccccgggggaaaaaaacc

SEQ ID NO: 299276 - DNA, 229 bp, Homo Sapiens
  misc_feature (59)..(68): n is a, c, g, or t
  misc_feature (92)..(101): n is a, c, g, or t
  misc_feature (154)..(163): n is a, c, g, or t
ctatcctaaatcccaaagtccggagggctgtgcttaccccagaaaaagaaaggattcannnnnnnnnncaattgggtactctgaatcccccnnnnnnnnnntttttcggcccttggggtttttcgcccccccttcgttggaaaaccccccgggnnnnnnnnnnggggcccccagcgcgggggaggaattttcacagggggggtgttgggtgagggaaaaactttttttt

SEQ ID NO: 299277 - DNA, 171 bp, Homo Sapiens
gcttttccaatttaggtccattcaaaaggaaagctttttcacattaaaccccttggacaaaggagcagggttttggtgggaacccggggccccccaaccctttggcactcaaagggcccccatttttgaaagggggcgcccctttttttaaataattttttggggcccccc

SEQ ID NO: 299278 - DNA, 168 bp, Homo Sapiens
agaccaaagacttttaaatatttttggcttgcctctggccacacaagggagcggaaccacaaagaattatttcttttcccctttgggagatggagaaagaccccagagggttttttttcccaagaggggggagacccaccccgagggagttggtggttgtttttttat

SEQ ID NO: 299279 - DNA, 230 bp, Homo Sapiens
  misc_feature (98)..(107): n is a, c, g, or t
  misc_feature (121)..(129): n is a, c, g, or t
  misc_feature (155)..(164): n is a, c, g, or t
  misc_feature (171)..(179): n is a, c, g, or t
catggcgggaaggttccgttaacccccgggcctttatccttccttaaaaaaagggccccctgggggcttgggggattaagggccccccggcccaacannnnnnnnnncttcctttttaaannnnnnnnncccaccagagggagggggccccctcnnnnnnnnnnacacacnnnnnnnnncccattcttttgggggggagagaaatattatttagaaaggcgccttctccc

SEQ ID NO: 299280 - DNA, 126 bp, Homo Sapiens
  misc_feature (21)..(21): n is a, c, g, or t
ctgctgcatgcaaataggcgncctgctttaacggcctgaacttttgcctccctggggaaaccttcccccctttgccaggaaatttttttgggttttaaaaaccccaaggtttgggggccccaaacc

SEQ ID NO: 299281 - DNA, 298 bp, Homo Sapiens
  misc_feature (102)..(165): n is a, c, g, or t
  misc_feature (202)..(211): n is a, c, g, or t
tgacttctgaggcttttaagtggctccctaaccgggggaggctttaccgttatgggccccttttaacttgggtaaaaatagtcgttgaaaggggcccccctnnnnnnnnnnnnnnnnnnnnnnnnnnnnnnnnnnnnnnnnnnnnnnnnnnnnnnnnnnnnnnnncaccctttaaaattttttgggggggaaaaacaccttnnnnnnnnnntcaaaagggtgagaaccctttttttaaaagggaggggggtgttctcccccaaccaaaaaaggggttttaaaggcttttcgggggggg

SEQ ID NO: 299282 - DNA, 133 bp, Homo Sapiens
attaatcatttaattgtttaaccctggatggaaaaatttaagctttaattttaattgggccaaacccaaaagggaaatttggggcggtttaaaaacaagtttttttagggctttgggggccccccgggaaaaa

SEQ ID NO: 299283 - DNA, 145 bp, Homo Sapiens
  misc_feature (23)..(23): n is a, c, g, or t
  misc_feature (25)..(25): n is a, c, g, or t
  misc_feature (51)..(51): n is a, c, g, or t
ctatttacatgaaggtttgacantnctgatagggcggggcttttctccagnggtaaaggggcttaacaagtttacccgtggccctaaatataaagaatttttgggtttttctcttcccccaaagggtgtttttttaaagagagaa

SEQ ID NO: 299284 - DNA, 148 bp, Homo Sapiens
  misc_feature (39)..(39): n is a, c, g, or t
ctccttccccggaatttggcgaccaaacctttgggtggntttttaccctcttttaaaaccccagaggggtgttaaaaggggttttctccccgggtgaaaaaggggggaaaagggccccccccaaaaatttttcttggggaaaacaccc

SEQ ID NO: 299285 - DNA, 239 bp, Homo Sapiens
  misc_feature (44)..(44): n is a, c, g, or t
  misc_feature (49)..(49): n is a, c, g, or t
  misc_feature (74)..(74): n is a, c, g, or t
  misc_feature (78)..(78): n is a, c, g, or t
  misc_feature (86)..(86): n is a, c, g, or t
  misc_feature (103)..(103): n is a, c, g, or t
aaaaaatcccggacatagtactgaactcctcacacccaattggnaccantctatcacccctatagaaagactantggntagtatangtaccatgaaaacattncttctccggcataggcctgggccagattaaaaccctggacctgcaattaacagcccaatttttaacatcaaccacagggcgttttttcccttactggaaacccaacaggggttggtcttaaggaaagggtaaaaaa

SEQ ID NO: 299286 - DNA, 125 bp, Homo Sapiens
gccagctggggaaaagctgctgccttgtgccaaagtcgggagacttggggtaaaagggaggtttttttgccacaaagaaaccaaagggggccgcctcccaaaaatttggaaaaaggggttttaaa

SEQ ID NO: 299287 - DNA, 228 bp, Homo Sapiens
  misc_feature (22)..(22): n is a, c, g, or t
  misc_feature (110)..(121): n is a, c, g, or t
caggcgggacgtgcccagtttnctggaaaatcaagatcggtctcccagaaactgaagggatgcgtggaaaaaacctttttgggaaaaaccccctcgttttcccaaagggnnnnnnnnnnnncccccccacatccccctttataacgcgggtttttttgaaaaaggaggaggtttttccaaaaatttttcttgcgaagaagggtttcccccggcgcgttttttttaaat

SEQ ID NO: 299288 - DNA, 106 bp, Homo Sapiens
tgctaaaagggctctttcttccaaaagggccctgatccaaagggggaaaattaaaaaaggtccccaaaacccccggtgggggcccgcggtttaaaaatggccccct

SEQ ID NO: 299289 - DNA, 130 bp, Homo Sapiens
ttgagaatccgcgggtggattcccctaaagttctttaaaagggattcttaacaaggggggcccggcctttttcccggggggaaaagcgcaccccgccccgggaaaaccccaaaaaggggaaccccgcccc

SEQ ID NO: 299290 - DNA, 139 bp, Homo Sapiens
  misc_feature (89)..(99): n is a, c, g, or t
caactgagctcacgcgtgcgtcgttaactatgatcccgctgagatcgacaggaatgggttgtcagactaaaaacattttgttgaccccnnnnnnnnnnngggggaaaccccccggaaaaacccccctttttcccctttt

SEQ ID NO: 299291 - DNA, 218 bp, Homo Sapiens
  misc_feature (164)..(175): n is a, c, g, or t
agtccaggggaaaccccggttaccctttccaaattaacccccttttttcccaaccctttgggggcccggggggttttcaagccctttttgcccgggtgtttattcgggggaaaatttgggggccccctttgccccccgttttttttcccacaaaatcttttttnnnnnnnnnnnnccccccacaattggagggagggccctcccaaaagacccccccc

SEQ ID NO: 299292 - DNA, 212 bp, Homo Sapiens
  misc_feature (102)..(110): n is a, c, g, or t
gacggaggcccatactttcttattttaaccccttaggagggttccctttcccctattatttggggcttaattttaaccttcccaaacccccctgggggcccnnnnnnnnntttttataacccccctctttccggcggcccgaagaaaattttataaaaatccttgggggcgccccaccccctatataatatatttcgccttcccaccaaaca

SEQ ID NO: 299293 - DNA, 157 bp, Homo Sapiens
tatttattggggatatcacctaaaaataactacttgggaaaattaggtttctgtttcacaaaaacttggggggaaagaaaattttggggaacctttccagtgggcaaaggtttttttcccttagggggggtatggcccaaaaattttttggcaaatg

SEQ ID NO: 299294 - DNA, 406 bp, Homo Sapiens
cccccatgtacgaggacaatttcactaagtcgttcctgcagagcctgtactgcctgcgtcgcatcatgcagagcctgtcgctgcatcgagagcatctcagtagctgccaaccgaggaacagtctggactacagcgactccgactaggacctgtaaggggcgccgccctcggggcggacgcgcactgccgcggtccgcgcggcgaccgtcgtgtgaacccccagagtgcacgcgccctgctcacaggggaccctcacggacctgttaccgatggtcgtagcgcgctcggactcccgcttcgcttataaccggtcgatgggaccctagcctgccatcgagtgacctgtcaataccattggcttacacagttatctggcctctagaacagtcacatgtctactctctgc

SEQ ID NO: 299295 - DNA, 392 bp, Homo Sapiens
cttaattgacacagaattgtacatatttatggggtatatagtgatgttccgataaatgtaatgtattgtgatcagatcaaggtagttagcatattcacctcaaacgtgtatcatttctttgtgttgggagcatttaatatcctagctatttgaaactatatattattgtcagctatagtcatcctacagtgctatagaacactagaacttattcctcccatatagccgtaattttgtatcttctaacaaatctctccatattcccccccctcacctccgctgaaaccatttctgcaccacaggtgccttgaatccccggccacactgagcacttcatagaggagggtgggcacgccggcataggaaacagccttacctatccttttggggcc

SEQ ID NO: 299296 - DNA, 419 bp, Homo Sapiens
gcagagctagtagatcattgctgacataggtcagtttagagacctttctgtgttaatgcctcctggtactgtcttaagatacgtacagtgtctgtttttagatctatgcatatgtcatgaagctccttgtgggctctgcatgaagctgctgctttgtttttgggttaacagatgtgcctgtcaactagcatgtgtattgtccaaattccataaacttaaggcttttaagggctgagtggtttctgagctctatgtgtctttcctatccttgtaccttcaaagggtgagaaatgagatttatacatccaaagttagtctgataaatatggcttttagtttctccatgtaacctagactgtcaaaaataagtgatggtgataagtaggcctggagcctcagcttctgtaaatctcattcct

SEQ ID NO: 299297 - DNA, 605 bp, Homo Sapiens
  misc_feature (115)..(156): n is a, c, g, or t
gaaagctcttctttaaccatctactctaagatgggcctccagtcactctctattacatcacattcattgtcttcacgcaaatgatttctttgggaaaccatcttgtttatgtatnnnnnnnnnnnnnnnnnnnnnnnnnnnnnnnnnnnnnnnnnntctttctttctgttgtacccagtatcaactctccagtacctaaaatggttattatatctagacacttaggagctgcataaatatctactgaatatgtaaataaatattcgttgagtatttaatcaaatgagattgcaattgtgaaaatttttttaaaatgaaattttctataggtttttaaatgttctgcttctatttaatcacatccgtgctgaaaacaaaactggccagtgaaaataacaacaacagtaagacattattactgcttcacaacaaccttaacttagagactataattagctccacttataaatgaagaagacacacgattttgaaagccaacatattcaacatggcatagaaatggtcaaggtgggacttttaagcctggctcttgactaccctattatacatctccacatggttttaaatgatctacttgtctaggg

SEQ ID NO: 299298 - DNA, 256 bp, Homo Sapiens
acacatatactgtagactcctctactgtctcaccctttctatgcattctctgttcacccgtttgcacactcctttgctactggtcctctcctgccatctcctttcatctcgcctttcttgttcactatgactcctgcattctcttcacaataccgatacactccatcttttctacgctgtgactttcgttgacctatcaccacgtgttagctgtaccttctttgtacgctctggtttccctttcttgactgtggca

SEQ ID NO: 299299 - DNA, 374 bp, Homo Sapiens
ctatgccgatctctctgtcaatgtctagctatgatgctctgtctcgcaggatttaaatgaaatgggctaactgtatacatgaccataaagcctgatgaactgaaggactgagccacatgtaccaagtcccatactcctgactgtataacagggagacgagaacagactacattaaaaaagaggcgaatttagaacaaacccaggctccgacaagggacccaaacctgagtcccaatttcaactgaggatactgatgtggcgctagaacacgactcacaagaaacatgcatacattaggattacacaaaatgaggcaaataagaaccacgaaatggatgaaatggagctagacagagatgaggaaccaccagtgt

SEQ ID NO: 299300 - DNA, 394 bp, Homo Sapiens
ctttgagagcagccagagattctttttgcctgagacagcacgaatatggtaaattgaacagacgttttaactccaactaggaattcaacacgtcacttactaaaagtctaaggtgcaagctcagatacactgatgaaaggtctcatggttggccctgaaacttattaactaaacattatggtctgatcacagttaaatggatgagtgatgtcacaccatacttgtaatgtgctgctgctcactcggagaggctatggagacaggagagacatcatgacgcgatgataaacataaagtgcaagttcttaagtgcgttgaaagacgtactacgcaagagcgcactggtatctcatagatctgatggtggcaacacaggaacaaattgtctaagaga

SEQ ID NO: 299301 - DNA, 457 bp, Homo Sapiens
atgacctgaccgccattcaagagacaccttttcacgcagtgcaacgagcagaccctttcgctgccgctcaacgtgccagtctgtctaacgtgagcacatgcaccgagaacacccattgcgcctctattcgaatccgcatgcatctcacgagcatgtctgcaccacctactgcaaagaacggcactataaggacagcatgaggcagcagtcataagactgcaatcccgtgacgaactactgtgaaccacgccactccattggccacattaagacacgcctgcactcgaccgcgcatacgcaagcctgcacgactgcgcacccagtttagcgatcaacgacctcccctgagccgtactagccacaggcccggcttgcgcagcagaaccctgcgcaccacatgctcgcgacgcgcatcgatcatacgcccgctcagggccacccttcacaaagctcccac

SEQ ID NO: 299302 - DNA, 224 bp, Homo Sapiens
agtacccccccttagccacaccaagcaacggggagtccacggggaccatggggacgccccggccccctgacgacaaggacgcacacagcgcgaacccaaaaccaccacagccgactgcgatacagccccaagctgcaaacacaaaacgcaagcaccccgcgacacgcgacacacgacccccggcgaccacaaccggccacgcaacgcccgcacagaaccacgca

SEQ ID NO: 299303 - DNA, 720 bp, Homo Sapiens
  misc_feature (91)..(91): n is a, c, g, or t
  misc_feature (451)..(542): n is a, c, g, or t
cacagcaacctgaacggacaacctgcgctaccgagctcacacaaccccacccgatcacgcaccaccccgatatactcaccaacgacacacnaccacacgatgcgcaggagaataatacgcgcgacgacacttactcacgagcgctccacacccacacgaagcaccgcacacaccgacgacgcactacgacctacgctctctagcgcgaaccacgcgctcaacacgacaagagaacgaacccatcgacgatagcagaaactcacacacgcaacacatgcacaacactaccactcgcaccgccatgcataccgaccgcatacaggacacaacctcgccaacacaccacgcgcatcgcatcacagtcccaacaacacaacacgccacacctatccccagcagcacctacaaacctcacaccactgacgacacggaaagcacaccacctaatcannnnnnnnnnnnnnnnnnnnnnnnnnnnnnnnnnnnnnnnnnnnnnnnnnnnnnnnnnnnnnnnnnnnnnnnnnnnnnnnnnnnnnnnnnnnagcatacaacccgcaccacacgacgatcttcaagcgcacgcacacatcacatgcgcataatcatccgtcacacgcagcaacgccaactccaacacaccgcaacacacgaaagcatacccaagcacctcaactactacgcatcacccactaccacaaccgacacaacacgtcacgcacg

SEQ ID NO: 299304 - DNA, 391 bp, Homo Sapiens
gctgatgccaggttgtcggctcctcttgacaatgacgagacattttggtaagaatgcggatacgaaatggcccgaagacatccttactgttacgccttggaactccgacagtctgcttcacggttgcctatgttcgatgaactgtggcatgaaggtaaggctggtgctgacacacggagactcatgtgtgccaggttgcagaagtttggagaaagcgctttcaaagcatggtcggtactctcgtttgagccacgagatctgccaaggttgcgtcagcacaagtttccacgttagtgacagatcctgccacaagtccacacttgaatgctgcccttggagacctgccttgattgtgccgagtgacagtggtcgacctttggcacgctgattc

SEQ ID NO: 299305 - DNA, 440 bp, Homo Sapiens
gtcgacccccctgtttccccacccgttatccgccgagaagagcacagcgaagctattgcggggattcatgccccatacatagcaccagcagaaggaacaaacacagaaccagggcctacaggatatgtgtaatcaggcgaagtacagaaaggatggggagtgaccaataaattgcgaggtgagagataaccgctatgacaaacttgagttggaatatggacttgaaagaggcaacaaggccatgtcaagggccaatctgagaaagcatcgctcataaggagaaggagcgttgaacgccaatagtccgcggagtgtggatgcaagatacggtagaggaataaccagatgacaccgagtgactagagagacgaaagagggtggctttagcggatgagctcacagaagctactgaggctggatgacctcgagcctagtaagcg

SEQ ID NO: 299306 - DNA, 445 bp, Homo Sapiens
caggaattcggcacgatttcaactgcacgtagcagccttaatcctaccagccgaactagtcaaaccatttttcgaatgtatttactgcgcatttgaccatagcctggttatagcctcttacgtctcagatgtacaaatggtagttaaggatccccgttgataacaggctgtagatcttatcagacgacatgatcctcaacacttggatcatccacgcttggaaggataatcacttactagaatctgaactcgagactatctcaagcgcatgtatctacggacagactgctccagcgctcaccacgcagtgactgaactccaggtcaaagcagatcctaccgactgagactgtacagtactgttacaacagtctccaccactttgtatgacctgaaatcctgccactggtccagagtggtcagatgtggaaagaatacatgtggct

SEQ ID NO: 299307 - DNA, 426 bp, Homo Sapiens
accactatctattgtcgtgatggtctctcagagcgctctgcacagatcacgacatatggcgtaggctttggcaagtatcgttctgtgctgaggattggcgaccagagtccatacagtctgggtatctaggataacgccaatgacatggatcgttacgccagtgtctgaccacataatgtactggtacctagtgctgtaccagtggtgcttactgatggcaagcatgatctggatcactgacagagtgctactgtcaatgatcggatagttgtcaacaaggcccatgaatgatcatcatgacaacctggatgatacaatgctaaagcccatcatgctgactgctgaacatgattgcgccaagaagtctacttcataacaagtatctatgcctcaccgacacagatctccaacgtactgacagtgcag

SEQ ID NO: 299308 - DNA, 432 bp, Homo Sapiens
gtagcaagggtcttggtcaccgagcacgaaagggctggtgctctggacctctcggatgtggacagcacagggcacagggctgcgggcttgagcgtacatcagaagccataggcagacacgtatgtgtggggcagcatcataaacactctgcacacacacgtggatgaggaaagacgatggctcagcatgaaacgagcatactgacagctatgacggctcagaagctgtggacgccattcagtctcacctagttcagaatgagtatgtgaccagatgtagactatctcttgagccaaagcggtgagagtgtgataagcgcttatggactgcagagaattggaagcatttgcaaccaacgacttcgtagacgacatacaagatacatttgaagatagcatgagggcctttatggatgcaccacaagagctatga

SEQ ID NO: 299309 - DNA, 386 bp, Homo Sapiens
caacaccgctgttattgacgttgatgtaggaatataagatcggaactacgagtcgtgggtgtactgggcaacgtatctcaaattatactgcagtccagggaagtgagcatacatataggatgttcaactattctagttctatgtaactcacgatactcaatacaaagcgctgctaacaacagcttatggctttaaccgggctgatacacaacctcacgggattttctaccattacgcgagctagctacacctaaagtggatgcggacaatagttcactctgattcccaagcttagctcaaggttcatcaagtgcacaccaccttctgtattaacgtgagctgtgacatcacaagaattgaccatgttgtatactgacactgaacat

SEQ ID NO: 299310 - DNA, 497 bp, Homo Sapiens
ggcgctctagaactagtggatgccacgggctgcaagaattcggcacgagcacatgactcgagtattcggaattggccggacatctgtagttcaaagtagtaaagagttgagaacctgcaagagaacgtcacccaacgcgaagcacagggactggaaccttgccaagacacacgtgcaaatccatgatattactgggaaagattgcctacacattgcctatcttggagctaaacagagcgggcgctactatattcaacctgcagaagagctaccagcaattcattaacttacttgcacaatggaaggtttggactaacatggactagcttatcctaagagacttgattgcagtgtaaattttacgagaaactggattcaatgttaagaaggacttggacatgtgtctcctactggcacaacacaatctgtgcttgcgagtgagaacattcatttgatcagcacacacgtgtgcattccatatgcattaatagggagac

SEQ ID NO: 299311 - DNA, 438 bp, Homo Sapiens
  misc_feature (364)..(364): n is a, c, g, or t
cgggctgcaggaattcggcccggggaaaactcttgtttaatctcagaggtcccatggtctgtaataaaatataattttgatatgaaagaaattatatcatagtcatttaatgctatgctggggaagctggtcaattgcttatcaatttacaacccaagccccatctcagtttctcagacttgccctgtgcattcttgccccttaacatttgtagatgatgttgcttttgcctggatctttcttcctgtcccacccctatttcctacactttttgtagttaactctaacttgttatccttcaggtcacaccactgattattgtatatatcttagtagactatcagttctttcgtggctagaaccnagtccagttcattccatctttagtgtttagccgagtgtaagaggtcagtattggaggaatacataaatatgtat

SEQ ID NO: 299312 - DNA, 146 bp, Homo Sapiens
ttgcctgctctctaactgcagggtaactactactgtgccgagcgcaactattagactactttcttaacactaggtttactactaaaccaactgactcgctaactgctaagtattaatcaacacaccttacgcaggacacgtagtac

SEQ ID NO: 299313 - DNA, 261 bp, Homo Sapiens
ctagctggagcacgagccagagcccgcccaagaatccgatcatgaagtaggtctactcgtgcctgataagagccagatacttggtgctgcaagacgaactgatattccagcatgtgtggctcgacagcagctccggttccgatcaaagtacagataattgacagtggcagtaaactgtaaatacctcgacctgggaggctatcttctaaaaacataaactacagaaatttcaaaatgatactaggttcgggcgttacagaa

SEQ ID NO: 299314 - DNA, 497 bp, Homo Sapiens
  misc_feature (55)..(55): n is a, c, g, or t
  misc_feature (83)..(91): n is a, c, g, or t
  misc_feature (117)..(135): n is a, c, g, or t
  misc_feature (137)..(137): n is a, c, g, or t
  misc_feature (139)..(139): n is a, c, g, or t
  misc_feature (148)..(148): n is a, c, g, or t
aaaaagcgggaaacccaggggttggaggaagaacggcaccaagattatgctccgnatctttttggcacacaaaacaacaagannnnnnnnnaattggaggagaattaaaaaaagcannnnnnnnnnnnnnnnnnntngnaattcaccnttctacgacaagggcgtcgtaaagctccccttacccagaacacaaacatgagtcacatctgcacaatgcacaagaatctgggacgacattagggcacaaaaaccccgtgggaaagcgcggaagattacagtcgcggatcaataaaagaaaaagcacgaaaaggggacctacagaccgtttcggaaaaccaactgaactctagggttgacaaccaaaacctcaagaagggacaacaggggtgaaaaaaggaatcccaaacgacctgaatacatcagggaggaataacaaaagaaccaagagatgaaaaaaccctggacctgcccaaagcccaggccctcaagcactcccg

SEQ ID NO: 299315 - DNA, 438 bp, Homo Sapiens
  misc_feature (402)..(402): n is a, c, g, or t
gagcaatccaaggttccaggaagacttcatgggcttttaggtcccgggttttaaggatttttctaccaggcaaaaacacttatgacagttctttggagcccctgggaaaagaacaaggggcttgccaagaaaaaagacatggagcacagtgttgatgggaggcagcgctcacaagagctactgtggaccttgcggtacctatggaatgcgcagtgactcttgagtgggagccaggattcaggatatgagacgcgagcgtctctaggaatgttcactggttgacagagtcgtgaggaactggtggatgcctacgttacactgggctagggtgtctgaatcagatagtcgcgtatttgcacgcacgcatctatcgaacaatcgtcacaaccaacgagcatgatntacctgcatgtccccgacatgtcttagtgtaggtgc

SEQ ID NO: 299316 - DNA, 419 bp, Homo Sapiens
aattcgtgatacattcagtgctttgacagcacatacagcagtaacgggtagcactcaactatatcttatatgaggccaccaccatgtgcatgttatgagtgtctttatcagatataatactcattactaatacttgcttaccagactgcgtatctcactcagtactgcaatacttgatataggacatcgtctagcaccataatatgatatcgtcatataccattttcagtccaatagatacaggatgtaaatattttgcgttactaaccgtggatgtcacaattcatgttaatggtctatgggagctctgaggcctaagtatacttaccgatcttccccatctacactaacatgtatctaatgagcaattatacagtgaatggcatatgtagttgctagaatttgatacacgagctcca

SEQ ID NO: 299317 - DNA, 420 bp, Homo Sapiens
atgtcgagatccttgactcagactgcgatatcatagccaaacttaagaccctacatgatcacaccctcatagtgaccttactgatctggttcctcggaatgtagtggtatatgcctatcactcacaacacaactaacttatactatcagtgtctaccctcaagaactcgaaacattctgatctatccctggcgccatcatcctagacctcatctacttccgatccgtactcatactacacatagcagaccatgttaacgactcctgcgattacacatcaaatcaaacggtcaccagtagtactgtacctacgagtgcacctgctaccgaggtctcatctgtaactgctacatactgaagccattagtcctagacactgtcgacctgagactacttgaccgctacaatggagtagcacttg

SEQ ID NO: 299318 - DNA, 419 bp, Homo Sapiens
ggtacgagaagtttgaatgggactgggacagggttgtcagatttaagatgctatagtatgagagggcaattgtgtccttggtgatcgagttctgggatatatgccgtagatgcccatcaaatatagaactgataaggttaactttaaatgtctaacgtcgagtccactatacattcgtctgactccacagggccttcatcaaacacggcgtctcctgtagatagattctaatggctacgagagatggcccatttaaaccttacatgatgcaccgaatcgctacaataagctggactggatataccgctactgcaaatgatgccaaattagcaccagtgaaggatcccagaggatagcttgcagacctttgcaagttccgtgagaagggcacatggctgctatatatgtagttgaattag

SEQ ID NO: 299319 - DNA, 369 bp, Homo Sapiens
aaaatgtgatgctttctgatcttgcacacaaagttgatatgcaacatacttattgttgctgtatatgaaccttctgcataggattaataagcatagctgtcacgaaattgtcacacaaggtcatatcctatacgcttgcgactatccctgattgaagcatgcgcttacctatgctgatacttactaaaagcataacctgaggtatcaattggcgacaggcaatgcgatgcgagggctggactgttgaagatggctggctactacgtccactagctatacatgctgtcaagtggtctaagacttgaaatgttcaaagtagcgggtaatgatttgcctcctaggagtgagtttttacgatgttcctataag

SEQ ID NO: 299320 - DNA, 364 bp, Homo Sapiens
gaaaaagtaaactcttcaattctacaattcacagtaaccttaggtcgtttggttaaatacacagttgctcaggagaaactaagaccagagagaattaccttctgagaattcacacaaagatattcatggcctcacgttagatgcacatgtgaattttactgagacatatgcctaactggtagggtgaccaactgcccaagtttgtcctggactaggacacttcctgacgtgggactttcaattcgcacaactccaacatcaaatcagtagaaagcaagtttccaggggacaataggaatcagtctaggtacacagatttctgctgctctagcttaatccaggcatcattttgggttgtctagaa

SEQ ID NO: 299321 - DNA, 388 bp, Homo Sapiens
ttcggcacgagctcgtgccgaattgtgcacaagctgctgcgcttctccagctgacaactggccggacatgcaagtcaaaggatggccagcggatgtcccgaactcctgtggcaggcatcacctagcaacctgggtccaaattaaaactaagattgtaactccagattaaaaccaaaatattaaaccctttatttgccagcactgactgagacgatggccttatgacaaggagtgcctgtgggtaatcctaatagctgtcggggggcactcttgccaaagcctgcttgactgtgccagtcagctactacagggatcagttgtccacctctagaactgtgaaagccgggctagaccctatctgagcactttcttgttacaactgtctgct

SEQ ID NO: 299322 - DNA, 309 bp, Homo Sapiens
  misc_feature (105)..(148): n is a, c, g, or t
gtcatcacgcctggctccagtccaaaatgtttaaagattgtttgcttagtgtctcgaagtaatgcacaaaatgcttgttttagagatggagtctcactgtgtcannnnnnnnnnnnnnnnnnnnnnnnnnnnnnnnnnnnnnnnnnnngtgcatactggattcaagcaattgttccaccttagtctcccaagtcgctgggattacagacgtgtgccaccatacctgggttattgtagcgttaatagtgtagagggagcttcaccatgatggccaggatgatcctgaactgctgacctaaggtgatcctg

SEQ ID NO: 299323 - DNA, 299 bp, Homo Sapiens
cgtgcataacggaaacgcgtagagaaaggggcctagaagtatacttaacgaaagacgaacaatagcgataatcagtgtcttaatgcgcgggaaaaacgtcatctttgcacactgctccaaccgtatcaatcacgttacacacattgttgacgacgcattctggaaacatagatcagggaagtggcgctggggtaaacgtggaggagctgaagccctggacatatgctgcaaccaaaggcgctgattcaatagcctagaggaggggaactattggctaaaacgaagcagataatgtgaag

SEQ ID NO: 299324 - DNA, 287 bp, Homo Sapiens
gggagtgctcgcccgggaatcaagcttgggaaagttagcgcagctctctaagggcgctggaaagtgtgaccctggactgcttgaaccagattaagcgtgctcaacggagagtaagttcagggatacccttcgagacgattcatctgctgcaggtaagcagatcgcccctactgcgcctgtgctatcttaccgttgacatcagatgagattctcaggctagcaggtgatatgacaattctttctacagttactattctggagtcgcgaacataaatctgagacttatc

SEQ ID NO: 299325 - DNA, 676 bp, Homo Sapiens
  misc_feature (474)..(474): n is a, c, g, or t
  misc_feature (499)..(499): n is a, c, g, or t
  misc_feature (501)..(501): n is a, c, g, or t
  misc_feature (533)..(533): n is a, c, g, or t
gatccccccggctgcaggaattcggcacgagacaccaccctcagagttctctgcttcactgtatatgaactggccactcacgctgatgtgcagcaaaaactgcacatggagatcgctgctggtctgcccaataatgcgccacctacctatgttgccggggtacaggtggagtacctctacattgtggtgaatgaaacactcatattattccccgctgctattagacttgataggactcgtatgaaaagattctagaataatggtgtgtacattgccaaagggtcaacgagggagattccaactgatgctcttgaccatgacccacagtagctggcagtagtctgggagacacactctgagacgcacaagatctgcatggaaattggcctcaccatgacctaagctgtgaaaagcgtatactatactctcttaagctacatagcatgacacgttgctgtacagctcatttcctangtccactgttatgtcacacaagagngntaattatcaatactgtcagacaaagattacanttatgtccctgtgggcatgttctacgcctatgtagatttttaagaattcccatggtatcacttgttatttgtttgacatgctgcttgcttgattgtacatgaaactatacactggcctatattactatcaatgtacaattttc

SEQ ID NO: 299326 - DNA, 329 bp, Homo Sapiens
aagtgctatgctcaggaagtctcagtgcgtgtgtccagttccgacaatgtcttttagaagtgattctgacagtattatttgacggaattacagttgcgtgtgaacccaggaaccttccacgtggagatcagagataccggctattcagtccagattctggcctatgagaggaggcttatcgatacggaaactctttacatgagctctaggctggtacttcccaaaggattcctgactatttgttggcaaaccttggatgctctactacaaatacagctgtatcttgaagtgaaattaccgagaggggatttccaaacttcgtgctctta

SEQ ID NO: 299327 - DNA, 619 bp, Homo Sapiens
ctcaatttatactgaatcttggcacgaatggcgctcaagaactactttgaatccatgcaatggctatactgaacacccctctcatgaatgggctgctgaaagatactatggttctttgcggaaataaaatatgtcactgatcttttagcatagaaacatcactggtacgttgcagtcaccctaaatgtggttaaaagatatagacgtgatcatgaacagaaaactattaacatgactagacctatccattatttaatggatcaccacactcatttttttgtacaaggccaaaagccaaaattactgattgtggccacacattttaattaacatgctgacttgtaaaagtgctctgtaaatatcgaaaccaatataatgttatgtgtgataacttgaatcttatgcacgtcacatttcgcataattctgcataatatctcagaagcttacttgttggttgccggccgctcctcataacacacatacagcgccccatctgatcttgtgcaatgctctgaaagacagcttgccttgaacatttcacgtttaatccttcaggaatttcgccagttcaccggagggatgtggccaacactcggattgggacgaattcatttctt

SEQ ID NO: 299328 - DNA, 620 bp, Homo Sapiens
  misc_feature (350)..(350): n is a, c, g, or t
cttcagtaatactgaatcttggaatgattggcattgaagatctatttcgtatccatggaattgctgtgctgaacaggctaatacatgtctggcctgattaaaggtactgggttccttttgcgtgaataaaatgtgtcactggtgttttagctattgagcatgaccagaaactttgacgcaacacgtgctctccccatgatttataggataacctcactcagcgtgtttacttactccaaacgccacggagatttatttcgactgcacattgtaattaacattcttaattgtaaatgtgttctgtaaatatggaaaccactataatgtcatgtctcataccttgaatattntacaggttacatattgcagtatgtctgaataagaatttgtaatgatttctgtctgccatgtgcagaggtctcttgtggagaaacatatctccagtgcttatcacttgttgcgttcggtcgttattaagatagatccaacgtccctatgatacttgtgctcagcctggaaatgacagtttgcatagaacaatccaagtctaattcttcaggaattgtgcagatccactgagaagagggagacacccatagggatgtggacagatgcatttt

SEQ ID NO: 299329 - DNA, 614 bp, Homo Sapiens
  misc_feature (437)..(437): n is a, c, g, or t
cctggctgcatgaattcggcacgagacaccatcatctgagacctctggcagactctagatgaactacccaagcaccctgaagtgcagcaataactggtgatagagatcgaagctggtctgaccattattgcgccacctacctatgatgctcgggttctgggggagtacctcgaccttgtatggagctaaacactcagattattaccccgagctacaagatctgtatggacttgcatcatagatctcagaataatgaagtgacattgccaagggtctacgagagggatccaactgatgctcggacacatgacattaagactggagagagtctgtggagcacattcacgagtggtacaagaggactgtgagtggcagtcaacttgactaaatgaaaaggcgtagactatatctttaggtagagagcagaacgtggtctncagccattcatagcccagtgtatgtcacatatagtgatattatcctgctgtcaaaccagagagttgaatggctttattctacgtcccatcccgacagagacaagatagctcactatacttggggcatgatctactcaggtataccttttccgtcccagatagttcaatgacaccctc

SEQ ID NO: 299330 - DNA, 254 bp, Homo Sapiens
  misc_feature (106)..(158): n is a, c, g, or t
tgctatctctaggcgtgattacaataaagacttacatcttgaggtagtgccgaaaactcttgtagaaaatttaatatgggaaatagagctataggtttcctgcagnnnnnnnnnnnnnnnnnnnnnnnnnnnnnnnnnnnnnnnnnnnnnnnnnnnnnacaggacgtgggctgtcgacgtatgagctccttggtagactcttactcaggtggtcgttcttcaccgtatattaatggttttggaggaaggtaaga

SEQ ID NO: 299331 - DNA, 455 bp, Homo Sapiens
  misc_feature (340)..(340): n is a, c, g, or t
  misc_feature (381)..(381): n is a, c, g, or t
gcccacactttttattcctgcttcgaaatgcaaatggatagagcacggtttctctgacagtataatgatagctttgtgagttagtttcatgtcatgctgggaactctctatgaggtggccataagcagcaaccagcccaaacacccacttgcgttctattagtatggaaccatttgcatttgttttttttaagctttatctttccttgtgcatcctgaccaagaaatatctttgattatgattaatgtattatgtcaaaatgtaggctagttaaacttttgtaaagttgcctggaatgtcatttgttaggttataaacacaagatctaaatgaagggttntatgtgttgtgtacaaatcttattttgaaatggacaaactngtcattacatttgtaaccttgtacagaggatttttcactatgtgcctagcttggtgtccattcagctaaaaatg

SEQ ID NO: 299332 - DNA, 681 bp, Homo Sapiens
  misc_feature (481)..(482): n is a, c, g, or t
tagtggatcccccgggctgcaggaattcggccgagacaggatcatctgaaacttctggcagactgggaatttactagctaatcatcctgaagtgctgcaattactggtgagagagatcgcagccggtctgacgactattgtgcataatacctatgttagagagactctagggaatgacctccaccttctatgatgctgagaagtcaagatattagctcgatctataagatctggattggactcgctatgaaagactcagaactaatcaatgagacatttgaaatggcttagacaatggaaatccatactgctgatgtaaatatgcacattaagagctatggataatctgaagagcacattcatagtcccacgagaaggacattgagtttgcatcatccttgactataatgtgcacattcatagtcccagtgtatggtcacataagagagttaattttccttgctgacaaaccagaggcttnnaatggctctgatctgtacgaccatggtgtgatcacatgacatggatcacatttactatccttgtgcgcatgtctttactcgagtgtatacactgcagaacactaagggagtgactggtgttttttgtgaacatgatgattgtctgaatgcaacatggacatttacactgcccaagaaacgtcccaatgacaacccccct

SEQ ID NO: 299333 - DNA, 648 bp, Homo Sapiens
  misc_feature (457)..(457): n is a, c, g, or t
ggctgcaggatttcggcccgggatctattgagatgagaggaaataattggtagtacacgcgactcgagcttctcaggagcacccagtggtgctgacaaaatgatgtgacggggcccacaaagtagaaagggacgctgcaggcaaagatggaaggggtatgtttgatgccagctctggacatgttgaagatgcatgtcgtcactcgggagattccactctgatgctgtccacactaaacatcacccaacgggccaatgccattggtaaagatgcttcccgagtgaatgctgatagcgaggtgattgagcgttactcgagagactctcgatccttgcaatatgtgttcaagactcttggagtgaggttcattgatgtagtcaccaacgcgatgattggagatattgtgttgagaaacatcttcgacataagcccattctatggaactgctgactatgtncaagtaaagctacacagtttactgctccggcttggggatgctggccttattctgagatgcgcgatggtttcacttgaaaggtggctttcttcgtggaaggattcataccggcatactgatgcaatgtgttcgcatgagttaaaggcccggaaaggtaatcttgtaggaatcagtaatagttccggccagat

SEQ ID NO: 299334 - DNA, 624 bp, Homo Sapiens
cagatctgatgctattgagattcacaaagcatggggtaatgcccactgctggcccactgagagctatagagcacagactgcctgtggatgataaaactgccagctgtgcaccttatgaaaaagtgtcatatgctcttgtagacactgaatttgacggtataactctccatccatgctgaaagagcacatcccaaggctggacaggcagcagctgataccgcccatccagtggagctaaacacgatcatttctcatactgtgccacaggctgccttccaagaaccggaggacatattgaatacaggcagatgattaacctgtctgctgatagtttcagatcctgcgaacagacccattatccctgggagattagcacccactcaaaggtccatggtgcgaacagatcacttacagaacatagtagggcgctcctacacgcatgtggtgaatgccattgtcttggcgaagggaactcatgatgcatcatgcacttaccagcgacctacactcgtattgcgtgcctgactgtctccagtgatcagacctctacaaagacgtagattgagtgtggaccctaactatacacctgcaatactattcagagtaagacaatgggcactgtgg

SEQ ID NO: 299335 - DNA, 624 bp, Homo Sapiens
  misc_feature (512)..(512): n is a, c, g, or t
gagaacggactagtgcctaacctcatgaacaggtacgtgcacatagcttggaggaaccgtggaggacattgaacgcatgccattaactgaagccatttcgaagtggcatttgagggtcaaacgatagaacttttgtagcaggcacatcagtttagatccacagtcacgctgaacatgggaacagaagactagacggagacagactagtactagggaactcatagaactctggcggactacagagacgaatgtatgcaggtgctcaaactcactaggcacaatagtgaaagagacctgaaccatctaccgagctatcttatagttatagcagcacaatgatagctcattatcatatgtaggacacttgtactgcttgatgacatgaagccgagacaagatgtcaagaaatggcacgagatggctcactaatatgatcgctggctggaaacagcattatagtgttggtggacaatacacgaagtctcagactgctatacgactgcattaagctntgagcaaactgactgtgcatcaccacaaatggtgatccaggacatgagtttgaagcttggaggccatcagcttgaaagagaagacgtataacccaaatgggtggacaagctt

SEQ ID NO: 299336 - DNA, 651 bp, Homo Sapiens
  misc_feature (168)..(168): n is a, c, g, or t
  misc_feature (587)..(587): n is a, c, g, or t
ctgacctgatgctattgagtatcacacagccttgggtaatgcccacggctggacgactgagagctatggagacagactgcctgcagatgaggaaactgccggtgtgcaccctatgaatgcatgagacgtagcacattgactatagcgctaggacgctgtcagacagcntgagtagcccgcacgaatagccagaacaatgcctacactacagtatcatgctctcatgacgctcgccacagctatggatccaaagaaccggaggacttattgaatacaggcacatgattaccgtgcctgctgatagcttctgatccagcgaacagacccattatccctgggagcttagcaaccatccaggttaccagagggcgaacatataactgccagaacatagtggggcggttctacgcgcacttggtgaatgccatttccttggggaaaggcactcatgatgcatcattggcctaacagcggcacacatagagatagcgtgcctgacagtctacaatgatcaggctcttccaaagaggtagatgagctgtgcacactaactgtaccactccatcacactatagaagaacgcctgntgatagatgttgcaagtaaacgaaacgcttcccctgtggacgtgtaagacattgtacacgaggg

SEQ ID NO: 299337 - DNA, 643 bp, Homo Sapiens
  misc_feature (331)..(341): n is a, c, g, or t
  misc_feature (426)..(443): n is a, c, g, or t
  misc_feature (459)..(514): n is a, c, g, or t
  misc_feature (568)..(603): n is a, c, g, or t
ctgtggagtctgctttcagctcagttatctatcggccagactgttattcacttagtacagttctgttacagagactttacataatctgttttactgaagctgctgagtgggatttaattaactttaggacaggaatttttttgggcccgaatagggcttttttggcctcttaaccgccccctcccccctttaagggaaaaggcgaaccctcctttgctcttggtttggaggggtttttttgaaagggggcggtttttggaaaaatttcccaaactggagaacttggggttttggtcaacctaaaagataaaaggggtggggggaccccccnnnnnnnnnnnaaaggggggaacccgcccctttttttccccccattggggggggcgttttttccaacacccccgaaaatattctctgaactctttnnnnnnnnnnnnnnnnnntgtgtaaataacccgnnnnnnnnnnnnnnnnnnnnnnnnnnnnnnnnnnnnnnnnnnnnnnnnnnnnnnnnataaccgggaagaggcgcctcttccccccccttttttggaggcttttcccccannnnnnnnnnnnnnnnnnnnnnnnnnnnnnnnnnnntttttaacccgggtaatagttacttggctggagagaatat

SEQ ID NO: 299338 - DNA, 127 bp, Homo Sapiens
ttttttcaattttggggactttcccccatttggatcgggaaatttaaaggggcggggggtattttttaaaggggttccctggaaaacaaaagagtttccccaagggtgtgggccccccccgcggtga

SEQ ID NO: 299339 - DNA, 101 bp, Homo Sapiens
tgcacgagttagaaccccgtcctgggattgccccctggatcaaacccgggatggggttcaccccctaaaaaaccggcctttggggggaaatcccctttggg

SEQ ID NO: 299340 - DNA, 201 bp, Homo Sapiens
  misc_feature (149)..(158): n is a, c, g, or t
aacctggtgctatagccatgtcaacccacccgggtttttgaaatggccgtaacggaaagcctttgggccgggtttcttttgggttgttggaacaaagggcccaaaacacggaaaaatttttggccccttggcccctggggaaaaaaggnnnnnnnnnnaggggcgcccccttttccaaaaaattttctcgggggttttttg

SEQ ID NO: 299341 - DNA, 697 bp, Homo Sapiens
  misc_feature (382)..(383): n is a, c, g, or t
actagcttcatagtttcaggtctcagattcaagtctttaatccatttttatttgatttgatttttgtgtatggtgagatgggtttaattttatccttctgcatatggttattcagttttcccaggatcatttattgaaaagactgttgttttcccagtgtatgttcttgatgcctttgtcagagatgaattgtttgtaaatgtgtagatttgtctgcgatctctattctgttccactgtcctatgtgtctgtttttatgccagtagaaatatattggcaataattagtacagaagagctgaaacaatgaaatgacaaaagtgaattatactgatataattcattatgctcactaaatgcaatagcatacagctaggaaacannagtagtgcacaccgtattaaaatacaacacaattcaatatacacagtgctcacagtggccatcgttagagtgttgaagaaggggatgtagtcagcaaaagttgtacaggtgacttcaaaagtaatcataagcacttatgattacttttggcttaatttcttaaccaagactggagacacaggtgttcattatgtgcttattattattttaaaaaatattttataatatattgtttctattcagaattaataaagtaaatcagtggaacattgttagttattgcctgggctgggaggtgattacactttaatcta

SEQ ID NO: 299342 - DNA, 123 bp, Homo Sapiens
taggcaccatggatcagttgggaaccaaaaatttttttccaaaactttgaattttatccccaaaaaaaggggggccttttcccaatttgggagggaaaaacccgattccccgggggccaaccc

SEQ ID NO: 299343 - DNA, 249 bp, Homo Sapiens
aagaggtagtaggaagccggagaatccgagggtaattgaacggtcccggtttttttaaggcgggtttcctggaaggaaaagggggacccttacggttcctaaaaaaattttttgaaaaggactgtgttttaaaacccggggggggttctttaaaaacgttttggcgttttttttgggggacccttttcccccgggccctttgggggtaataggggtgtgacaaaaaaattaaaccgtttttaatagaga

SEQ ID NO: 299344 - DNA, 308 bp, Homo Sapiens
  misc_feature (18)..(18): n is a, c, g, or t
  misc_feature (27)..(27): n is a, c, g, or t
  misc_feature (47)..(47): n is a, c, g, or t
  misc_feature (172)..(182): n is a, c, g, or t
  misc_feature (193)..(263): n is a, c, g, or t
gtgcagggcagtgaccancatgctggncgatctactctcagcatggnacccgcccctcttggcaaaaccaagggttggcttgcctggttcccaggaggggggactttggggccccacctttgggcttccggttggtcgggtttggcctccccctggaaccccccaagggggnnnnnnnnnnngggaagagttnnnnnnnnnnnnnnnnnnnnnnnnnnnnnnnnnnnnnnnnnnnnnnnnnnnnnnnnnnnnnnnnnnnnnnncccccctgccctttttgggagaaaaaacaaggggccggccggggg

SEQ ID NO: 299345 - DNA, 264 bp, Homo Sapiens
  misc_feature (26)..(26): n is a, c, g, or t
  misc_feature (65)..(65): n is a, c, g, or t
  misc_feature (169)..(169): n is a, c, g, or t
cctatataatcttatgcacatagcanagtttttgttggtattttatcaggactatgaaaagtaangtatatcctcattgatacttaaaaaagatatactatctcatattttttggggaaaaaatcctgattttaatggggtagggggttcccttagggaacttggcttnggaaccccatggaaaggcccctccttttttatattttcccaccctttaaaggggtgggaaagggttttttttatgtgggcgctaggccctttttt

SEQ ID NO: 299346 - DNA, 208 bp, Homo Sapiens
  misc_feature (26)..(26): n is a, c, g, or t
  misc_feature (58)..(58): n is a, c, g, or t
  misc_feature (104)..(104): n is a, c, g, or t
cagaagttgtgttcttcgcaggattnttctgagccttttaccacttcagcctagcccnttacccccaactaggaggggcactgccccccacaaggcattacccngctaaattcccctaagaaagtccaacttcttaaacaccattccgatttactctgggtttaagggggttttaatatcccctgggctctaccctttgtcttatttg

SEQ ID NO: 299347 - DNA, 394 bp, Homo Sapiens
gggctgcaggaattcggcccaaaggactatgaaccatgaggtgttcctttacgacatgggcaccctacaacaaggataaaacacccctcttacttatatcaaaattctcgcaaactactatgaactgaaatgatcaacaccaactctgtcaaaactatactactgatactctttggtgagcaagagaaatgaagatcacatatgaaaatcatgtagctatactaatgtaattgatcctatactttcttaacaaacgtaacactcacatgtgcttgagagttacagaggaatataatgtatgaaagaactattccaatagcataatgtacatgggaatacagtcctgatcttcatactcatattcttcattgagtaccatgaccacttccaattt

SEQ ID NO: 299348 - DNA, 434 bp, Homo Sapiens
ctacgactgtgtgctcagacgctggattccgcggtaccctcaaaccacagtctaggtacggggcgcacgagccagccagcgcacctgcatgctcggactgacgcgctgcgccccgcttagaaccaggctctgctccgagcagacgtagccccttaagtcagccacactccccgataggctgcctgggcgtaatgatgaatgcggaccgcatcctgctgagcagcgctggctcgctcaacgagctccggtctggagccctgagaggggtagctgttctgagcgctacagccatggaccgttgatcatgaagcatgtactggactgaggggacacgggacacaggtccccagctgagagctgtgggaggacagctgtcttagcttttatcatcggcagagggacgtctgagatcctgctataacaactggaggaac

SEQ ID NO: 299349 - DNA, 348 bp, Homo Sapiens
aaaatgtgatactttctgatcttgtttttaaagttgaaatgcaacaaactttttcttgctgtatataaatattctgcatagtattaataagcatagctttcaagaaattgtcacaaaaggttttattctctttgcttgtgactatttttcattgaagcatgcgcttacctatgctgattcttactaaaagcataggctggggtatttattggcgaaaggaaatgtgtagtgtgggctggactgttggtggaggctggctttttagcccacttgctatacatgctgccaatggatttaagacttgaaatgttgaaagttgagtggaattatttccctcctaggagtgag

SEQ ID NO: 299350 - DNA, 388 bp, Homo Sapiens
ggctaatgaggaattgtctaacaccactcgggagccatccaggaatagctcagtgatgcaaatgtggcctcatatgcacgagtttactctcatcattctattcagctgcaaaggtcagtatccatacagcaccttgcgctatagacctggagtcattccttacaacgttgggcctcgcgcaatgccgataatgcacagtgatcattactatgcatcacacttttgctactgcattcatctgtgcactgactgtcctggatcacataatgctcccactatgtgtgaaacttgacaggcatactcgttatcactatactgtcagacgcttggactccattgctctctggagccgatgaactgtaactggagttactgtggagattatgca

SEQ ID NO: 299351 - DNA, 387 bp, Homo Sapiens
cagaagtgttactaagccagagacctcgctccaggggagccggctggtccactgcgtttatggaaaacccaggcttgggcagcaaactctctgactatgtacagcagacaagctatattgaggacaactgccattctcgagtaatgcgctgatgtgaagataaggatgtatatctgaaccccgttgcatctacatgttctcgctgttagaaagatgagtctcgaactctcactcctgtggatcaatgtagtctgactgctctgacagacatcatcgagatcttgaagcgtgacattgctgcgactgtacctgagcgttcgcgagatacgaatgaggactcattgcattgagatcctggaaccattgttgagctggtcagattatgta

SEQ ID NO: 299352 - DNA, 440 bp, Homo Sapiens
aacggaggatgaactgccagagctggaaagttgtatacgtcgctggaggacatgcctagatgatgaccccagagatttgcaggaaagcatatgccgattccatcgaacaatggaatcaatgtggtctgacaaatctatgatgcgacttccttatcgagctacatgccgtagaagttcactatggccaagctacatgctgtgcactactgggcatgtatgtcagatcatcgtgaaagctgatggatgaagagcaatgatatcgctgtgacataatcatcatgggaagagctagtgagggactgtactgctggctgtagaactgccagtgcatactgcttaatggacatacatgatcacgcacgagccttagtacacgaggagtttgataagacactgtgcagcgcttgttggtatagatacattactacgcatatgagaca

SEQ ID NO: 299353 - DNA, 318 bp, Homo Sapiens
tgcctgataaacatccttattacatatcagagaaatgagccattatgtgtttgtgactctcatatgtagagcttaacctactttggacctttgcttaccttgtcttggtcgttccaggaagttccttattagacgctagagccgtcagcctaaccctgaatagcaatggtctatgtcatctctcacaacattacccagtgctatggagcatgagcactcacagctgaccatgagggcgcgtgcacatgcatgtatgcgatgagcggctgaccgcgctctgcgaatggaatctgagacctgcataggactgactatgtg

SEQ ID NO: 299354 - DNA, 361 bp, Homo Sapiens
  misc_feature (320)..(320): n is a, c, g, or t
aaaacctatatatccctgggatctgctttacaatattttaaaggcatgaaatagaaacccatctattttcagttcctgatgaggctgatttttcacccttttccccacctctggatatatggctgtgtatgtgtagttgtcatcttaggaactaaaattaccatgtatcttttagactcatgtgctggatgccaagaaatattaaagaatataagacacaaatacaaatcctgaataatgagttgagctataaatgcactaaaaaatcaagttgtaagtatgtgaaaattaaacctcaaatattacaaaagggtgaggtntaataacagaataagggaaatgtttcaaacctggttttgca

SEQ ID NO: 299355 - DNA, 418 bp, Homo Sapiens
cattcattgacctacacactacattcaacatctgcctatgatgaacccacttctcactccttgactcttgcctgaaccgacacctgacaacgggactattcctagacatgcactacttaccagacgcctacagcgcctatacatcaatcgggcacatcactcgtcacgtgaattatgtctgaatcatacggtaccttcacgccaaaggcgccttaatattctatatctgcctctaactacacataggactaggtctatatgacggttcatttcactactcacaatcctgagacatcggtgttatcctcctgcttgcacctatagcaacagacttcataggctatgagctcccgtgcggccaactatcattctgaggtaccacagtatttacagactgactatgcagcatcccatacat

SEQ ID NO: 299356 - DNA, 368 bp, Homo Sapiens
gcccggcagaccttctgtaccacactcatgctgaaacatgggtgcagtgagcctgttgcagctctctgagcagactcatttcctgtgtccggccgttcttcatgcacactcggatgtaggggactcggggagctgttcgggctgttagattttcgtgaggcttccctcacctgcggacttcgtgcatcttagtgtcagatgaactaccgactaggtggtctgcttaagcagagtatacttttctcctggttttctggaagagaagagcatgtgttctagtgctgacggcgcggccttcacgtccgcttctccccaagtggtggcagtacctggccataggaaggtggcttctagcagcctgcaccttt

SEQ ID NO: 299357 - DNA, 369 bp, Homo Sapiens
cagacaccttgacatctgtacctagatctggcccgcttttaagacgctgtcgatacacgggcggttcaccctagacactggaaagcacatgggcagtgccaacttcagcatcttagtgcaccgaccttgccgtcgatagtaaacgccatctgctgtcttaggcttacgagtatttgaatggctgtccatgcagatctatcacgtgaaagaagctaaatcacttaattacccgatgggatgtagttaaacgtatggatggcggaagctcatgtacctcatgtaccctgtaacacgcagatgccctgagccctgtagtgagtgcattatctaaggacataagctcatgcacggattgacgggcaagccaca

SEQ ID NO: 299358 - DNA, 399 bp, Homo Sapiens
gacagaactactctctagcatacaacctttgccatgccatttgcccttattatgtatatgcgattgaatctgaaacctgtcgcaatagatctagtacctcatggccaagattaaatcgtatgaccaagcataatatagcatggactaacccctatgccttctgcataatgaattaacttgaattaactatgcaaggtgagccaatgctgagacctccgaaaccagacgagctacctatgaacagctagaagagcacacccgtctatgtagcaaattacagataggatttatcggcagaggcgacaaacctaccgagcctggtgatagctgttatgccacgatcgtctcttacttcaactttaaatttgtgcacataactctctaaattccgaagtaaat

SEQ ID NO: 299359 - DNA, 711 bp, Homo Sapiens
  misc_feature (289)..(348): n is a, c, g, or t
  misc_feature (465)..(465): n is a, c, g, or t
tactttgggggaacgggtgcacttggctatgacttgaggaaaacacagtgttattttaaagtataagtgttcctaacttaaatgttcctgaagtgaattaaatggcaattttgtgctattcttaagagaaaggatttacacctacattgtaaattataaagcaagctgcagtgttctcagcacccacttcatgctgtttctgttaagaattcccagaagggctgcttagaatatactagcgattaagtgagttacagtacattctaaaagattttataataccacagannnnnnnnnnnnnnnnnnnnnnnnnnnnnnnnnnnnnnnnnnnnnnnnnnnnnnnnnnnngttatgatttatttgatagttcatttctcatattaacataggatttctggccccactccctattaagaatgtttcaagaggcgatatttaatggtgcaaactctgtttttctgggcnaccaaatataaaatatcaaaagaccgaatgtcacccttgactcaagtattggggatgtttacaaaataattagactgtcattaagctgaaatattggttgattacaatgaagtaaaatattactgcaccaaggttcaaattcgaatttatcatcctaactcttttggttttcaatagactgagaagagtaaaggcttttcttattgagctatctgatccttctctgagttctgcggtcgtaaggtt

SEQ ID NO: 299360 - DNA, 217 bp, Homo Sapiens
  misc_feature (56)..(69): n is a, c, g, or t
  misc_feature (81)..(89): n is a, c, g, or t
  misc_feature (94)..(121): n is a, c, g, or t
  misc_feature (131)..(143): n is a, c, g, or t
ttttttataaacgggtttaacaaaataggacccttttaagggtcccaagggtaaannnnnnnnnnnnnnaccccaaaattnnnnnnnnnaaaannnnnnnnnnnnnnnnnnnnnnnnnnnnccctttgggnnnnnnnnnnnnnaggaaaagtttttaaaaaaaccgggggttataaaaacaaaccttgtttaaaatattttgtgggggggccccccc

SEQ ID NO: 299361 - DNA, 362 bp, Homo Sapiens
  misc_feature (119)..(133): n is a, c, g, or t
  misc_feature (147)..(204): n is a, c, g, or t
  misc_feature (247)..(256): n is a, c, g, or t
  misc_feature (259)..(269): n is a, c, g, or t
  misc_feature (296)..(308): n is a, c, g, or t
aactgcccaaatttttgtaagattcctccctccttggaaccctttgtttggaagagaaggggaatgggccctgggccctttttgttggggggcctttcggcccggggcttggggtttannnnnnnnnnnnnnntggtttaggatacnnnnnnnnnnnnnnnnnnnnnnnnnnnnnnnnnnnnnnnnnnnnnnnnnnnnnnnnnnggggcccggcgggtgcacaaacaacccttgaaaaaacccattnnnnnnnnnncgnnnnnnnnnnnacctccccgagggaggccaccacaccnnnnnnnnnnnnngggtcacccagcgcgcccgccctaaagagcgccccttttggtaaaacaacaaaa

SEQ ID NO: 299362 - DNA, 120 bp, Homo Sapiens
  misc_feature (16)..(16): n is a, c, g, or t
cagactaggggaaagnatacccacccctcttccaaaccttttttataagggaggggttttttgctaaaacccccagcggtttttattccggggccggggtggttttcctgggaaaggggc

SEQ ID NO: 299363 - DNA, 191 bp, Homo Sapiens
ttgagcatcaaggttatttccaaaagccagaatcatttaggcagggcaaagggcattaaaacctaaaaaacccggaaaattttggctaacaatttggggaaaaccggggaggcaaatggaaatttgaagaccatttttttgggggaaaacccccaggggggaaaacaccctccaagaaccccccaggggag

SEQ ID NO: 299364 - DNA, 662 bp, Homo Sapiens
  misc_feature (90)..(98): n is a, c, g, or t
  misc_feature (104)..(104): n is a, c, g, or t
  misc_feature (106)..(106): n is a, c, g, or t
  misc_feature (108)..(108): n is a, c, g, or t
ccatacactgacagtttcatcaatgtggtcatggtaactatttcatttgatgttcctcctcaggagatcctcacacaggtttttttgacnnnnnnnnntactantntnctctatttccgcgttgagaatgctaccctggctgctgcatatatctccaactctgtctcatcaacccgtcttttggcacatacttctctgatgaatgttctgtgcaccaagaatctttctcagatcctctcttgctgtgaagattttgctctcatcttgcagtctactctggatgatgcctctgatgcctgggggattaaggtggagcttgttgaattttaggattgtgatcttcctgtgccccttcatagagcttttgtttgcaaagcagtatcgtccctctagtcccctcgccttggttatttgctcccatggaggatttgattctttcaggggttcttgaagaagcctccatggtccttactttttcttcctgcggccttcctttccgatacctgcggtccctgcccaccttttgttgtgggttggtgctaaacacagccttttaggcctggtttcgttttgacctcttgcttctccgctttgttttgggggcccacttctccttttcctccttaagggaggtttgggttcttttttttcctttggcatta

SEQ ID NO: 299365 - DNA, 552 bp, Homo Sapiens
  misc_feature (215)..(251): n is a, c, g, or t
  misc_feature (294)..(336): n is a, c, g, or t
  misc_feature (388)..(439): n is a, c, g, or t
  misc_feature (455)..(482): n is a, c, g, or t
gcacgagaatggattagagtgtggatttgtagtttatagcatgagatctgacatagagtaagcatttgtatttatgattatccttgaaatagatttcacaattattaacccagcatcaactttgggtaaataaaatgcactgaaaaacttttggtagcctccaaggggtgggataaaggggccgggccaccaaaccgggtaattttgggcccttnnnnnnnnnnnnnnnnnnnnnnnnnnnnnnnnnnnnntaaaccccgggacctcaagggccccctggctcgggttttaaannnnnnnnnnnnnnnnnnnnnnnnnnnnnnnnnnnnnnnnnnntttttttaaaagggaaatccctctccgaagagaagggtttggaccccggccnnnnnnnnnnnnnnnnnnnnnnnnnnnnnnnnnnnnnnnnnnnnnnnnnnnnaacaagcccccctttnnnnnnnnnnnnnnnnnnnnnnnnnnnnccctacaccctctgggtcacaaaggagtttttggggggccgggctttttagcaggaaaataaggggccca

SEQ ID NO: 299366 - DNA, 686 bp, Homo Sapiens
  misc_feature (212)..(213): n is a, c, g, or t
  misc_feature (215)..(216): n is a, c, g, or t
  misc_feature (219)..(220): n is a, c, g, or t
  misc_feature (224)..(224): n is a, c, g, or t
  misc_feature (226)..(227): n is a, c, g, or t
  misc_feature (234)..(234): n is a, c, g, or t
  misc_feature (237)..(237): n is a, c, g, or t
  misc_feature (240)..(240): n is a, c, g, or t
  misc_feature (265)..(265): n is a, c, g, or t
  misc_feature (267)..(268): n is a, c, g, or t
  misc_feature (285)..(285): n is a, c, g, or t
  misc_feature (293)..(317): n is a, c, g, or t
  misc_feature (340)..(340): n is a, c, g, or t
  misc_feature (343)..(343): n is a, c, g, or t
  misc_feature (406)..(406): n is a, c, g, or t
  misc_feature (410)..(410): n is a, c, g, or t
  misc_feature (436)..(436): n is a, c, g, or t
  misc_feature (450)..(450): n is a, c, g, or t
  misc_feature (453)..(465): n is a, c, g, or t
  misc_feature (481)..(481): n is a, c, g, or t
  misc_feature (513)..(551): n is a, c, g, or t
  misc_feature (555)..(555): n is a, c, g, or t
  misc_feature (567)..(567): n is a, c, g, or t
gagagaactgtttccgttataagccttcagaaacccaaccacgtctttactgtgtctagctttttaaatactgattggttagttttatttttgcccacagtttcttgggcaaaaaggttcttcattttgtctgaaaaagaaattatttgccagaggtatttggagcctctgtgaaggggagatagagtgggggtgggttgtggggaggggtnnannttnngggntnnggggttntgnttncttcctggaatgttaatttcctgtncnnatgtgaaaattgggaanttaagggnnnnnnnnnnnnnnnnnnnnnnnnnggagacgggtttaatttgtaagnaangttggagtggagggaaatgattttgaataatgggagggttgaatttttgggggtaaggagaantttnaaagtaggttgaacaaaaggtgtggnaattaaaattgggnggnnnnnnnnnnnnngaaaagatggggttgnaaaggttgttttaaattttggggttaaggaannnnnnnnnnnnnnnnnnnnnnnnnnnnnnnnnnnnnnnaaanaattgagggagnttacctttggcttttaaggatgtggattattaaattttggcaaaatgggcgctcccttcctggaaggaattccagacgctgtttaacctcccgggttttcacccctttattggctttca

SEQ ID NO: 299367 - DNA, 739 bp, Homo Sapiens
gatcatgcaggtgggggcgatctgccattctaattactctgccagactgttgctagaaccttcctcctgatatcactccactgctagagatgggcgtgggccgctggacgatcctgattgattgctatcccactagggtctcgaggctagctccccactgtccgctggctcaggctcagcggggggtacacacactattgtgaccctatactatgatgtcgaaccgcacaacctccatgacgcgactctgagatcgcttcacgaggagaggccgcctgacctcactctgcctagtctcaaggcattaattcatgtaggcaagggcagcatcaagggcttctgtcataccgagactggaaacctgtcctgtgcagacctctatctatgcgtggctcttttccaggtctccacttgcgatgtacatggggcggtcagctgggctgcatgccaatgctcgaccaatccttgttcacaaacgatcatgctgctcaggttatggcttacctgaccactacggatccacaagtttacgtgctgcgcatccagctgtcctgcggacatgtgctcactctgttggactgtgcttccatttacgactcagactcaactcagtgaggttgacattcactggcacggggccacaaaggacctacctgggctcttttgtgtctgttcgacacttggttaacctggtcccattaacctatttagggtatatacaaattctgagcggctttca

SEQ ID NO: 299368 - DNA, 564 bp, Homo Sapiens
  misc_feature (288)..(288): n is a, c, g, or t
  misc_feature (539)..(539): n is a, c, g, or t
gttaggtaagcaggtctagagagttgtggcacagctaaatagtcatagaactgggactagaattctcttttgaggccttagaatttggtcacgctgcagtatatcctgcatctcaaaagctttgtcttctgagggtgaatttgttgaaaaccaccaagaggatctcaggccaaataaggtagatgaccagatttgataatctgctattagtccaaaatgaactggctttaacaagaatgttttccttgagaattgtagtgaatgaatagcctattaaatgcatcgcanaaactagatccccctaaaagacaacagggaatgatagactatcccatttgattcatctcatatatacacagcagtctcagagttgcagtgccagtaccaccactactaattatgatcacttagacataattactaattatgattgctactatgaaacttatgaaaaaagtttctacatcttcatgttcactggtgggccatatagccattacatattgaattctccttgaaaggcttctttagattgattngctaagagctctgggtttagggctt

SEQ ID NO: 299369 - DNA, 697 bp, Homo Sapiens
acgggatcgggtagctagacaatctcctctgcctcccatacactttccataaggctatgacttagcaccttcaactactgagtgagctaacagcccaaagaaagacaaaacactacccctgtgcccctttacttctgtccttaaccaaagtaacctatgtagggggtaagcccaacgctgacgtgttacaagaagtactatgtccagattcttgaactacaggaaacaagcaccttagcgagagcagcactaacatgagcagccgcacaacatcccggggggtcaactactgccttgaccagggcgatagataaccaccgccagagacgctgctgtgtatactaaaccaactacctgacctctgtactcactactcgagggctagagctctgaggagagctatactaacacagactgcttgtaacagatgtctacgggctaaatgtgagcaaatcagttctggagctgccagcctcataggagactggctggctaggatactacaccagaatcgtccagaccccctgtaattacaattgttcagtcatacgtgtggaacatactgaaatagggtgcttaccataccaggcttttttaatataccatggaaggctactagctcttcctatttctggggacacttttgctaataagctaatttacccgggcccatactggatcacaggccaagggattg

SEQ ID NO: 299370 - DNA, 405 bp, Homo Sapiens
cagacgttcttttattcccaggaccaggatgtgccctatatcactttaagctagagcgtacccatcaactgcgactgcactgggatggagcacataagacgcagctacgtctgatagaatgtgcactcaggcacacatacggactacttgaagcacgaggattactcaacggggctgaccatagtctactagatgacacacgaaacccaggactacaagcactgcttattacagattgcactgggtcactatgataccctactacgagccttataatacttcgagtatccatggaccagttccgacggtatctacgggttaccatttgtctgagtcatgggatttcacgagactcacgtgataattgattgacgtgacgtcaataagtgatgaatccgtcaacta

SEQ ID NO: 299371 - DNA, 274 bp, Homo Sapiens
  misc_feature (83)..(186): n is a, c, g, or t
tcagttctcattcttctctcgcctgctgccttgtgaaggaagacatattttcttccccttctgccatgactgttaagtttccnnnnnnnnnnnnnnnnnnnnnnnnnnnnnnnnnnnnnnnnnnnnnnnnnnnnnnnnnnnnnnnnnnnnnnnnnnnnnnnnnnnnnnnnnnnnnnnnnnnnnnnntacacccgttagtctcaaaacaattctctcaaattctgatatacagacctttaactagccactttcattctgctgtctcattgtctaa

SEQ ID NO: 299372 - DNA, 368 bp, Homo Sapiens
gtatcatgcattgagctgaccctgcttgatcctctggagatgcggctgatgttgacgccagagaggaccatgctaggactgacaagcgcgctgcgggatacctctatcacacgtgctaagctggtgagagctgcccaccaaaggactggtacaggatgagctgtacgcctaaccaaaacaaattctcgggcaaaggacgtaagcatgcagacgctgaaggtatacttgcgatcccaatttgtggaccatactgaccaggaaacgtctatcaatgagacacctgaggacatcaactgccagtgccggactgaggtgcaacgcctgatggaccgcatacagctatcatggtactatgtgctcatgctgga

SEQ ID NO: 299373 - DNA, 414 bp, Homo Sapiens
gagaggtaatggagacctggtctggccccgccagagctcagggctatgccctcatgtgcgtactgatgtggctggagagtgagggagtacgcaaaggcccttctgggtcatgcctgcggagctgccgccttacctttgggggagctgaaaaggctgcatggaagagtgacttaggaaccagcctgggcataattagggcacacagtgaggaccgcacagagcaggatcagcgagttgtgtggtttggtgtgtctgctgtaggtggtggtgacggtaggcaggagacagattttggacttgattcttataaagagctggtaatgggctctaaggcctttcagcagagagatattcctagtggctgcgaagttgcttgctgtggtagggcatgaaggcaggaagatagattaggta

SEQ ID NO: 299374 - DNA, 353 bp, Homo Sapiens
gtttttcaactcatttccataggtttgtatattttctaattaaaaggttgtggcgggagaagttcaggtggaaataaaaaggagagggcaaactataggataaatgagacttaagggacatggcaaccaaatacaacgtggggatcttgcttggtccctgttgcacgcacaccaactggaggaaaacactgatgagacaagcagggagactaaacactgatggagtgactgatgcaatgaaataggaaggacatgagagaagactggccatatgttgataactggtcatgtgtatatgaggatcgagtatattattccatctacttttgcatgcttgaaaatttccctagtaa

SEQ ID NO: 299375 - DNA, 206 bp, Homo Sapiens
gcaacctctgccttctgggcccaagtgatcctcccaccttagcctccttagtagctgggacgacaggaacataccactgtgcctggccaccttaacagtgttaaagtatataactcagtagtcacagtgttgtgcgaccatcaccccaatctagttccagaactgtttcatcaccccaaatggaaacctcacatcccttagccccg

SEQ ID NO: 299376 - DNA, 381 bp, Homo Sapiens
cgcgagtgtccttgtttgccaaacattcacaggccgcccttacgcgtgcgtgtatgtccatctactcacttactcgtcccactaaagccgcttaatccctctcgcccgaccttgcctggatcctacttcgctcattccttttcgctcctgccttccatcctggatctctcgtccgtctgctctttctacttatctgctgcctctctgccctttccttcttcgcatgtgtctttttctatacctctataccagtatctgctcgtgttcatcatctttcctatctatctgttcgtcttccttatattcaccacgcgcatattctttctaacctgtctatatctcctgcccttccctccctctatcttactgcttccttgctac

SEQ ID NO: 299377 - DNA, 417 bp, Homo Sapiens
gcaggaattcggcactagctcgagccttatgcggaagcggatacatagcgggaaaaggatattattgactcggtcgccctgttattgagagaaggtacgacattccctactatggaatacacatccggatacgttgcaaatgtccgtgaaggttcagtcagaatggatgatgatactagacgatactgttacgatacacactgaataaactgattgacttaaatgctctgagagcggcactgaaagtccgaggccaagaggagccaatcagttaccttcagcaagtgactaccctgagtagaaagtgcaactgggacaaaagcaattagagatcacgggaattcaattctcatactcttgcaaccatccctacggaatatgaatgacctcttcagtcaactatcctgtccatggtgc

SEQ ID NO: 299378 - DNA, 621 bp, Homo Sapiens
tcaaaatgtttctgttctctgcaccacagttgcttttaatttagcaatacaagtatgtatagatactgggattagcttcagagcctgcataattactaatgagaaaacatacttagtgtcctcattagttgatcatttcaagtatttttcagcatactaggatgttttctggtaatcagtgccacttaacggagtaacagacttgcaaatacgagaggtgctgctcagataaaaccaggcaccagcaaatggcatttaaatgtgttcacaagatagcctatgaaacaatgtggcttaagacacgttagaactacaaggtaaacagaatgaagctgcaaaaagagtggtttcatgaagcatctcagaagaccctctcaaattgttaccaattcaccagatgatttcacgccagttcctgcccctctgtgggccagtttcctgatccaaatggtaaagagattaagctaaattcattcccattatctctccaggcttctcattccctgatattctgaccataatattaataactgctatagttccactatgagtacaggtcagcattttctaaaacatggtgcccagactgctcctacgagaaagaggtggggtgtttgcttt

SEQ ID NO: 299379 - DNA, 337 bp, Homo Sapiens
aagaaggggagctgagttatagagagggaagcaggggagcaaaagctattgcaagaccctggagatccatccttgcatgaggcagagtggagggacccagtggacagcaagagactgagaagaataacgtttatccaatgcctggcatttattagagcatctaggctctcagtaaatattagttccttgactgagtagatgcttttcatacattctctgctcttcataaagatcccattgtcctcatttaacagaaaaggtcatctggacttgaacccaggcccgcctcactccttggcccatgctctccaccagaacagaggctgagaaccagaag

SEQ ID NO: 299380 - DNA, 419 bp, Homo Sapiens
  misc_feature (342)..(342): n is a, c, g, or t
ttccttttgaatttttaattgcccagtactccctgaagactttcaaatgtcaaatgttccatccttctctccccttagactctggctcccagatatgtattaagaatgatctaagctttcacttgcatctcaggtaagatgctcttctgtgtccctctgggtcactagacactgggggagctctctccagtcctcagctgaaccatgccatccaggtatctactctcatgtggggaccgcctgtgtattccaaggggaagtagagcctcagtcctcccacttatcctcaaattcttcagagagttccatcggtcctctcccctccttagagctaacccctgngggtccggctcagaaccctgtccacactctaccccagcctgtgagattattttcatctgcatagcatgataacaatt

SEQ ID NO: 299381 - DNA, 356 bp, Homo Sapiens
ccttttggtatttttgataccactttattctgggttcttgttgcagagtcatatggctcctttaagacgttctctagtgaaagccattggtccggatgacaaagcaggttttacaattggggagccactctgcccctggatccatgtcccagaacactactaaatgactaaatcactagattacagggcttcactttgctcctaacagtatacctcttgggatgctttagtctttttcaactacagcttttcttctgtagtgaccatatgagggtgctttccctgcacccctctgcaccaccccatagagtccaggtttttatgattttgtgctgccttgagattacttacgggtt

SEQ ID NO: 299382 - DNA, 404 bp, Homo Sapiens
ctgcgcccagcctaacatctttattttatacctcatggttttgtgtgacattcttcagggagtcatgcctcataaatctatagagtgtttactgtagtcgttctcagacttgaagttgcactagtattacgtggagggcttgttaaacagggtttgctagaccccaccttcagtttatgatccagtgagtcttgggttttgcatttctaacaaatttgcaggtaactcagatgctgctggtctcaaagtactttctttgagaactgctggtttactataaacatactgctcaaaggatcccatagagggcttagttaatatcagtttattttcctgtagttcatattgtaatgtttgcaaagagagtaagccagtcacctgtcttttttaccctggaagtttct

SEQ ID NO: 299383 - DNA, 654 bp, Homo Sapiens
ctgagatgtaggtcattcaacctgacagagaggacaaaccgtatcgagcatactggagcatgattacacatgacgtaggattgacagtgatacagaatcgagcaagcacggagccgcgactatggctggaaatggaatccatatagacactggagcattaaatgatgaagaccaaacagatggcacgaattactgcaggactagcaggtgaattattgcattgcaaatgatcccagtagccactttaccaggatgggacccacagaactgacgatagaaatggacgactggaatggagacaaagtaaatgcacagtatggaggaatcaccgaacagcttgaagctagaaattaccagatctgagtgatcaagtatagagagcatagtcgatgatgaccacatggatggagcatatcatatgacgggagacatcatgacgatcaccattcacaacggcatgatcttcgacacgtatgaccgagacaatgacgagttggtaacatcatatcccatgatacagtgcacataagtagacgagggtgtgaggagggatcactgaggacagacatgcgaatcctgacggatgaactactctctaggacagtactcctgagacctggtgatgcatgctactgatgatgaaagagtttggac

SEQ ID NO: 299384 - DNA, 622 bp, Homo Sapiens
ctgagccggagggcgtgtgctcggacggagatgctgcagcggctaggatctatgcaggcccactgagctctgacgtgactcacactgagctcccgcaggctctgcatgtgatggcccgacttgaagacattcgctacatccctagtcactgcatcaggaccgatgatggctagacggctctccaggactacgacatgagacaaagggatgagtcatgacgaattgaacacttcagtgacagcaggagtttaggtagcgcacaccagaccgtactaggtgacaactccgaggttgtcctgtcaaacagccacgagagtggcttcatgagagctgacgaagtgagacatacacggattgatagatcaactctgaagacgatcagcatagtaccatgactgagactatgcagcgcaagatcattcatacgacacagtcagactacatagtgtcgtactgagaccggtgacatgcgttctgtacgtgagagctcaggggaagcgacataatacactggccatgcgcatcattaagatgatatctgcgagctatcgcactacctatatactcggagaaacttgtacaccagctgttgatagtgacttcagacatggacctacacgga

SEQ ID NO: 299385 - DNA, 608 bp, Homo Sapiens
  misc_feature (395)..(395): n is a, c, g, or t
attgatctgtacatagcctactgcttgtgaaactgcaacagtgtcatagagagtgcagttgtacaggcagatcagaagacagaatccaccggatcgattttgttatatcaagtcgtgctattcatgataccgcgttatgtctgagactaccgtagtctcaagatctgtacgaccatattgacctgccgcatagccttcataatagatgcaccagaaatgcatatacatggctgctagcattgttcgagatacattacttcgtggatcacggaatcgctatgacacagcagttgagctatgacctgaatatgactcgtatgtcagcgcggaacttgctgagccatgcatgttacatgcctacatgacactgaatgatttagtcaagctgacctgcngtggctatttataggctacatgcactgataactaccgagtgcaatataatgacagatattcagatattgtcattgagatgacagcacttgttgatcaattaactttgatccggacgtaacatcagccttaaatgatctcagccttagtcattattcatattggccttgatcccatgatggacgaacagttcgtgggacttcgcacctgtgaga

SEQ ID NO: 299386 - DNA, 484 bp, Homo Sapiens
  misc_feature (460)..(460): n is a, c, g, or t
gagtcattctgagaacttgaaaaatacacaaccaggccgacattgctgtgttgcaagtagtaggtaggaggatcatgtgaaatttctaacaggtaaccatgtttgatctataaaaataactattctaattattttcactctcctcaatggaggagctgattaataagtgaaaataagagattggaattctcttgtgttttcaaatactaagggagatgtgccaactcttaggtcatgggggaaaccattgattggattaaggttggcaaggctggaaagaattagcttaagtccctgagcccacaggctagtacgttggccctggggaatggggtgcacgcagtcactctctgccacagggaaatactctaatcttcgtcaaccattctacctttcctgggtcttttagcctagtcgtaaggttgaactttggcctttagctacactaggcttaattaanggacagatgtaatggtctaatgtt

SEQ ID NO: 299387 - DNA, 638 bp, Homo Sapiens
cgaacggtcggctaacctgcacgactccgtgtcgagcacctggatgaccatcaccctgatgcacactgttgctaccaactttggcaactctggcatcctcatgcggctaaacgctggtgagattgcgattggagctagaggcatgatcgttgacttgcttaagaacctctatagcaatgcaggcgcgatcatggcgaatgacattgtctttcaagctaagtgagagacacgctttaatcacaagggcacccaagatcaatacttctacgtgacctcctagactgtgtatccgatacccatgatgagccagaaggatcagtattactacctactggaccggaacctctcctgcatagtggaggctgtcgctaccaaggcaatgccgcggctgatgatcattcatgccagggaggcaaagatgcagcatgtggagaatggactcgttgagctgtccaaattcttcatcgagggcgtcgatcagctggagaaacgccttcacaagactgggatcactgacggcttcaccgtccatgcctgtctgcccggcatcaggacccagtgcattatccaggtgtctgagatggatcacatagctgcggtcgaagtggacgagtccctaccatagcagcggcattcac

SEQ ID NO: 299388 - DNA, 382 bp, Homo Sapiens
  misc_feature (156)..(164): n is a, c, g, or t
  misc_feature (261)..(314): n is a, c, g, or t
gtattgcagaaccatagattgcaaattcatccaatgtagttattttctcttgttttgaaaaatggacacattcacacatattttaacatatgtaggaaattttacagccaaatgaataaaaatgatcttttatgaaagaactgacaaagttctaannnnnnnnnaaaagtatcagttggcaggaagaaggtaaaaactctcatctaagaatgcgacgtattttgtttttaaatccaatgtttttaacttacactttatctnnnnnnnnnnnnnnnnnnnnnnnnnnnnnnnnnnnnnnnnnnnnnnnnnnnnnnaactctatattgctggtggctctgatttcatgatgcattgtgcttatgaaactctagctttcagcact

SEQ ID NO: 299389 - DNA, 310 bp, Homo Sapiens
aaagctggcaatcttttgacatttcttgggttgtagaagcatcacctcaatccctgccttcatatttatgtgacattcttcctgtgtccttgggtccaaattttcccattgttgtaaggacatcagtgatactggattaggggcccaccctagtctagtgtgacttcatcttacctaattacatctgcaatgatcttatttccaaataagatcacatcctgaagtgctgggggttaggattttgacatgtgaattttgggggaatgcaattcaacccataataatcagtaacaattaaagattgcaacat

SEQ ID NO: 299390 - DNA, 168 bp, Homo Sapiens
accggatcactgtaaaacaaacaagaatgaagttaggtatatgtggatatgtgtgagccatatggaaatcatgttatgtagaaagtcctgagtaaacgtgaaaatcactgatgtgggattgagagatacatcgcagatggatggcacaataaattattaagacatgtt

SEQ ID NO: 299391 - DNA, 426 bp, Homo Sapiens
gcgacctgttgctgatttgcagccctattaaaccgggctttgatgagaatgtctgctgccctactgatctgtttgcagaggacaatgagtgctactattgacatctgccaaagctggggacagaggcctctgatacgacatcgcagcacatacagctggtcacatcagccacgctgctcacttggtcacagacttcactggctcacgaagaccggtatgtcagaagctaacagtcactcgatgtgagtatatgatggctgctcaccggaccgtgacctgtagcactgacactcctaggagagtccacagagagtcatatcctagtacatgatgccagtattcgcactgaagatgacaactagacattcaacttcatgacctattgagtacatctgtccatacgaatgtatacagtgctgcctgtga

SEQ ID NO: 299392 - DNA, 391 bp, Homo Sapiens
cccaaaccactccaccttactaccagacaaccttagccaaaccatttacccaaataaagtataggccgatgaaattgaaacctggcgccatagatataggaccggaagggaaaggatgaaaattattacccaggcttatattgccaggacttacccctataccttctggattatggatttacttggaattactttgcaaggagaggccaagcttaaaaccccggaccccggcgaggtttcttagaaccggttaaagggccaccggctattgaggcaaatagtgggaggattattggttgaagcgacaaacttacgaggcttgggaatgcttgttgtccagaatgatcttaggtcactttaaatttggccacaggacctttaaaatcctttg

SEQ ID NO: 299393 - DNA, 371 bp, Homo Sapiens
gagctggcattcgcgctaggtgtttgaggtgtgagggaggcacgaggagtggacacagaggggcctagaggaggcccctagatgggctgaggggccgatggaaagggaacggtggcctgtactacgattctgacactcaggctagctgacggggtgtgcatatgcaaagcaggtgcgaggaaggttggaaagtgaggtgaaagagactgaaaccaacctaatactgaaaagcatctttcattgcaagggaggagccccgagactgcgacgagtaggaagccgagatgtaacagattcagcaacttgacctgtgctgacaggacggatattgcactacgaacacactgctgtaggctctgaagactctctcc

SEQ ID NO: 299394 - DNA, 384 bp, Homo Sapiens
gtttctggcactattcaagctaatggtgaaatgggtacaatgcaaccattgattagaagtattcggactgttaaaaggggaacttttaagctaaattatgggtaggtgagccgattccatggtccacagcttgtcggtttaaattttggtccccctatgttggattggcttctcaatgcatatcttagaaatgtgtcagatggttttagaacccaagagctttggactctaggcctaaatgttgacaaattaaaggggcatatacaacctttgaaccctcaaatattttagcgcctgttgaaagtgcacgtatatgatgataaatgagacttttgaatattctgggcatattaagagcgtttttcatactaacttttgaggttg

SEQ ID NO: 299395 - DNA, 678 bp, Homo Sapiens
cgatggtggcgagtggcagactgggtttgcagagcgtgagttgggtcctagaacgcggcgttgtctgaatgtcagcactccatgatgacggctatagctgaacatctacttccaagtcagtgggtgccagaaactgattgaagtggacgatgaacgctgacttcaaacttactatgagaagcgtatggctccagacgttgctgttgaggctgtgcgtgaagaatggaggggacatgtggtccgaatcaccgtgtgtaccgacaaacaaggatatcgcatgaagcacgaggtcttgacccatggcaccttccgcctgctactgcttaaggggcattcctgttacagacctaggtgaacatctacgatgcatgatgaaattagcgcatggctgcattctggatgccaagctgagagaacgccactgggatattgcagatcatggagagacggatattccctgactgactcgagctactgtgccgtcgcggctgtgccttacaagagctctccgaaatccggaagctttgacagtctctaatgcagagtatgttcggcagtaccgcactagatagccgtacatatgagtggtaggacgcctaggccactgcacccgacatcagtgacttggtacttcatgtgaactgcagtatagacgcaggtgaacgccgtaaataacca

SEQ ID NO: 299396 - DNA, 625 bp, Homo Sapiens
  misc_feature (508)..(508): n is a, c, g, or t
  misc_feature (510)..(510): n is a, c, g, or t
  misc_feature (538)..(538): n is a, c, g, or t
ctacctgggcaagagtttgacgctgtttgaactgcgagagtagcttccaacacagcgtcccaatgaaaaatggccgccatgggcaatgctatctactgctgagcatccatttcctaggaagcaggtgagaccatctgaatggaataggctgtggtcgcttactccaaggttcatgtgatacgcattcagatcattgctacgttgctgacgcatactgatgccgactgtatcgattctaaagttcaggtcctagctttcccagtgatcgatggccatcacgttacacatattgtgtaaagtatgggcccagcagtgtcctacttcaaaccaggcgacaaagttacagcactagatgcacctctatgtagaagatgcaagtattgtctgagtgcactcacagatctgagtctgaagatcagaaatcgctgcaacggatagccactttaccatctattcggaccagtacattctgaagtacactgtggagtcagatatcaatcattgccanantagatgaccctgcagatgtagagtgagnacgtctgctagcatgacacgctatcatctgctattgggcatgtaacgagattgcaatgtaaacgctggatctacctgtgatgaatca

SEQ ID NO: 299397 - DNA, 615 bp, Homo Sapiens
gcacactgaagtggcttacctcactttgcattgtgtaactcttaagctcggcttattccagtggagcgcggcttatagatgcacacaggagtgaggatactcactcgttaaaagagttgctagacgaaaatttgatagcctagatgaagattgcctaggctcagtgtcgacagcagtggccatgtgtagatcatgtagaacatgtgaatgacgtgtctgaattggcaatgacatgtcttgctgatgagtcacatgagaagcgggacagatcactgcataccgtgactggtgactaaatacgcacagttgcaaacatacgatacacctatggtgaaatggctgactgctgtgcagaactggaaccttgcagaaatgaacgctaactggaacacaatgatgagctctcgaacctcacacgattggtgagacccgtggctgatgtgatgagcactgatgttgatgacaatggcaatgcttttaggacaattgactatctgaaattgccagatgacattctgacattgatgccccagaacctcacttctatgctcaaaagctcaaagctgttgctaaaggatgttgcccagctgttgatgaaggtggctgacttgtggc

SEQ ID NO: 299398 - DNA, 580 bp, Homo Sapiens
caagatatcaacacacatcaaaagaggaccaaacagcacttgatacaaaaggggtataaacacagccaagagcgctacagtgagacgcacgaggagcgagagggcgcgattgaaaatatgagagacactagacacgaacctctagagcggaatacaataatccccgagaacgtgggtgatgaccgtgccacatacgggtagaacatagccccagaccagctcaaagggccaccatatgccacaacggtatctcaaagagaaccccgaagggcaacaggctacacacgcaagaatgcagtgcacaaagagcacatgaaaggaccactacttgcacacagctaatgtcagacaaagagtgaatgtcagaaagagagagccgcatgagctggctaggactgcatgacaacctggagtccataaccggacaatgcttgagagcactagggagagaaatccgcgcattcacgcacccatactgcgcatagtaatccagaggttacacccgcgcttacaccacaccaacgagcctcgggggaaagcatgcacgcccgcatgcaaaacaggagacaaccacgcgcag

SEQ ID NO: 299399 - DNA, 617 bp, Homo Sapiens
ctaaactcaagaggacatgaagtccgtgtggcagtcaatggtgcaacggctgatggacagcgtactgttacgatgcaactgtgatgcccagctgcaaataggcactgataccatcattgccgcgtaccatgatgtcatcgataccacctatgcctgacacggatgaactcgtctcatcttcaatggtgccaactgcatgaacagcgagtcctaatagctacggcatgccaagggggcactggcagacattgccatctatgccacttgtaatgcgtagacaacaggtagagccagagctgatgtatgctcattgtcccacagtcactgtgcacatggatcaagagatctcgtgaacccatatcgagaatggagatgagctctacaatacctatgcgtgccctacagaccctatattgagtgagagcaagacatacagtgctactagctgaccttgtaaccatgtgcacatcatccgagcaataatctacacttgtagacgtgagctgcagctattgagcatgaaccttggcactttcaagtcatgatccatatacaaccctttggaagatggtccagaattgatgggtgacctgatgagcaatgacttactgatatgc

SEQ ID NO: 299400 - DNA, 603 bp, Homo Sapiens
agacagtggagtttggtagaccgagcttggggagcgagagttgagcgccatattgcaggatttgcggaatgtcaggactccaggatcatgggtttagctgcacatctcattgccagacagtggctggcagctacttatagaagtggccgatgaacgccgacttcattctcagtatgatgtggcaatatccgcagacgtagctgctcgacgatatgggtgaagactggtggggtcatgtagctgcgagtagacctgctaacgacaaaccatgactacacatgaaggaccaggtcattgcccatgggcacttccgtctgatactgcatgaggggcattcttgctacagacccaggtgaactgctgaatggacggcaaaattgcacattggaagcatccgaggtgcgaagcagcgagaactcactggggatttgtagaaaacgggagccgggttttgcttgacaggctgtgcctcaaggctttacggctgggcaccataagagccttccaaaatcggaagttttgaagacttccaaaaagatatgtccgccatatgccctgaaaacgctgacaattaggtcgggagcttaaccgtcggcgattggg

SEQ ID NO: 299401 - DNA, 588 bp, Homo Sapiens
agacggtcgagattgttagacctagcttgacgagcgagagttggacctcaggctgcaggattggctgaaagtctggagtccagaatgatgaatgtagctgcacatgaccttgccagacaatggcttccacctacatatagaaaaggccggtgaacgctgacttcactcactatatgatgaggcaatatcaccagacagagctgttgacgatctgccagaagactgtaggggacatgtagtgcagattaaccgtgctaacgacacaccttgaccacttctgaggcaccaggtcatgctctatgtgcactaccgtgtgatacttcaataggggcaatactgatacagatccaggtgaacagcgggatggacgggaaacttgcgccttggcagcattcgtggtggctatatgcgagaacgccaagggcacccatggccgcaagagctcttccaaatcgtacgtattgaaagctctgagagaatttgttcggcttacacttagaacgctgacagtctaatgctaagaccccatttcctattcccgagattcttgtattgccaaggaggaccgaagttaacgtggatgtttgc

SEQ ID NO: 299402 - DNA, 626 bp, Homo Sapiens
  misc_feature (485)..(485): n is a, c, g, or t
  misc_feature (568)..(568): n is a, c, g, or t
gaactcccagactaaagctctccgtccaccttgtctcatcaaagtgctaggattgtcagggtcaaccaccagatccagatcttcatgactgagaagcggatgcctatatctgaccactgcgcactgtctctatggtaccctactatggtccagctccacaagtggcttgtgtcttccacgcatcgagtctgctatgaatgcttacatacataacagggctctctggggcacaggagtgcactcatgccaacctgagattgcatgcctcctccaagctgctagatcctagactataagccatgacttacataggccatatctgaccggacaatctatatacccagacactgatgatgacatcattgattttccaagttagcatatcaacagtcaccatgcgatcatgtgaaccggcttaataatatacttaagcacatacttgcgcatgtataaacgtcgctaactatcctatgaaatgcggctanttaatgtataaccaggtgcatctgatggtgaactgctcgatacttcacactgaccttgacaggagatagtcactctccttaanatctaactgagtgaaggttacagaacaggtgcgcacatgtgacataaagtggaccctt

SEQ ID NO: 299403 - DNA, 686 bp, Homo Sapiens
  misc_feature (552)..(552): n is a, c, g, or t
acaccaccgttaaggccaaggagcacatcaatgactacctggctaaggagactcaagggacaattgaatatccgtttacacgagctagacgaagaacacagtttaatgctgtgatgactgacatactaatgcaaatgctagaggtggacgacccttcatggtacggacatctaggatgagacaatcccatcggacaaagtgcacactgtgaggcgcatctgatgactctacaagctgtccgcatccacactgttagatgctatgcctatcagtactagctgatgaaatacgatgagccatgacgccgagtatttgtctctgtcggatgagaggtacctacgcctgatgttagatgaactaacgtctggtaccagaatgaatacactggcaagctaagacctaatgtcaggacattcacgtttacttaccatgcacgatactgatacctatgatcatgatagcgtcatcggcacagtccgcgtcacgactagcatggcagatgcagcattcctttgcgtgtatacacagtaggatccggacacactgtctaangacgcatctatcgcagtgatgaccgagctgtagaatttgactcatgctattcgaggccatgcttgatacgtcatactcaggaacactatcgctatgtcaaaggcattacacctcactggaatcgagaggtgaac

SEQ ID NO: 299404 - DNA, 613 bp, Homo Sapiens
gtaaacccatattgactttatgtgcctactttggttaaataatgtgcttgtattgaatcgcacaatctctccgctcagctcttgatgatagcttaccaattttcaacactgtctaatctaagatcatgttcactgcccagaaggcttacatgacactcgagggacaagtgtgagcctcgagaccgctaatagccatctgagctcagctggcacaacctaccgagtccaatgcttgccttgttgccataatccagcataggccatatcaagcgcattaagctagctaccaagtctatgctagagacatcacatatatctcattatcaccataggacctgacaccatgtgatcatgtgttccatcttagatatgttgcaacgtgcattactggctgtcggagtgagtagaatgttagaactgatgtaggaaatgctaacacataaacggcgtctaccttagtgtgcagatctacaatctgcgcaactttgtcgaccgttagaagcagacttgtccatgatgctgatacacttgatctgtacggagagcatcaagtgataagattgactcgaagattcgaattcaaagactaactgagtatttaggcatcaaatga

SEQ ID NO: 299405 - DNA, 692 bp, Homo Sapiens
acacgttctttagagtctatggggctgtctttacctaacatgctggcgtgaatcccatggcgttgaatcatggctttcacgctttgaaggaaatcctgattgatcatgggaacctgttaactagtgcaggtattacaccaggatataacttaatgactcaaggacttgggagtatacacccccttggaaatagatcgcaggtgatccgccgtgactttctcacactcttgtactataccggaatcgagattaggaacatgctagacctatcacaagatctggcttactggcttgtacaggattgagagtataccactgtattgcccggtaagtccataggcatgatgagctgtgctcgaagtactgggacctgatcgtctacagaaacaagattagcacattatgaaggacatgattgtttcattacgatgcaagatatccatgagaacgttaatgaaagtatcacggtcacggaccgagtctggactagcatgccactagccatagatggtcgagcgtgtactcactacgatttgctcacccatgcttatgtagcatgcatccgcagtatgaaggaaagtgatcagactaccaccaatcaatgcatgatcatgattgcttacgacatgcatcagtgacactttagcaatatggaacgtctaaccgttcactggaactgggaatgtgacatt

SEQ ID NO: 299406 - DNA, 624 bp, Homo Sapiens
ggaaacccatatttacctgctgtgtctattgagcttggcttattcgctggtggtgtatcgcttagatgcacacatgagctctgttgcatatcggactaaagatctggtagacagaaaatttcaaagcctcggtgtagattgcctttgctgccaatcttcaacagtgtccattctaagatcactgtaaaatgagtgaatggagtagctgtgtttgcatcgacatgtgttgctcttgagacatctgagaattgttacagatcacttcataccatctatggagacaaatgatgcacaattggccctcatcctgaatcgtatatagcaagggcttaatgctgtgcaccacgagaatctttgagacatgacatgcttcttgtaatacaaagaggacaacccagaattgatccaattgttgcgaccaccatatgttgcgatgagcactgctagctatgacaatgaatagacattcttgaaataatactagtatggcattgccatgagacgtgcttactttaatgccccggaactgcatatcattgcttgcttgatgtcacagcttcatgaaccttagagatgaatgtgaagattctgatgtcaaacatagactcacgtgcgtctgcacca

SEQ ID NO: 299407 - DNA, 687 bp, Homo Sapiens
ggatgatggcgtgtgatagacgcgtttagaggaacgcgcattgtggactgtaacccgggactgaatcagcaccatgtctggcggatcatcactggccatgaccaatgaacgtcctgcgcgtgcaatgtccaatgtgcatggtatgtgcgaccggactcagactcaggacttcatatcagactcgaatatgcacggacggagctgatcacgctttgtctacagagtagatgtgcatggtgtgctagcttaattgtggaagcgtccaactggggagtatctagatgccgtgaggaatgatgcatgatgccgtatgactgttaccgtgttccttaccatgtctggtcagacgatggatggctcataaccggaagatgtcatcagaaagggcgtagcttgctgatacgaatatgagcgtgtgtccatacaggacggtcacttgtgggagctgctgctaccatgactgatcgtactacagtgagtaactggatgagctgcacagagcatcacctatcgctaaacttgtgaatctcacttacgtcgagtatgcacgcatcctcggacatggaacctacgtcaaagatgactgaaataactctaggttcagacacacgttccttgtgacactttgcgtatcctgagatgcagtttagcatgccctgagctgtactgcacaagcattgcatcaaa

SEQ ID NO: 299408 - DNA, 629 bp, Homo Sapiens
  misc_feature (562)..(562): n is a, c, g, or t
gtgcctgggactagtcacgaaggatcacaggcctatacatctttctgctattcatagcactatattcatcttgatgatatctgattgctgcacaaatgagagctgcagtgtgcaagcctttcaatcgctacctccacactgcttaaccgtatgggtatacgatacaaccttactcagaactccccataggagtgactgcactccattctattgtgccatagtcatcgaaagccaatctaactgaccacagtcacatattgtacactggatctaccttacttgttgactactagctataacaagtccacttgacagttcatgtagttcatcctgatgcactgctccaggactgtatacggcctgaggatgcaaatactccatcgcaaactgacaagagtcatgatgcttaccattaggacgagcatgtacactagtgcaaagtgacgcagctgatgatatccaaacgtatgatactgtacacgtgactcctagattctcggacattggccatatgcctatacgtttagaccgatgagtctctctgctgactctgactagctgnacatctagaacgtaggaatgcatcctatctgactgaatcagaacactgcgaatccgtcagcaatgaa

SEQ ID NO: 299409 - DNA, 446 bp, Homo Sapiens
ctcctaagatgtgtatgagccactggatagccaggaagcactggatgggatgatggccgacgatccgcgtttacccagagctcaccaaggcactggcctgctgagctcgggacccgagtcccaacagatgtgacgctggcaggcagacctgccgccatagcatgcctgagaggtcaggcgacggtaccctgccagacgttgagcgacagctctcataaatgcatggttgaacaggtaagccctgatctccagcacgctcatcacggtatctgtgccactggatggcaagacctgggaaatcactgagcgcgcaggtctagctgataagtcacggctgggacatgagtctggcatgagcactgagattaccgacagcgcgcactacctcttaaccatactactgtatacgctcgtgcattgacgaacatgctcgccgggcttatgcc

SEQ ID NO: 299410 - DNA, 450 bp, Homo Sapiens
agacaggggagcgcatgctcaaacctgtggcgtgtaagaacatgattggcacaatacgaaccgtacgcattattggagcttatttgacacatggacacctacaaagagatttgacaggaggccctactggtgtgacaaatgctggtctagaagaacacttctacctgctcaagcttcaagcgctggtatatgatgacagctactgcgatatcatacatacatacgtaggttttacagtcataaatgatgtacttacggtactcagagcatcttatcaactggctggaaacccatgataaggcattatgaatgtaagactaagtcttgagcactgcatgaaccacgtgtcggtgcatcatgactgaatctatgccagactgacacacattaatgcacatagacctggcaacgatacgaccttctagaatatgttccctggggcttctgcct

SEQ ID NO: 299411 - DNA, 407 bp, Homo Sapiens
gaatcgggaccagccgtacctgattcgaagcatcgccgacgtgatctagaacctgccgggagccctgtacgacggtcacggcaaaagcgccgcgtatagctgcgctgctcgctgaacgctttcaaaggagctagcctcgtatgtcatcacctacaaactgtcacacgcactagatgatggaggggaccatcaccaccatcaccacttatctgtgagcatcagtacattggctaaagccagaggatccagagcgcagagtctcgtgcagctctagagcacgtcttacacccagactcacctaaatcctactcacaccccagatagtgcacactacaccctctttcacggacccagagcaagcgatgcaagccatgctgcaatgccaatcctttcacagtctgaagcaa

SEQ ID NO: 299412 - DNA, 411 bp, Homo Sapiens
ctcgtgtgctgtatagctctacttctatgctcttttatttctctcttctccatgtgtcccatatcttgttaccactgacaacttctgcatcttatatgaacccttctctagttcttgtccaactacctgtctccttgcatctttcctctctacttatcaacccatagttcacattcttctactctctttgcctgccatcttacatccacttcctccccattcttccctcttcatactcctgatccccgcaatccaactcacttctcctcctgttgcctcatctcctcctcttatcatctacccctctactttgcattcccctatactcttctaccacattatcctcctcttatgcatctcttttaccacatgactcatcctttccctctttccttgccatctatccttccc

SEQ ID NO: 299413 - DNA, 685 bp, Homo Sapiens
  misc_feature (308)..(308): n is a, c, g, or t
gttcaccatggcctgtactgctctactactcctgttcctctctgactgcacaggatccatctcgcatgctgtgctgactgagccgtctgccctctgtgcatctcctgaagcattaggcaggctgacctgcaccttacgcagcggcacacatgttagtatgtgcaggatgtactggtcccagcagactactgcgagcactccacagtctcttctgagcatacgagtcatactcagatgagcagcagggcatccggcgtgcgcagtcgctcctctggatccaaagatgtgatcgcccaatgcaagactgntgctaaactctgagctccagtctgaggatgaggctgactatcattgaatgattggtcacatcagcgctctgtaattcggcggtgggacccagctgaccgaactacgtcagaccatggctggccgctcggtcactgtgttgccgacctgctacgatgagcttgaagccaacaaggccacactcgggactctcataggcgacttctaccgctaagccgagacaatggcctagtaggcacattgcagtctcgtacaggcactagaggctaccatctcaccctgcagacaaagacacatcgagtagcttgtcagcagctatctgagcctgacacctgagcagtgcgaagtcctacagaagctacagcttgtcagctacgca

SEQ ID NO: 299414 - DNA, 688 bp, Homo Sapiens
ctgaacgttactacatggcaactgtaaccagaccatatacccgcatttcgtgtcggcgttagagagtgagacctgaaccagtagatatgggacctgatgtgactgatccgaaatgataacgactcatgctatgacgagggctagcctcgatatcatgtgcataacgagttaacttggagcgactttgtaaggtgagctaatgctagaacctcagccatcaggcgagctacctacgagcagcttaaagagcacacccgtctatgttgcacagtagtggcgcgaattgtacggtgtggcgacaaacgctaccgtgcctggagatcggtgtgtgtccaagatggtgtcttaggtcacctttgaatgtgtctcgcagagcctgtagatcccgttgaatacataaccgatagatcgaagatgaacaggttttatgtcactaggatatgacctatgttggtgagcactgtgagtaacacccatactgggcctaacagcttgcagcaattatgtctgcggtcaggcttaccagccactagctaataaatgccaaacatgtagctgaacttcttacacctagatgcaccaatgtgtcacgctattgaagaactttatgctcgtatgagtctcatgcaaacattgtgcttcgtataagctctgcgctagagtagaacactgaacttgccaattgacg

SEQ ID NO: 299415 - DNA, 637 bp, Homo Sapiens
  misc_feature (487)..(487): n is a, c, g, or t
  misc_feature (494)..(494): n is a, c, g, or t
  misc_feature (508)..(508): n is a, c, g, or t
  misc_feature (617)..(617): n is a, c, g, or t
cgatagagcgagtgttagatactgcaggagagtgaaggtgcatacgagtatggatttcagtaggaggtaaacatttgggagttatcagtatgtgcatgatactgaacagtaaataccaagggaatgagtataggtggaaaagagaagcctacaaaggactgatgcttgggacactcctgaggagttgggaagaaaagcttagggtaagataggaggaaaagcttagggtgccataccttgaaagccaaggaaagagagtagaataaggaagagggattgagcagttgggtaaaatgctgctggtcaggtacagtgactaaggatgcatcatgggtgctagcaatgtggaggtcgtcagtgaccctgatgaattgcatagatgattatttgattaaactctatttttcctattaaagcttccatgataaaagggaccaaatatgttatttctcattattatatctcctctggaggactagagaactgngctccgnagttatatagacangaataatgcctcgaatcaatcacacttctatatggctttagtgatgacagtgctgcgttgcacaggcatgtgaagtgtgtacgccgacatcactgacactggttaccancacttgaagcctttgctgtg

SEQ ID NO: 299416 - DNA, 642 bp, Homo Sapiens
  misc_feature (574)..(574): n is a, c, g, or t
ctcattaactacacattactaacttgcaaactttgaacttccaacaacgaaaattgggaatactctgtatggaagctaaatggtgacgtgggatatagtaccggatggtgaagatgtaatatgataaccatgcatagtatgctatggactaatccggtattacgctctgatattgcattaactagaaataacttcgttcggctagccaaagctcttatcagagcatccagacgagctacctaggaacagctaaaagagcacacccggatatgatgtaaaagagcgggaagatatataggtagaggcgacaaacttaccgagcctggatatggctggtagtgcacgatcggactttagagcaactctaagtttgctcacagatccctctaaatccgctggacaatttaactgttagtccaaagaggaacagatctatggacactaggaaatagccttgtacagagagtattactgttaacacccatagtatggctaaacgcaggcaccagttatgaaagcgttcaagctcaacactgactacctaaaggatcccgaacatataactggactcatnacacccaatcggaccagtctatgaccctatagatgaactaatgatagcatgggtaacatgtaacagtc

SEQ ID NO: 299417 - DNA, 632 bp, Homo Sapiens
  misc_feature (506)..(506): n is a, c, g, or t
  misc_feature (516)..(516): n is a, c, g, or t
cagcgctgcccgcagcacgcgctctggtatagcgcgccgactgtgctacagggccaagcaaggttacgttgtatatagggttcgtgttagccgcggagggcgcatgcgtccagttcctatgggtgcgactcacggcaagcctgtccatcatggcgtgaacacagtaaagtgtggttgaagccttgagatactggcagaggagcgagctgaacgccactagggagctctgagagagctgaattattactgagatgatgatgattacacatacgccattaaggaggttatcctgattgatccatagcatatagctatagtgcgcaatgctgacacccagtgtatcacctaatgagagcacatgcacagggagatgcgtgcactgacatctgcagtcgcgatgagccgttgcgctgacaatgagcactagtctagagctccacctgtaccgctgatataaggtaagtttgagagctcagacttaactatacatatagcgccaggcatantaactgttgncaccaactatagccatgccacgtaccgacattggctatagtgagtcgagtacattcactgaccgacgtttcgacgctcaacttgaggacccttgaggctcacaactgatcagcttg

SEQ ID NO: 299418 - DNA, 616 bp, Homo Sapiens
tgccagcatggttatgacttctatactatttctgtatggctgttattcaacagattccctaaaataatatcagatgacttgctcgatatgacaaagtctaaattactaatcgtaagacctgatcaattgccagattcatgttcaaaacatcggtagtatgtgcatgagaaagtgcttcattgactaaacaggatgagcttgcgagtatatacggtgattcagatgatgcctgaaaatgagcatagagtaattaaaccgtcatacggtggctgtaagcgtagagatatcatggcatacgctgagaatgctgaatgctgaactggaaactgagaaatgggacgaacaccataggctgaatatgcacatggtcgatgtatatatacacatacatatctacacagatccaactgcgtaagtctgcagaagtgccctcaatctataacttttctatctactaccatgagctcgtgacaatgctctggtaatgatattgccactctgattaggcaatgctttcgcactctagacacgtgattgcattttgcgccatgtctctaaacgggacatgcatagacagtccccggaacagaggtagctcactgcaactacgctattg

SEQ ID NO: 299419 - DNA, 568 bp, Homo Sapiens
  misc_feature (275)..(275): n is a, c, g, or t
  misc_feature (281)..(435): n is a, c, g, or t
atgcccattagtgagtgtccaagatagaggtgtgtgaattttaaagacagggcttcctgacatctatgtgcctggctaaaggccacttcattcttctatagtatttcgaaagtctagagctttcaggttactaagcgcattgtaacgcccttttaacatatgcaaaacttcattttcgaaatgctgtcatgaccctggagcagggacacaacttgagagtgttagctcagcgatgctgtgaaattgtggtggcagtgggagtgcacaggaagttnttttcnnnnnnnnnnnnnnnnnnnnnnnnnnnnnnnnnnnnnnnnnnnnnnnnnnnnnnnnnnnnnnnnnnnnnnnnnnnnnnnnnnnnnnnnnnnnnnnnnnnnnnnnnnnnnnnnnnnnnnnnnnnnnnnnnnnnnnnnnnnnnnnnnnnnnnnnnnnaacccctcctttcctattaatcacattctatctttttcttcccctttaccctctataccctattactcacttctctatctatcacacttttctactcccctttcattctcttcatacatctcatatctctccc

SEQ ID NO: 299420 - DNA, 470 bp, Homo Sapiens
ctggacattattatgatcaagctttagatagaccatgtacgcagaggctgctgaggcaacaggatcggcaagctgcacactgagacttactaggtgacgggccggaggggatctgagctgcaagcgtattatacctgcgcactagaggcacataccatcgtgcatcgtagcctgagcctaagaagctgcttatgagtgagatgccatgatgacagacagatcacagacgagctagctctgaccacctggacaagttcacccaggtctgctgcgaagccatgtgtagaaccttcagctgcctggccacagatatctggcctgagactgtatgcacgaactcgatctatcaggagttcactgaccaactcgtcaagagcgacatctgaatcctcttgcagcggactcaggctgcacctagagctacagctatctggacactatcaagaaacctagtgtggagtgtgcgtgta

SEQ ID NO: 299421 - DNA, 419 bp, Homo Sapiens
tagtgcgagtgtgagctccactcccaatcagtatgctagagcattactgccactctagtaatggtacttcctcatgctgtcttggctgtcttcaccattcatgggtgctttctattgagagcctgaccaccagaaattctgcattttctagctctccacattctattacatatctaacttatcttgctcaccatgcttttgagatctactcatgatgcgtgatagaaacatactgcgtattgtcgctgagtacaattctattgctcgaatatcacatgtcccatagactattcttatgctgacaggtctgtaggatgtagcctgttcatgaccatttaacagacgctgatagtttgtagctatgtcatacaccccagtgtgctatcttcctcctttatactgtctagaacgactcgtga

SEQ ID NO: 299422 - DNA, 175 bp, Homo Sapiens
tgcggcacgaggtaaaattagggatgtggaaagaagtctattaaaaaggctcagagaaaggagatgctggagttgatgtaacaggattcaagactctacgatattaactgtttcaagtagaaaaccatcaagaaaggatagaaatttaggattgctttcaaggagcctctcattc

SEQ ID NO: 299423 - DNA, 681 bp, Homo Sapiens
  misc_feature (512)..(571): n is a, c, g, or t
attaagatgaccagagccaacagaaggccccccttccagctgtcctcttgtgagcccatccatcagcatggccttctgcccccacattgatgcttcccatgaaaattggtgccggaatggacaagctccagggtgactcaacaaacagcaaacagcacaaggatggctgcagatttgacatctgttccatgtcccatactgaaaacttattgctcctaaacactgaggatggcagctacaaataccaacctttgtggctcactgtcaacatcttacttcctagtttgagaattttctcaggagatgcaaccgatgatgcaccccagactccccaagtcacatgtcaaagttccaacttatggcaactcagtccttgaacaaaatgtgacgtataagatactagccctgttgtgatcgacaggggtctttatgttcatttgtgtctgtttataggtgactattaaacttagactcctttcaaagttgaaagtcatgataactcgaggtggtannnnnnnnnnnnnnnnnnnnnnnnnnnnnnnnnnnnnnnnnnnnnnnnnnnnnnnnnnnntcgtcccgactgcgagctggcgtgatagccgaagagggccgtaccgatcgcccttccaaacagttgcgcagctggatggctattgcacaatggacgcgtaatagttggtt

SEQ ID NO: 299424 - DNA, 619 bp, Homo Sapiens
  misc_feature (554)..(554): n is a, c, g, or t
tgcatttctctagcccaagatacttatgtgatactctacactgtagctcctatggcagaaataatatctgagaaacttcattttgaaaatttggacatattaagcattatagtacccgtcaaaatcttgatgttccccaaacttgagtcatctaggtgaggtcattgctgtcttcaattcaaatgctattatttctagaatttaccttaccctggtttattttcaaattcacctgtttcttttcccttaatcgcttttgcccattttaaacagatggtttcactgttgctgactctttccctactgtttatatggcttacagtgttctggtgagatctcagtattctaagatggtgaggccatcccttcaggctggctttactgccagagattttatggatttaatatacacacaaggagttacgtttttgcaagtagcccattctgtctctggttacatgaggaaggcctgtggctcaaactaccagtgaccgtaggtcttcagtgcattctatatcacatagtattctgtgtgtaagtattggggtaacggnggtgattgccctactatggatttggcatactatgttgaactcaatttggcttgagtctgaccagt

SEQ ID NO: 299425 - DNA, 865 bp, Homo Sapiens
  misc_feature (89)..(90): n is a, c, g, or t
  misc_feature (97)..(98): n is a, c, g, or t
  misc_feature (102)..(102): n is a, c, g, or t
  misc_feature (106)..(106): n is a, c, g, or t
  misc_feature (658)..(703): n is a, c, g, or t
agtcacatcacagtactgcgaactgctactgttcgctcgtcaccggatctcactgcgtctactctgccgttagaccgcggggattgagnngccgttnngcancganccaacgagacgattcgctcgtaaaactagcagcagcccccaacctgcaagaattcagcacgagcttctagcaaccttacacacctttgtcacagagaagcagggtacctttatttgccttactttactctttaactcagcttattccagggatatatgtcatcgaaatgcacacaacaatcacgctactcatcgatttaaagatttagcagaagaaaatttcaaagcctctaagatcattacctttagtcaaaatgttcaacaagagccattgtaacatcatgtaaaattaagaaatgaaagaacctaattttcaaaaacatttactagttattaatcaactcaaaatttgtacaaaatacttccgacccttgttagaaacaaattattcccaagtgcaactttttggaaaacctattaggaaaaggcttacctctgtgccaaacacagaaacctttgcagaaatgaaaacctttttcaacacaaaaaatgacaacccaaaccttcgccaaatggtgaaacccaaaggtgaagtgacagtccactgcctctnnnnnnnnnnnnnnnnnnnnnnnnnnnnnnnnnnnnnnnnnnnnnntaccccaaaaaatatccgactttaaacgccccgaactcccttgtcttttcttaaaaggctaaaactccctttaacaaaatattcccaactttcttataacacttgctcgccttgtcccaaacctcggtaaacctcacgaagacacgaacgcctcgctttccc

SEQ ID NO: 299426 - DNA, 306 bp, Homo Sapiens
ccaagtttaaacacaaattcacttgtttcatatataccttatgcacatagcttgaaggtaactttatataacattatttttaataattttgtgcattgagaccaagtttgcataccttgaaccatcagaaagcaaaggtgtcattatctcagccactcatgtgggtaatttgtggttggttgatgtcaccatcattcctgactgaatgtatatgctaccaataagcagttattttcttatacttattcatgcataagtacttaacagtaaaaaatatgacataactcgcacaggaacaaggatggc

SEQ ID NO: 299427 - DNA, 427 bp, Homo Sapiens
aggcgcatgagaggatccgtatcggggcagatgagcgggtgtctctgtgtcacagcgacccgtgcagactcagagccttgaatcgttggcccagaaactgcattggcgcgcggagtggtctcatgcagaaggaactagctgtaataagagggcgtcagaacttgtgcctcaaaccctgatagaagcacagatcctccggagagtcagcataggaggacccaatcgaccagataaagccggaagtctaaaggctgaggcaagggacggaacccatcgtagtgcctgaagatttctaagggaaccagccttggcctgtaagcaacatgcgcctgagaacaccagtggccttcaaataccttgcgaacagcccccttgacccgacgatgggccttaaccacatggcttgcactgctacacctgcccacct

SEQ ID NO: 299428 - DNA, 453 bp, Homo Sapiens
ggaattgttggtagtatatccagtatgctgttaaggctgggaccttgactagcatgggaattgcactgatgctctgaaaggaccagtaatgaatgagcttagggcggctatgaaaactgtggaccgacatttatggactgctaaagctaaggaacacagtaatgtggttcacaggcaggtgattacaagcctttatgagttgaccaagcttaaagcttacgcaagctgggttatggcccgctctgacgcagatttgccacctagtttatggataaattttaggcggttgcaccaagttcttaccatcattaagtggccttacggattaacgaaaggggggtaccttggggtccgttgctttttgaaacagattgcatgcttaaacttttggaaagctacgacggattctgaggaccagtgcagtggaagatggggcgttacaatttgggtaac

SEQ ID NO: 299429 - DNA, 419 bp, Homo Sapiens
ctacaatatgcggctgttcgagcggctatctgaagtgctgcatcaccattacgcgatgaaccatcgccatgacatgtgaatgccttaacattctgggcacatggtactagaaacacggccatcgcgtagcctatcccttttatgcttcattccatacgtggcaactcgggatccttagggcctaggcactaatggggctcgagacggatcttctgcttaatgggattaccgagataatgccttaatggcacgccactgttggggccctggccttgggtatttccagcatattaccccctttcgcaagaactgactctaccggagttttaaccttaactgatggaagaaccactttaggtattgctctgcagcagaaccttctgcggtattccccaatattgccgaccctaactcggaaa

SEQ ID NO: 299430 - DNA, 478 bp, Homo Sapiens
  misc_feature (197)..(197): n is a, c, g, or t
cttgagcagtttgcgcttgatgtgcccagctgaagtgctgcaggagcagtatgcacgctgatattgctagcgagttgcgacaccgtgcgacgattctgaacatgagaggagacagaggcctgcagcaaagacatccgggatacaggctccgtattgacatgccacgcatgccaatcgtagccaactgcacagtcttncaggaactgagacgcctgaggatgcctgagaccctgagcgcagacactcaggatggacaggagaggactgttgagcataatctggagatggtcatattcagatgaactgcatacatactgaatgagcagatgatgcgagctcacgcaatataatgacacgtgtccatagctgcgcacatggatgagctcacagtcgattacggagacactctcacagtgaatgatggctgactgatgatcatgatgcacaatatcgagatcatggctagtgactcttctca

SEQ ID NO: 299431 - DNA, 432 bp, Homo Sapiens
ctactatacgaccctgttcgatggactgttttcagcactcaatatccattcaatgatgaagcttgaccttgtctgcgacagggttaataatttgatgaactttgccaacgagatgaccaatatgatgcctcctaatgccaccatatgcctcctttttaaaagattcaaaggcatacgccgatgtagtccgctgattctaccatccatacctgagtgcacacttcgtgaacaggatgacttgttgaactaatggtggcatgaacactagtggacactagctacaggcgtaatgagggtatacctcggacttagcagtaggaccatctatgcgtagatccatttgtacagtgtagctacaccattgccagtacttgatggcaactagcaccatggtaacgttctacactgatacgagtacaactgatcccgagg

SEQ ID NO: 299432 - DNA, 461 bp, Homo Sapiens
ctactatctgtagctgttcgattgactatcgcaagcacttcatatcagttgaatcatgactgatttgtctgcctgtgactgtcttagtgctctgagcacagggtgctcgagatgcgtctatggtgtagcatctgtcacagtttgcttcctttgtacaagatgcaaagcatatacctatattataactgttgttcatccatacatgcattagtggacacttgcgatgctctcggctattgtacataatggcgctatgtacaactatgtacattatcgtattgacaagtataatgctagaatgacacacatctgtttgagatcctaccttacaggctttggagcatatagccagaggtggtattactacgtcttacgagattactagtcttaacctactggggcaccactggaagttgttatagcaactgcaccattttacgtgctcaacaagagtgtacaag

SEQ ID NO: 299433 - DNA, 463 bp, Homo Sapiens
cgaacacgtgcgcctgtatgagatactgcagttagtgcacatgaacaatatcgtgttggacctttacaaggatgttgtcaggtgtgatgattatgaaagtgcacgcgataaatgatgaagtcatctatcatactgcttctgctcgcgcaggcttagtgttctgctacggttcagacatgatagggttatccgactttatgactgatcacggagcttctggaatgggtccaggacgtactggagaccgccatgatttgcgctagttaggaccagtgtgatccttgcgatgatacgccattatcgtgagtgcaaactgtgtgatttccgcttgaaccattgccaaaggatcttccctatgacagacctgtgctcgaactagggacctgcggtgctagcgaggcttcaagctagagactctatacacctgaagattctatacgcagtggttcacgctgaagtagaa

SEQ ID NO: 299434 - DNA, 468 bp, Homo Sapiens
gaattctgctgacctatctgtccctaccatggcagccagggccgttccagtggtgtctgtatgaccgcccatactgaccaccagtggaacctttacagggttcaatacagagacgcattagatcatgcgaatcgtccggagctgcacgcatgacgaaaggaacgagagactgacgcactggcaagatacacaatgtaccgtacgatatccgtcacgagccgacatccgcgagtgctgagaaagggccgggactctctactaggcgacccacaaggtattacgtctttctcgcgagctgacacaacgcgctctcgtacagataggatggactcgcacaagatcggcaccatgcactatattttgaacgagactacgcctgcgggttccgaatatccgatctttggcgacccatagccttgtgagacgcaggacggtgattcctcaggacacaacccagcagtgccagga

SEQ ID NO: 299435 - DNA, 468 bp, Homo Sapiens
ctacgacacgcggcggttcggcccgctgtttgacgttctcgatagcagttagctgattagtgatgctaatgacctgcacagcgtgcatcatcatgcgcaagaggagtacgaatgctgaccatggatctgcatatccaggagcccgctccctattcaaaagactcaagggctttactatcgcagttcctgtgtttatgcatgcatccagatgaggacagacggttaactttcgaataggctactgatggcgacatagggcgctgatgtcacttactatcattcacgtcatagacgcatagtcgtcattcaattagtggagctccaaccatgaggctctgttattagatcacaagtagtcgtagcactagatctaacgatctatcctatcggaagtgatcgagtcacaatttgagttatgcatagcagatgaccattcatccgtattcagctttacaggtcgtgactgcg

SEQ ID NO: 299436 - DNA, 422 bp, Homo Sapiens
ctaccacatgcggctgtacgagcgcctatacttagtgctgaagtacaacgacgtcatgaaccatcgcaaggacttgcgaacgcgtgatgattctgtgacagcgcacgttcagccatgtctatgattacccatatctcagtactggctcagtctttcatggacccaacgcctgggcatatactagatgtcagtgtttatgcatgcatccagtggtggacactcgcttaccgttcgcgtatgccataaatgtcatagcatcttgtatgagttgctaccttcagctatttcgactatattgccagttgtgcgagtactagcatcttacgagcgctctagactgatgtgattcggcaacctagtgaattacagatagcagctgaccattctgcgttatcacccttaatggtcggtgatgccgtaaa

SEQ ID NO: 299437 - DNA, 473 bp, Homo Sapiens
ctcgtgccgaattcgttacgagctgccgaattcgccaccagggtagacatctagagtcatatacgcaggtgctggcatacaatgttgtactgtacagcccagaattgggctgctgtcacagactcgattatggaactacacagagacgggagccattatcatgtgcgatgctcgacatacgtttgcaacggatgcactatactgtcgattgctggacaggatttcgaattagacgcttctgatactcaaatgatacaaagtaacagacttaatacgcattatatgcagaaatgttacagattactagactacgctgtcattgaatacagcggttatgactgagactgattaacgtttgacatagatattcgatgctgactaaacatgtgttagcatgctagttacaatgccatgattacggcgctaattgccatactattgtatacacatatgcgtgcagtcgatgaatatca

SEQ ID NO: 299438 - DNA, 381 bp, Homo Sapiens
  misc_feature (190)..(215): n is a, c, g, or t
ctttgggccaaagtaatttatttaggtgggagggtattgtagtagaaaaatggctcttatctttctcaaattctttattttaggctttttccataacttgaatccattaacagatagggtctaataggtcagatgattttgggagaccgctcttcatgtttcttgattcagaaaacttatatattctagnnnnnnnnnnnnnnnnnnnnnnnnnncaggcaggtgaaatacattaagtatgtatttgaatctattgaatttgtcattttgaatttattaaatgtctgtcattagaggtagtagtaaatagttatatatttgaaatgtagtacttttataatctatactttcctaccagttgattgttcctttaagaatgtc

SEQ ID NO: 299439 - DNA, 393 bp, Homo Sapiens
cagtattgctgggttctcggacgacacgaccacagccgtatcgagtgcccggccgacggcacgacgactgctattggatcggccttcgagcggtgcaactccgtataaggacgcgggacaagcccgacctagatctctggaatggctaacgaagcctaaccattgtcgtctgacattggacacatactagagtatggccggatacgtcgggtaagacaagtcgggcacaattagggttatgtcaccaaatttcccagtgaagcagtcaaagtgtgattgcagtcaagatgaatatcatggcagtagcccaagccgatgtagactgacatggctcagtatgcgtctgctctatgtcctgagagctgacacagagatgaccatacatcgatgaga

SEQ ID NO: 299440 - DNA, 408 bp, Homo Sapiens
caaacccacacacgcttactacgaacaaaccttaggctctccatgtacccaagtaacgtataggcgactggaaccgaaacctgacgcaataggtatagaccctgcaagccagcgaccctgaaggataagcaagcactacatagcacggactcacagacatagcgccagcataaccaattgactagatataactgcctcgcagagctcaccagcctgtgtggcacaattgcgacaagatatatcggcaaaggcgacacacctaccgagcctgactatagctggctggacaagatagaagcttagctcagcgataaatatgaccacaggacctgtctaagaccccttgcatagtgaactgctagaccaaagagtagcagctcttgggacactaggactacacctctgtgg

SEQ ID NO: 299441 - DNA, 466 bp, Homo Sapiens
ctaacccactccactttactaccagccatccttagtcctaccgttcacccagataaagaataatcgatagaacttgaaacctgttgcagaagatataggaccgcacgggaatgattgacaatcataaccaagcatactatagcaagctctatcccctataccttcatggtcatgacataactagatctaactgtgcacggtgagccaaagctatgaccccacgatccaggcgagctacctaggaacagctaaacgagcacacccgactatgtagcacaatattgcgaagatatataggtagaggccacagacctaccgtgcctggctatagctggctgtccaagatatgaacctagttcaactgtaaatttgcccacagaaccatctagattcccttggaaatgtaactggtagaccaaagaggaacagctctatgcacactaggaaatcaccttgtagagagagt

SEQ ID NO: 299442 - DNA, 410 bp, Homo Sapiens
cgagctcgctgcaagttaactccagacactgttagcctgactatcaacagaggaggctatagaacgagagaaattgctacctgatgcttatgatggaagcttgatcgcaaaggatgatccagtatgtctgagggttttatagctcgagctatgccaaactccgcgccggttgtgccaggactagacttctcgatggatgtggaggcacagctcccaccggcgcaagcgctcgagctcactggtagcagtgacacgtatctacatggcgtgaatgatgctgacatggacagcactgaggtgagttcaacattagatgaacacacacgaccttttatatacccgtgaactataaccgatagctcctgaggagcagcacgacgtcgctatgttgaaccttgcaggcgagtaca

SEQ ID NO: 299443 - DNA, 471 bp, Homo Sapiens
gttagctaaattactcgatcgagaatggttaacagtgctttatccactacgcatggtcaatatgcagaatatgctcccaggtaagagaatgctgacttgtatgtaacgaatgcttagtagtatatctagagatatcaggttcctagagtggatttatgtctgtcagacagtctgattgaactgctcagatagtgatacacattacgcacagatctcagctatcaagagagatttataatttagctactttcatttgatccgtatgatgagatgttttcatttgctgggatgagtctgtattctgctacatggatgttacatacttggggacatcatgtgtgaagctctgatctctggacaggacaacttgatcagatgaactattagatgatgcaggtggatctgtctcttcacacattgctcagaatagggacctgatgttgcagattttggaaggaaggcgactgagct

SEQ ID NO: 299444 - DNA, 462 bp, Homo Sapiens
  misc_feature (438)..(438): n is a, c, g, or t
gagacctgcacgacggtagccctagacggcgctagtagtgccgacaccaacaatgacagcactatccaaggacttgatgggctcttagagtgctgtactaagagccaggaagactgtgtggcatataccaagctgctttcacgactgcagattgccgaaccatgatgactcagacttgctgtcctgccaaacttcatcgtaatggctcggtgatccagcatctgtgagtataccagagcggatcactattgttgtaccataggccattccaagtgtcgaccatagcctgatagactgtccgcgacgtcatctaaaggaactgagtgaactgaacaaggcccctgatgactatcacgttcatctgtaaggcagaccatcttaccctcatcagctggatgctgaacatgccatgagtcattatgatgcttctgagcaagnagtagagcacatccttcaagtata

SEQ ID NO: 299445 - DNA, 704 bp, Homo Sapiens
ctcggatgtacgcgtctgttagacttgccattttaggatgctgtgcaggcgtgtcgcattctataggagcttgagtcaggactacagggcccatgtatgggagctctatggattcggtaatcgactagactgcatcagattggcaacgggcagcacaaggagctgacttacatgatgaacaccggcatagtgtaacttattaggccaaggacatgtggagtaagccgcatctagaggcgttggattctgtacaagagatctgttagtttgggcatgaaacagatgtaaggtgcatactgaagactgatccacgcatgcactgctgactcgagaccctaaactggtcctgcgcaacgtgacattgccgagaccaggactggcttgagctcaatgaagtcagttagtagttccatgctgtcagcagcttacagagatctcaacataggcgatagatgatcaagatctgcctgcttgatagcattcgagcctgctcgatacagtatgcgatgagcgcgagcactccaatggtcgacgacatgaaacgctcttagatctgcccaggttagtcacgtccgcaattatgagaaccttccgtgcaaactttaacaggagcccggtttcctacgccttaattttcccgctcatgctgggcctgaatttatgagggacccaacggtgatttcaaagccggaaggggccaccct

SEQ ID NO: 299446 - DNA, 688 bp, Homo Sapiens
cgctaagtcaccccttatcatctatgctgactgtgacctcagcaaggctgagcagacggtgacgagatctgttagattcaacaaagcagagaattgcattcgccaaggccgactcttagaggaggactccattcatgatgtgctggagcggcgagtataccaagaggtgaccaagatgactggtgacaacccggtgtgcagagccaccgatcacaggccggaaacacgtcgtgctcactatgagcagctgacagagcactgccagctatgtaggaaaacagtggccagactgataggcggaggcgactaacctacctagccaggagtattctgtgtgcccaagatcgtaacacaggtcagcgatcaaatggccaatagcaccctctaaatccttttgccagttagctgatagtctcaaaatgatcatgtcgcttacactacgaactaactcgtgccagagagtcgaaaaatgaacatgcttcgtacgactagaaccgggcacccatcaaggacgcgtctaagatcaacacccattagctaagcactgcgaacgtatcactgacctcatgaacgcaattgaccaacctatgacgtatagaaacacaaggcttggctaaggacatgaaaacattctcttacgcataaccctgcggtagattttatatccctaatgtcaacccaacccacg

SEQ ID NO: 299447 - DNA, 761 bp, Homo Sapiens
  misc_feature (563)..(563): n is a, c, g, or t
  misc_feature (645)..(645): n is a, c, g, or t
  misc_feature (656)..(656): n is a, c, g, or t
gtccaatggcgagcgcatcaagaccaccaccagcttggaacgacagataggagtgacgactgctggccaagctgtggacactgtgggtgcacacgtgtactgtgaggactgtgagtactgagagctgcagacacggacggaccggatggagttctgaggccggtagagatccgagcagctgatagaaggtcgtacgaatcgatggacgagggagcgcagacaccgcagtatccgagcttgaagtctagatgcagtacacacgtgcacatgacgaggtaacggagagcagagggctgattgagacgatcatcgataccgtcagcctccagtgcggatttgacgctgtgcgtgctgacttggagtagctgaccaccgtctgtgatggccacgagagttattgtcagaccacaggtgcggatgtgctgctgggtcacgcatcgtacagcatgtaggattagctcttgctgtttgtcgccagtcactacgttccgtggctgctgatgcattcagctatggcagctttgtgcgaatattacgacagagaacactcatgatcgagggtncactgctgacccttgcggactcctagactcggtagactcgtgtaatgctgaaggctgacgccatgcgtggacgatgtccatnaacgactgggnagcatgaatcaagtcttgcatacaaggagagccttgagtgagtgcgcaggtaataacgtcgttaatgctcggctcagttaagggtttcctgaggaatggatttct

SEQ ID NO: 299448 - DNA, 751 bp, Homo Sapiens
gtggaccagtcagcgctgaacatatcggggcctcagacgacgcatcctactcactcgattctagtcagtagaggcacctccagatgcgacttagccgaactgacgaagaggagagcgctcacgcgcgcctagtcgctcatggctcaggccactagtgctcagctctgctcagagagcactatggagcctccagcagacagtactgaaggctgaggaacatggcgtgactacatgagcacagtactgggttggatatgagacctactcggagcaaccgcagcatgcagagatatgcctaggggactcaggaggcagatcagtcgagcacgagacaggactggcagtatcagagatgaacctatacgctctccaaaggattgagaactttacttttgaattaggagtcttacagaatcgcaaaataattagttgccactatttctgcaagagactggtctgaaggttatacatcattctaatgataagcagtgccctacaagactcttatccttgcaatacgaacagatgtcctgagaatacttgtcacatgttagtcatgaccacatagtccttgccactataggccaaaactggctttcattgggaataactgatggagtcccaacattcactattttggtcagtaacctgactttggtaaaatacataggccacccaggtgccaaatttggcccaatcttttgggacacaataatgtccctccaaaccgttcggtttgggtccaaatcgg

SEQ ID NO: 299449 - DNA, 722 bp, Homo Sapiens
accaaatcgagagcgtaccgtagcgctcgcgaccttctgatgtgatatatggatgcagactgctcgcaaagctgtggacagcgtgtgtgatcagctgtactgacgctcatgacttcatgagtggctgaagacacgagcagaacggcaggagtgttcagtatgtaaagctgccatcagcagagagaaggatgctccgctttatgcacgagggagccagaagactgagtatcccagtataaaaactgcaccccgcccatagagccagagaccagctacggagagcagagccggaatccagacatgtgcagataccgccggcattcacttatcatttgaggctgctgcgtcagcctcagcattgttaccatcgtcttcaatgtccatgagcctcaacgccgctgacaggtatgcatatgtcacagtgtcacccagactacagatggcacgaatgcatgttactgatgatcgacatctactgcatagtacgtgtgctcagcagttgagctatcactgctatcatggcacctgcaggcagagatgaatcagttttgaggcttcctgactgcccatgctgtcatctggactacgttgaccccgttcattctgctgcataacgcaagtccatgacatgttcaagaacgcccgcgaggaggtttgaaactaccaataaatgtatagcctacttttacaggttacttccccctagccattgttcacccaat

SEQ ID NO: 299450 - DNA, 690 bp, Homo Sapiens
caaggctgggacgaattaatcagtcttaactataagtaccggcactgtctctggggacatactctgatatgcagtttctaatcagtaccgatcagaagattaggttataaaaacatttctacttcatgctttgatgcttggtacttattggagcgactttcagcgtgactcttatatatgatgtagtcaagtaccatagacatgaaattcagacgactcactgttaccacgtacagatgtgcactgggcatcgctggagcaggcaggaatgccagtcacagctattgcgcagacaaggctactgcgactcgtagcgtgccgtgatagactatcgagacttgcttagtaagtgctctgcacgtgctcgaaatcaccttagttcctgttaagtactagcttgccgctgatgaggatactgttcgccggataaagcgctaggagcagcatatcgcagaacgatgctggtcatgttgagacagtgctagcttccacatgcagtaagacgtgccgacccttgatagtaactggatgcccttgacgacataaatatagcttgacggtggcctatacactaaaggacttggtcaccggcggtcaatgacggaaggcatacgcccggatgtagccttacgacggtatggaaacggacttaagcctaaacccaatttaagggtcccagttgctacagaa

SEQ ID NO: 299451 - DNA, 712 bp, Homo Sapiens
  misc_feature (110)..(153): n is a, c, g, or t
  misc_feature (205)..(217): n is a, c, g, or t
  misc_feature (387)..(387): n is a, c, g, or t
  misc_feature (567)..(567): n is a, c, g, or t
gtgacattatcatcatagtttatattgtgtaattaaatgattcatcttcctcatttgatcctcatcattaaagtcacctgagtatctgacttatacaaacttctttagannnnnnnnnnnnnnnnnnnnnnnnnnnnnnnnnnnnnnnnnnnnaatggacaactagaaacattgaacaatatgtagattaaaatagaatgttgtnnnnnnnnnnnnngaatggggtagcacataaattgagtagtaggttagaaataagtcctattaggagcaatttcaggattcagagatatttctaggtggttcaagagacaaatttgttcgagaagtagtagttatgagcaaaatcagtgaaaacctatttgatatccaaaggattgagaactntacttttgaattagaagtcttaaagaatgtcaaaataattagtttccactatttctggatgagatttgtctgaaggttattcatcattctaatgatttgaagtggcccagatgtctcttattttttgcaatatgaacagaagtactgagaataatggtcaaatgttcatcatgaccacantattttggggatatagatataatttctttcaatggtgattagtggtttactctcacatttcactatttggtcacgtacctaactttgtatatcacttaaccctctcgctttcttctttttacgaaatgattcttggcaatgggac

SEQ ID NO: 299452 - DNA, 699 bp, Homo Sapiens
  misc_feature (335)..(335): n is a, c, g, or t
  misc_feature (411)..(411): n is a, c, g, or t
caaggatgtgaggcacgtgagggtatggccatgcggatgttacaggacttgttgtctgaactgtgcttcactgggaacgaccttggcctttccaggacctacccattgagatttggctgccattatcctatgagtgataagtatgaactcactactgctgcttagctggatcatatgccagagtagccatgcttgacagacactgacttgaggtcgtatgtaagtatctcagtcatgatatactggatgtttcacaaggactggtcagactactggagtgattattcacagatctgctgaacaggctgacatgcagacctaggacgctgtgctgngagtattccccagatactgattggggccagagactctactgcctgtgtgactcacatcctgtccatactagtatcntcgtagctctaatgagtcgagccattgctgttaatagtgaatcttctgagcaatgaggacatgaccatcttgtgtgctctatgaatatagtctaagcttactgctgaggcgttttttgtaacccaaactgactgatgcttggatttgaattttgtattgcaatttcaagacttgacctggttcacaagacgtcatatcaaagttaggcgtacatttaggctatgtttcagggtaatttgccatggaggcgacttgatgccaggttgaactaaacttggtcgttgtagt

SEQ ID NO: 299453 - DNA, 576 bp, Homo Sapiens
tcagacagcctatgacagtaaaccgcctgcctgctgagaccagtcttcgattgtcctatttcactgcaacgcccaactcggtactgatcaactgctagctctctaccactagttgccttcttgctgatgccgactctactatgtttcgacaatttatgccctagtacaacatgtcctattgccccatctctctcttggctaccctacacctcatgcagattgctctgtcacgctcctgcttcaaatctctctaccaatattataccactctacagaatagcttcaaccctatctactcccatagttccgcagcactacctgtaccctcttcacctcatcttccacgtcacactcctgaataacgtctcacttcctttccctagatgtcccctctcagacgtctgctcctatctttaagaccccccataggcctcaagcttacaccattttttccagcatttttctgccccatcattcgctaacctgccttaccatctattcctacgccctgactcttaatcttccgcgccccctctaccctccctcatcgtctttcaccccatcctttctctactc

SEQ ID NO: 299454 - DNA, 736 bp, Homo Sapiens
  misc_feature (609)..(609): n is a, c, g, or t
cacgactgggccgaatcaatccgcctgaactattaattgctggactgactctgagcacttactaggacacgaggatattactttgtaccgagcgtaagattaggatctcccatcgattgtccttcagtgctcggcgcttggaaagcgttgaagcgtcactaagacttactcttatatatcatacatgtaactgccctactcacgcccaataggaccaatctactggcctcaagaatggcttatgctgagctgacgtccatgtgactattcggcggcctattagcaagcgcaggtgtaggacgctgaactgacgagcaacaggccattgtctgcaagcgatcttcgacgcactagtacactgactgtgaacccgacacaggcatgctcatatggaaaggctattcaatagatacacaactctaggtggtgcctcgaacccaagttgacctatagtgaggcgcattacaatttactggccgtcgttatacaacggtcagactgggaataccatagcgctacccaactgaatcggctaggagcacaatcacctttcgccagctggcggcatacccgactatgaccgcaccgatcgcccttccaacaagttgngcggctcgattgacgatgggtaaattgcagccgtaatagtttggtaaaattccggtaaaattttgtaaaaccgctcatttttgacccaaaggcccgaacggaaaaacccctttaattcagaacgggc

SEQ ID NO: 299455 - DNA, 777 bp, Homo Sapiens
  misc_feature (251)..(251): n is a, c, g, or t
  misc_feature (361)..(361): n is a, c, g, or t
  misc_feature (433)..(433): n is a, c, g, or t
caaccttactacgagttaaagagccttaactataaatacctgaactgacaatgactacttactattacacgttcaaaataatcaataccgaataaaaatttaccctctgaaaacacatctaatctatgctctggtgcttccaaatacgagctgccccagctgaccttactcttactaatcatacattagccaaacctaatatatggaatgcagacaaaatcacatgcaccaaaactgcattattccgagcntgctacacttagactatcctgatgccacatgttatgtacagatgtgcgctgacgtcctctgtagcacgcaccattgtcactaagagagattgtgcacatatgactactgngacacgtattcacgagaggataacaagcaatgcggctagagaagactgccttgcaagctgcttctatgacangactgctgctacactgacaccatggctatgatctcttccaaccaagccatgatcacagctgattggcttgatagcttattgccagtctgatgtgatcgcggacaggcgaggtgagcttattttcagtgagcctaatactcactcaaggacaatgataacaccttgagcttgatactaataggccccaatcaagggccaacccactggctttaaatcctaaattccgccttaatttcctagaacctgacctttcttaggttcttgagttctcacccactggaaccgtggcccatttttaaaccgaatgacccattccaatgctgcttactggttggacacacgtg

SEQ ID NO: 299456 - DNA, 763 bp, Homo Sapiens
gctgcaggaatccggcacgagggagaccatgacacattgtgactgcgcgcctccgttttagggcttgcgcgcaggaagggagacagagaagccgagaacaaagcaagctcgtaatgtgagcagtggctaaacgggactgtgagccatagcgtaaatcatagggtacgggggtaacggaatgggacgcagaactgtggcaatgagatatcaaggaactacactcacgggcaataccagaaaacgtcattagctcaagaaaaagatacactgctgcagggattagcatgagcgaagaacgagacactctagacaaggtattaggatgtgctcacggacacgagccgtataaaaactcaggaggcgtaaacaggcatacgccatagctcatataacagctatgctaagaacatggactggaactgagacaccgcaactgggactatgtaggcacagatatacactcatgagcagaaaccttggccgaaacgtcacaatagcagagacattcaacactgaactgcaactgtggcagacggagagctatattgccaagaaaccacatgctagacacggagatggacttagtggacaagcgatggaacacgtgaaaacactaaagagcggctagaacacatagaaccaccatcgagaatggctattaatgcactggagagggaaaaggatccaaaggagcgggaaaaatgggaaccatggatccccggaaagcaaaggggcctaagtaacaggacgttgaacgggccta

SEQ ID NO: 299457 - DNA, 730 bp, Homo Sapiens
ggacatttgcatgtgatccaagcggtattctgaaatcttccatctgcaatacaagtagagctgtactgatgacatgatagctggtcgccctgaactgagtaggacaacatctgaaggttcactgcttggcttgtggcagaaacagtacaatcgcagtgctacgcccgctctaaactgtgacctaatgcatatacgattccatttaccattcacctatctaagccattatacactgtcgttattaccctaccaaactcttacgcggtttcatctagagactttgcatagagactaattcctaaacacctcgtgaaggacttgtgaagatattttgcaaagacttgacaaagccgtctttctgaagacctggtctttggcccattttgtctcaattctgcttaactggtaatctttaacagactcttacacactgctacttatattataaccttcacgaacccctgatagtccttatgaaagaacccgtcgtccacgactggttcccaagtggagccctaattgccatcactccaggctaacctctttaaggacgccattcatcgtagcatcagcccttcatagatctcaatgcttgtctttaaccatcttcgccaattccatctcttctatcgttctcctttataataacctacgcctaccctaccacaatctacctacaccatttcttgaatataaatccctcacttaccttcatctcatcctctctgcg

SEQ ID NO: 299458 - DNA, 646 bp, Homo Sapiens
gaaccttggcaatttactgtattgttgtccctaaaactctcgtctttagaatcattgtggcattactttagacttcacactgactatcattactatggtgacgtctattccagctggcttactcaatatgcttcgaatgaaagagcagaatcttgcgtcttaaacagcccatagatataatataatgttgtcctcattgcactcctacgtagaatatctaacaggttgtcactcagactatgctcaaccatgatcaaacagcttattccatttggcactgcactgatgacaagaacaaattccttatatggagctgcaatctacctatcttgtcagtgacctgagcagtgatgtactcgtgcctgtcatgatctttggacctactgaagatacgttctaccatgttcgtgaataagtgacatggattttagacgctgtcccatcttacgcgacccaagtcgagcgccagaccagtcacaggacactgcctgacatccatgactccttcagaagaacgcacaagtgtatccgtctctggtcttaatcactgagttggccatttggcaaacaacgtcctgaccagcataccctttgtgaatccaatcccttgaactcatggaagagccttttactacacgaccttcct

SEQ ID NO: 299459 - DNA, 640 bp, Homo Sapiens
gagccttggcactctaccgtatagttcgccctaaaactgttgcctttagcctcaatgaggctttcccttagactgcacactgactacgattactacggtgaccgctatgccaactgtcttactccatgggctcacgatgccagagcacaatgctccgagttcaacagcccatcatgatgatataatgtacgcctgactcaactcctacgtcgaatatctaacggattgtcatgcatgctctgctcatccaggctccaacagcttattccatctggcactgcactgacatcaacagctgatgccttctgtggagctgcaatctaccgatcttgttagcgtgctgaccagcgagctaatctgaccttccatgatctttggaccccctcgatatcgttacgtccatgttcctgcataagtgacgtagcttttagacgccgagccatcttagccaaccaacgtcgagtgccagaccagtcacaggacactgaatgacatccatgactccttcagaagagacccgcaactgttctgtctctggactagaatcactgagctccccttgtggtaaaccacgggctgcgcaccatactcctttgtgatcccaaacaccgtggaacttcggtgaacaggcgttctcctc

SEQ ID NO: 299460 - DNA, 694 bp, Homo Sapiens
gacacagggcgcttaggtgtctagttcaccctagaactgttccacttaggctcaagaaccttatgctgtagattgcaaagtgcactcttactgatagagggactactatgcactcgtgtagaactgcaggtgttcagaacgactgagtaggaactcgctgacgtgcatcagctgatcatgatgatatagatggcacatgacggagcgcttacttcggatcaacatcgggtcactactgtaactcatgctatacttgatgcacgtggtatgcacatcgagaaacggccggacatatcagcttgattgcttcagtggcaattcaatcaacagatcttaatggtgtgctgactatggatctattctgaccttcaatgatgtcccgatggtttcttaatccttacgacagggttcctgcatatatcaggagctttttaagacgcgtgctatcttaggcgacaaaaatcccgtcgcaggacgaatcatacacccttgaatgtcatggacgctttccttagattgagacccgccagctgacaaagatgcgagatgagcacaatcctggtttgggtaaccttcggtaaagcgaagagaccagtatttctgaggagtgtccatcagttacaccttgtgggaagaacacgtattctgtagaggcactactttttgtttccaaacaccggaggcccttggttag

SEQ ID NO: 299461 - DNA, 631 bp, Homo Sapiens
ggtcaatcgtgctcgaacaatatcgtttacaggctccagacatcacaggtacaagcagcgcggtcccgaagacctgggatatgagacaagcggaagaagtgctcatgaacgtcagcaccgaactgtatcataatggaactacggttctattaccgagacacggatataggccatttggcccctctaaacaacgtagcacactcttagaacgcattgtctagtaactatagcggacgcgcacatctaaagcagctctgtgaaggatctcattcagatatgctggcaagacggtgcgtcagcagtcaacattgatgacacatcgattctggcccactacatatcaacgcctctgtacttgtgaaagctttaccagttcggacccctgtctagtgaaccacaacctgctgcgctgaagagagattttagacagacccgtggtcccagactggccccaacggcgacctatgaacgtgagcagtagtaactaggctggtgccacctaggagcaaagtttaactggacttcaggagcgttcaatctcagcagctccaatctatgctcttagccggacttcccacggctcctaaacataacccattttatatgaagcaacttcccaaacttccttccg

SEQ ID NO: 299462 - DNA, 678 bp, Homo Sapiens
cttgaatgatggatgaaaaaggtctgactcaggatgaaggcttatggtctactcggatgcacgtactgaagatctgaggggaccaggaggttgagttaacggcactggagttgtaggaagtcacatatggttctgcaggaagacagaaagggaatccagactgagcagacactacgacattcgaaatgaaaccatgattgatttgaaaaaatgggcaaataagttatcagtctgataactattgacgtgaggcacctctcaaggaagctagatcagatttgaccacttaatttacacactctagatggcagaagtcaaactgccaatggtatgcagaaaccactgataacacgtgacagtgaaatgcatcattgtcttaatatataggaattaactgatcagtagcagagagttcattagcctgatacggaaaattgacatcattaggctcttacctgaaatacatgcagattagaggccagaaagatatgcttaatcttacttacaatttcagaaatgcaatccacattatcatgtggaaccaacttagaccgacaaaggctgaccctactgggtagagcaataaggggcacaggccttttcaggaggaattggtaactagcttatggaaagcttaaatgccgaagccttttgatgccaggtggcttcaatttttag

SEQ ID NO: 299463 - DNA, 658 bp, Homo Sapiens
  misc_feature (138)..(419): n is a, c, g, or t
ctgcaggaattcggcacttggaacagtagagagatcgctacagactcctgattatatccatcatccagcttcagtgattacgattctggcacattcctttcttgtatcctctagcatgtgcttgtaaaaaatttactnnnnnnnnnnnnnnnnnnnnnnnnnnnnnnnnnnnnnnnnnnnnnnnnnnnnnnnnnnnnnnnnnnnnnnnnnnnnnnnnnnnnnnnnnnnnnnnnnnnnnnnnnnnnnnnnnnnnnnnnnnnnnnnnnnnnnnnnnnnnnnnnnnnnnnnnnnnnnnnnnnnnnnnnnnnnnnnnnnnnnnnnnnnnnnnnnnnnnnnnnnnnnnnnnnnnnnnnnnnnnnnnnnnnnnnnnnnnnnnnnnnnnnnnnnnnnnnnnnnnnnnnnnnnnnnnnnnnnnnnnnccagtgattgcactagactgatgataacgaatttactgagttttttgctccatatcttaaagcaactttgaaatgcttacttccatggtcgaccatgatcgttaacaatcccgattctgggtgacgataccgtgcattacgactcctaacatggccacagggatacgaaatgacccccacgggcttatccatggggcatgaccttggacaagaaagcccgaggttgccccgcgaccccc

SEQ ID NO: 299464 - DNA, 664 bp, Homo Sapiens
ctcgtgccgaattcgtaacgagctgacgaatgcgctactggtttagacagctagggtcagatacgcacatgacgtcatacaatgtaggcctttacagcgatgactttgagtacaaagaaagaagcgatgactgaactacacaaagaccagccaccatataatgtcagtacttcgctatacctgttgaaatgaaggactatactgtccattgctggaaacaatttagatgttgtcgctaaacatactcgaatgttccaagggagcttacgctacacgaatagtatgcccatattttctaattgaccaggctaagcagtcattgaatgccgatgagagcatggagaatgatcagcctttccacaggagcttgatgcctgcataattatttctcagcattctgaaaagcaagccatgtttaacatgggaaatttatgtcatattgtctaaatcaccttctttaaagtccccaatttgaaaatatggactcatactccctagaccccgagatgaaaatcaaagagtattggcttcgggtgtagatctatcctggcctgatgagtcagactttgcattgcacatgggttgtatcagtcccaggttacaacccactatatgctgctaacattatttttcagaacctatgcgcatgcattattgctcttct

SEQ ID NO: 299465 - DNA, 578 bp, Homo Sapiens
  misc_feature (221)..(301): n is a, c, g, or t
ggaacaagacctgcactttgaacaatagttacgatgacatgttgtgaaggtgcagttatggcctagtcactgtgcccgaaccttgaccttacaaaaacatgtcttagctgaaaccaagggctatgggatttaaggttgagcacgatgtagtctaagctaacagaacgtttacagacagtgtgcttggtacaagacatcggcattctctagctctaataaannnnnnnnnnnnnnnnnnnnnnnnnnnnnnnnnnnnnnnnnnnnnnnnnnnnnnnnnnnnnnnnnnnnnnnnnnnnnnnnngcgatagtctgtaacatagtctcattgaatggctaagtactgatcgatccttagccctgcaccggtaaagggactgctctgacgagaatatgtgctactgaaggctcgggagataactgaatgacgatcgataattgtgcataggacaaacaccccctatgctgtaggtcagacatgtttgcatcatgcttgcttgttatgcttaactcactgacatgtttggctggagagtaaccataattctggcttaggccacatgcacgcaatatgcccttcc

SEQ ID NO: 299466 - DNA, 767 bp, Homo Sapiens
gtacattcgtgcgctatctctctggcagtgtgtatccatccatcagatctacaagcagcgctgacctgatgaaatggaagctgttaggcatatactctacaagacatcttcatgcaggtgcactgctctgcttgtggactaaagagaacaatgaccgtgctacagcagcacagaactgtaacataaagcaatcacgcttcacctctaagagcaccgatctaggctatttgaaccctcgcgatcacctagcacgatcttacaagcattggtctagtaactctgcagaacgccagcatcataagcaccttgtgaacaatcgtgttcagagattctgacaagacggtgttaagcagacctgctgattgacatcggctctgccccactatctatcactgctctgtacttgtgaatcctctaccgagagcgcagcactgactactcagaccagaacctgcaggagcctgcagaagtgactgaagacagaaccagaggtcattgactagtccccagctggggacctatgtgcgtgatcgtgatgctaactgagtctatgagccactctactgaggaataggtttagacagccgtcatgcatgcagtgcaagtctgatgtggctcacaagctacctactgatcagctgctccattacccaccgacttgcttgacacttaacacactgagtcatgatgccaacttgccccaccttcccatctactgatgggggtcaggaaactcaggaagtctctaaagccaggaggttcccggg

SEQ ID NO: 299467 - DNA, 751 bp, Homo Sapiens
  misc_feature (407)..(407): n is a, c, g, or t
ctagaactttataacattactcctctaactgctaccttcagaacgactaccgattgctaattatgtcggtcaagagccaaatcctgtgctcacctatcaggaagagctatgtgcgcatgtatgctttggttcctactattgtacttatgttaacattgacagactcctagcgtactcatatggcatgaaagcttgatcactacagttattgccaccatgtctatcatcaccggctgagtctacctgtcggcaagtcttaacgcaggcgcatacgttcaatcttagacactgatatgctgcaaacctatactcatggcagtgcagtacactcacagatgtctaagttgactaatcctcctaatactcactctcactgagcaggcactagtaagctcgtgcgtcatcgncatgaatatgagtacgatcacacattagctttttatagtgcatggtacctcttagacgtactccacttatgacttgcctaaagaccatgacgatgccgccagacgctgtgacaatagtacttgccgcagtactactaaaggtagtggggctatgattcaaacgctttatactcagtattaacttactgacatatcccagagccgtcccctatcttggactaggcctacgaggcatacttttaacacggccttctgcatagcgcatacgggcctgaaatagctcatgggtactttcaatcagtcacgagaccccgtgttacaggccatttatccaacccccggcg

SEQ ID NO: 299468 - DNA, 300 bp, Homo Sapiens
agatggcgagacatagggatcaactacacgtgggaaagatggatggtcagttcaacccacgcgcagtaaatcacgagatacccaagcattgatgaatgccagaactgagaatgactacacatggtgcaagctgcacgacacattggtctatgaatgccaagctggctatgataggaactctggaggccccactgggtccaccgagtgtgcgtacaatgctgggcctgagccacctcacaggtatgcagagagaatgcgaactgccgaaggcgtcgaaatcttcctgctaaccaggatgct

SEQ ID NO: 299469 - DNA, 717 bp, Homo Sapiens
  misc_feature (619)..(619): n is a, c, g, or t
ggacggcctagctcatgtgtagtgtcgagcagagacgcattatgaacactgaagtgagaaccatatatatacttgcagctcctctctagctcgactgattccaggggtgtgttaagacgggatgtacgcattagtgagggtggtcatggttgtaaagcttagggagcagaagagtgaagagcctggttgtggatacgccgtcgttcactgtcatcagtagtgaccattcgtagatcatggagaataagtgaatgactgtgctgaatgcgcgcgagcatgtgtctctcatgaggcagctggtcattgtgaccggtcgcttcatactgttgctggacacagattatgcgcagtggcgactatctgtgaaacctatggtgaaatgcactggctgctgcgcaaggacatgaacctgagagcgagacctgaggatgatgtgatgtgcacttgtattcatgacactgactagacttaatttgaagactacttatatgagaatgccggactacatccgtactattaggatcacgtactactggactttgcttaaaggttcacgcttgcttaacaagatgatgccgaacttgtggtaaagcatacttgactgtggccaaacttggangaacttctgcatgatggtaaggctaacaatgtcaaccgagacttagtgttcatgactcaaagatttgacattagcgttcatgcatggccgcacctaca

SEQ ID NO: 299470 - DNA, 399 bp, Homo Sapiens
caggggggcccaaagcaggaaaggcttcttaaccttgaagaccccaatggggcacggaatggtaacaaattggaccaacatggaaaaaatttggaccaaaactttttccattgagttgcttggggttcccaaggagaacccggggttgttgaccgaggcccccttgaacccaagggccaaccgcaagaggatgacccaaatcatgttggagactttaaacacccaagccatgtccgtggttatccaggttgggttatccttgaacgcttttggccgaacaattggaatcgggatggactccggtaacggggtaaccaacttgcttggccggaacttgattgattacttaatgaggatcttaaccagacgcggttccagtttaacaacaacggccaacgg

SEQ ID NO: 299471 - DNA, 393 bp, Homo Sapiens
gaaactagttcgagttttcttgtatttgggatcacagttcttggaattggtgtcttactttactgctgattggtttctctttattgttaaactgggttctcatttctgttatgcggtaacacggttctgagaatttgagcgctgtcctgtgaaatgccagggcactactgtgcacatgcgacacggtagggttaaatgtgcgtacagttctcagagacgtaagcacacacagctgttaaatgtgatggcccaggactgccttagggaaggtctcagtactctgcttggggttcacactgctggctagtacatactggtgatactcgcatgacttaagagcatttccttacaaccagaggcatcctgtgaataacaatgagctatgagttttaa

SEQ ID NO: 299472 - DNA, 123 bp, Homo Sapiens
atgtactggggctgggtataaaggagttggcattggagacctcaatttggtcttgacttagattttggacctgtcctgggcaactcacgtttaatggattaaggtgggccaagattgcttttt

SEQ ID NO: 299473 - DNA, 549 bp, Homo Sapiens
agatggtgaaacatcaggatcaatgacatgcggaaaagatggatgggcagctgaacccacgtgcattacagcttgtgatatccgagagtttatgagggctagaactaagaatgactccacatgagctgagctgaatgacacataggactatgaatgccacgatgggtaagaacgcaatactggaggcaccaatgattccataccgtgacggtacgatgggtggactgagtgacccatagggtatgaacgagaatgcacacgtactcatatagatgtacacttagatcgagatcgcgggagagaccagtatagagcaggagaggtattcgaaatctcttgcgaaccaggaattacaagagatggaccgaattgcgtccagcgctaccactcaggaatgtcacctgagctaccaatgggtagacgagcagtacaatcatgcggtccaccactgaactcatgaagtgaatgctgtgagataacgacagaagagtatggacacatcgagtggtgggaacatatcgcaaacctacttttacaagagtgcttggg

SEQ ID NO: 299474 - DNA, 604 bp, Homo Sapiens
  misc_feature (53)..(355): n is a, c, g, or t
  misc_feature (474)..(474): n is a, c, g, or t
  misc_feature (526)..(526): n is a, c, g, or t
  misc_feature (594)..(594): n is a, c, g, or t
ctgatttgcttcaggtttcagagggtattggggtaacttacaaagcagtttannnnnnnnnnnnnnnnnnnnnnnnnnnnnnnnnnnnnnnnnnnnnnnnnnnnnnnnnnnnnnnnnnnnnnnnnnnnnnnnnnnnnnnnnnnnnnnnnnnnnnnnnnnnnnnnnnnnnnnnnnnnnnnnnnnnnnnnnnnnnnnnnnnnnnnnnnnnnnnnnnnnnnnnnnnnnnnnnnnnnnnnnnnnnnnnnnnnnnnnnnnnnnnnnnnnnnnnnnnnnnnnnnnnnnnnnnnnnnnnnnnnnnnnnnnnnnnnnnnnnnnnnnnnnnnnnnnnnnnnnnnnnnnnnnnnnnnnnnnnnnnttgtagagtagaagcccatagagtatcaggaatttcagaaagatgtatgtctatacatttatggaacttaatagtttccttaggacagccaatttgggcctggagaacccacaaggttntattgtctgataaatcttagatttgtagggtcatttcttcagaggataactntattgagccttctattttaggaaacaggtctttatgtaggagattcaaagggagcaatatcacattanagggaagcat

SEQ ID NO: 299475 - DNA, 783 bp, Homo Sapiens
  misc_feature (17)..(17): n is a, c, g, or t
  misc_feature (80)..(80): n is a, c, g, or t
  misc_feature (119)..(119): n is a, c, g, or t
  misc_feature (252)..(252): n is a, c, g, or t
  misc_feature (288)..(288): n is a, c, g, or t
  misc_feature (379)..(379): n is a, c, g, or t
  misc_feature (421)..(421): n is a, c, g, or t
  misc_feature (431)..(431): n is a, c, g, or t
  misc_feature (457)..(457): n is a, c, g, or t
  misc_feature (468)..(468): n is a, c, g, or t
  misc_feature (518)..(519): n is a, c, g, or t
  misc_feature (532)..(532): n is a, c, g, or t
  misc_feature (534)..(534): n is a, c, g, or t
  misc_feature (537)..(537): n is a, c, g, or t
  misc_feature (597)..(597): n is a, c, g, or t
  misc_feature (648)..(648): n is a, c, g, or t
  misc_feature (666)..(666): n is a, c, g, or t
  misc_feature (705)..(705): n is a, c, g, or t
  misc_feature (718)..(718): n is a, c, g, or t
  misc_feature (741)..(741): n is a, c, g, or t
actgacttctacaaganattagtctgggactcttttggccagcaggtagctggtgttccttctcagtggacagcacttgngtttgacttctctgggctatatttctttgtattcagcanacagtgtctataactatatctcttaccaccatcagcacaatccagtggaagtacagaggctacagaaagaacattaggctcaccttactcggaaaaactggctttgaggcagccatgaggatctggtgcacanaaggtctttccatttatcctttccatggagactatnttttgttcagtcaacagacttactggcattgtccagtgtaatctcaggtgctagatcagatgtctgtagaagagagtcttactgacacttnggtgggttcttttcagtcagcactcttggatctgtctagcanaggtgaacanagaattcacattcattcttagtggtntgccagtagtntagctctgaacgaagtctaccttggaggtgatagccaagaaatgtcaggnntatggtcagcgtngntgncatgggtctgctctgcagctgagtgtgctgagatgcctagtgagtgccctatagatgctnttcagcagttgtcttcagtctaagtaacagcatgctgaatcagcttctttngggcttttgcactcttgngtgaccctatacacagatcattcaactggacaatgacantagatgcacattnttgtattgcctatgatagtgccntgctaccgtactacactatccagttgtatagctgaatctaga

SEQ ID NO: 299476 - DNA, 387 bp, Homo Sapiens
gtaaggtaacaggctaaggagaagctcagtttgaacattgcaatgtaaagtcctcaaagcctgtgactttcaagtatttctgttgcattaattgtattttcctgcttagctgtgttcagacatagtatttgcatttcttggagctttcattccaacagtctaacattttgatcttgaaagagtctcaataagccttatttgaccatctgaggaaaaatgtgaccatctgtgaataattggctcctgcttacgtgtagctctcattactttacagatgtatgcatgtgtatgtaagacttcagttcatacatggcttaattctgaaagtgttcagaccatagtacccttatttgatttgtgatttttgggaagaaatttgatatatgg

SEQ ID NO: 299477 - DNA, 430 bp, Homo Sapiens
aacgcactctgctacacttgccacagcctagactcactagacattctactactcagtctcagtgaccaggcactatcactctcatgcgccagcacctcaatacgacgagcttacgcattaggttgcatagacaggatgccgccatactgacgacactgatgactgcctaaagcccatgttggagccaccatcgctggatcaataggacttgccggactactctgaactctaggcggctatggtataatacgcctgacactgagtcttaaccgcatgaccagtcacatagccgacccatagcttggactatgcctatgaggcataagtataccaggctgcatctgactactgcaaacagacctcggatcgctcactgcatactctgcaagcatgcacagatgactggtaggaacaggcattgcttatcaga

SEQ ID NO: 299478 - DNA, 372 bp, Homo Sapiens
cagcggtgagtgagagcggagaaggttttcattatataagtgttagtgccggaattcctcgtgtttgccggtgctgcgattctcttcgctgcttctaccccgtgtgcctggtgaaatgatgctggctgtgactggttatgaccttgggcgacaaatcatgatgagctctatgcagagtcacacactgggggtccaggtgcggagaaacagggcagctttgtggccgcaggaggagtccaggagccgagcccgcctgcccttgccctgctgttcccacgccgcaggtgaccgcacgtctcccctgcagtcctgttggagccactctgtccagctgcccgtgctctcatcctactcctccacgtctttttcact

SEQ ID NO: 299479 - DNA, 384 bp, Homo Sapiens
  misc_feature (276)..(289): n is a, c, g, or t
tctaattccacctctctgtcccatactcctgagctgttaatttgtacatttcgatgccgattgtttcatcctgtgttttttaatccaaactgagtgtaatgagctgtgtgctttagggacctggctttgccttgccaattagaacaaagtggttactgagtaagagtatgttttaaataaaacatggcacctctgaatggtgctgatactcatttgggaataaaagagatggttataaccctttgactcacaaagaagagccattataaaagatcnnnnnnnnnnnnnngctcatctttgaaaagaagggtaaagtttacctccataaaatgtggttctacaagtttcttaaggtaactaaataaatttaaaagtttgtcatta

SEQ ID NO: 299480 - DNA, 712 bp, Homo Sapiens
  misc_feature (48)..(48): n is a, c, g, or t
  misc_feature (55)..(409): n is a, c, g, or t
  misc_feature (472)..(473): n is a, c, g, or t
  misc_feature (541)..(541): n is a, c, g, or t
  misc_feature (554)..(554): n is a, c, g, or t
  misc_feature (571)..(571): n is a, c, g, or t
  misc_feature (573)..(573): n is a, c, g, or t
  misc_feature (630)..(630): n is a, c, g, or t
  misc_feature (692)..(692): n is a, c, g, or t
cacgagcaacaatttagttatgtaagaagacttctgagattacaaganactcacnnnnnnnnnnnnnnnnnnnnnnnnnnnnnnnnnnnnnnnnnnnnnnnnnnnnnnnnnnnnnnnnnnnnnnnnnnnnnnnnnnnnnnnnnnnnnnnnnnnnnnnnnnnnnnnnnnnnnnnnnnnnnnnnnnnnnnnnnnnnnnnnnnnnnnnnnnnnnnnnnnnnnnnnnnnnnnnnnnnnnnnnnnnnnnnnnnnnnnnnnnnnnnnnnnnnnnnnnnnnnnnnnnnnnnnnnnnnnnnnnnnnnnnnnnnnnnnnnnnnnnnnnnnnnnnnnnnnnnnnnnnnnnnnnnnnnnnnnnnnnnnnnnnnnnnnnnnnnnnnnnnnnnnnnnnnnnnnnnnnnnnnnnnnnnnnnnngtcacttggagtagttataaaccactttcctggtgaaagcagaacatgctgattcaactgttnntgtcaatagcaatggatagatttggtaagtcccctcactttcttattctaaatgtcaagagtcacttnctgcagtgataangagtgtgatctacagananattatatccctgtgacccgatatggaatcagatggttctgcctcagatcatactaanaacaagatacaacaacatagggacaacagcacatacaaaacaaccttaaagtgggtttgtgnataatgatacgacctgaggg

SEQ ID NO: 299481 - DNA, 595 bp, Homo Sapiens
  misc_feature (165)..(165): n is a, c, g, or t
  misc_feature (187)..(187): n is a, c, g, or t
  misc_feature (195)..(195): n is a, c, g, or t
  misc_feature (248)..(248): n is a, c, g, or t
  misc_feature (295)..(295): n is a, c, g, or t
  misc_feature (337)..(337): n is a, c, g, or t
  misc_feature (368)..(369): n is a, c, g, or t
  misc_feature (382)..(383): n is a, c, g, or t
  misc_feature (397)..(397): n is a, c, g, or t
  misc_feature (399)..(399): n is a, c, g, or t
  misc_feature (411)..(411): n is a, c, g, or t
  misc_feature (458)..(458): n is a, c, g, or t
  misc_feature (469)..(469): n is a, c, g, or t
  misc_feature (477)..(477): n is a, c, g, or t
  misc_feature (483)..(483): n is a, c, g, or t
  misc_feature (499)..(499): n is a, c, g, or t
  misc_feature (523)..(523): n is a, c, g, or t
  misc_feature (539)..(539): n is a, c, g, or t
  misc_feature (545)..(545): n is a, c, g, or t
  misc_feature (551)..(552): n is a, c, g, or t
  misc_feature (560)..(560): n is a, c, g, or t
  misc_feature (569)..(569): n is a, c, g, or t
atgagccaccacgcacagcagaagcgtaatttatgtaccataaaattcactcatttcgaatgtacaattgaatgattttcagtaaattggccgagttgtgcaaccatcacctgaatccagtttcagaacgttttcatcaccctaatggcacacacaccctctttntaaaattatgtctggtagattntgaagcanatcacgtgagctgaggtttcagctcagtgaagttcttagcttgaagggctctntagctgggaataatatgagcgagtgaggtgccattgaacagttattngagatcacatcatagaagatcttgggagatgtaactaactancgaggtcgtctaagaataccacatctgacannagagctcatgctnntagagtcttccagntnattcttcaaganggagagccgcgtcagagaccgggactggttaacacatatggatgtcngcaagacagangtgtaaanagaganggtgtgtggaaaggangatagctctgatgagaggcatctngggatgtcacagaaangaggangagtanngccaagangattgacangataccagacagggctggtccgtgct

SEQ ID NO: 299482 - DNA, 842 bp, Homo Sapiens
  misc_feature (41)..(79): n is a, c, g, or t
  misc_feature (102)..(159): n is a, c, g, or t
  misc_feature (391)..(393): n is a, c, g, or t
  misc_feature (398)..(398): n is a, c, g, or t
  misc_feature (418)..(419): n is a, c, g, or t
  misc_feature (444)..(444): n is a, c, g, or t
  misc_feature (452)..(452): n is a, c, g, or t
  misc_feature (472)..(472): n is a, c, g, or t
  misc_feature (482)..(482): n is a, c, g, or t
  misc_feature (494)..(495): n is a, c, g, or t
  misc_feature (501)..(501): n is a, c, g, or t
  misc_feature (505)..(505): n is a, c, g, or t
  misc_feature (509)..(509): n is a, c, g, or t
gaacattacagatccaattgactcttctttgtattgctccnnnnnnnnnnnnnnnnnnnnnnnnnnnnnnnnnnnnnnnagaggctgggtctcacttggtgnnnnnnnnnnnnnnnnnnnnnnnnnnnnnnnnnnnnnnnnnnnnnnnnnnnnnnnnnntcgagcgatcttcctgcttcagcttcctgagtagcttggactagcagaggtgtgccaccacatctggctaattaaaaaaaagtttttagagataggatctctctgtgttgctcaggttggtctcaacacctggcctcgggtgatccttccacctcagccttctgagtagcttgtggtgtaggtggcagccaccacacctggcagtatcctttcttgagaccactgacctttnnncagangtatcactgtccctgaagtnngtatagatcttttctgctacatctnatgcatgntatgctcaaaacaatatatngctttgattntcacttaaatannttgaantagnctgngtaataggagcaataatctgtagtacttagctgttggattcacatattatttatgagacatagcgtcattatttcgatgcatatagcaggctgcatacatttgtatagctgatgaagtccaaatagcattactcctttcattagcatcctttaggtaattgtacaccgtgcagaagtcctatggcctctttagaactgcttaacttaacaggcctttattggcggaggggattcctctttctgagtgtcccctgtctaaaaatgccccaaatagccctttttcgtttttgggcttaacgtaaattttttcataagtggtatatttctttttaa

SEQ ID NO: 299483 - DNA, 640 bp, Homo Sapiens
  misc_feature (428)..(428): n is a, c, g, or t
  misc_feature (506)..(506): n is a, c, g, or t
  misc_feature (540)..(540): n is a, c, g, or t
ctgttgggaagttgcataatgtggtcatctgtgcctaattaaatgaggttagaggtgtgcacaccaccacaatgcctgggatctaaatcttcagatattaacgtttgaggctatggagctgtttccctgaatcacacacgagaaagcagtcaacatgggtgggccaaatgtggccaagatgagagagccagaagtgttggccttagagcagagcctctgtgtgtgagacattagaaggccagagccggggaggtgccggcgcagccactgccttccggtgggccggacggaaagcttggtcttatgctagattcagaagcactgaagaatggaggttgacactttagaggactaggaagggatcatttgtgctcttgcagctattgctgatagctagagccaaagaccattatattgctgaggcttgngtaagaaagttagggatgtgaggaggttgaaaatcctgaagaagagaattaggctgcacctgagtgatggtggtgttnttgaggctgtacctgagtgatggtggtttttggngggctgcacctgagcgatagtgattttttttggaggctgcacagcttgtcagaccatctctagatgtctttccacaatggtcataaggcgtaattccccc

SEQ ID NO: 299484 - DNA, 384 bp, Homo Sapiens
  misc_feature (226)..(289): n is a, c, g, or t
tcccttttctttgtctgtctatgtctatacttacttctatcctctgactttcgcattgactgtgtacctctaccttgtcctgatttggtatcttccatattcttacgatctttcttctttgatctcttttgtacctgtgatttttctaggctgctgttcctcatgttctaccgtctactttctacttcctcttccatcctattttcttactgtctttctgacctcnnnnnnnnnnnnnnnnnnnnnnnnnnnnnnnnnnnnnnnnnnnnnnnnnnnnnnnnnnnnnnnngtatgctatctatctgtctttatgtatatttctgtatatgtatctatacatttagtgggatatgcctatctgctttatcacgtgtctaatgccca

SEQ ID NO: 299485 - DNA, 608 bp, Homo Sapiens
  misc_feature (562)..(563): n is a, c, g, or t
gtgcagttcctggaccaaactgaggtttgggctgctatttctcatggcccaataacaagatgcacattaactgagtaggtggagtttttatttctgcaaccagttgcagggaaaaggcctggaaattattgccagaccaacttaaaattacaaagtttttcagagcttatatattttttaagctatatgtctatacatatgtgtacatttatgtaaagacataagttactgacttttaatctattaactaaggattgagtcttgaagaccttcctctggagcctcagtaaattgacttaatttaaatggctgtgagtgctggggtaattacccttgctttgccttctgctaaatcacagcagtttggggagttttcttcccaataaaactggcttaatcctaaatgggtcctgacgtattcttcgttattttatgttttaaggcccaggaaaggcctaagctaaacttggtgggcttttcttatatcccagcctttgtataagggccttggcttttaatatttaactactcagacagtactactgtcaatttgctcatgctnnttatcatgcatgtatatgtatttattaatcacgagaatcgtaggg

SEQ ID NO: 299486 - DNA, 614 bp, Homo Sapiens
  misc_feature (248)..(443): n is a, c, g, or t
caaaacttgaactactcattcacattctgtgctaatgtatattgaggtctaaaaactatagtgcaccttttacaggtgagatacaacttgtaatcctataactgtaccatactcttcgtgctaatgctattttaaatgaaaagaagacactacatttatacgccctgccaatggctcagactctagaggcagtgataaaaggagctgctcaaaggggatgcaatacatcacagtacatcacactatannnnnnnnnnnnnnnnnnnnnnnnnnnnnnnnnnnnnnnnnnnnnnnnnnnnnnnnnnnnnnnnnnnnnnnnnnnnnnnnnnnnnnnnnnnnnnnnnnnnnnnnnnnnnnnnnnnnnnnnnnnnnnnnnnnnnnnnnnnnnnnnnnnnnnnnnnnnnnnnnnnnnnnnnnnnnnnnnnnnnnnnnnnnnnnnnnnnctgaggctatctatgatcatgccaatgatctacagactatgtaactgagccagacacgactttacggtggctataagtgtagagatgagatcgcaatggctgaggaactgaactagtcttatgtctgtacacatacacattatctatatacatatgagtattctccacacc

SEQ ID NO: 299487 - DNA, 608 bp, Homo Sapiens
ctgcggtgaggatgtagggcctctcagtgcgattgttgcacggaagcatgctgctaagaagaaacttcctgcctcgttcgcatcatcgtacgattcctcctcatgtctaaaaatcttcccagtcagaagctgtactgaatataacacattatggaatacactttgcttccttgctgacattcacagatgatgaaatgatgatactgcgttcagttctacaatgagctcaggaacaacttgcacctttggattcaaccatggatgaaaattcggaaggtgacccagaatatggaggcacaggagctgcattcacatctcactgcgctcgtgatagaggaattagccaatgcagatgcatctgcggctgacattcgtgagatccataacacattacttgacacactgattagaaatcatggcacagactaacagtacgtcacatatatgactcagctgactacagagtaagttggaggtttctgcctctcagaggctgtagcacgtagtgactcatttgctatggagaccacagctgataaagagggcgattatgatgtgctcaacggatcactgatgttgatcaccaggctcaacacgcaaggctaatt

SEQ ID NO: 299488 - DNA, 621 bp, Homo Sapiens
ttgcattgaagccgatatgccgcagaagctgtctggggctttctatctaaaatcatgtataaaatcatctctccgtagatctgcaagtgtcctcatggcattctcatggggatccgtgctcatcgcatgaatcaactgtcacactgtcaatgcagaactcatcagtcaacatgtggaggctgagtcagggaacgtcttcatcctgatggctgtagtgaacatgttatgtcagcagatctacctcacgtatgtacagccagaacttcaagactgaactatagagaggacccttacacgtgtctgaggacatagtgtctcgaactccataccatagactcatcagcagtgaactcttgctgggtgacagctcttacctggcgagcctgtatatgacacatgatccacggtaccaagtgcagagattctgaatgaagtagcactgtggaggaacccagatgctactagttctaagagactgattagaggtatgtagcctgaccccgtggccgacaacagctgtacaatctcgtatagtcgaatcatgtgtcctacgagattctctcattgagaaatactatatgaatcctcatccatgcgtaaatgatcactgacagatctcct

SEQ ID NO: 299489 - DNA, 672 bp, Homo Sapiens
  misc_feature (647)..(647): n is a, c, g, or t
cttgactgcacatgctctacgatcgtcctgatgctgagatatgtccgttctgaacctccatactatgcaatatggcgagatgctgttgtgaatgatccatacaccgacgcccatgatcaacacttacctaacacggtctgatcatttacagtcaaagtattattgaggtcgtcttaaacggtgactgacgttataacttgcatgacatccaattgcctgcgtacagctgaacatacagcgtgccataatccacgagactattagcagagtagatgaccattcattgatctagtacatacaagacttgacaattggttcagcagcagtagcttacaccctggtatactagcgctttaggacgccaacatgctcggaacatgttgcggcttagggtcaataaccaggctgtccaacatggctatacgctggatgatctagaactcaaccgtgagttgtatccatcacctgtagtggcagccaatgaggagcctgacacagttgtatgagttgaacgctgcttgtgcagtctcaagtgagatgtgatgtcacagtgtagtaatcgtatgacacttagtagtacagtggcttaacgagtaggatacactcacggactagcaagatcctacttgacatgagtgctacatatngactgatactaaggtgccatattaa

SEQ ID NO: 299490 - DNA, 609 bp, Homo Sapiens
ccgaggcccagcctgtgtgttcctgtgacctgccggtattatgagggacacagctactacaccagcaccccctggacgcctagataagcaaccatggcaacacacagatgcggccattgaatcatctctgcagtagctgcattgcctggacgctgcacagacgcatctatatactgatgtgatgctagagaactacataaacttgatcttcctcgctattgtcgtctataaaccaaacctgatcacctgtgtggagcagggtaaccatccttaaactatgaacaggcatgatatgactgccaaagccccacgtatgacattctgattatgaccgataccttacggcacagcagcgcgtaagacatgctcttcacaaagtgagactaatacgatatgaaagatgctgacgtgacaatctacgagcaagacaacgctgtgacagtgtacatgactgaccagtgcacctaagaggatgtcatgtacttgaacattgagagacacttacctgtagacaaagatgtcaatgcgatgaacctgagaaacactcgcataaagcctcaaagtcaacacaatcatgactccgagcaactgtacgtactacttgtgaca

SEQ ID NO: 299491 - DNA, 715 bp, Homo Sapiens
  misc_feature (26)..(26): n is a, c, g, or t
  misc_feature (298)..(298): n is a, c, g, or t
  misc_feature (357)..(357): n is a, c, g, or t
  misc_feature (371)..(399): n is a, c, g, or t
  misc_feature (432)..(432): n is a, c, g, or t
  misc_feature (523)..(523): n is a, c, g, or t
  misc_feature (557)..(557): n is a, c, g, or t
  misc_feature (583)..(583): n is a, c, g, or t
  misc_feature (596)..(596): n is a, c, g, or t
  misc_feature (624)..(624): n is a, c, g, or t
gcacgagctgccctgtggtctgattntgccctggggctggatcaggctttcttggctgctctgaggctcagccctggcttaggtaggagggagccttagggtgctggcaaagcagggaacagtgggctgccgattacctctgccagccaccccagcctcagatctccccagttctggagcagggctcctgtcaccagcgggttggaaggaactgctttaaatgagggtggctgcctgccagatgtgctgattcagctcagcctgagcatcactccattgtcacatctgtccccaactntatgtttgggcttcttatcttcagcagctctggatgctcatttagatccctcaactccnctcgggcaacaagnnnnnnnnnnnnnnnnnnnnnnnnnnnnnggaattcatctcgctgctgctgggagatgaatntgcacattttaaataggtgagtaacgtgcaaggtgattacactagatcaaaggacagcaggatagtgagaaatatggaacaagaggctgangaaagggctctagatgtcaagctgaaagtatcanggatcattaatcttacagcatccttngatcaccaggatngtacacagatccaaagcctggatgctangtcctattgaatgctatattgctatactcatcatctattactaatcatctgatgtatatctaccatgtatctatgatgtgatacgatctaa

SEQ ID NO: 299492 - DNA, 700 bp, Homo Sapiens
  misc_feature (381)..(381): n is a, c, g, or t
  misc_feature (470)..(471): n is a, c, g, or t
  misc_feature (482)..(482): n is a, c, g, or t
  misc_feature (486)..(486): n is a, c, g, or t
  misc_feature (491)..(491): n is a, c, g, or t
  misc_feature (499)..(499): n is a, c, g, or t
  misc_feature (522)..(522): n is a, c, g, or t
  misc_feature (535)..(535): n is a, c, g, or t
  misc_feature (539)..(539): n is a, c, g, or t
  misc_feature (541)..(541): n is a, c, g, or t
  misc_feature (562)..(562): n is a, c, g, or t
  misc_feature (593)..(593): n is a, c, g, or t
  misc_feature (595)..(595): n is a, c, g, or t
  misc_feature (605)..(605): n is a, c, g, or t
  misc_feature (610)..(610): n is a, c, g, or t
  misc_feature (613)..(613): n is a, c, g, or t
  misc_feature (690)..(690): n is a, c, g, or t
gcacgagcagatagatacatagtacattgtgtatcatttttgtgtaatgtggcccggactaccctgagcctgccatgccatctattttacctaattgatctgacattgaaaaccaagacctgccagaccttttcatttgctctaatccctaccacatcactaactaaccttgtccctgggcctgagatttggtaaaattattggagaattgaactatttgtatttatttttccattattagacttagtaatgaccagttgcccagggactcccttttcataaaaatgtagaaatctgtttttcctagcctgaaaatggtgcaggtgtatgctttttttcctcagtagtctttactgatgcttggcctttgaattgaaaganatttatgtgaattatgtttggaaaaactagagatataggtcatcatcattgagaatcttctaattatattgattagatcacattgctgnngtgaatggttngtanaagtngagggganaaccacccaaacctgtgtgcctncacggtgtgattntggntntttcacttaagtgtatctggnggcaccttctgacagaactttacagggatantnggactatggngtaanatntagagcatatggtcatatttgctgtgccagaacaagacttgaggaagaagagtacagtataactgtcagtatttagngtagcctatt

SEQ ID NO: 299493 - DNA, 427 bp, Homo Sapiens
atcgactgtagtgtatccagtactcgacgaggagccttgattcatggtgccagcctgactgattaagaggacgctgccgtgagactacatgaggaaccaactccttctactgttcaaggacatgggtttgctgcgcaccgtgccgaatatctaatgactattctgtctgaattcgagatcagatcagccactgccaatgtctgcagtgacatacatgtgtctgatcaaggagcatgcataaatatgaatacatggaagagcaggtactcttaactagacttagatctgcatagaagatggttatggaaagcaccccttataccactgccatggtgcataagtgtcgtaacgagcactggacttcagtgggacacagtaatagaggctgtgtcatgtactattgtacgtatgatccgtgtattgctaa

SEQ ID NO: 299494 - DNA, 370 bp, Homo Sapiens
gtttctgaaagtaagaacacttactaaatgacagtagctgataagtctccatgtcaaatgggagtattctgaattttcagcttttattagaatattagaagacctggtttcactggagttggagagatgggcaaatctgggatatagtttggaggtggagccagtatccctcagatggactggattggataggtgggtggagagaagcaagaatgacctctgggtttttagtctaagcagctggctggatggtggtgtcatttcattgggttgaggaaggaactgattttgaggagaataagaaagtggttccaaatatatgtcatgaactcagggtagaggttaaggcaataaattttggtatcaggag

SEQ ID NO: 299495 - DNA, 283 bp, Homo Sapiens
cactttctcatggtcacggacccccatttccctttacgtctcacccttcctgtcttcaccctcctgtaatcccgccccttgtggtctgtgccgtccttctcgctctctctagcgctctgagtggccagtctcacttgccaatatgagctcacatgactcaccactatgcctagcaccacacaactgagatgtctcccaagccatattatgcctttgccctcatactcttacagctctgctaatttgtgtgtatccctaaagatttcccctctctctactgact

SEQ ID NO: 299496 - DNA, 375 bp, Homo Sapiens
ctctgatgatcatgacattgtgtggacattcctgacttactacctctgtctccaagactgaagacaatcttacatatatgctcagtcactcatgccctgtggttaggctgtgcagactctgatacagcgccctgcatgaaggaggggctataggaagcctcacagggacagaggcgtgtactctgcatacacactataacgaggctgagagcataccatgtgctcgtctgatcgacctatgccttgactgcgaggacgactagtcacatggctgctgactgagctctgatcagtgcacaggagctggtgacaggtagatctgcactaaagggctgactactggatgcacccttgcatgagtgcgtgagtaatgaa

SEQ ID NO: 299497 - DNA, 382 bp, Homo Sapiens
ctggacgacactgtaggagctgtgtatcctgagctgcctgaggcgacgcccagctttcccgcgtgggcttgtatcattccattgatggccttagattatatctggtctagccgtactaggaaccatacatgcgagctgttcacatcatgcagcctgcatccaggggcttagacagtagcacctgacgctgctcatggaagatgcagcagcctcagcactgtttaaccgatcactagtacaacacgctcgcgaacaccgaagcacgcgtatagagacaaaggtatacgatatggctattgaaacattcttagctgcgccatacatgacggaggatagcatgatcagcagacgtattcatgaacgaacgagaggcaggagaacg

SEQ ID NO: 299498 - DNA, 392 bp, Homo Sapiens
gcccagagagctacttcctggcaggcaagcctgtgccatgaggacccctgtccctctccaggctctgagcaccaccggactctgtgaccatagagaccaggagtctgtttgtctgttatttctggaatatgtctgagaggttgggattctaaaattatatggttttaaagtctgtgttcctaatagagcttctcaagtacttacattatgctaaaagtctgtgcctcgaatggtctatgactccccaaatccacatttctaaatggctgcaattttggctaagagtctgtaagcctgtgatgtccactgtctcccagtcgttaacttccatgttcttctttgggagaatagtcagggatggaagacaggagtgtgaggtggcaatggtcctt

SEQ ID NO: 299499 - DNA, 415 bp, Homo Sapiens
ctcagaggccacatggccagtaatgacagcagtcatacccagatcaggccccacaaggccccacagctgccctgctggtcagacctccagttggtccagaacagcaccaccaagcttccaaaagtgggtgctgcaaatgctgcagttctgcagctctccacactcctatgggtcaccagttactgatataaagtgtgtgtcggtgcgtcctgttggcggagcacgggaggtaagtgaattggccattctcagcttgtataatgcaggacggccttagcttgcacagcaaggcagtggcttagactgcgcttagctctctagacacaaggcaagggctcaggtgctgagaacctgcccaggaaggaaaggtgttacttctctgactgtttgagtgactgtgcatgagtgaatccta

SEQ ID NO: 299500 - DNA, 429 bp, Homo Sapiens
cttgtccagagtgagagtcaacgctcgtcgtcaacaaccgagatagcataggtctgtggctgctgcttgcgcctggacatggaacaggttcatgttgatcgcgtctggatggtactgatcctgctgtctgtccagggcggcgagacagcagacgctcagtggaagatcgcgccctgctgcggctggaagctcgcgctctgacagccggtgtacgcctcttgctctgaggtaacccggatcgccggttagacttgatagcctatgtgcgccctgcctactgaccccgggtacagcgtacagactgcactctgtgactggctactcagaagtctcgctgctgccactgagcgaccaactatgtatgtactcagcctatgtcaaggcctactggtgcagtgatatgacgtgctctgtgagtacgctgcacag

SEQ ID NO: 299501 - DNA, 377 bp, Homo Sapiens
gaaaagcggagcagtcctcctgacaagtgaccccagtcagttctctccctggagcagaggggagcacccgatcccctagggaggtggctggagaacaggtggggactcgagatgaacttgctgcctgtgcatgtgtgccagggaaaggacagctgagaccctgaggccacacattgtccaattgctgtacctctaagggcccaagtcagcagaactgtttcccaactgcctgtgggctggccttgcagggaaggctgtcaaaagatggccaagtgcaggcacaagccttacctccctgagagcctgctcccaccttcctctctggccttcagcttttcttaagtgaagctacccttgacctttgttgtaattctttt

SEQ ID NO: 299502 - DNA, 430 bp, Homo Sapiens
tatgacccaaggagtagcagtccttgtgagattgagactggagtggcctgtatttcctcttaagtggcatattattccctcagggatgctcacatgataacctaagtgccttgagacccaatatgctgcattaactgcgaatgggagcactttcccttattcgatcgacaagtgtatagagtctacacctggtaaagcaacatgagattctctacatcctacagaatccctaggcgctattctctcatgctgcgtactgacgctaagcgcacctgacacatgtcagtccctgaagaatagccttatgtaaggctctatgaaccgttacctagctctgggatttttagcactgttactaggctataccaagggccattcactccatcctgctcgtggtatacagaatctactatatgaaagcttgaatact

SEQ ID NO: 299503 - DNA, 373 bp, Homo Sapiens
ctcacacacacacttgaacttaaacattggtcacctttcttaagcaatttgcacatgatgtcactgcccctcaaagtagtccagtgctcattccacttctacctgtcacacagtgcatgccacagttaatgactgatgccacttgatttgtgctgacttcagacctgtcctacgaatatctttcaacagagctctgtaagtggcaacctcccttaaatcagcaccatacctgaggccagtgttcacgtggatgatgcaagtgggtctgcctaaagcataggaggatggatgctaagaacatgcctttaataccttaccttagtattggattaatgccagaaactcagccatcacagatcatcgtttcagtcaa

SEQ ID NO: 299504 - DNA, 437 bp, Homo Sapiens
cgagcacattgacttgatatactccatcgcgaatgctgactgatggtggctggctcactgtcagtcacgtattacgagaccagcctccagatgtcatgcttacctgatgaggactaatcgagtcatgctgaacgaggcctgtccgtgagcgaagaccagtcgagccatcatctatcgccacttcagcttcatgggccatgtgctgtagctagagtaccaagtactgcatcacgactggcactcagactctgaaagccctgcatgtctgagatcgaccgaggcacctacaccaccagccgtgctcaactacaccgtatccatacctgtccactccacgagcagtgcgctgagcgtaccttcacagccccagtgccacctgtatcagctgctgaacggtcacgagaggtgaggctgttcacagtgcattgggactacat

SEQ ID NO: 299505 - DNA, 423 bp, Homo Sapiens
gctccacctacactgaactatgctcttaatcaaggctgagtccaatgtattaatgccgacttgatacatgatgcacataatggcgcgtctaagaaatctatggctaatccaacgtcatgaacttatcatcatgaaacgatcttacctattgacagcaccttgctctaaagcctacctctgcattactattggcacttgatcgtgctttatgacatagcacagcgtgtagaagccttttcctttactatgaataactaaggcgtgccgagcacttacagagagattctcatggccactaatatagtgacctcgatttcaattctaacatgacgatccagatcttggcattgagggatgatagactatgacatttaatgcaattagtgacgttgccagttgacttgctgccataccgctacatgg

SEQ ID NO: 299506 - DNA, 346 bp, Homo Sapiens
gttacccttggggttggtttggttcctaagctctagtgatcacctggaaccaggaatgactattggcctctgataaattaggctcctgggatgactggtcctaacctcagtcagaatcacatgttgaccagcctcctggatctagtgagttctcagggaaatgtggcttccataatatatttcacatcagatttaaccattgtaatctgttctgccaatgaaatgcccccaaacagagtgtgtctccctgaaagcaattgactgaatgggaatgcattcttgtgcaatgctggaatgttcttaagtgtccagaggatgtgcattgagttccagaggctctgtacct

SEQ ID NO: 299507 - DNA, 397 bp, Homo Sapiens
gacacacacctgatctgacatgtgaggtgctttatcaattgcgcactatctgctacaagagtgaaccgaattccagaccataccctagatcgcacaacgggactcgactaaagcgcatacaatattgatgccaaggcctaggtgatacgggctgcatatgctatagtggtacctatctacacggcctgcatagcagcattgaggaatactcatacaagagccttccgacacttgcctaatatctggactctgggggcagtttcatcatccagagcatgcattgtgcgacgcaacctatgagatcctctacctaactggagtcatggtgcactgggccatacgtctgaccagatgtaatgtctagtggataccattacctgcaacacttgcactatgc

SEQ ID NO: 299508 - DNA, 424 bp, Homo Sapiens
cgcatgctgcgtaagcggttcctccgcgatgccgatgacctgcataagctcctgctagtgtaccaggccgaggcccgctagggcgcatagcgcggactaatgaccatccgagagcgcctggcgaccctggtggaacagggccgagtgcggaccgactcgtgtggactgagtgtctcggtcagtcgcatcaggagcgcatccaggactgggccgagctgatgcgctcactgatagacgagatgctgcttcggcacttggtacagactgtacgagatgatgagcatgaggtcgcagtgaacgccaagctgtatgagccggatgccctgatagcgctgatgagccgatgacttccggccactctctatagctgggtcgactacactttggacccaattgcaatgccaataggtgtccctcagggact

SEQ ID NO: 299509 - DNA, 159 bp, Homo Sapiens
ctcacttctctctctttctctatggattgcaaatgcacacagaaaatggactgttagattccatagagtacatgagaataccacataatagaacttcaatacacaatatctagctttctaaaatcactttaaaacatacagagtcacttaaagtataat

SEQ ID NO: 299510 - DNA, 363 bp, Homo Sapiens
gttgcagtcaactagacccctcccttatttcatacttcaagctgttaatccacttctgtaaatctttttagttttaactcaagtatagaagcttctaattttttctgggttaaattttgtctcattagattcactccctcaatctttgaatccagattctatcattctgtatattagctgcaaatcattaatttaaagcatgccactagtactaaatagggtgataaagtcagcaaactcgggaaagatctataggtatctcagcagagagttctgactccaagtgaaattcccttcctctcatctctcatgtggcttctcagattgcttgctttctagtgctgctaatagaagacactatag

SEQ ID NO: 299511 - DNA, 845 bp, Homo Sapiens
ttcacaagttttttttaatgaatacagtttacctgaagaatatggggaaggataaaaagaaaatgatatagacccccatcccagaaagcttcatcctactggagcttggaacacacgtagtgtatgaccagtagcatcacaatgtgatgtgaaaattaaaatacaagcattcagcacggaagtccatgaagaaaaagaatcgtacaagctcacctacttttcacggaatagacagaaattatggtgcgagttcatatcagcaaggaaaagtctctaatcaatatattaccgttacttgacacaaaaatcctcagatggccctaaatgcatagagtatccagaaatgtctttaaagaagtttacgaaatgtgcaaatatacagtcaactactaaaaggcgggcaaaaatatgaaaggacggccttacatgatgcactgcgtcaaaaaaacccagttaacaacaagtagattatagcacagggatgattttaggtaaacccaatgcaaaatttaaaagagcgggatctaaaagttattctaacatcataacaagtcacactcttcagtttctttactctacaaagattaaaacgcctacctgttcgttatatgaaggaaatgtagatcaaatgcaaaggtttcgcaaaggaaccggaaaggaaaatgaaaagccatacgcaacgctccgggtacatacaagcgttaaggaaaattgatagagtatacaatatgacaaagggacatgccgaatgaactaagtccaagtgaaatctatattacttaacggtaaaacgaatctatgtcagacgttaagttgaatcggtaacgctttaacgcgtaaacgcc

SEQ ID NO: 299512 - DNA, 403 bp, Homo Sapiens
  misc_feature (200)..(276): n is a, c, g, or t
agttaccctatgaggtagaaatgattattggttctgttacatagatgaggaaactaaggcattaaaaattaaataatttgcacaaggctacatagctaatatgtgaggggatgaggagcctgaaattcagtctggcttagatttaggcttttaacctcgagtgttgtactaccttttaaaattacagttttatgattatnnnnnnnnnnnnnnnnnnnnnnnnnnnnnnnnnnnnnnnnnnnnnnnnnnnnnnnnnnnnnnnnnnnnnnnnnnnnntcatataaaatggcatagtatttgcatataacctacacacattctcttgtatactttaaaccatttctaggttacttaatatgtatatacttttatactgtattgtttaaggaataatgtcaaggaa

SEQ ID NO: 299513 - DNA, 312 bp, Homo Sapiens
tacagagattccgtcctgcgcggttgttctctggagctgtgttcttttgtctccgttcgcctgttctcctacctgtgtgcgtgccgcctcccgatggtcgattcgatctacatgtacatgcgccccctgtggccccatagctatcttctccgctgtgagctatgctgccgcatacattgtctctgttacgtcgctaatgctgtcactgatcaccacttgtgtctcctatcggtctctttaggggctcgtgcctacgattatttgccctttgttgtaccctacgctctgtcttactgtcgctgtccttttatc

SEQ ID NO: 299514 - DNA, 436 bp, Homo Sapiens
cccacacggaccttcacgatgaaagctgctgtgctgaccgaggcgcgactcttaactgacggggagccattgctcagcatttctggcatcaatgacgaaccacgctcagatgcccttaggatcatagtgaaacgaccagtcctctgagtacaggcatgtgctgaaggacatatgcagatactatgtgcctgagattgaaagctctgcctggccataacatctaggcctaaggctactcgactactgccactgtgtgaccatcaccttactgaagctgcacgagcagctcgggcttgtgacccatgagtcctgggataacctgtagctggagacctatggcctgtggcatgcgatgagccaggaactgaaggaggtgacagtcgaagtgcagacctacctggacgactgccatactaagtggcatgatgagatggag

SEQ ID NO: 299515 - DNA, 635 bp, Homo Sapiens
agctgacggaatacctaagctccctatagcacaatgtactgacgctagacaaactacaatatattctggttctctagtaactgttggactaaataagtaccatttggaaaaggaagacgctgtaaaagttctggctgttgataatactctagtgcgaaacatgcacattgaaaaacctctgatcatcaaatgcatctgggatcaagctttgtctgtacgctgtcctgctgcactaaccgcatgtgcttgctgccgacatggaaatatccttgctcgttgcagggatgcatctgaggcaacatgtacagtgtgagaaatcacacatgccctgacaaacagttttggtgctcataaatcgaatgatcaactggggtgtggaacatatcggcaggattctgagaatgttagagatacatctgctatcaaagaggttcataaattccttggaaaaggacgtctgaaacctcgtgttcttgctgccaaaatcgtacaaatatcgtcctgtttaccgaaccaaagccattgatacaagaatagattacattgggtttacggggacattatgccttttttacagaatccttgggaactggaccttaggcccggggggcacatgtttcttgtagggggcttaa

SEQ ID NO: 299516 - DNA, 635 bp, Homo Sapiens
  misc_feature (163)..(296): n is a, c, g, or t
cacttttgttccttctgtctgctttctgatgctaatattatttgaacatagatttttctcagtaatgatttctagttggcttttcctttccttttgtcattactcagggaatgataaagatattgttgatttgagacagtgcagtgtagtgttatagacacannnnnnnnnnnnnnnnnnnnnnnnnnnnnnnnnnnnnnnnnnnnnnnnnnnnnnnnnnnnnnnnnnnnnnnnnnnnnnnnnnnnnnnnnnnnnnnnnnnnnnnnnnnnnnnnnnnnnnnnnnnnnnnnnnnnnnagacttaaaaagttaatgtcatgtaaaatgctttagcataatacctgactcagagtaaaggcttaataaaccctagctgatcttactgtcagaatcaataatattactatttgtaatataattaccagacttaacaaatgggagaagtattaaccatctgcaggaataagtaccagagcctgcatcaaaatagtttatattcaacatgaagtctttaaattggcaaaagcactcaggttaatatatacctgttaagaaattttaagaaacaagcatggttttttagctgatactctgggaaaccaaattaagcagatattgtgcagtatggatatcaaa

SEQ ID NO: 299517 - DNA, 277 bp, Homo Sapiens
gttaccttctcactttaaccacatctatctttgcttcttctatgacaggtatgcttcttgctcaagacttctcatccactctttctccttaaatatttgcaggcgtaaagcccttctctttattcaagctctgagaggcccatcatgaccactctattcttaaatgataccccattccttgcaccctgcttggtttttcttattatcttaccacagaccctggttatgtgttcattggctgtctccagccttaagatgtaaaggcataaggaagaaa

SEQ ID NO: 299518 - DNA, 420 bp, Homo Sapiens
gtgatccagacgcctggacgtgcgatacagcaaagatcatgagcatgagacagagtgcccagacgctgtgcataattcatggtctacacgcgaccatgctgtatggatcatgatggggaaccagcatacgagctcgaatagtgtaaagcttgttgatatgaactggacttagcgagctcgtgagccacagtctctgagcgacagtcgatcatctgagagctgatatggatgattacccagatgacgctgagattgctgcacggctgactgatctgacacactgttggacgtgacggtagacctctgtgttgctgcaatgatgctacctgatgctgattgcatgacattgtggagcatgtagactgacttgacaatcgtacattgaagctggacatcatgagcctattcgtcagtcattgt

SEQ ID NO: 299519 - DNA, 372 bp, Homo Sapiens
cggtttttattatttttacctctagacgtctctttttggtaatggcttacgtgttttttctattcgcctcgttcttgtcactactcctttaacggtttttcaattgtttcatatctggtctggttcagattttctagatctacgtttgtagtctgtattcatagtctacctcttgagtctttcgaacaagtccccatgctgtctgcacctgtttataaatgtcttgcctgctcttcatgcttggttgcgctccttccacgaatgcatcctattctcacttttccccgatttgacactgctttcacttgttttgcgcttttaaccttaacggctggtgcatgtctactgcctgtaatcgtttgcatcttcgcc

SEQ ID NO: 299520 - DNA, 438 bp, Homo Sapiens
cagagccactgagatctgatcaatgacctggccattgtgtacttggatgtgctcaaagacggagtcatggactatgcgtacaacctcagactgtccacacttgtgagctcagattgaccctttagcttcttgacgactgatacacagctacctgtgccttatgaaagctgcgcgaacagcttgtacctgtgacctgggagcattatgttaacacgaaagctgagacagaagtcctgaggctggagatgagcgttgatgtgacacaggtccaggacggagtgctgccatactgtacgacttgcctaagacctgccatgcggactttagctgtaccagccgaatgtctagccagtgaccacagagctacacgaggtcacgcgccagaagctgcacgagcttgaacagaagctgagcccactgtgcgaagagatgcgctac

SEQ ID NO: 299521 - DNA, 664 bp, Homo Sapiens
  misc_feature (581)..(581): n is a, c, g, or t
  misc_feature (586)..(587): n is a, c, g, or t
  misc_feature (603)..(603): n is a, c, g, or t
aagtgttaccacaggggaaaaaaatgcagaagaggatgcatcataagaaatggcatgacaatgttttctcttagtgtcttttaaatactaggttagtgcgaaagtgatttctgccatttaaaaaccacaatcactttcgcactaatagctcctgaataagacctgtcagcatcctttagtctaaggtgatgagaaatccatgttaccgatatagaagccaaactctaagccaagatcacataaagagaataaaaagtacaacttctgataattcctctttgagaggcatgacagcagagctcagggatcttcttgcatttctacagaagatgcactggctgccctgggtttgtatctttcacaacaaagagtcttttccaagcacagaccagaggtcatgagaggactgtcaatccagtttgcactgaaataggcattagctgcctctaaattataaattatctcagccatcccttgtccttagaattagtcattaatgaaatgctaagagaactgatgaaaagatacaactgtttcttattacatcatagaaagcattacctttcctagggttcacaatnggttnntccctaggtggaatanatgctcttgttctttacctatgtctcttactgatggcttatgcttgttagcctacataata

SEQ ID NO: 299522 - DNA, 505 bp, Homo Sapiens
  misc_feature (139)..(209): n is a, c, g, or t
  misc_feature (343)..(461): n is a, c, g, or t
acagcaagagagacctgaactagcacactcagaccgcttgccatgtgatgccctgcaccaccttgggaccctgcaaagagtccccaccagcaagaaggccctcacgatctttctggaaagcaattatcatcaatatatnnnnnnnnnnnnnnnnnnnnnnnnnnnnnnnnnnnnnnnnnnnnnnnnnnnnnnnnnnnnnnnnnnnnnnnaaattggtatcagaagtggggctgttgctaataatgaatacctgaaaacgtgaaagtaagggcagaggccggaagcatttggaggagcaggccaaggccagaaaaagccttcaattcattctggtaaaggcttnnnnnnnnnnnnnnnnnnnnnnnnnnnnnnnnnnnnnnnnnnnnnnnnnnnnnnnnnnnnnnnnnnnnnnnnnnnnnnnnnnnnnnnnnnnnnnnnnnnnnnnnnnnnnnnnnnnnnnnctctcttggaacctagagtaaaggctatcctttttataaattag

SEQ ID NO: 299523 - DNA, 671 bp, Homo Sapiens
atttcaggagctgagatgacatgctgcctagattacaccactagagtgtcttactagcgctcctgggctctgacagagcttgataaaccgatgatacatgaatatatagatgcaggtgcggctgcatgaaggccgccatcacatagcgatctgtgtacactgagcagatggacgtagtcataggtgagataccagtctcagggtctacacgaccgatagcagcacttgctgcaagactaactggacagatgctacgatagagactgctaatgctggtatcatgctatgctgcagtcagactacatatagtcgtggctggaaacgacctcaagacgcatagttcgacatgtctatagatcctgagagctccacgtgtgctgcaagattcaaggctgacactgtatgtgagttaacaccgactgtatgattagggatatagtcgatgacatacacctgcaacattggatgattgcatgaactctgatgactatgtagcagaaatgctctgatggacactgagtccagatgatggacgctgatggcattcagcgatgtgagatgtgtatcactggagaggaggctagctttggtcaaggtatccatacagtcgtacttaaggcaatgcctttacacaccatttagcttaccttaacaagggcatggcgataggt

SEQ ID NO: 299524 - DNA, 594 bp, Homo Sapiens
  misc_feature (543)..(543): n is a, c, g, or t
  misc_feature (568)..(568): n is a, c, g, or t
gctaatgtgtagatgggaattttttctttccctcctgtgcttaatgttgtatttggggtatatttgtggattgtgtgtatgatctgtatgtgttctatatgtaatcaaacattattttgcaaagacatcaaatgtattaacatagctttcatttgagggcatacaggataactgcagtaaagtaaatgtgcttaagaaggcctagtgctattaagttttgtcttagtaacactgttgggtattatacataggaatcctgtagcagaagataaccatcacagtttaatgttagaggccaggtgctgtcaggtgaattagctcctcctttgggaatattagaattcttctaaagtcagagaactccatttggtgagtgttccatgtaacatggggaacagctcccactttttcttaatatagctatttgacagtgagggacaggtcatacacctgacatcatttggcttttaaattaaatttctaagaaagaactgttcagttcttgctgtttctggttttcccctacttgaaaacttaacattngtaaataaaacatcttttgagcttngacatgtcccttcttgctttgccact

SEQ ID NO: 299525 - DNA, 519 bp, Homo Sapiens
agccttatatttcactctttgggaattgcatcttactgtaatcttaaactacactaaaataaataatgtaaaccttttgtcaaattgctcagagtaggtttctactttggttataaggaataaaattcatgcttttgtgtacacactagacatctaaagcaaccaaccatagttaacaagcagtgctcttaccaaaaggtaactctttctagaatctggcacaccatttaatatcagtatgagcatatggtgggtttaataattgttttccatgtttataagttttctttagttctataagcagttaaaatgaatccctttcactgaaatacaatctgtggtgggacttctagcttttctcgatcttacgctgctagatttatgtcactgccatagctatgcaatgggtgatatttacactatgctcaaacaaagcaaccagaaaaacacatcattgaataatacagatattctgaagtcaagcaagccaactttcattaacagatcaatttcctttag

SEQ ID NO: 299526 - DNA, 671 bp, Homo Sapiens
  misc_feature (545)..(545): n is a, c, g, or t
  misc_feature (570)..(570): n is a, c, g, or t
  misc_feature (586)..(597): n is a, c, g, or t
  misc_feature (616)..(616): n is a, c, g, or t
gttactttcctgcttaaaaccttccagtggcttcttactatgtttagaataaaacctaagctctacatggtctacccttgcctagcctttgaccttatcctgtactactttattcttgcacattgctcttcatcgacattgcccttattatgttctgaaataagccatgttccagccagcacatttttgtatggctatttgccctattttcatttaggtaccatctttaacattgcctcctcagagagctttccttattcactgaatctttagaagtcccctagccagtcattgtcttaaatcacatcaccccatttagctgtccttattcttaattttcagtatctgtaatgatctggaactattttgtgcatttgtttcttttgactttctgctcatctattggcataacagagtatttgcttttcttgtcctctttgtatccagggcttataatacagtaggaacttagtaattatttcttgaattaatgaatatttatattttaatttaaaacattataatcttcttcacactggtaattnttattgctttagccatgttcagttnttaagtagtccatggnnnnnnnnnnnngtagacaatttatatatgntagatatatagttatagatgaaaaaggattctttttaacccctatttggttatgg

SEQ ID NO: 299527 - DNA, 649 bp, Homo Sapiens
  misc_feature (376)..(376): n is a, c, g, or t
  misc_feature (518)..(518): n is a, c, g, or t
  misc_feature (539)..(539): n is a, c, g, or t
  misc_feature (633)..(633): n is a, c, g, or t
ctgtgactccctaaagctgatgtggactcgctcatcgctggatgaataggccaagctggagtactcttaaaactaggcgggtctggaataatacgctttacactcattttaaaccccatgacgagacgcatagcctaccctacactagccctatgactatgaggcataatgatcacaggctgcatctgactgcgacaaacagagctcattctcatccgaacccactgaagcttcaccagtgcagtcattctcataatgcgccacagactgacatactcatgactatcctgcctagcatactcaaactactaacgcactcacagacgcatcataatgctctattaaggactctaagctctactccgagtaatagctntatgatgactgctagcaagcctagctagcctagccttactcatcactattaacctactgcgagaactctctgtgctagtaaccacgatctcctgatcaaatatcgctctactagctacaggactgaacatactagtcgaagncctatactgactgtacatatntagcacaacgcaatgaggctcactcactcaacacgttcacatcatagaacccttaatcagactagtatacgacctcatgttatacagcgtatcncaatcatctactatcc

SEQ ID NO: 299528 - DNA, 670 bp, Homo Sapiens
ctagggttgaagctgcaggcactcctacatgatgcgcgggatcatgcaccctctctatgaaagactctacttctatgctctactataactctctagaacatgtgtagcttatatagcgaccagcgacaactgctgaatgtaagatgaatagactcaggagttttagagcaactaccatgactaatgcgaatagcactgactactgatcagaccaaaggatactaggatctacaggctgtgagagacatcttacatcatggtgaaaacaatgcatcagaagacaaacagcagataggagtactccaactcacttataatccagatgaatgatcatgaccaaatatgaaagacgctgctacttagacggccaggagaatggtataagagatgatgaagtatgaagcatcgagaatgacacatgactcaagtatatgatatctgcaggaaatatatgacccagataatcatgagatagttagcactggcgagaatgtagcctagctagcagctcagcgacacgaaccttgcaaagacacgatgcatatccatgatatcgctgagacagtatgcaagacattgccaatgagggagctaaactgagcgacctataccttataggccatgtgaagcttaccagcaattctaagttactgagaaatccatggtctgg

SEQ ID NO: 299529 - DNA, 372 bp, Homo Sapiens
  misc_feature (136)..(136): n is a, c, g, or t
gctcaatgataaaatgttgttgctgcatttatttatactatacctatagggttatacatcacaatagctgggaacataagtgaccaagttgattctacattacaatttgagaaagtaaattaactaactgtatcangtacacatagttttggttttcctttgtaaatttaaagaaaatttaagttttatttgccatggattctgctttataaagccagtcttgaatgctgatggttcattggctgacactacttgctgaatcccaacttttccttcatagcatctttttactttgcagtgcaactgtatttcctaatttgtcattgtaattctgttcacattctgaatatgtatgaatagttcctcatagtg

SEQ ID NO: 299530 - DNA, 127 bp, Homo Sapiens
aagcctcaacccgataaggggcatttgtaaaatcaccacagctggcaccatattttaatgataagagattgacgcttttccttgtaatgttgggaataaggcaatgaccatgctccccattcttatt

SEQ ID NO: 299531 - DNA, 375 bp, Homo Sapiens
tttatcttaagaagttaaaattagcattctgattattaaatctaaaactctagctttaattctatctaaacaaatatttcaaagtctgtactcaaaagaaatagtattttgttcattatctgcattattctgcccctaagaagtagttactgacataatacgggaaacattctgttgcagtaatggaatgcgtaactgaaaatacaaaaaacagtaaaagctagttaaccctgttaccaagctacagaatatgacccctgtagaatactttaaacatttattttcttcaaaagacttgaaaaactattcttagaatccttacatagaatctggaatactttataacgctggtcaaaccaagacttttttaatacc

SEQ ID NO: 299532 - DNA, 385 bp, Homo Sapiens
ctgcaactcatgcatcccatgcctcccctgcccagtccttcgggtccctaaagactggggcatccaggctccaagcttttgggatggtctgatgggctactgtctgaaggaaaggcaagaaaggagcggtcttcagggagatggatggagtttcttggttcccttgcaatcaaccacgaatgttcctcaccacacttgaccttgctttctggcagctcatcgctgctaaactcctctcccagcccagcgtcacccttgcatcagcaacccagcgtctgatggatggtgcctgcttacccttcatcacagaagccatctgtgacccctgcactaagccagggctctgcatgtccctctccttcactgtacatgtggattcattgca

SEQ ID NO: 299533 - DNA, 416 bp, Homo Sapiens
  misc_feature (211)..(242): n is a, c, g, or t
  misc_feature (244)..(361): n is a, c, g, or t
cttctctagggcaggtaattgcatctgttaatgtggtccttgggcccctgagttgctgccttccaatcagaattcccttagcattagccagtgacgcctgaattaatctcaggtaggacttctaacttttttccaaaattatttttgtgcagaggtttatctagatttttcttctaaatgtcctcctccccacttgttttattattactgnnnnnnnnnnnnnnnnnnnnnnnnnnnnnnnnannnnnnnnnnnnnnnnnnnnnnnnnnnnnnnnnnnnnnnnnnnnnnnnnnnnnnnnnnnnnnnnnnnnnnnnnnnnnnnnnnnnnnnnnnnnnnnnnnnnnnnnnnnnnnnnnnnnnnctgttactgtttttctaacctgagttacttaggatcatattttcattctttttta

SEQ ID NO: 299534 - DNA, 379 bp, Homo Sapiens
ctatctgggccactgacctaccatgggaccatggccactgtcattggtgaacacaaacattctgctctattgccctctacccgtcaacctttcagcaggctcttaccagggtcccagcctcacctctaccctctgaaacactaaatgggcttgcggcatccctaccatcctcaggagagcatgggatggggtcagggtcttgctctccctgccacagatgggcgtggctgatggccatcatgtgtctatgtagctatgtcattcattcctctatacatgctacctaagagtgggctcgtacgctttgcagcctactttatatactttcgtttattatcctttgcataaacattctgcaatttattcacctattgtagaa

SEQ ID NO: 299535 - DNA, 387 bp, Homo Sapiens
gcccaacactaatatctgattgtgctcatatgcatacattacctttaagggactatgtaatgttacccctgttgacctatgaagatagttttgtgcactaaagcctatgtcaaaggaagttgatctattgtgctgttgatcagaggcttcttttgaataaacttcagcacacacaaagaaatatgcgtctgcattactccagacatgtggaataatctgtttctcatggaagtgttgaaatgatgtaatttgacactaataacagtgagactatgtacttactgccttactttgcatatgtgctctcataacgctgtgacagcatggacttagtactggatcattttcttgatcctaatgaagaacttgctaaatatgattcagtac

SEQ ID NO: 299536 - DNA, 433 bp, Homo Sapiens
cgcacgtgcgtctacaagacgctggctcctatgtattccaacagcttaccgactgtcctgatgacgccctctttaagagaaagctgaggagctatctctgcctcactgcactctttatagcacttactgcgaaaggcactgttccttgcatgacagaggctagcgtaatagatttccgatgaacgatcctgaccgccatgatactacttctgatcgaacggagatccctacgcgtacttgacatgtcatacgagggaaaccgcccctcgcgtatcatcgagtggaatgagcagcactggctctgaacgtacgtgtactcgaactacagaagcctcatcttctactcctacatactgtcactagaatctctataaccaggcgatgtgagacatctgacgttgacagtgcgagagtacatggcgatagaagtccc

SEQ ID NO: 299537 - DNA, 383 bp, Homo Sapiens
cgaagtagcaccctgaacttctgtagcaccactgtccctgggacctgagagactgactgttcgtgtaaatggacatggaaaagcacaccgtagagcactcgtacacaatggacggagtcaccgctactgcctccgaaacgctatatgcgctgacagagaccactacctcacctctaaaacatgggctgctgatactgatgaaatactccttagaacagatagacgctgcatgatgaacattgacagggtgattgggccatgccatgagatacatcggttcatcaccctcttgccctacatcctgccccatagagcaacctgagacaccgtgttctgaggactcctcatcctctcaggctcagtcgatgcgcctactcgtgact

SEQ ID NO: 299538 - DNA, 373 bp, Homo Sapiens
gatagacgctgtatccccaatgttgatagcaagctctactcattccagcggaggattaatacgacacccagctatatagtaccggatcaatggctgatcaagatgtgggaggatgcatacatcgtagcctttctgagtacatactacctgattgtaacacatgatccttgctgcactgaagatgaagcatgagtgcatgatgctgaaacacagtcgtcgaatgcatcaggtcatatagacgtctgtccggatatatgtaacatgtcgtgcggaatgactgattagcgactgattactcaaacgtgcggaaatgactgctttgtgagaatcgaagtcagcaacctagacactgatgtagtgccaactcagagtt

SEQ ID NO: 299539 - DNA, 647 bp, Homo Sapiens
cttatcggggagttgtccaaatattctcccagtatgtggagcgaagagagctcatgcatagacacgtcaatataagatcatagattggccgacttgcccaagatatatgccaagcctatatggaacctgaggctctcatcaacactactcaggccttcctctctacactaatggggcacactgactgcatgcttactgagtagcccgatctctatcatagaggcttactcaaagtcaaggttgtatctacatcataagagaaagaactatatccctgctccctataagactccttttctatgggcaagaatactggatggcgaacttagatttaatcttaccgcttataactatgaaggtatgccatatcttgttgatatgccataggatatcacattaccggttctattggatccattataagatgtggtccttatgatgagacaagaagttaacacctccttatgagagatgctcagagataatgtgttttgaactatatgaccacatggataggccatatactcgcatagaatctgtctattacatgggacaaacttaacgttctggatgacatagcatatatcatcatatcattacattgggacatctcatagggcatgcccacatgttcctcaggtgagttt

SEQ ID NO: 299540 - DNA, 482 bp, Homo Sapiens
ctgagggtggaacctgtggaaaatatgttggttttagaaatttaaacctgatatttttctcctctgtgaaaagaatcaaaatccagcataagcttattacaggcggactgaggttattttgggaagtagcaattaaaggtgtttatatttttcctctcccttttgcccttgcagcttgcacaggtctgtgaagctattaaaccttcacccaacccacagcccggaggaatctgccctgccccgtttctcctccagttcaatgccttgggaaagaaaagaaagttaaattcgtattaattacagccaaatccgctcagtaagcacttgctgaatatgcttgaggatgaagtttaaagctctcctccaaacaaaacggtaaaatgaaaggaataatttatttggtcagactataatttgccacgtcattccatttctcttgttactaaaatggattctctgctgaggccgtgacttccaacttc

SEQ ID NO: 299541 - DNA, 380 bp, Homo Sapiens
gatacctatcatttttgacggagctttagtcattgccaccgtctattccacttgcatcggaatctccaagagtatgacctacacaacctggggagtgattttcacaatgccttcgtgcacagacgagtcatgttagcctccttcccatgggaatgaccccaagctaccgggggcacatcacgccccacttgtttacatacaaggctacatacagaacgaagacgctgttaattgccccgacacatatatctttgatacctaccgtcccatccataacaaggcgtgctatgcatgatgccagacaatgtcccctgcagagctcatcacttctaaaggaaagcacgctggaatgcacaagcgccagtcgggtccacttgttc

SEQ ID NO: 299542 - DNA, 420 bp, Homo Sapiens
aaaatctctaaaattttaatttacagccaaaattcttcatgtgtaaatatgtattgattcagatgcagaaatgaagaaaaaacacctttgttatataaatatcaaagtgcatgcttaaagccaagtttttatctagtttattctaggacttaacttgcctggaatagctaataaattattcatgtatgtgcttttgaaaatccagagccctatttttacacacttgtgtgaagttggcaaacattttgaaaaatggaaaaaagtttctaataattgggaacaattacattaattaatattttgtaaaatattgaagcttttagccctatgtcaatttgtcgattaaaataaattaattataggaaaggaagataacagtgagaaaccaaacattacaaaaagtggcttagctctccttga

SEQ ID NO: 299543 - DNA, 539 bp, Homo Sapiens
  misc_feature (489)..(489): n is a, c, g, or t
  misc_feature (507)..(507): n is a, c, g, or t
ctataaataacctagataatagtccaatatatgtgggcatatatcgatatatatggatctcttatgactagattaaatgggctctgctggaatagatccacgtgtgtcacagacggcgtgtgaatgacaatgatgagcgaattgaaagagcatcgaattatgagggaatttacagagaggatcctgccttaaaagcacatatggaggcctgtgtggggggagcctaaaatgataatggcaaacattgtgcctaactaggctcttaggattgctgactttgtcatgaccccgtaacctacagcggtcactgtctgatgaacatttggcatacagactgcctgtacctatggtaatgctacaatgaatagaacattcgagaactgagtggaatgtattggcgtttctaatgagcctgtactgtatgagaaactatcatgtaaaatcagcttggacaacaagacctacgaacggaaggtgacagggatagtnagtgacagactggggaanggcatcttggtacaagtgcgaatggttggaaa

SEQ ID NO: 299544 - DNA, 656 bp, Homo Sapiens
atatggagccatggggctccctcgaatgagaggtcctccatgactacggtgcaaaggagagcctgtgctggatggcaggaggggtgtgcatggcatccctgggtattatgggcctgcccgatctcacggagactcatgagaagactgctaccctggatacctacgaggctgcctactgcttctgcacagtcacacggaccatgagcccacctgcctcctgggcatgcccatagctctggaatgactatcgtcagctatacctgcaagggcactagacacctgacatcctgaccttggattggatacatgatcgtccatctccattgactgtttagtcatacatgcggttgcatctactgactcatctacaccttaaatggtcactgaccttgtatgggattattcatactcttgagtccactaccctagcatgtgcattgtcagctaatcctctatgcctatgatcctatgacgtgttcatgagcttcatctagcgtataatatgatcctgcttaataagtatcttattatcatctggctcataataagtatattattaggtgtatttgctttcaaatgtaaataacccacaatgtggcaagttctgtcttacatgtaacatggggacccccggaacgctcatggtgtgttacggg

SEQ ID NO: 299545 - DNA, 662 bp, Homo Sapiens
gctgcatgactctctggtgcaaaaatgaacagtgtcctggaactacagcttgctgtggaatctggacatgctttacacagaggcctggaatcttaaacgactcatgactgcctggagataacattgacccagagccgtttgaacatgtagccaacttgtagggaagtcgtcttcttgtccgaatcctgctgcactgaaggcgctgacctctgaatggtatgacaccagtacctcagcactgcctgccacatcctatgacagtcattgtgcattcctcggtcacccaagccatgcttcatgctgcagcagagatggcctggacccaatgctctgcatagctgctctggagcacgtaccacatgaataccctacctacgatgaacctgcaatgatgaaatctgtgaggcgttcatgagagatgcataggattatgcagatcacctcatgtgtgagtctttcacgtaactcggagcatgcttctctgtgagctttattcaggtacgaccgtgagatatctctctatggtatggtcctgctgtccctttgcagatccaactgtatgcgttattaatgagatactacccctaagacctttatcactgcgtacccctgtgccagattgagcctgttacaataccctgtctaatggctgaagaaatcaa

SEQ ID NO: 299546 - DNA, 680 bp, Homo Sapiens
agagctacccctgtggcgacctgtagagatatgaccgagctcacatctgtatgcgggagagcttgcgcgagatcaaagccccagtgattccctcatggatggagactctgagagacacaccggtcccactactactgaagacacacctgtccctggctatgtttgcccagactttgttggattacaaagtcaaagtggcctatgttgcacctgacccataggaattcgcaggctcctaatacgcgcttctaccacattgcccaggtgcaccctgaacctgtgacctgggacagcttgctgtagaagctcaaggtcccagaagtgttctacggatactgtgaccagcacgtgcacgaacgtggggagctgagccttacacgacctgttatctaactctggaatgaacacactaatgagaacccgacactggagaggtcaaagatacctgagtctgtggagcgctcactgtctgaagagaccgaggacctcatggtgtatctcacgattatctaggtgattaaaaagaaccctttgactcacgtcaccaacgagctcatgagtccatggaccacagtgattcttcctttatgaggaaaaggtatgccttgggaccttgaagaccaacctgatctgtgatcgtaattaacccctattatgcggactatactgagaaggaaaca

SEQ ID NO: 299547 - DNA, 671 bp, Homo Sapiens
atctcgagttctctagctatctgtattcttcagaagattggggaatacttgaaattgatgccctgcacatgaatggataatagttcctgacatgcatatggtgcatacaatttggggacctctaggttggtatcattactacatatggtgcttattctaaatatgggaatggtacaactggaagggaagatcctctaatgacaacggctgatatctgatctaatgatcacgccgtttgagcaggggcataagctgcttgacaggcatggtgcatctacacggcacatgtctcagatgtaggatgagtactgtatcttcatgccacgcacacctgcacacccgctgaccatttaacactaccaggaggctgacgtcgcaggagctcctgagcccgagagggtgatatctggccgtgtaacaaaggtacattatgtccgtacatatgtgctcataaccgtttctatcgatgctaacttgtgcactaagctcaggtggggactgtaaacaaaatgtccctatagctaagtttatgatcgatttactggccgacctttaggcatggtcctgattggagataactcgtggatttccccgcttaaaccaatatgtggccaagtttctaatgtccaattcgggtgggccaatggcataatgaacacggtggtattttt

SEQ ID NO: 299548 - DNA, 665 bp, Homo Sapiens
  misc_feature (477)..(477): n is a, c, g, or t
gtcaaatgcataccccttgggcacactgaatctgctaacgtctattcgcctgctgtctctctttagcttgacttattcccagggcgtgcctcgccgatatgcccacactagtgacgatgctcatatggttcaaagatctgggagagtactatagcgcagtcttgccgttgcatgccttaggtccgtgtcttgagcatggaccatatgaagatcatgtaggtgaagattcaggcaggttactggatacccctaatggaaacacgttatgcatcagcgcatctgttctcgaaccctttggtgaaacggatgactgctgcgcatatcatcatcctgagagaaatgaacgcttcttgcagcacagagcttgcagccaggatctgatactcatggatagacctccagttgttgcgatgcgcactggtttgcatgacaatgagcagacattcttgagaatgtactgatatgacattgcctgangacatcctgtctgtcatgctccggaacgtctgttctatactacagagcatatagctgcaatacccgaatgttgccaagctgcttgataaagctgcctgccaattgccccggctcgaataaccccgggatgaatggagggccttttctggcaaacacagactccgttgtaccatatttccaaatttgga

SEQ ID NO: 299549 - DNA, 444 bp, Homo Sapiens
cgccatggaggggagcacgcaactctacaaacgtactacgctacgtgatactgggggaacataagcagcctgacatgtcgtgagagcccaaagggagatcactgggctggaccatagtatgcgccatgcattcatgaaataaggactttctacatctgtgaagcgtatctgaacgataatcttcagatgacttgatggtgaacatgctctagaagccctctggtgcgtcacattgactacgaagcctgatctgacgatgaatgcatggctgacaggactgctatgcatagctacagaggctgtctaggtgatgccgtctgaccacgtgtaccaacgttagttgcccaatcaagggctggatgcctctagacatgcctgatggacccatagacctccgacagtataccatatgccactctcgacaccaacatacatgcagatctg

SEQ ID NO: 299550 - DNA, 449 bp, Homo Sapiens
ctctatgagctgagacagtaccttactacacagcatcttaatagcatattggtctacctaggccccctctagaattgctccatgtctatttgcggtgatgtaggctatgcccctcgtcttgctaaggtctgagtatctccatgaactctcatgaactgcgggtacatgtcaatgctaccattgtctgcgatccggacgcttcagatggggattatcgaccagatggccgatctgtatgcgatgcctgtgttcatgaagctgcactgcactgaggatcagtgttgtgccaaggattacacgctgtggagtccggtgtcatagtgatgacagtctggcacctgtatgtacacaaagcatctatgtcggcaaacactctcagattcggagtgaaggtcactcatatctgtagacctgctagtgatctacacctaacgtaagacaagcccaga

SEQ ID NO: 299551 - DNA, 438 bp, Homo Sapiens
gctgggtggtccacccaatataatacatgggctaataggaatacgcaggcgccttcgaatgcatatgcactgtaggcttacggtagaggatgttgcgtctcattcttaggtgaatgttaagctgcttacgggactctgtgtgagagcctcttatgctcatcagacatctggtgcttagtatcactggatgccgtgattggcgggctttacaatggacaccattgggacagcacacatgaaccttttcgatacatatatgacactattgccaagatcaagggctcagactatcgagataagttgtgtgcacgtgactggaccacagcattgtgcacagtgtagattgcacctattctgcatgaccatgtttaacatgtgcagatatcgatgtgcctatgcgacaacgtgtatgtgctgaagctgagacattgtacagaa

SEQ ID NO: 299552 - DNA, 445 bp, Homo Sapiens
gaatgctaattcgcacatactcacccagggccgatgaccgataagcagtgagcatacaagagacatagtatactaataggccaacgatacgaggatatgtgaagctgagcactagggtaatgttgagcaggtcaaggtaccttgggtggaagcatatgacgggtctgtacatatgattgctacctcactgtgtcgtatggatgccacagctatcgatgctccatattccggccaagcagtaggaggcatcggataccattatgatactattctggaggacaagggctgacattcatcgagtaatgctgtgtcaacgtgacatagcactagcacatgttacacgtatatgtagaaactgcgaggcatgaccgagtacagtatgagactatctggggatgactacgtgacatcacagacatgctagggagagacactgcatggaaga

SEQ ID NO: 299553 - DNA, 386 bp, Homo Sapiens
tgccagtcctatgtgtgcttagacatctcgtgctatgtctttcagattttagggaattatgtaccatatgccatattactatacctgccatgggcagtgttacctgtgaagtctactttacatcatgtgctattacactgaatcccaatgctgaactttttaaccagacatatatcgctgctcatcgccttactacatctatcgtctgtcattgatgcactgcagtacacaattatagggcaccacaagattgacagcaaaaaagtgattgtacgtagccacaaatctgtctctgagcaacaaagatgtggcgggtagtcatgacagaactgtgagctgcagcacgagaatgaatttcgagcatgatcttaatgcatataccaagc

SEQ ID NO: 299554 - DNA, 392 bp, Homo Sapiens
ctgaggccctactatgctgaagacctcgctgtctgggagcgcgtgtgtccgctgcagtcttcgagaacgcatgctggtgcctgagactcgctgacgctgaacctggcccagactttttagaccacaattgagatcagcatggcgccatatcactgatctgattgctctgcgaagaagttggagcatatggccacagtattgcggcttatccgaggagaatgatgtaaaactgactgcgagttgaatgagcaccttgtagagtacagatagatgagtgcgactttacacccattcgcatgacgtaccctgactgctatgaccaacattatgagcaaagacacagcgctgtgcataccactatccattcgagagcttgacacatttgtcagtga

SEQ ID NO: 299555 - DNA, 401 bp, Homo Sapiens
cttggcaagatctattctcatccacagctcgtcctatggcgagtgggacatgaataggtgtctgaggcgtggtcctactgcctccggggaatcctgatgatatttgatggtcacatgttctagatgctgtatcgaggcagctgctgccataacatgtggctcgtgcaatgcgtgtcccaaaggctgctgatgacactctgcgagccagatagacagtcgttacaggatgtacatctgtggacgtaaacaccaaatcgtactggaaggcacttggcctcctctcattcaatgaacatgcagaggtggaattcacagccaacgactccggacacagccgctacaccattgaaggcctggtgcgcacgaccttctatcccaggaccgctgccagcactgagtga

SEQ ID NO: 299556 - DNA, 442 bp, Homo Sapiens
ctctctccaacttactacctgacgaccatacccggcccgtttctgtaactgcagtatacgcaattgatgtcgaaacctgtcgcgatatagatattaccaactgggatcgatgagatgccattatcacgacgtttataacctggactaacccatatacctgctgtatggtgagattcctagagataactttgtaaggacagtgcaagctaatactcctgtggtcatgactagctacttcagagcatttaaagacctcactcgtctatgtagcataatactgggagcatttatggtgacaggcgacaaatctaccgagtctgctgatatctccttgcccagcatagaatgttagctcaactttgaattgcccagcagatccctctgcatctgcttgaggatctagctgatagtctagagagggaccgctctttggacactatga

SEQ ID NO: 299557 - DNA, 456 bp, Homo Sapiens
ggaccaacgggtctacaccctgcgaacagaccacagtaatgagaggaccgtctgtgtgtacaagatctctgtggcttctgagctgtacatggacaccgagaggaagatgcgtgcgaaagcttacgcaagctccgctcccataagacttcaggcgttgagcgcctgatggtgcatgtgattgaagctacagatttgaatgtctgccaaccaactggagagaacaatctatactgtgagattgacgtgggctcctagagctacacctccagtaccgttcaggacacactcaattcgaagcggaattctaactgccagttctttattcaggatctctaccaatacgtgctgtgtctaaccctgtgtgacagagaccagctgttaccagatgatttactgtgtcatactgtaatgctagtggcaacaattcgatcacaacacgaaagtacaggccctatg

SEQ ID NO: 299558 - DNA, 439 bp, Homo Sapiens
ctcacttcaccttactatcagacaacctgagtcatactattaatgcaaatacggtatacgctatagaagtcgaaacctgacgcactagatactagtccgcacgggaaagattgagcattatgaccatgcataatatagcagggactagcccctatacctactgcataatgaatgaacttgagataacgtcgcagggatagccaaagctgagaccactcgaaatcagacgagctagctaagatcaggtcccagagcacacccgcctatgtggcaaagacgtgggaacaggtataggcataggcgactaacctaccgagcctggtgatagctggatgtccaagatatactcttagttcaacttcaaatttgcccacagaactctctaaatccgcttgacaatttaactgatagagccgcgaggaacagttctttggacact

SEQ ID NO: 299559 - DNA, 451 bp, Homo Sapiens
cttaattcatctatctatcctacaatctctgttacactatagatccatggacagtattagccatcattgaggcactctgtcgcactcaacatagggcgtgttggctgagattgtccatcgtgagcgcacatagtgtctcacgtgactactagtatgccacctgcatgaggcattaactttaaacatggtctgcgggacatgccgctcatttaccggtcaatggctacgagctactctgagacttgtaatctagcacacactcactatgtagcaccttagatgagatagttataagtagaggcgacttgcctacggagccacggtgattgctggtatgagggacatctaatcttggttcgactttaaatttgctctcggaacccattaccgccccttgaccatttagctgatagagcggttaagatcagctctaagaaccctacgagaactc

SEQ ID NO: 299560 - DNA, 461 bp, Homo Sapiens
gggctgcaggaattcggcaccaactcactccaccttactatcaaaccacttgaataatagcattatcgctaacaggatatacgtattagaagcctcacactgaagcctacactcatgtccaaccgggacacattgtgcaaatgactatgcataacattctcgggaattgccgttatcactatcacctacactatgaccttctggctgcgacgcaactatagccacaactgagaacacgcttatgcgacgaccaagctcacttccaatcccagagcacgttcgctctatttggctaagacgggggatcatgtatgtccctaggcgactaagcatcaccaccgtgagataccttgatgcgcatgatgtacacagagatcaacttcaaataacagttcacagatgaatagataggcttgacaattccaatgagggagacgccaggtacagttattgtgacagtc

SEQ ID NO: 299561 - DNA, 450 bp, Homo Sapiens
ctcagatgagagctgttagaagactctgggctcacttaatctagagtgtgtatgagcctcacgacttagtatctataattataatagcacactgttgcacatgtggatggtcacttactgagcatgagccctacagtattatggaatcgtactgcatatagaatcaatggcagcagcattaggagggactcagacagagaacaccaattctatagatgaagctttggagtgcgctaactgcgaacagtgctcaagtaggcagtaacacgcagatcatcattcaatagaaatctgggattaccaaactggctgaacctagaggaggctcttacatgatggaaggtctcacaaccgatgctgatgatgctgctataaagcgccgtaatgataccgtggaaatgtgtgtgatggccgaagctgcagctgatggaatacctacactgcgaatag

SEQ ID NO: 299562 - DNA, 387 bp, Homo Sapiens
acgagatgcatgatgcctacacggtgaacaattagaaaggctatagcttagatgactagtagagtttgttaactcattaactcatcaaaaatgtttatggagtatctgatatgctttaggcagcaccctgataagtggtagagacacaatagagaagaagacagatcagatctttagccttcagattcactgactatcaagcctatggcattgaggctcaagattcaattgtcaggattatattaatctaccctatttttatacgtatgttatgttgcagcatcatagctctcaaaaatatactgaaataaggcaaaacaaatacattaacatgcccattttgtcttactcattatgatgtgaacaaggtgttcccatgtcattgta

SEQ ID NO: 299563 - DNA, 385 bp, Homo Sapiens
cttcattcactacacactctgagcctcatcatgcaaaaatacctaggagccaattttaaacatagaattcttttagctgttgattcacaaaatgtcttaggatgattaatttctaaaaatatcctcaaaggtttgagataataaggccacagcagtgttttcaatgcggcttccaagttaagcattattatgtggatgtagctatatctataccaacagagctataaatgcattcatttggggatgagtagtcttgatgtataattaatctctcattccttctgacagtactttttttcaaagttgtactgtcttaaggataaggaatactgcaagctgctccagatcctactgaagggaatgaaggtttaggaactttacccga

SEQ ID NO: 299564 - DNA, 393 bp, Homo Sapiens
aatgaaataactgatggttccaacagctgatcaatgtaagtggaaataagttgcaaagtttgcacaaccacacaacaatggcaatggaagtctatggtacttgatgcctttctattttctctgtcaagactcctctaacttctgcttccttcactacctggcccagaccctgagatgaaacattttaaacattttagtctctggtacccttaatctctggtacctctgctctcactgtggcagaaacttgaataagtggtaagggttaacttgtacaaaattaaccccctgctggctggcctccctgttagagcaatcaatcatttctggtcaactactggcctggagcctggcctctccctatactgccaagggaggggacggtgcttcaca

SEQ ID NO: 299565 - DNA, 390 bp, Homo Sapiens
cggcacaagctactgtccaatttaggatggtgaaattccaaaggtgcctaacttgagtaagggatttgtgccagaatattccccattactataagggctataatttcctgacctggatgtccttaaaaccaattaaactgccaactatctttactttagggctctctttgtccttatcaacatatacctccaataagtaattccttaattcaccgttaaacatggacccactctaggtaaaattaccctcatggaaacatattcactgtgaaaatgatgaatttaaaaattatgtttgaatcacctaaaatgtatgtgcagcttctagatggccccttagatctgctgggctctatctgtgtactttaaaaaaacagtatctaattcagt

SEQ ID NO: 299566 - DNA, 781 bp, Homo Sapiens
  misc_feature (683)..(683): n is a, c, g, or t
  misc_feature (727)..(728): n is a, c, g, or t
  misc_feature (752)..(752): n is a, c, g, or t
ctatcatctgggtaagcccaccccatgaccgctaccaggggccctctgaggcctcctaatgactctccggactggccatgtgatgccagtggcactcgataacgctcctcatactatgccggctaaccaacacactgggagataccaatgatggggcgatgtaacacgagagagcacatacctaggtgacgacacaccacctgtgcaaaaaggccttggatacaggatagtactatttattacctcataagaatatatcttcgcgggatctttctgagccttttacacactgcatcctagcccctacccacccgactaggggggcactggcccgcaacaggcatgagcccgctaaatcccctagaaagtgccactcctaaacacatcacgattactcgcatcaggaggtgctactgcgtgagctcaccgtagtctagtagactctattttaccctactgacaagcgtcacagtactgtgagactcccttcaccatctccgagcgcatatacggctcaacattatgtgtagacacacgcttgcacagacattacgtcattaatggctgagctcttctcactatctgcttgatgcagcaactgatatgtcactttggatccagacatgactctggctttgaagacgacgtctgatactagggttttgcacatgacgcatgacatntctgaatgtctcatctatcgtgagggccttagctcactcatagnngagaccatgcagaactgttaactnatgcttgagggggccgggtccaatgcctt

SEQ ID NO: 299567 - DNA, 810 bp, Homo Sapiens
  misc_feature (518)..(518): n is a, c, g, or t
gtcatcactggtcatgaatgcaggttcatatgcagcaccaccatcattgcagctttgttagttgtcctacatgggaactaccaagcaggtggctgctcgtcaatgcacttctagtatgacagatctactctgccgtgcgagaagcagcatatgaagatctttcaaacatctgccgtggagttctatatgacgaacaaaaatctgagccatatgacacacgttgcctacacgtggatgagatctctcacgtactgtgactataataatcgcgtctactacaaactcattacacgactctcataacatgcacagaatcattgatgtgcctccaacaccaggaatgactacactgtgcttctctactttaaggggagatggcattctgaatctgtacgacagacacatattgaaggtgatactgtgcaaatgattcgcatcacacgataaacacttgccaagaatgataacaacatttcatgtgttgaacggggctggtcctccactgcactatgcatgtncacagacactgtctgtgtgaatacgggctcactcataacgctcatcatagtgtgagacatatgagtatatatccatctctagagagagtgcgctatggatgtaagagcccatatgaaatagttgtggatgaagcagtgatgagtttacatagaactggacgggaccacctcaacgcaaagattcttctagagaatgtggttccactcacctattgacatggggaccatctcactgccataccaggtatgctccacttatcacttggaccatggccacttgattacttagggt

SEQ ID NO: 299568 - DNA, 742 bp, Homo Sapiens
  misc_feature (584)..(584): n is a, c, g, or t
gtgctaacgtgtggtaggttgcattatcattctactctgcgcacatagctgtgggagaagaaaacttcctattgatcggctattcctacgagcgactggtaataacctacaaatgagtattaatgacgatcacgcaaatgcgtgaccaatctctctgtggtctatcagacatgtagctactctgtctatatgactaaaaaaaatataagccctgcatggagtatgacacacgggaagtactctcctgcgtccttgaatataaaatttgctggacatacatttgacaactgactctctgatctggcacagacatatggaatggcacacaccccacactgtatatgcctggcgatccccagtttctgcctgataggtctgtgtaatatcctagacagacacagagcatgtgcgactctgtgcaaaagatacccccctctcgatgataacttgcaaggattaaccacacctctgcatgtgatccacgagtctcttcctgctgtcctggatgcaaggtgactgacaccatactgtgtgatacactcgtcgttcataaggagcactactggtgacacatttgagatgtntccagctcctgcgagatggcggacacctgtggaccacattgaaatagtcttacttaatcactgatactctcctggagcttcacagatgctctaaaggcagatcatcagaagattttgttccggtacatgaagactgtgaactcttgtataacgttgaa

SEQ ID NO: 299569 - DNA, 787 bp, Homo Sapiens
  misc_feature (665)..(665): n is a, c, g, or t
cctaggctgacgacgtcgattgcagggcagctcacgtggtctgaatcgacaacctatcttggagttctccaagtggagttccacccgccggactcctgacacccctgggctagggaaaatgtctactttgttttgttctgttcctaaagtgatcatcactaatctgtgggatttttaacgattgcactacagaagaatgtaccctgatgtaaatctctgcggatctgggagccaacactcctctgagaacagtcatcgctggatactccgataatgcatattgacagagtcagcaccagcagaggctactcgacttaggacgcacacatgttttagtattttcttccatcctccaagcactcgtatcactttcaagcatttaatttttatctgcctatacatctaaactacgtgatctaattgtactagtttactcgcaacaactcagttgctaagggtccaacttccagagaatccatactcggaaaatctttgagagtatctgtcttaccatccagtgagtggctttgagccctatcttacactacaaatgacctctcgacgggggacggcgacaacactgctctgtgagtggctgtgatgatgctgcacatactcagcatagtaatcgagttgctatatcttcacaggctctccagaacctncaccccgaggttatcagtagcggattacgcctgtacagaatttaacatgatcagcctgtctgtatagcaaagattggatatctctgtcacttctttgataagcgggtatgtagtcattcgta

SEQ ID NO: 299570 - DNA, 212 bp, Homo Sapiens
ctatgtttagacctacccttatccttccatctcagtggcaagaggtgttctctccacctgttctgtagattctatccccggctttctcaggaaccttgttttcctttctgtgcccatatcttcagcctctaccttgctacttgctttttctgatcagaatatgaatattctcaagtctcttccatccttaaaaaaattgagaaactctctgc

SEQ ID NO: 299571 - DNA, 804 bp, Homo Sapiens
  misc_feature (707)..(707): n is a, c, g, or t
caggagagcgctgcattggacacttctagaggcctctgagcgacatgttctcactagtgaagaccatgcgtttcacctttgcctactgcacttccagtagaagcatgctcacttctatgcctgctccggtgccagggctcgctaatgtcctaccaatctatcttagagctgtctggctacactatacgcagcctcttattatggtatgtggctatgagcactctgtttttcattctgagtctcctaggatgcgtgctatagactctaccctgtacaggaagccgtgatcgaattagaccaggagaaacgcctagcatgccgctacaatatcgggaatgtctatcgagatgatgacacacacactctcttaccatgtacttggtacctggagcgattggactagctgcatagtctcaagtatgtctggcgtgcctgcgataggcgttctgcagatccatgtatagctgtctggaatacgtatgctagctgagcttatatcgcaggataatctgtgtaagatcctactctcacctgggaaatgaatgatgatcgacatgatcatcccataccatgatccctataaagcgaggagccttctgtagaggggacacattcatgtcatgctgtaagattgacctgagcttatggtgctatgactacatgtcctctgctacatactatatggagcagtggcgatatacctcttnctgatcactagactgagaaatagtcatgcgaatcatctgtgtcgttagacccactgatcttgctcgcatgcgtagaacttatatcttatattttgaa

SEQ ID NO: 299572 - DNA, 749 bp, Homo Sapiens
  misc_feature (526)..(526): n is a, c, g, or t
  misc_feature (531)..(531): n is a, c, g, or t
  misc_feature (703)..(703): n is a, c, g, or t
ctgaaacagaatgagtcgttcctggcactcccgaagagcatgcctcgacttctgtgctgcctcatgatctctcttacacacggctaggatatgtaccgtccagagactactgacgtattctacttgaaacatggagtaggtatcagccagctacctgtggtattgcagacaccctggctccttagaggacgacagctcactaggatctacactctgtggcagacatcttactatcaggtttactgcaagcaccagaaggcgatcaggatgctagaatgactactactctcgtttatactcatgactgattccatatctatatgctgcactgctgctgcactgatactcaccatagtgtgatgaagatatcatagctatatgatgcatcgactgtaacacatggctcagaattccgtatgtgcgggatctctctatttcaaatactccttatatttgtgagcgcgggactagtaagaagacccagctttatgcactctgcccgtagcctgacagagacacggagcanactcntgatatcactgagatagattgtcgtgtcgtcgccgatagtggagctcaacagagcgagcttctctgtttcatacctctgaaagctaaccagcaattctctctctactgtgacatcgatgggtctggaatggatggactgtgtttcgtctcctgctctactgcacatcacatnttggctgggaatgagagatcatccgatagcctcacactcgctccaa

SEQ ID NO: 299573 - DNA, 780 bp, Homo Sapiens
  misc_feature (670)..(670): n is a, c, g, or t
  misc_feature (736)..(736): n is a, c, g, or t
ctccagttgggctgttcttttttctgaaactcccctgctcactacatcacatgcatcacatctgccatgactgatgcccttccttccagctgatcgcatcggctgctgaggctgactgcattcttaacatagttctcgagcctgggctgtcagctccatcaactcatttaagcactactctgtatcggctatgctagctatacatacatctaaattttgatcataggatcatctcaagccttctatcgactcagaagagtcatactccatccagctatgttccccagctggtgaggaactacgttcctttggaggaggagaggcgctctgctccttagagtatgcagttaatctgctctgtgaattgcactctttgtggtggatctacttcaggactctgatgatggagatgcacagatgggtgcctggagcggatggagatctgcaggacaggcatacatctaacagacaggaccctcatctgcaagtctgtctgagttagcttacggccactccggaccctgtactcctgcgtatgatcaccggtagctgctcaacatgatattttcaccatccacgagtgctgctgtctgaacaattgcaccgacactgtgtctcaaacgagtaccgaccagagtggctgaaatctgcccctatgcaggagagctgnctatgcgctgatcgcggtcatggtcaagacccattgcgatgcagctgacatcgtacacacagaggntgctagacgacacaagtgttttaagtgaagaaggcgtttaaccc

SEQ ID NO: 299574 - DNA, 744 bp, Homo Sapiens
  misc_feature (338)..(338): n is a, c, g, or t
  misc_feature (501)..(501): n is a, c, g, or t
ggagaagaccatacgtcttcatggagaaaaccgcatgataatggtcacgataactcagaatgcagatcttcccagcagctcactcgctaacaacccccatgctgcctacagtctttgtatgaattctactgcatagaaccttgctatagtaaacctttgctggcaagctcttattctttttactagacactgctcctgataccatgtatgaatggatattgcaccactaatgctactgcatatctttaaactctgcacaagctagtgtgtagctgaaagccgctactggtaaggaaaccaggtgtacgatgtgccttttttgtatctgtgaagtagtntaagaatatcgaatgaacttacactcttacaagctatctcggttcaacaccgtgtgtatatacacttggaagctcaaacaggagttacggattggacttaaaagcagctctaactctactatagcagaccatctgacatacctagtgcatgagcactaggctntgccggcgtacgagcgcctaatgtggactctatcactcagctctggtatacgtcatatcttaccaagaggctgatgctctacttgggagactgtctagtgtgctttatcaaccaaactgggatgggctttttcacatacatattaatggcatactggtactgaaagaatgttaacagttcttatagggcaaggggaaggggccatactcatttatgtccactctaacaggctttatatacaaa

SEQ ID NO: 299575 - DNA, 784 bp, Homo Sapiens
  misc_feature (750)..(750): n is a, c, g, or t
gtgctttcctggtcggctggctgcatggagttcttgctggaccagccagcatgtctgccgctgagggtgagaaagctgctcaggaggccaggcgaccttatgaacaggcctctgatgacgagactcagtcttctatggccactactgataatcatctgtgtgctacatatatacactacgggccatgatcgtggacttcacaggcaatgcacagtgtgatatcctgaatgagcgtgaatggacttgcaaggaagatgccatgatagcgttcttcaacacagtagacgaactaacgaaagaatacgggatatgagagactggatttggatgctgtgccatgtgtttatgataagctgagactgtgacctgtgttcttcttcctcccttgataggtggaatgcttgaaataaccagctgaaccagctactcaaggctgctcaccatacggatgtatcggagtatgggctaaaacgatcaactgactctctgtgagagtgagtatatgactgacttgcaactgtatgtgatactcctatgacttccctacctcacaatactactcaaagggggtgcctcgactcttgctcccgatagcagtagaatacattgattgggcacaattacagggcctgattaggaaaactgactgtcacagctaatgacttcgagcctataccttgtgcaagtggcttttagcatagggcgtactagactcttcaccattgtcttccgaatgggaacgcaatgggnacggtgatctaataaaaccctctagacttttaat

SEQ ID NO: 299576 - DNA, 796 bp, Homo Sapiens
gagagattgtcctttgtcagatcggagtcgatatgcttgtattcttgtggactcgactcagaagaatataggatgtcatcctcgactaccaggggagtaatacacctgcttctgatgactgatgcataatactgtgatcacaactcttgtatataatagctctaataatcaaaacctcttgctgagaagccctatagtctcataaaatagacatgtgatctgatgcgagaccctaggagactccaaatgacagaatgacgcctgtagatcagatcaccaagacagaatcccaagagccggctccatatgttgtaggacgtctaagactcctacgaatagtgcgcagctagttgttgcgaacaaccttgacaagataaaattgctcgtgaccaagactatgtattcgagtgttttgacacactatatagcgctgcttgatacatcgcacgtaatacgaaactgtacacaaatactgcaaatatcctttggttaacacgagatcatgcgattaaacactggaagaaaatgaaccatacaatcccattgtgtatacgctgtaccataacctcgatgcacatttttcgcacactcctgctatgggtaacaattaccaaacaattaggctgcttactaggagaccaggcccacggcagaggaaagctcattgcctgtattaatgttatcaggttgggaaaaacgcttctagcgacaataagaactgctttccagcagggcatacttatcgggagggactgtttagatatacaaaattaaactctcgggattctttattttt

SEQ ID NO: 299577 - DNA, 181 bp, Homo Sapiens
ctgcgtctgagagcttcagagaccttgcttgtttgtgcgtttgctagttgccctatcgtttgcctcttcttttgaacgctcatattctagtattgccctaatcatggtgctctctatgatgctctgaaactctctgactatatcaccactcaccttgtgctatttcaacctttggctattt

SEQ ID NO: 299578 - DNA, 135 bp, Homo Sapiens
gtaatatcagactagcagctcattagagtactacttagagactacatagacaaggatccacgctctatatggcgaaaccactaagattgtgccaggcactagcttatgtaacaccgtatgatggcagtagatcac

SEQ ID NO: 299579 - DNA, 370 bp, Homo Sapiens
ctcatctgttgaactcaagaaatcaagggccagtcatcaagctgcccattttaattgattcactctgtttgttgagaggatagtttctgagtgacatgatatgatccacaagggtttccttccctgatttctgcattgatattaatagccaaacgaacttcaaaacagctttaaataacaagggagaggggaacctaagatgagtaatatgccaatccaagactgctggagaaaactaaagctgacaggttccctttttggggtgggatagacatgttctggttttctttattattacacaatctggctcatgtacaggatcacttttagctgttttaaacagaaaacatctgttttggaatgattttca

SEQ ID NO: 299580 - DNA, 346 bp, Homo Sapiens
gtgaggttggatgccgcgattatgagaggtgtgcttataggccgtacagacctcggctatagtgctgactccacatttatttcaccattctacaggtacgggtctatgctactataaggttctaatgtgaggtgacggacaatgcgtaccactctagtatgatgtcatgaaggtgcaacgaaggtagaggtctagtaacctacagacgaagtcacgagtgatgcacgctcaaatagcttgcagaaatccacagagtctgatggagttcacacccatatgaatcgctgagctcacactatgccacatactgcttgtgatgactgggtccgtgatgccattattgagg

SEQ ID NO: 299581 - DNA, 352 bp, Homo Sapiens
gttaacatctcccagaaagttatttaatgctatttagaaaaacacttaatattcactcaacagctaggattagagttcactgtcttctatcagtccatttttcttcatattgatccatgttttctctttgaatgccgagataggttaatttaggaatggattcaacgggtgggctaaattgtcaccaaaaggcacacatcattttttataggtagataaatcctctgctgtacatccattcaccttaggtaaacctagtcaagtccaatgactaaatttctaggcttgatatgactacctacctgtgctactttagtcattgatcagctcggtaactttattttccctcttt

SEQ ID NO: 299582 - DNA, 355 bp, Homo Sapiens
cgatctttgtgtctagcaatgagtttttcatgtggtcaaacatgtaccaagtccctctggtgtgatagcacttgtgcatagacagtagtgcttaacccttatagttaccctgtgagctgatatcactgctcccatattacagatgacattaaggttcagagaggtttactaacctgtaaatcatgtaacaaagatataaaacaaggtctgtctgacttgtcattctaccagtgctgcatctaatttgctagaattatgtgtgagtataatgagctatgatacctggattttgtgatggcattttagatgcttagatattttctattcttctcagagttcttagacagattccaaa

SEQ ID NO: 299583 - DNA, 413 bp, Homo Sapiens
ggactcttggcttttccatagcactctattctcatcttcattttttcctaaaacaaataatagattttggtgggaggaatttatatttgtgctataaatctctttgaaacagttatttgcagtgcgtgtttgataagaaatgacgaaagaaagagtgaattatgaagtagcccagtgaagagtagtggttctagagtatgtgaacatctcatgtagcagttataggatgagaatatcttagagaaggaaaaatgtgttgggaaactcagatccttttcttcctatttcccactccacccatcagagtcccttgtttgagtagcatcatggactttttggaagatcgggtaggcaggagtcaaaaataaaaccccatttatgctctaggactggtggtaaaaaataaataaata

SEQ ID NO: 299584 - DNA, 385 bp, Homo Sapiens
  misc_feature (183)..(250): n is a, c, g, or t
tggtagttataaaacaacagaaaaaaagagctaaaagtactacactgttttagctaaacagccagttctatacacagcaataattatgataagagcctgctaaaatttatgataattttaaactttgcagtagatgttacttttgttattccccatttcacacctcccatagtggttaaaaannnnnnnnnnnnnnnnnnnnnnnnnnnnnnnnnnnnnnnnnnnnnnnnnnnnnnnnnnnnnnnnnnnnctgagtcaccaagagaactgagccatgaggatcttcagcacctgttacataccaaacagtgtaccagtagttttacatgtattatatcattgaatcctcagaaactgaagtttagagagatttgacaacttgcac

SEQ ID NO: 299585 - DNA, 322 bp, Homo Sapiens
cttaaacaaggatttttagataaccatctcatttgctaaaatgaaataagctgcacagtagatccctcccaagcagataattagtctcggaccctgggaaacaggggcagggagtagcaccttgcagatgaaggcagtatctcaggcctctgaccatctcacctggcatttgccagaggctttgctaagcgtgattctgctttgtgtgccaactctttgtggagatgtgcctgcattctgaattgtttactggggatttgaatatgctatataaattatgatgtatatcttgcttcttgggagatgcatgtcttcaagggtg

SEQ ID NO: 299586 - DNA, 407 bp, Homo Sapiens
taatggcaaaacagagtcatcgatattctttcctgacaccatacttctggtgatctgtggggtgggattattcctggcctgctcactctctgggagttgccattcctgtgtacaagctgtaaaatcttaaagcggaggcatcattatcaagttttcagtctttcttcttctacactacttctactcctctgcgaagaagtcttctctgatttgcatactccctgcatacttgtggacgtgaggtaggaaggggaccaaatggagacagagccccacctgcaggtctgcacaaggccaagggcaatggctgtgtcttcttcctttctggatccctatgccctggcgcatgttattttatccataaatattagttatgtaaatactgtaaaaatatatataaattgttt

SEQ ID NO: 299587 - DNA, 223 bp, Homo Sapiens
tgagccactgcaccctgctctttaatgctttataacaaatacttaggtgatatgagtcttactgacttggtcagaggtaaacataacttatttttataataaaaaacaccaatatgaatatgattatactattactactgagccaacttttagtgttctcggtgctgtggaattgtacacatagaatctgcccatttaattaataagttgggaattccaaaca

SEQ ID NO: 299588 - DNA, 108 bp, Homo Sapiens
aactgtctgtgaaatggtgctcaattatatttctcctgattataggtatatatggagattagatgtctgttcctactttaagctatttcaatcgtacacttgatgtgt

SEQ ID NO: 299589 - DNA, 633 bp, Homo Sapiens
  misc_feature (568)..(568): n is a, c, g, or t
  misc_feature (587)..(587): n is a, c, g, or t
ctctaaaaattcactaaatgaataacagttattggttttgctattcaagataattataaaaatatctattatagctaatcttcacatgagcagaggaatgtcttaataattttcattattttattaagcatgtagagtcaataagagcatgctggcttaattccaaaggacagactattctaaaccaaagtgtacactctggttattttcaggaacagctgctttcttgcctagttcaaaacaagaacagagaacccaaaagcattagataacttcatggtagttcctcttccagccaaacacacatacacgcaaaattttacattggtaaatctgtcagcctctcagaaaaatggtaggcaataaatatattgccctcaatgtgcatgtgtttttcttagtcttcaaagtatctaataattgtgctgtataacactattttcaaatatcactttatagagtaatcataggagtaatatgagttattattatattaagtccaacaacaaatttataatagacagtgcagaattttggtatggtgaaacaggttttcaaatagcccgtngttagttaatatatactanatcattggaaatatggccataaatggtggctcttttctattgctta

SEQ ID NO: 299590 - DNA, 257 bp, Homo Sapiens
gttcatgtgccacgttcgccatgtccaagtcgacccctatctgcctgatatgaccgtgtcgcccatactgccgttcactggcgagaccaccgttcactgcggcatgctcaacatgactcactaccgagtttctatgtcccataagcgagtcatgctccattgtataagggccagatgattccatgagcttgagaagcaggttcgtgctccaccgacatttgatgcgcatattgcataagttaggcaggtgcgatcct

SEQ ID NO: 299591 - DNA, 560 bp, Homo Sapiens
  misc_feature (54)..(192): n is a, c, g, or t
ttagcttcatccttcattgactgtgcaacttttgagtacatttcttattttttnnnnnnnnnnnnnnnnnnnnnnnnnnnnnnnnnnnnnnnnnnnnnnnnnnnnnnnnnnnnnnnnnnnnnnnnnnnnnnnnnnnnnnnnnnnnnnnnnnnnnnnnnnnnnnnnnnnnnnnnnnnnnnnnnnnnnnnnnnnagttactcaaaattataataatgaattggtcaaggctccagaaatatgtcagtttttagaaaaatgagtttttgttaatgtttctgatttttaaaaagatcacaaatgtggtttggattagtctaaggaaaaatgttttgtttaataactgattaatgagtttttaaaaactcatttcgtatgacccagtacagaatgggaaattcactaacagaagacgtccagctggcataaaaaacattaaagggtctcagttctcgagttcctggcatgtcttggaagcagacagactctttttttgaagtagtcattctttcttattgcttatgacttagataaatgaccttgagaaactattttttgctcta

SEQ ID NO: 299592 - DNA, 571 bp, Homo Sapiens
  misc_feature (512)..(512): n is a, c, g, or t
  misc_feature (514)..(514): n is a, c, g, or t
  misc_feature (556)..(556): n is a, c, g, or t
tgagccactggacccggcaggatttttctaattctgtgaaaaatgatgtttgtagtttgataggaatagcattgaatctgtggattgctttgggcagtatggccattttaatgatattgattcttctagctcatgagcttggaatgtttttccatttgtttgtgtcatctctgatttctttcagcgtgttttgtagttcttgtccagctcacattttatcttcatactttgagtagcctccttccatgaatggatcatccagtggccgcacttaggttctcctatgaagatttttgttgtattgtacctcagaaccatctccatattctctaaataataataatgatggtcataaattgaatagaagtatttactagatgaggaggaaaaccctaaaacaaaacatgaacataaaatatttttaaaaggaagacatacaaacagacactataaccaaataagatgacagaattaaggccttatgccacagccagagttgaaaaatgcagaananaagttttgaaagaatctgttaagatatcagattgtatatatnagatactagaaacaa

SEQ ID NO: 299593 - DNA, 630 bp, Homo Sapiens
  misc_feature (156)..(164): n is a, c, g, or t
  misc_feature (528)..(528): n is a, c, g, or t
ttcccagcaattatttttgacctgaccataaacttttatttggaaaaccaaaacctatgaaggtagaccttgtgtctccattgcattttcccagaagtagtttcttaagaggatagagtctgcattttcttctcttaaacgaaacctgcaggatgnnnnnnnnnttgtaaagttttcctaatcatccctttcctggaaaacaaaaatgtttggggattagagttactctaattcaaggtttatggagttcttgacctgaatgttgtaatattaccaggtataggttatgagccctaacaggtggttgcttttttttcaccaatacttattaagcatctgttattcttaggacctataaagataaataagaagtttacaatttatctgttaggagaaagcttatatcaacattaaaataatcacatcaaagttaaatgctagtgcaaggacaagagcttgcctaaagcagacataacttgagtacaaatgagtggatagatactagtactagaagttggagaagagcanaattattattaaatatcaatattctgctatgtatcaggaagggctaagcactttaggcaggcatctcctgtacctttaaatcactaagggacttctgaagaa

SEQ ID NO: 299594 - DNA, 410 bp, Homo Sapiens
tatacacagtgagctagagagacatatggatacccattgaggctgtctcaatatcccagccttggtcctcacctcctatgctcactctcttcatcactgccctttttattatcatgtctatgccttgtttggtggctcctacttcgcgtatacctgtggtgcttctgagtcatctgttggtcttcataagccacgtcataccccttattctgactgattacgcacagttgcctctctgtttcatacctgttgtgatacgctctccctgtgggctggccttgtccttcacagtcttctatgcttctcggctcttacatcctactttccctgccttctccctccgttgcttccctttgttgtctctatgtgctcatggttctctgtctgttgctatacactgctgagcgtat

SEQ ID NO: 299595 - DNA, 604 bp, Homo Sapiens
  misc_feature (483)..(483): n is a, c, g, or t
atctattagatctgtcaaatgacctaagctacatacattactctgcgactctggttcctcactcatgctgcgtgctgtgtctgatggacatgatgaggcgaccactcggagcgctatgaacgcatacccctactatgtatggatcacactaataggctaccttggcctaatcatcacggctagatctccctaacatggccctaggctcagctgacattatactaaatcctctcatatgcttaccaactgtcatctcctagagcccacatctggtacactggcttacactatatcatggtagtatgaatgcctctgtacagactatacttatgactctgtacagcccatgtcgtatcccacatcgctgggtctatagatgactgcctgattactctgaccactaggcttgctatggtgtctatacgcctacacactcattctgggctctcctgacaaaacacatatgactgtgcgcatgaatgntctagttactatgaaggccttatgtctaactaagcttcatacagtctactgatctgcagcacttaacatgtcattactggattcggactcccatgaagctctcagcggtgccaatcgttga

SEQ ID NO: 299596 - DNA, 302 bp, Homo Sapiens
cataataataatttcagagacctgcatgcccatacgcatgattgccatgaacagcatgctcacgggcaccattcctatgcacaacctatcttatgaccatgatacacccagtcacgccttctcctgaaggccttcactttagctatgcagttcctctgcggcctcacctgtgcccacaactgcacatacaatggctgtgtttccatgctcatctcgtctgtgtccctggggcgtgctaataatgatcgttcacatccttgtttcattacgtctctttagggcaacctttacctctgctgctg

SEQ ID NO: 299597 - DNA, 246 bp, Homo Sapiens
ttgagtgtgtctgttcggctgcgcttctctactctctgctctctgtactatcttcgtccatgtctcatactgcttcttctctatacctgactctctctttcctctgtcgtcctcccgttttatgttttccctgtcctctctcgcttttctagccttactttttctcttctttggtgttgtctcatctctcctgtcctcgtcctcctttgattttgtgcctgtttcctcttcccttttctaccttta

SEQ ID NO: 299598 - DNA, 353 bp, Homo Sapiens
caggtgtgagccaccatgcccagcccatgaatgttcttaatgacaactggaatgatgaattattttcaggaggttttcaatttactctgcccaaacccatcagatgagtcactatggcagctatagccttatgaaatatattacttaaataagatttgaaagtcaaaattactcattgatccatgggctgcagaatgaatgttgttttagcagccgtgaaaacaacattcatcttcttatacgtctccatcagagcccttgggttaccagatgcattgttaatgagcagtaatattttaaagggaatctttttttctgagcagtagatctcaacagtgggctttttgggaggc

SEQ ID NO: 299599 - DNA, 312 bp, Homo Sapiens
ggatgatgggtggatgcacaattgcatcgggatccgatccgtgacatgagtgccgttcatatcttggcagagaagctccctgatgactttggcagggtgattgggccaagccggattcctgccatcaatgatcggctcgagatgctctacttggatgctgaggagtatgagagtcaacgctgcatcacccacctgcccttcaacctgacgtatgaagcaactcgagacaactcattatacgaggatgcctcatgctccagggcacagacgtacgtgctcaactctggactgtgcacagtatgaccaccacta

SEQ ID NO: 299600 - DNA, 351 bp, Homo Sapiens
gctcagggaaatgcggaggccagtaggcttacgtgtttaccgcgtagggcaaagccttgccaaattcccggccagcggagcggcgagggtggggactcacgggaagttaaacagcctcgtcggcgtcctcgaggcttcacggccgcggctgaggccttcccaggtggagcggtggcctggaggggaatcttgatcctgggccagccacctgtcaagaggaggcggagcgtcatgcctctggaagactggatgaatattctccaggagcctgacgggacgtgcgccgccttgttggtgttgatcagtccaccaaggagaagcagctggtcgcagtggccgtacctgtaattc

SEQ ID NO: 299601 - DNA, 133 bp, Homo Sapiens
atcaagttttaaatcatcccctcatctcacgaggtagaactgacctgcgtcccatttgtcacccccaacctattgtggaacctgtctcactgccctacatatatttgatttcagtctgtgtcttcctgagagg

SEQ ID NO: 299602 - DNA, 413 bp, Homo Sapiens
caccacccaatcccttaggagacttacggcttctgggatgaacactttcatcagctccagaaactagcgccttaaatgcgtatgtaattgccctacttggcagtcctgttctgaatcatcctttttccatggcatgtgagaattggatgcccttgggaatgagtgggtttggtgttttgctttagtcttcagtgtgtctgatcccatagatttgctctggataacactaccccactctgaacagagggacctgtagagctgtagattaccttcccaacactttggttcctaactcacctatttaatatgaaacaatacgtttctctgacctatggtcagggtgacaaagccccaggcagaaatgtcttccaaagatttacagagtgaaggagaagccagtcctctcgcctcta

SEQ ID NO: 299603 - DNA, 411 bp, Homo Sapiens
ctggcctcaagttttatattaatattaggcttttgtatgatatttatttcttaatacttagctatccaagacccagcttattttgtttataatgagtgttccagtgacttctgtatagaaataatagcttggggaatggttagcttttgtgaccttaagcatctcaccctgtctgcctaaacttttctggaaattttctttggtttcatttcatcctaattccattcaacttttgaaaccatttaattggtaactgttattttgctatgaaataattatcttcagctgaccagtttgttgtatttatattgcgttagattctgttgtatttatattgtgttaggttcaaacaggctgttcataacagtcagatctataacttaatggatgtttatgtcctgtgttttatat

SEQ ID NO: 299604 - DNA, 385 bp, Homo Sapiens
ctcatctcaatcttaatatgtgcaggattcacaggtgcatgccactgtacgctatgtctaataggactatatatcctacgagtgctatgcacatgtatgtacagcgatcttatgctacaaacgcatgacttacaacatgacattaacaggactttgcaggtatctgctgctatattgtgccacatctgagaggaacattggtgaagccttggagatatagagcatggaacctttactttaatttatctaaacatatacattgcaatgtcattgggatgcgattaagaccattatataagctattggtagaataaacaaccgcatgtgtaaatcacgtaccattgcccattatggcctgacagtaactttaacttaaggatttgcc

SEQ ID NO: 299605 - DNA, 610 bp, Homo Sapiens
cctatttatccattttgattgtgtatacctactatttgtattcgaatgacttcatttttcccaccctgtgggtcagtttgtgacttttggaattttccacaggtacctgtacaacttgatatttgaaaacaggattcatcaccatatatccccagcccccgttttctttttaaacaggcctcattgcgtaattcctttgccctgaaaagtgtcaccacctttatatttttaccccagccttggagttatctttttctgctctccattctccatgtccaaaaacttgctgtcagtccagtttttaatcagttttctccttgaggcttgatctcccatttctctcatcccattatagcttttcatgtagatctgaggcccaggttactgtgattcttttttttccaatttccttgctcccaggatccccatcttgtataaagtttctaaggtgctccttctcaaactccatttttacaatatccgtattgttaaacacccattttacaatatctctattggaaatttcatttcactaagtaacacccagtagataattcctatggagcactggtgttccaaattctccattacctctatgcctaatattcat

SEQ ID NO: 299606 - DNA, 612 bp, Homo Sapiens
  misc_feature (538)..(538): n is a, c, g, or t
ggggagtgctgactgtgcaggttggagatggaaatatagggggtggaagtgaggttttcttggggtcttctgctcctgtgtgggatcgcagaactggttgagccagattaccagctaggtggtatcagctgatccatagagtgcagggtctgcaaaatatctcaagccctgatctttggttttacaatagtgatgttatcccgaggaacaatttggagaggttcagactcttgcagccagaggccgcatgacttctaaaccaaaatttctaatcttgtagctaatttgttagtcctacaaacgcagtctggtccccaggcaaaaagtgggtcttttcaggcaaggttagttcagcctacacccaggaatgaacaaggacagcttataggttctaggcacgatggaatcagttaggtttgagctctctcactgtcataatttcctcagttacaatttttgcgaaggcgcggtcaactttctactgttgctagacctgaggacatatttttggctctttaaccttgcgcttacctgtgtnctgattgataacacgtatatctgtatcataccattagaatggctggcattacacgagatctttcaatgataaat

SEQ ID NO: 299607 - DNA, 631 bp, Homo Sapiens
  misc_feature (370)..(370): n is a, c, g, or t
  misc_feature (448)..(554): n is a, c, g, or t
ggcagagatttttctctctgtaaggaatcttgactaaatagagtgtctcttttacttgtgtctatctgcatgaggacagaacaagtgattatcttgttaacggtaaatctgtcattggacatgtcactttactatccagctgccatttcctcaatttctagtgtcatagtaaagatcagtaagatgaaagtgaaagtgctgtgtgaaccataaaaggcccgtgcagatgcaaactgttactcagacctctcttcagacttctcgcttttgtgaataactttctgctctccacacacattcaattaacaacgccattaatatttcttaacggtttgcagcctctatagtagtgcctgaaatgttgtcattntattttacctgtattgcgtatatttttgttctgaaatacgcattttttcttcataattaattatttgtaatattgggnnnnnnnnnnnnnnnnnnnnnnnnnnnnnnnnnnnnnnnnnnnnnnnnnnnnnnnnnnnnnnnnnnnnnnnnnnnnnnnnnnnnnnnnnnnnnnnnnnnnnnnnnnnaatgggcaataagtattttgtgaatgagtaaatgaattttctttggcactaaagactttcctcgagtttatacttta

SEQ ID NO: 299608 - DNA, 390 bp, Homo Sapiens
gtatatttagttattttttgtcttttcaccatttctctctcgctgttctcgaactctttaccttgtccttcgcccaccttggccttccacagtgctttctttaccctccttagccatcccacccggtctccttaattaacattttctaaacatgcttcttgcgtgctttcctgtaagctttcataggtgtcttgtcttccttgctggctttccaattcatactcctatattgtatcttactctctaacaactctttgggtgtccccgtacccaattccccctatattgacgtccattgcacatcactgtcccttgatatacaactttttgacttttgctgcctcaattccacatacgcctctcccgattcccctttccacatttttgccc

SEQ ID NO: 299609 - DNA, 242 bp, Homo Sapiens
agggaggatctctgacatccattagcattaactagaagtcagacgcgtcagaagggttctatttaccctcttactcacttcttagcccctttattaagccacctcattttaaactgggcaaaacagaatcagccaaagagctttgccaggtttgggacacccattcatgaccagccagcaagagagacagtgagttcaatctgagaagagtctggtgactcccagaataaaccattccttcc

SEQ ID NO: 299610 - DNA, 298 bp, Homo Sapiens
ggctgatgggaggggtgggacggggccctgactcagaactcaggttttcatccctatcctaagctggatcctcctggccctccgcatttcaggagagggttccatcatcattcctgtaggctggaaccctgggagtccttctagataaccccctcccctacttctcactcctgttccatcttgaagtcctgtggattttaactcgcagtacctctccactctatccctgctgtcctgccttcatccaggtcctagacgtagccttcaccattgcttcccttgcttattccacagccat

SEQ ID NO: 299611 - DNA, 181 bp, Homo Sapiens
gaatacattcatgatacacaattaatttttctacttttggagtagtcattagtgaattaccaagttagtttagtaggatattgcctatctatcctaaaatagttcatcttttaaaggtttctctgtaatgccattattataaagtaatcaggagaataatcatgttaaagtcatctgcttt

SEQ ID NO: 299612 - DNA, 364 bp, Homo Sapiens
  misc_feature (174)..(182): n is a, c, g, or t
gtttggggaacactgtctttagttacacagcttttccaccaataggttaacttctggcagaaatagaaaggtcattgcttagagtcacatttgaagctttaccacaaattcagacaatttaaattcctttgttttgttgaactcgtctgaaaacagtctttaattactttgggnnnnnnnnncctcataccagagtcagggcatgaacaaacaagggcatagcctcgctttaaacctgttcactattgcatcctggaaaaatgccttcggcactgccaagatcaaagagttttagttcaggtagattgctcctagaacctctgctgtgtccacggcagctagcatgttacctagcacgtattaa

SEQ ID NO: 299613 - DNA, 254 bp, Homo Sapiens
  misc_feature (73)..(123): n is a, c, g, or t
  misc_feature (143)..(192): n is a, c, g, or t
tcatacaagaagaatgtggtgcttttggaaggaggcggccttgctcagggattcccacccacgggctttcaannnnnnnnnnnnnnnnnnnnnnnnnnnnnnnnnnnnnnnnnnnnnnnnnnngattttttgtttaaaaaaannnnnnnnnnnnnnnnnnnnnnnnnnnnnnnnnnnnnnnnnnnnnnnnnnaaaaacccggggaaaacccccctttttttcaaagagggggtgtgtgttttttaaagcgcgcg

SEQ ID NO: 299614 - DNA, 568 bp, Homo Sapiens
cgcacattctgttgtgcctgcccttgaccatgggtggcatcttggttttcttgcagtctgcatcactgttggctgtgtctttggagagagaattttattgagggaggaaatgttccacggtggatcatcattatcatctctgtgaactctgtaccacggtagcgaaggaagtgccaaccccatctttttttcaagaacagaacaccctgtgtgcttcaaggaaagtctgggaagcaacccactgggagggaagacagtgcttttctctgggtccccacgctcaggtcaggcgatgcgagttgttacactcgttttcggtcacgctctgggtgctgcggttcacgtttcttttctattatggagttattgtcaccaggctcttactgtgttaaataaagtcattttgcttacgctcaaataattacactcatccaaggcattcttcccttaggggtgttgtttatagttatttgaaaagcacggacatactgagtctaactcgtagatctagtaaatgctgatatcaaaagtgatgttaacaactattcctaagactggacctgcttgg

SEQ ID NO: 299615 - DNA, 770 bp, Homo Sapiens
attttttatgtgttccaacaatatagtagtttaataatagaaccttaaataagtattgctgtcacctccctacaagtaactatgaatacacacagactgctgatggaattacctgttgtgctctatcaagatacagattcatttgagggggattcagtagtcaaccatatgcatggacaacataatgtctcagtcaattaaagaaaaaataccagtgtggtttgagatatttctggatttaaattagcaaaatctgaacattggttgtcacctcttaacttacaccatcatattaaaagagatactctaccaagaaacatgcatccaactggatggtcccagatgttagatactttttcccttggatcagatagccccttataaacagaggtcaaaaatttgtgactaattgggtctgtagctgactccacagcttaagccattgcatctcaacagacttcactagattctcttgctgaagagaattaggattgctctgaattacttaagtagctgaacacggaggcatttatgcatttgctgcctctacttactacacatggataaattcctctggaaaagtgaaacacacttttagaagattaaaaaaacacgtggcctgggtcaacaagttcatcaaaacatctagactttttgatctgttcagttggttactctcaaaatagggttcatagattagagctgtgttaactaattatatgtactgtcttactatgacttagtctgtctgtgctacttgaaagcagttc

SEQ ID NO: 299616 - DNA, 246 bp, Homo Sapiens
atcgagacgtagtagtcgtcaacatatctaatgctacgtgagcaccatactgaaaagttgtcagtttttactttcaaaaggatacccccgaaggcgcgctgttccacacccggcgcaaatttttttccccccctggcccaaaaaatgggagaagctttaaatttttcttcccccaaccccttataaaaaaattatttgtttttttgggggggcacccaattggggtgtttgaaaaatcccccccca

SEQ ID NO: 299617 - DNA, 812 bp, Homo Sapiens
  misc_feature (414)..(427): n is a, c, g, or t
  misc_feature (476)..(476): n is a, c, g, or t
gtttccctaactcctgtcttgggaacattcatggattaatcttgggatggatttcataggtggaataaatgggaatgtcactcttcaatatttctgaaacatcaaatcaaaatacataccttgtagattacctcttacagtaagtgctcaaaatgtgaagtgggaagaatgctgttttagaccctcctatacctcttaattcatgctgttaggtaagtgtgacatgtaaaaattaaatatctcagtctctcataaaaggggcctggtaatactttcttttgagggaggttaggtgacctaatgtttgtgaaaatatttgtgacctataaggattttcataaattaattgttaaaactgaagtatgaataaaaatagagagtcttatgaaaattctgactactgagatggttggnnnnnnnnnnnnnnaatttaggagaatcccttattttaaatttctaattctattaaatttggntatcttattgaatttatagattgctagtaaatattttcagttctaattgacattttggttaattgttttaggtggagctgatagtagataggttaaggggttggggaatcttgtatgaacaattcacaaaaaatgggtggattctgaatttggtaagtttttagaattatgtaaaatatgtcttaaaatcttgagaacttaaaaatttgagggactttttataactgtaataaaaaggggagaaaagggtttgggaaaaagccaccctttctactttaaaaaccttcttggaatataaaacaaacatttcctatgggggtttgtttaagttaccaa

SEQ ID NO: 299618 - DNA, 298 bp, Homo Sapiens
  misc_feature (21)..(21): n is a, c, g, or t
  misc_feature (24)..(24): n is a, c, g, or t
  misc_feature (36)..(36): n is a, c, g, or t
  misc_feature (42)..(42): n is a, c, g, or t
  misc_feature (55)..(55): n is a, c, g, or t
  misc_feature (65)..(66): n is a, c, g, or t
  misc_feature (104)..(216): n is a, c, g, or t
ataatcgtcagccacgtgtanggntgtgaggaattncattanggcaccccagttncttcaattanngtaatgggccttttttaaaaggggactcttttatgggnnnnnnnnnnnnnnnnnnnnnnnnnnnnnnnnnnnnnnnnnnnnnnnnnnnnnnnnnnnnnnnnnnnnnnnnnnnnnnnnnnnnnnnnnnnnnnnnnnnnnnnnnnnnnnnnngggagaaaaaaatacaaacagggccgggggccccttattaaagtgtggaaaaatatataccccgggttttttaaaattattt

SEQ ID NO: 299619 - DNA, 750 bp, Homo Sapiens
  misc_feature (410)..(410): n is a, c, g, or t
gtagatcagcagtccccaacctttttggcaccagagactgatttcatggaaggcaatttttccacggacctgggggcagggagaagggatgcagggagggggtggtttcaggatgattcaagtgcattacatttactgtgcactttattatttcattgtaatatataatgaagtaattatacaactcaccataatgtagaatcagtgggagccccaagcttgttttcttgcaactagacgtcccatctggaagtgacgggagacagtgacagatcatcaggcattagattctcataaggagcacacgacctagatcctcgcatgcacagtccacaacagggttcacgctcctctaagatccaatgctgctgctgacctgacagaggtgacctgacagaggtggagctcangcagtaatgcaagcagtgtgagcagctgtaaatacagatgaagcttcactctcacctgcagctcacctcctgctgttcaacgtgggtgtgggtggctggggacccctgtggtatattatacacccacagcaactctaggagagataatttttccaatataactgcagattatataattaagtcaacaggtatttttcttacccttctatggttattactattccactaaatgtatgaatggcctaatctaattgttgttacatcttggggttaatttctcaggaacaagtaattatcaccaaaatctcattccttttttgaaacggagaacatgaattcc

SEQ ID NO: 299620 - DNA, 808 bp, Homo Sapiens
  misc_feature (553)..(553): n is a, c, g, or t
  misc_feature (704)..(704): n is a, c, g, or t
gtacttcaggaggtctacgcacgttggtcactaaaagtcactgagctcgagaccatgtctgttcgttgtggtcagagcccatgtctactaataaaaacaaatgacggctggacgtggagacaagcgcctgatgttccacctactctactaggctgctgtcaggacaatcactgggagcctcttgtgagagcagaggtgtagtggtgccatagatcgctgccatgactactccattcctggtggcgagagagatcagactctctggtcagatgaatgaccaaccaagtgcagagtcgacattcttgtcgggataatagtacatctgtgatactgtcatgttgtagcatgatgacagcgtgcgtatgaactatgggtggtgcatatagctatgtcatatgtaactacatgatcgtataaactggtgcataactactacttctatgactcctggagatgatcggggccctgtccaccattagaagagatcttacggagctgatgtagttagcagatgatagggtgggatgacatgtgatcaacatgactgacattntgtgtagagtgcttgtttactactactgtgggcgagtagattagagctgtgactcatagtgtcagcctagcagttattagattacttgatctcctagatagtggactacataacacatggaatttgctagcgtcttgcgactcagaaccgnggaataagcatcttctctgacgatactaccgagagagcggttgcaaaccgacggcggccattttatcttttttggttaaggggcgcggacctacgataggcaca

SEQ ID NO: 299621 - DNA, 122 bp, Homo Sapiens
atgagccacacacccaggcaaaagattcttgatgtatctaaaatggtatactgcatgacaacattttggccaaagataagaccacatgtattttgggagtcccataatattataacagaact

SEQ ID NO: 299622 - DNA, 775 bp, Homo Sapiens
  misc_feature (687)..(687): n is a, c, g, or t
cccgcttcggctgcagattcattccttgaacactgacttcacgtcggcggctaatctgggccatatccgagactttcaccgcagacatgctttctgcagactctaatgggtatagcgtgtggcagacctgcctgctttgcctgtgagctatggcagctgccatgaatggcctacagtctgtcgcgactggtgcctacaggggtatcgagcgtgcgttgccttgctattctgcaaagcaggcgccacagctgacatatctgtccggcattggcaccctttcagtggttgctcaggaggcacaatccctggagggccattgtgtgcctgatgagcgcgatgcaagccaggtgagtgatgtgcgaagcctgtatgcgcatgtggatctgctacagcactgtcgattagacatgctggtcaacattgcttatgcgggggggcagacgatcctgacaccatgaatacagcattctgtgtgacccctggcttcatgtgggatgatttcaacatcgtcagactgagatgccactacctttgcttaatgtatggtgcacagttgatgtgaccagctggccaagggctcatcgtggtcatctacttataagagagcccactatatgttgattgccgctatggagaggcgactttacgtgtgacatgctggcttattactgcgcccactagcaatgnaccatgggagcagctggggtggatatttgggcgccgattgtgctacaaactgctgagggacaatcgctagaaggacgactctggttca

SEQ ID NO: 299623 - DNA, 638 bp, Homo Sapiens
gagagtttaattccctctgagaaaacagtaaaacaaatcacactttttacttaagtagaaaaacattatcatgcacaaagtaaaatcatacaggcattctgttaattcaatgtacatttctagagcactgggcctcaatatgaatgcttttagagaataaaatgtagaaataagtgaagattgcatgctagagagccatctgatacctgcttttccgcctccaggacagtacttggtgttagcaggatatcatggcagtcatcttcatctttatttatgcctttcatcctgcacatttcacttcactctcctgcagctgaattttttttcatctgacagcataaggacataaggaaatgagatgcttaacccagtcacttgagctagatctcatattatgatgacattttagatgattcaattaaatgttaaatgtgtttagtattcaattcatactaatagtgtgtgagggcccagaacacagagataataagaaagaaatttagttgatctgagtatagtttcagttaatgaaacttatgtaacctgaaaaatgtaacaggataagaacaggatgacagatagtattattaatgtgcgttactgtgtttttcgaccaagtttagtttctgaaatta

SEQ ID NO: 299624 - DNA, 278 bp, Homo Sapiens
  misc_feature (144)..(182): n is a, c, g, or t
caccatgtctggcctatgcaactctttctaacgcgttgttaccattttacttggaggaatgaaacagaagacagatatttcagtgagatacagagcagatgttttgatgagcaagcaaatgagagcgagagagcagggacagannnnnnnnnnnnnnnnnnnnnnnnnnnnnnnnnnnnnnnagagagagagagaatgggcctcatagtgggcttgtgtgttcaaattggaatgccgaaataaattgcccacagaattaattaaactatggaatcaaa

SEQ ID NO: 299625 - DNA, 294 bp, Homo Sapiens
cgaccatccatatccaatgatctgacctaaacattacccagaatcattgaacatcatccgagactgcggtccttctagctggtggtacttagagtttacggtgccataacgcagccgtacggtgggaggattatatggtgaaatggggatcgccaacatgaccacatacgactgaccgaatactaagctgcattgtgcattttgtaacggctattacactccttaacaattgtaataaccagggacttcactagctgtatgactgttacttgaccgtcttagaagagcattatc

SEQ ID NO: 299626 - DNA, 187 bp, Homo Sapiens
gatctcgctatcgtggtgaattggacctatgtacgacagtcatgatgaccaccaccgccaggctaacctgatgtccagccagaattacaagggcaaaccgagacattgactaaactctagtatcgaaggcatcttcagatggagaccttctcgctaatgctgcgatgacctgcacaccgaatactca

SEQ ID NO: 299627 - DNA, 364 bp, Homo Sapiens
aacaaatggaaatctaagaatcaatgctattaaagcgtaaagttgctaccagggagaactacatgtaagctaaaaagggacattctgaattaagcaattctggaatacaagcatacatgtctaataatattgtaggaaagatgtggactccttaaattccagtttgcatctttacatttggtaaggccagtcattcttgtggtttcagttattgttaatagattaatgacttccacatctttatgaccaataagagctctccccaaaacataaacacatactaatgaataactacagaaaatatatctccatatctggtttattcatggactttactgggcttttttttaatggcatttcatga

SEQ ID NO: 299628 - DNA, 371 bp, Homo Sapiens
ggtagtcccacgtcacggttcacccagcagtcaggaggctcttctttcacccaccagatgaaggctcaagtataaggaggtaagatccacataacatagatacaggcattaccctggcttagaagcttcaagcccccaccacctaatatgtcttggaacagtcaacaggcatagcttctagaattgccacacgttataagtccagttatatcaatgattgcattcaggtaatcgaaagcaatggtgtccctatcaggtatttatagttctctcaaaccagacagatgctatttatcaatcagggatcattgttacaataagcaataatagttgcttataataacatggttagattttcatgggaaaggttt

SEQ ID NO: 299629 - DNA, 287 bp, Homo Sapiens
ctttatttcaatcatatagcgacaactaccatagtgcatatacctcaactgtctgtattagaagatatctgcttattcatgtaatacctaactgctctagtcatactatggacatctaacaatgctcttcctcacggcgtccatcctcattcagcatttttagaagaccaccatcgcgcagatacactacccagtgtagcctgatacattatggttggatgaacattcagtgcaggaaactgtgattagctatgtgtctatgtatataatcttattctgtagtcctc

SEQ ID NO: 299630 - DNA, 421 bp, Homo Sapiens
cttgagtccatttattacctctcttaccaattagctcatatctttgtatatacatttgtataccactcgaaccaaacgttggggctactcccttaacttcatgggatatgtaattggacgttgcggtacttaaccgcaggaacatagtagtcaaagactcacacaatgttctgggaaattgcacgtataataggcctattgatagcaaagtatgatcagcgagtcgagtcactttagggctgtgctgccccttatacacattgggggtatactgtcttgctgactttatatgcaggtatactaccgtaccaggcatactctttctcgacaacttacaaggccttactgcgtaaacaatgtctaaatcttataccccgttgaccgtcaacggtcatgtctgtgccaactgattgctgacgca

SEQ ID NO: 299631 - DNA, 105 bp, Homo Sapiens
ccaggatccgtcaggagacccctcacaccctaactggcccaaagccatgtaaacttctctgtgtataccgatggaatgtcagatttcaataacattcctgtacca

SEQ ID NO: 299632 - DNA, 582 bp, Homo Sapiens
  misc_feature (501)..(534): n is a, c, g, or t
gagaaagactacattcacataacttttattatggcatattattataattgtattttattattatcattaatctcttattgtacctaatttataaattaaactttaggataggtatgtataggaaaaaatatatatattgttttgtactacacgtggtttcaggcatccactggggttcatggaatatatcccctgagaataagaggggactaccatagtagttttttcacaaattgaaataatcaggtattagtttgctagatgataaattctgaacaaatatgaccatataaagcatttacatttggacatgttttctttagaacttaatttattcagcatattacagtaaccattttagacattgttttccaattggtatatatatattgtgtgtaaacataagatgtagatacacagtttgagcatcccaaatttgaaatgttcgaaaatcccaaactttttgattgctgacaaggtgctcaaaggaaattttcatcnnnnnnnnnnnnnnnnnnnnnnnnnnnnnnnnnngtgattaaccagtaaagtatatatgatgcaaatactccaaaatcagaa

SEQ ID NO: 299633 - DNA, 366 bp, Homo Sapiens
aatttcttcagcaatcaccagtagaccacaggaatttaataccttgccaccaaaacttaggcaaattaagtccccagctagaaggagctacactcaatacacagaaagacaaatgttaaggtgaccagcaagtgtaaaaagcaggcagagaagggataagtcgtcatgcttgttgccattatggagagggtataaccttaagaagttgctaatcacatttctattgatggcagggaggagcacctgactttatgcatgagctgttcatgtagttaaatgactgttattcattagaaatacagtcactctgtaaatgatttgtaatgaacacttaggcatacgctgcctggtacatctcctgatagc

SEQ ID NO: 299634 - DNA, 341 bp, Homo Sapiens
  misc_feature (187)..(292): n is a, c, g, or t
caaagaagtctcctaagagccaggctattagcactatcctccctttcaagtgctatacagtgatcaggtgaaactggagaacatctgagttgggagagaattctaagatctcaagtgtaaaagcttaatttcactgactaaaaactgaagtccagaaaaggaaagaggtttttggcaaggggacacnnnnnnnnnnnnnnnnnnnnnnnnnnnnnnnnnnnnnnnnnnnnnnnnnnnnnnnnnnnnnnnnnnnnnnnnnnnnnnnnnnnnnnnnnnnnnnnnnnnnnnnnnngattgggaatcttgagaaactaaaagaaaagggcaaatacttaaaaaaa

SEQ ID NO: 299635 - DNA, 117 bp, Homo Sapiens
gtttttggacacatagtgcctaaatgtaacattgtgacatcagtaactgaactggggtagagacagagttttatgagagcatagttttcttactgcttttgaaattaagctcatgca

SEQ ID NO: 299636 - DNA, 243 bp, Homo Sapiens
ctgacacgaactaccatgcactctgcacagctgtcttcttgcgttatctgccatgattcactgtgtcattcactatgggagctttggcgttgtcctacgtgactgctagtgctggcggatcatctgccacgtgttctataccacatagagatcatgacttctgagatattgcaatcataattatcctcgctactccagcatgtgctgaccattgagtaaggctgctgagagctacttattgcc

SEQ ID NO: 299637 - DNA, 423 bp, Homo Sapiens
cggccaactgctcacttgcactatgcactgattatgtgctacgatggcatgtgtgtgtagtacttcaccctgcctgaacgacatttggcttcgtgtgctttgtatgctcctgtcctcaagacctttgacttgttgtgacaggaagctgccaatcgtgactcttttctatctctcatcaggaaaggctgctatactgcatgtgcttgcgcagcttgtgacggtgatcagaacctcgcctgacaagcccatccttgctgccgcatgctttaacgctgacccagacctgttcagtgtcctgtcacacaggactagaggcatgtgaagcttatgtacagccagaatggccgatcaggaaccttgatgatgacttcaattacatatggaagaactgatgaccagatcttctatgcttgcttggaatct

SEQ ID NO: 299638 - DNA, 290 bp, Homo Sapiens
gtgcagtgcactaccctaccattcgcacagccgtctccctataccattcactatggttgcctgaggagatatcgacgtcctacttctcgtcagcatgatgcgtcctagcaggacttgactattcgttatcgcaagactactgacatgcagactcatatgactgtacatagatagaactcatcagatctagacggataatcctgagctacctcagacgcctaagttatggcttaatcgcgctcaaataatgccatatctgccgcctcgtactcattggacgatgacaatat

SEQ ID NO: 299639 - DNA, 328 bp, Homo Sapiens
gttcagtgcactaatctaccatttgcgatggagtctcactatgtcacccagtctggtgtgcagaggacagacctcgtctcactgtgacctctgactcctgcgttcaagcacttatcacacctcattctccaacgctctggaattacagacgtaagccactatacactggagaattctagcatgtctagcggagagggagactcaccacgtcggccaacttagtctcaaacttctgacctaatgtgatacctgctgcctcggactcacagaacgatgagattaccagcctgaaccaccgtgctcagacgccagattcactatgaatttc

SEQ ID NO: 299640 - DNA, 342 bp, Homo Sapiens
gtgcactgctctacatgacaatgaggagacatgtctgactatgtactcctatgtgattgccagaggacatacttacgtttatgcgcaggaactgcttttgtttgctagcaggtattaacgccgcatttacagaatgttgctcaaactgctgatcgaggtgactgtctgttggcaaagctcgaagaactagcggatgaagggaaggattctgctggccaacagagactcaagcgtgctcagtctacaagaatctggagacagagctctcacagcatggtcagaatactcgcctgagccagagatgctccacggaatgttgtcatgcagatccgcaggaatgag

SEQ ID NO: 299641 - DNA, 133 bp, Homo Sapiens
atgaactgagctaattatgggctcacacattgtggtcagcctactgcctctgagaaccacacgactatgcctatacctgcactactaacaagacgcctcacatgacgtatgatcgatagaccacatgagtcta

SEQ ID NO: 299642 - DNA, 253 bp, Homo Sapiens
attacttgttcttacaagcccttaacacagcggcatacccacttgatccaacatggtagcatgatgaaattccgacttactccttgtggcctgcctacttcttcttatcactacacgactatgactaaccttgcactactcaccagacagcatcacactgcttctgatctatcgcactcatgactctcgacgatgattctggctgagtcatccactagcttaaggctaatggcgctacaataatatgtatcca

SEQ ID NO: 299643 - DNA, 337 bp, Homo Sapiens
gccacagtaacgccaatacaaaggatacacgtccgtagtaagacactgcgacaacgtcagcattgtccagaaccctgcggcttgcactggctgtctgtactcctacgatcggtaggaacagagagccaggaccgaatcttcttatacacgcatcgcatagcctggaacatatcacatcaatatccaatgctaaacaccaatggacaactgtctgctgatgcacgcctacagcccgactgatacccgtgcacactgtctgcatgtagatacggacacctgcgcgtacagctgcagaactgaggatatgctaatagctatgcactcgttgctcagcctg

SEQ ID NO: 299644 - DNA, 226 bp, Homo Sapiens
atgaaatgcacttgagctctatcaagagagcgagagacccagtcaaagcaacatgctctgttgatgacctccagacgtgcaccttgtgaccagcggacttcctaggaggggaacacaatgatgactgagcttgcactaatcacactgcgtctgagatcgatgtctcattgatccttctcatgagtctaaacgattattctgacagagcctaacactgtcggctgca

SEQ ID NO: 299645 - DNA, 241 bp, Homo Sapiens
atgaactgcactaacgagccagctatagagtggtatgcccacatgatcctacatggtgacgtgacgaccgcttggcgaacaccttgtgcgctgtggacgtccttctaggggtacactacgatgagtgagagcacacccattacaatacggatgacactgagtctcaatcatgtgatctcatgacgtctaacgatgattgtagagaaccatacattgtgaatgcagatggctgtttacaaac

SEQ ID NO: 299646 - DNA, 420 bp, Homo Sapiens
gcggacggcgcgtgttgcgcctgcggctgcttatctgagggctgaatcccgtgatccacgtcccacggtccggacccgcggtcgagttcggcaccatggttacctctgtcaaagtgactgcgaatggcgtatcagctgcattaccagtatactggatagggagatcacgcatgcctgctacttcctgggatgatatgaagctgagagactgattctggacctcagcttaggaaccttaataggaagctctacacggtggtcggctgagatcctcgaggctatggacattctaggccctcagatcgagagttcttcagagacttttctgaaaggtatgcagaagatgctgttgacatgatgaaggcgctcaaggttaagaaggtttctatgctgctgagcagtgatggcagcataagctca

SEQ ID NO: 299647 - DNA, 413 bp, Homo Sapiens
  misc_feature (122)..(215): n is a, c, g, or t
caaaaaacaatttgtaatcactacagtgccaatcagggatagtgatgagtgaggtgactggtctagagaaactactactcagctaagttgcatagatggggaggagtaaggtggccaaatannnnnnnnnnnnnnnnnnnnnnnnnnnnnnnnnnnnnnnnnnnnnnnnnnnnnnnnnnnnnnnnnnnnnnnnnnnnnnnnnnnnnnnnnnnnnnagtttgcctcgcaaagctgatgtatgaggcttgaacaagataacttagttaaagagtttatctcagtgtgcggcacggccaacattggtggatggtggctgtgagtgagctcctcaggagatccagagttcagcctctgctttctttagtcctgtgtgtgaaactatttttaagagcaccacactggcctctcttaat

SEQ ID NO: 299648 - DNA, 363 bp, Homo Sapiens
ggcacactgaccgaggaggcccccgtgcccaagcgcgccacgcagaccaacgagagcaccatgccagacacctacgattcgcggacccagcttgggggcccagaagctgacgaatctgatgagactgacggcaagttaagccttagcccgaatgcccacccctgatgacgacactggctgagcctacctcggcacctgtgcgtacttttgctacatagataatgctggtcactcatgtaaagtgcagagcacaccaccaatgtaacagatgaaacagcttgagggagggcccagtacccagttcagcctctagtgagtcagatcacaattcactggccgtgattatacaacgacctgactgga

SEQ ID NO: 299649 - DNA, 366 bp, Homo Sapiens
aagttttcattctcattgcagccatttattgtgtattgctctgtaatagatgctttcaaatatgttattttatctacccctcacaacagcaactaaccagcatcaagaacaggtaccagattataaagatttgataataaaaacagaatagggtaaaccttgcaggcaagcgggaacatttcagaattctctatttatctcctgttcactgtacagctttgataattacctgaagggagaatgatttgaacaccgagacatctgtacagctgcttcaaactataatgtgataaaaaattactgtacagggatgtattacttgactacttatgttttaatttaatcccttgtaagatgtaagactgc

SEQ ID NO: 299650 - DNA, 254 bp, Homo Sapiens
cgtcctgggacccacccgcctacatgaccccagtgctgatcacttccttgctggtgcaccattcgctatggctatcttggctttagctcaaatctaccagacttagcccagccttctggcctatgcacttgctattacacagattgtactgctggtcgctttggctcatcctgcaggcccatgcttttcatcattccgaactcgggcaactgaccactcatcgctgttacctgctgctaccaacacggctggag

SEQ ID NO: 299651 - DNA, 252 bp, Homo Sapiens
caggctcgtaacgtcatacacttatactttaagagcaggatctcggaccatgagcgtgcagttggatactcctatgctcatctatgtatctctaggacatgtgtagaatacggtgctaccatatataactgtagattcttatatgaaagatatgctcgcaatggatcatctaccagtggcattgtatatgacctgtctacaatatcgaaccatagtacacaacgctcatcatgattgtggaagacatttgac

SEQ ID NO: 299652 - DNA, 305 bp, Homo Sapiens
ctttcttgcttaagccctctgatctggaggaagtgctctagctttagctgaacttatagcttttgcaagcattacgctgggagatacctgagggtgttgtcataaatgaagggtgcacattgacagatctgcttcgacgtgttcaatacctgtcagtgttatagatgaagtgactgtagtatttggtctgggatctatacgaaagcatatgcagtcaaccacgatgcacatgttttgaaatgatatcaccataatcttagagccgaacgtcacacagacacttatgctttcactcaagtgactga

SEQ ID NO: 299653 - DNA, 267 bp, Homo Sapiens
gtatgaggaattcggtcgcacacttcccgctagtgcgctggctgaattgactatagtgactgaaagtctgcatattcagggcgtatagtccagacatgaccatatcactaccctagacctggcgctttgcaatagttgagctgcactatgtctggcagatatataataagaatggacagggtctggaggttaatttgcagttagacatttgttatggatcactgatgatagatactgagaggatgatagaatatatctctataggat

SEQ ID NO: 299654 - DNA, 638 bp, Homo Sapiens
  misc_feature (88)..(124): n is a, c, g, or t
  misc_feature (566)..(566): n is a, c, g, or t
taggcacatgccatcattcctggctaattttcaaactttttttgtagacacagtctcactttgttgcccaggtgggtgtcgggcaatnnnnnnnnnnnnnnnnnnnnnnnnnnnnnnnnnnnnngtgtcaccacacccagccttgttacattctttctactaatttagggtttgatttgttcttgcttttctagttcctggaggtgcatcattgggttatttatttgaagtctttctactttttaaaaaaattttatttttaattcttgtgggtatatagtaggtatatatatttatgggtacatgagatgtgtggatacaggcatgcaatgtataataatcacatcatggagaatggggtatccaccccctcaagtgatcattctttgtattacaaacaatccaattatactattttagttattttaaaatgtacaattaaattattattgactatagacaccctgttgtgctatcaaatagtaggtgtcattcattctaactatttttttgtacccattaatcatccccaactccccttacctatccccactaccctttccagnctcttgtaatcaaccttctactatgtccatgagttcaactgttttgatctttagatcccacaaataaggtag

SEQ ID NO: 299655 - DNA, 117 bp, Homo Sapiens
caactcagccgggtgataaaggttaattaacatcattggtaatcaatgaggttgatagtgtgtacccttgatatggcgtgatggcaaagggcacttcatctcttgtggtctcctttc

SEQ ID NO: 299656 - DNA, 581 bp, Homo Sapiens
  misc_feature (497)..(498): n is a, c, g, or t
  misc_feature (510)..(510): n is a, c, g, or t
aattcattgttttctttgaaagatggattctcttatcttctcattccttggagaagcagcgcttcaggtctgtccatggtgtgaagaatatcctggccagagaaaaccaccatctggtgtctttgtattccagaagggtgcggttttgttgttcagatgagcactgcctacttcctcaccatgttctgtttatccaggtcacatggtttgtatttcacatgtttgtttgtgggcaaccaggatggattctttctcacaaccagaaaccccctgggatgaccccccagcctggctgggggtgtgtaccagtgtgctctcctgaggacacaggaaattgaacactaaatgatgccccctatgctagtctttcgaaagacaaaaataaatggataatctgcccacccggcttgttatcctcagctcccctataatgtggcagcagataagtagcctcccttgcatacagtgctgctacttcatgtctttgaatcctgcanngatgagtggatntgagctttcatagcattctggcatccctgatttccctcagctcaatctttggcactccacgagaagtcaga

SEQ ID NO: 299657 - DNA, 587 bp, Homo Sapiens
  misc_feature (493)..(493): n is a, c, g, or t
  misc_feature (513)..(513): n is a, c, g, or t
  misc_feature (520)..(521): n is a, c, g, or t
  misc_feature (533)..(533): n is a, c, g, or t
tatccacttgctaggatgcaaacacaatgcatgtggcaaattactttatatgctgataaagcctgtgttttggaaaaatgttggaatgtttgtatccaaaacattgttttgaatcaagccatcttaaatatgcagattatgaataggaagtggtatcctgaatagcatcgtcaaaattccaggaagggtcaggctgcaaaatacaagacatggtgagtctataattaggcatcaacgctattttatctgattgagcatctccctgggcttggctctggcattaatcagagaacagctctccagcccaaaggagttcacttaagaagatgacccaggaggcaaatctagctctctcagaagccaagacagagcaagccctttacttattatgttgtttgcttcatggaataaggcatagaatttctgctaaatgaaagcaagatacagcatttctaataaaatagagtctaaggtttctctattttttcagaanaaattctctcttgcttgaanggagttnncaaactacacanatgcaccaagtctcaggcaaggcattaatagtatatagggtccaggaaactgca

SEQ ID NO: 299658 - DNA, 535 bp, Homo Sapiens
gaaatccaagagtgaaagggcagtatcaggtgaatatcaatgaatcacagcagtgtggcttttctggtgggctgacagtgtactcttagttactaaggtgaaatcctatttgcagagcaaagagaaatccaataacaagttagcccttcccatttggtgcaaacagtagtttggcccagggacctcctttgctttttgctccacattgtgggctccagcatctacctcaaggtatatgtcagtttgccaatgagtaaacagaaactgccagctcatatgatacggacaagcccagcctgaaacctaggagtcacttctccggtgggaactgcaggaggcacacagaccctgaaattaaatggtaacacccatgttctcatacaccctggtcatgtatgaaaggtcttgccctttctccattggctagagctagtcacggaagggtggatacgtctgcagaatctgcttatctgctcccctgcttccacctttgtcctcaccgctcttccccgacactcctttcttaacccagtat

SEQ ID NO: 299659 - DNA, 499 bp, Homo Sapiens
aaggaattcaagctccaaagagagcagggagaacacagactggagccagggagaagcgaagaagggctgggaactggcatgagcactccaggcactctgttgggcaattatggtatctcatttattctcacaaccccacgagacaggggctgttatccctgttttacaaatgaaagagcggctcagtttatcaagctggtcagtgatgaggcaaagatgaaaatccaggtctaggcaaccccaaagcccttgctgggtcatgagccccgagacaatgtgctgtgtcacagcactgtcatttagccacccaggaggagcggaaatgtctctcctgagggtccaaatcaacacggtcaaggctaacagggatcaatgcaaagtcctgattgtcaggaagtcatctgcacaagtgcagaatggagtcctggcgaatggacagcagaccatcatgatattgtcatcatgcgactgtcactgccgctctctttccactttgcag

SEQ ID NO: 299660 - DNA, 152 bp, Homo Sapiens
cgacttccatctgtgttgacatttgggaattttgtggttgctctttctcaagtggagtggaaatgcttaaaacagaatttacacttttaaatacaaccaaggctctattgcattgtgattcactccaggtctgaatactttttctttggctt

SEQ ID NO: 299661 - DNA, 243 bp, Homo Sapiens
ctaattaattaatatgtttttaatatatattttttatttcaatagcttttggaatgcaagtggtttttgattacatggatgagttgtataatggtgaagtctgagattttagtgcactggtcacctgagtagtgtacactgtactcaatatgtagtctttttaatccctctcccctccttcacttgtgagtctccagtgtccattataccattctgtatacctttgcatactcatagcttagc

SEQ ID NO: 299662 - DNA, 353 bp, Homo Sapiens
ctttgatgtaaattgcaagaacacccataacctcttattctatgtacatttcttttcattctcatcggatgcaccaaacatgcagcggtaataagccagattttactcaggtgtgtgagagcacttgccttaagttgacttttttcctagtgtgtatatatcattagctactatgaacacagattgatctcagaaacattttagaagatgctcttgaaccacatttttaagcactttcatttttataaaaattgatataacattacaccctaaccctgtcatacaacttatcattttgatcaaacaatatactaaattgggatttttgtttttacaagtcattgctgttctgg

SEQ ID NO: 299663 - DNA, 343 bp, Homo Sapiens
cgcgagatatagactgatatatttcatattgttagacttctgttctgttactctgtatctccaaatttctggcctcgttctctgctcttatattgcacttcataagagagattagtagctttccatgactggaaatcactggtctccacatcacttttcactctctgcacttgaatgtatccccactagatatcttcttgctcaactgttctttttcatatatgtgtgctattcaagtctttaactctttgatctctgcaacaggtatgtccacatttattttggctcctgctaagactgttcctacctgtattgcacgccctttccatgggttttcagtccc

SEQ ID NO: 299664 - DNA, 615 bp, Homo Sapiens
  misc_feature (79)..(245): n is a, c, g, or t
gtttccagccctatccaccactggcttctgatcggctgctttttcacactgctgttcctgcaaggctgtgtggccccannnnnnnnnnnnnnnnnnnnnnnnnnnnnnnnnnnnnnnnnnnnnnnnnnnnnnnnnnnnnnnnnnnnnnnnnnnnnnnnnnnnnnnnnnnnnnnnnnnnnnnnnnnnnnnnnnnnnnnnnnnnnnnnnnnnnnnnnnnnnnnnnnnnnnnnnnnnnnnnnnnnnnnggggaataggggatgagggctccattatcactgttgggacctgggcttgtgggagctcaggagtcttctcagacctcctcattgctgtgccaggtggaggaggtgtttgtatttactgagagcaattgggccaatggcccatagtccttgagcacccagctgacccaggccacagaggctgctcatcttggtctggtgaccacaggaggctgtggctgttgggatgacccttcccagtgttgttaacaacagtcccaggccatgtcctgctggccttgagttcccctgtcctcttgtgaatgtccctagagccatggcctcaaggttcctgaagttcccaataatgtgacatgctgtccagaccccactg

SEQ ID NO: 299665 - DNA, 640 bp, Homo Sapiens
  misc_feature (345)..(346): n is a, c, g, or t
  misc_feature (443)..(443): n is a, c, g, or t
  misc_feature (519)..(519): n is a, c, g, or t
gccaacagtgactacatctggagggtggaactagggggggaatcagggactttctcatgtctatttaaaattattttgaataaagattatatttatctgatataaaattattaagatataaaatagtataccatggaaagtgtcccttctcgctctgtgccccagatactctgtgttccttcccagaggcaaccatgattaactgggtctggcataactcccaagatactggatgcatgtaaaaagcaatgcttattttttcctgggtttctacacacaaggttgtccattattgtcactttttaaacacaaaaagtttaagagaacaacagtggtatatgaatnntaaaagagaaattaagacagtgagatgtagataaagagacagggtagagttctcactttctgggctaatcaggcattctatagaatgtacgtaaaanggaaccagagtttaagaactctgtgctatatcatgaaataacttgatgtttcaaagatttgggactattgacatantttggattatataggctggacttatgtagaagttactttggtttaaaatagatctcaattccctttaaccttaatagacttagggaccaaattatgggtagtggcttgcgttaacataaag

SEQ ID NO: 299666 - DNA, 618 bp, Homo Sapiens
  misc_feature (445)..(445): n is a, c, g, or t
  misc_feature (453)..(453): n is a, c, g, or t
  misc_feature (460)..(460): n is a, c, g, or t
  misc_feature (476)..(476): n is a, c, g, or t
  misc_feature (522)..(522): n is a, c, g, or t
ctggtttgcagaggaagtgggacacttctgctttgtacctgcaaggatttctttctgtgcttttcagggggagccaccacctttgagcaggggataatagtttcatttatttcattaggccttgcctcgtatgtcactagacactcgtctagtcccttgggacaaatcacttgaggccatggaattcaaagaccttcccaaaagtcatcatgtagcctgtccatggtgacatttgctagtagccactattttacttgcagttaactttccgggccaggcattgattcatgaagagggtgaggtgttccagacagacagactcggagtctatgtggttcggctcctggagtgtgaactgggtaaggcttggctgcctgctcttcgcttctcctgcaaacaccagacgtcgccctagcaaagtatttaggcttgtacccagcacggncactgcangaccagncccaccatggcatttnctgtgattcaaaggttgcacatttcttccaaatgaggggccacaanagggccctcaaccgcaggtccttgggtacgagtgccttccctaaccagtgtgcgaattcggtacgtaaccacttcaagtggaagttggctggtggg

SEQ ID NO: 299667 - DNA, 304 bp, Homo Sapiens
gaaggaaaatgcgttaataccttattggaattattatttttttggaagactattttttatattcagaagaagtgtcagagtcagcagaaagggattatttctccatttacctacaacaatggtttaaatgactggatagatagaaatctctttcaacttaactgcttagcacattgcatttttctctgggtcatgttagttttccaaaggattactgactttttacctaatttgctaagggatgtcaggccttaatgacatatttctcctcaaatatggctgtgttttgacttccaacaatgag

SEQ ID NO: 299668 - DNA, 626 bp, Homo Sapiens
  misc_feature (604)..(604): n is a, c, g, or t
cacagcagatgagcattgtctgttgttacttcttcacaccaaatccacagatgcagagcaactgtgccgctcttccttctgcacagtccggaaggccgtctagaacactgggaatgccccagcagaataagtttggcacccttccaagctagggttctctaaatatttctgcaacatttatttagttgataaaaactgagtacctcttaatgttcaaaatcagatttattacatattattcttttttcttttctacggtaaattgtcaacttgaaaacatgctattttttgactttagcaattaattgaaccatttttaaaaaattgagtaataactgacttattcccagcaaataatgctctcccaatgcattgttccatgtggaaatttcagccgactgtcgctgctgaccttacacagctgtgaggtgaccagactcagggtggaggtgggacagcacttggaccagaggctggagtgagaagcagaaccaatttgtatttaacagcaacaaaggaatcatatatagaaacctgagtgaaataaggccataattctagggatattatagcaccgctcattgccaccacctccaggcactgnctggcttgcctcgggacacaag

SEQ ID NO: 299669 - DNA, 262 bp, Homo Sapiens
ctctattatagagttattcccattctatgaccattaatagtggctctcatagtctgcttagtgaacatgggactacacatgtgatgtaacttacacttcatagcgcatactcactctgggcctactaaccagacgcactctccatgtaccactgagggcccgatgtaaccctggaggccgcattccatatggcactctcaggactctggcaagagggcctttccaacagtgttatcgtagatcttatcttagaggtaccaac

SEQ ID NO: 299670 - DNA, 273 bp, Homo Sapiens
gagagtttaaggcatatgctcctgtgattacggatgctgagctgtcccatcatcatcagtgagagcagctatagccccaccatagcctgcggtgtggttcagactctctctcactcgctacccacaatgcgcgccctgtatctacttgcgtcatctggtgaccaactatgtctgtgctgctctacagcactctgcctcgaggaactgactcttagctgcaggacagtctactcgttggccctattctgggcatcccttgggtctctgtaggcc

SEQ ID NO: 299671 - DNA, 641 bp, Homo Sapiens
  misc_feature (596)..(596): n is a, c, g, or t
  misc_feature (627)..(627): n is a, c, g, or t
gagattataaggaattggctcaaatgattttggaggttgagaagtcccaagatctacagtcagcaggctatagacccaggagagccaatggtgtggttcaaaatctgacacactcactacccacaaagagcccatgtatcagcttgaatcaaaaggtaagaaaaaggtggatgttccagctcaatcagtcagtcaggaggaatttcctcttatttacaggagagtcagcttttttggtctattcaaggtttcaattggttggatgaaggccaccacattagtgacagcaatctgctctactcagtctggcaattcaaatgttaatgtcatccaaaacatacttccagacaaacccagaataaggtttaacccagtacctgggcaccttgtgacacaacctcggtgagacataaaattaaccatcacagtctatatcaaaaatattctttgtgaactcagtaagtgccgtgcactattctagaagttggaaatatattacagcagaggaagcaaccgaagaaaaaagtctgctttgttgtagtttacattctatggaggaagatcgattatgtgtacacattaagcatgtatgtatntatacaataggagctatttaatatgtgtatntataaatagagttt

SEQ ID NO: 299672 - DNA, 536 bp, Homo Sapiens
  misc_feature (359)..(359): n is a, c, g, or t
cccgtttctcctcagccttgccagtatctgttatttcttgactgtttaataatcaccattgtgactggcatgagatgatatctcattgtggttttgatatgcatttctctaatggtcagtgacattgggctttttttcttatgtttgttggccacataaatgtctcctcttgagaagagtctgtttatatcttttgcctactttttaatggggttggttttttcttgtaaatttgcttaagttccttgtagattcttgatattagacctttatcagatggataaattgtgaaaattttctcccattctgttcgttggctgttagctctgatgataatttgctttgctgtgccttctttntatttggtttggtgttgttgcaattgcttttgatgttttcatcatgaaatgtttgcctgtgcttatgtcctaaatggtgttgccccgatttacttctagagattttatggtttcagattttacatttaatactttagtccattttgagttaatgtgtggataatacgtaaggaaagc

SEQ ID NO: 299673 - DNA, 236 bp, Homo Sapiens
aggtgatttacgcgctcggccctgtacttgtgcactgtggaccatactgtcaagaccttcgagaaccctctgaggaaagacagtcgctcactgtggcattcgatgcttgtcttaaacactgccacagagatgacttatttgacagcccatgccctggaggatcgctactttatgaacactgtcttctgaccgctgctcatactgtggaaagcttcagggagccgacaacgcatgtc

SEQ ID NO: 299674 - DNA, 327 bp, Homo Sapiens
agtggcggtcgcctgtccgcctgttacgtgagcactcggaggccatgacagcaagacattctaggagcgctgtgaggacagctaatcgctacatagagccattggaggctttagctaacttctgcctcagcgaggactcagataagtgcgaagaccttgaaatgtgacaacattttcgacaagctccagaagtagattaccctacacacgaacaactgaaccgacccagctacgcatctcacgatatctgtgactcagcactagcataacctgctaagatgaaagctcgcaatgatgcacagattactgccaacgatgacggaccct

SEQ ID NO: 299675 - DNA, 626 bp, Homo Sapiens
gcacgagctttgtagtatttcctgttcaccgtatcttattcatatttaccgcccacttgcaaggatttccattaaattttaaagatgagttaacatcttataataacattttcccttcaagttgaatcgtcacctttttgaatggagtgtgtcattgaaagttttgaaaagcatatctccttactagctgtgtaacttcaagtaattagttgagaaagaatggtgagagagggggctaaatataaacatacgaagaggctttatataccactctgatgaattttatttaatactaaagcctgtgaactgtcgaaggatttcaaatgataaatgaacatgagatttccatttagaaagatctttctggtatcagtggaaactcattacaatgctattgcagtagtctgggcaaggaagaatgcacacctaaactaaatcttccagagttatctgatactcgagtggttgatggaagaaagaattattactaaagggatgaggagctagggaatctgatggaatgtaactgctgacttaagtcagaaattaaggcactgcgtgccctgtcatcacatatgtggtcataattttttaatggaagttgtgtttaggtctttctaggcctg

SEQ ID NO: 299676 - DNA, 277 bp, Homo Sapiens
gtcaaacgcaacgcggtgctctgccgatggacctatgtaggcgatgtaactaacgccgtatacaacactgcgaaagtaccagataacagacttgaacagcaccactaatcgctacaatatgtccattaagcgacgatacacgccaagcctattaagcggcacgcagttcaccgatctcaaactcacgctttcgcactatgaccagcagaagcattgccgatatgccactagagaatgcctatctcaggtcacaatgggcatccacacgatcggcctc

SEQ ID NO: 299677 - DNA, 267 bp, Homo Sapiens
cttgaatacagataagaacatatgctttcctactttataaactcttagcacgttccacattatgtgagctgagtgactcagagctgagctggattactggccaaagttagcctgggaagataaagagatgtttgaggtacctcacacaaaattaataagctgatgtggtcatagatatgtttccagttgaggccctcacatgaacccttaactgaattaaataaaactgggactagaaaatgttgacattttctgcacttccccaac

SEQ ID NO: 299678 - DNA, 590 bp, Homo Sapiens
  misc_feature (505)..(505): n is a, c, g, or t
  misc_feature (513)..(513): n is a, c, g, or t
cacctctctgctttaatgacgccattaggttttttcatcctgtctcccatatcttgcttccctaggctatttctgaggcatcaccccttttctgctgtattgctttcttctgccttccctttgaggcttttgtcttttctgtacttccattccttgcagcctctcagacctgctgagtccaggttgtggagtgatagtgacttcaggagctctgagcatctgtaggaagtaagtacaacctgtgcagacttcatggctacaagagcctccaaaatccaggaaagaagcagggcccaaggcatgtccactgctgcttaggtgtcctcattctcaaagggttcccagtacaggagcctgccaggcatgccccctcctttgttatttatttcaagagcataggcaattaccatccaaatgcaaagtgagtgagtggcctctactagcctaggaaggaatcaggatggcggaggcagagcaggtgtagtcaaagcttataggctggcangacctaangtgttcattggttctccttctgaaattaccaagttttaatgtcatgagcttcagagggtcaaggtttccaagctttt

SEQ ID NO: 299679 - DNA, 339 bp, Homo Sapiens
cgaacatttattgataatgctggctatgagattagtgacaagcgaatcggagacgtgaataccatggatgctgaccagacacacatgtcacagcgtaacgctgcacctatctgataaggcttttgcgctgtacgaacatggactttgaagtagctgcctaggcatatctgtacctgttcacatacgcacctataggttacaggaatctgcattatcgatttcagacaaaggaccagtgatccgcacatgaccatgttgttttggtcctgcatagcatgtgcatctgtatgtacactatcggatctggctttgcgctggacatgggatcctatgagacag

SEQ ID NO: 299680 - DNA, 307 bp, Homo Sapiens
gtcacctctatttccctgctatcactctgtagatcgcattattacatgggtgtgtttcgccgagatgcacacactagagaggttgctcatcgcctgtaaagatcatgtagaagagaaagctgaaagcctcggagtggatggccttggctcaccatcgttacaagagtccattagaggaccatgtcacattagcgaatgcagtaactcaatatgcaaactcatgtgctgctgatgagtcatgtggcaactgtttgtgaaacctaaggtgaaatggccgtctgctgggcacgacaggaacctgagagat

SEQ ID NO: 299681 - DNA, 262 bp, Homo Sapiens
cacacgctttgatttgcgcacatcttgtgagccctgcggtcggcgctttagtccacggacctaattatgacctctactgctcatggggcactctgctaatgcctccaaatgctgacctgctctctccaagtttgtgaaagattatcctattgggatattcaattcttatgaactggtgaactcaactatggctttttacataactacacgatcacgggccctatgcaacccgtgagaaatcctcctgacaatatcaaacatt

SEQ ID NO: 299682 - DNA, 342 bp, Homo Sapiens
caattgtgtgattattttttcccccatggtggttctgatggtggccaccgctggacaagcgcactctctgagatgtggccatgtccctgccgtgctaacaggccccagtgccagtgcgccctgggcttatttgtggcttaaatcatctcagcaccctgaattcttccctctggagacacgctcggaaccgtccccccaattgatgacattgcagctgtcatgcaagagcttgccttcacatctctcctgtggaacgtgacagttttctctgtgatggccaaattaattattagaaatggtttgctagcagacagttggatgctgattacgattggaacctta

SEQ ID NO: 299683 - DNA, 338 bp, Homo Sapiens
cagcctgtcctttgggaagaaacactctgtcaactgtcctctctaccttgtaagcctgcctggcagggaccaagacgtaagcctgcacccattatcaggtgtctaacaagttagtgcctggctctgcttttaggaagaggtaaatccattcaccttcacaaataccatcccacccatcgtgaacgatactctttcactccatttccatattctgggttactcaattttttacaagaatcatgatgaccttaggagtcctgggtcaaatgggatccctgagctgccaggcaggggcacaaaccacaaggaaacccaccttccatcccaggcttctagaa

SEQ ID NO: 299684 - DNA, 399 bp, Homo Sapiens
ctcttttttgtactttttaactctctcgttagagatgaccagagctggggatgcgggcacctgtcttccaggccctcttgctgtgtggccgcagactggtggttcagcctcttaactcggacatgaggtcgaataatctgttttggtttactgctatttctggagaggcgcggagctgaaataacagagctgttgaaagggctgggaattctgcgaggctcactggtctagctcagtatctgcgttcttaaaatggaacctacttcatgaggtctttggggagattgagacttggatataatgtgcctagcacttagtcctccgtaaatgttcactcttttgtgatcattgtgccttctgtgatttatgaagtgtctcttctgagttaattcttttaaa

SEQ ID NO: 299685 - DNA, 219 bp, Homo Sapiens
cgaacgatttgaccaagaaatctatttctaggattgccattacaacagcatacactcagctatcgattacgcgaatggcgcctcactggtcagttcttggctgatgtgtggtgccaatagcctcacggtcatgaatgctatgtagctgatcttaccacactgtgatcctaaagcctggcgaaacacgctactgcccagacatgcagattatctcggtgg

SEQ ID NO: 299686 - DNA, 373 bp, Homo Sapiens
tttccttctagatgttgaatgttttaaaggcagatttaggtctaattaatatttgaagtgttcaaagtgtaaatgcatcatacagacctaagaaaactattttctaagcaaatccaaattaaagcctgattcagaataatttattttaaactaaaaccaagtagtctcttgtgccaaagtagcaaaattttctgccaattcacagaaaagggcaaattattatttattcagatgcagtccagaatctaagaagaggtacagccagatggatggactggatgacttaactatagcagaagtgcattctgtaatcattttgcacagtgccattatatcccttcacttccttcaggttttattcaaatgctgtctt

SEQ ID NO: 299687 - DNA, 414 bp, Homo Sapiens
caggattcggcacgagagaagtcagaaggagccaaatcaggactgtaaggtggatgaatgcctaatgatttcccatcaaagctctcacaaaattgcccttgtttgatgagaggaataagcagaagcattgtgatggggaaggactctctaatgaagctttcccaggtgtttttctgctaaagctttggctttctcaaaacactttcataataagcagatgttgttgttctttggccctccagaaaaccaactagaaaaattcctttaacattccaaaagactattgccatgagctttgttcttgaccagtccagttttgctttgactagaccgcttccacttcttggtagccattgctttgattgtgctttatctttaggatcatactggtaaagccatgttttgtctcctgtt

SEQ ID NO: 299688 - DNA, 358 bp, Homo Sapiens
gtgtcatggacagataatgttgtctaacaccactattctcttgttatctacctggtgttacctactgtcgattacgataactgacgcactagaatggaatgtacctggagacatctgtctgtagcactactataaatggaatggggatccttactgcatgcaaaacacatggatccatgaagaactgattgctgaaggatctatgcctcacacactagtgagagcccatgatcatacctagatgtcctagactatgtgcactgtccaatacatggtcagctcttacaagcgatactattacaccagaccctctacaacacgggcagacaggtatctatgttcagtatcatactcaatg

SEQ ID NO: 299689 - DNA, 400 bp, Homo Sapiens
gtgtcatatacagataatggtgtattagaccactcttctcctgtaatcgagcttgcgttacccactgccgaattccatagctgacactggagcagagaacttaactgaagacagctgtgaataccaatactatagatggaatggaaatccttacatacagacaagacgcataggatccattaggaaccgcctgcgatggacacatgacgcagacacctgtaagagcactacgtcatccttatctcagctagattacgtccactgtttactactggctcaactgttacaagagctagcattaccccagacccgctaccattctggaagataggtatatatgttccgaagcatgcccaatgcaagtgagaccgctatgagacatgcgtctgaccaccgagga

SEQ ID NO: 299690 - DNA, 396 bp, Homo Sapiens
gcctgatgtgcagcggaagctgtcccttaccggactcgcgctgtttccggactcgccgttggcgctcgcgagtagggcccgtgacgcctggcgcgccttggaccacgcgtgcgcgccttcgacgctggcgctggatggatgatgcagcttgtggaccgagagccttgtcctgccgagtgggccttgctggcctgggagctgtccggcgttggcaaccgggcttaagctactgaagcgagtgctgcttgcgtacatccaggttggcgtctggctctccactgataggtacatgcagcattctatatcgctgaatgtaaccagtgttgacgttagctgcataaggtgacatatgtagggagtgttgataagtaaggttcgctggtctttctgctgcga

SEQ ID NO: 299691 - DNA, 411 bp, Homo Sapiens
ccgtcagcgtcagctatagctcagtccgaggaccctgctatcgctctctgagtagcgccacatgcagtccaatgcccgaactgaccgactacattgacaaccacctggcggatactgcctgtagcgacgctgccattggaagcgacatccactctgcctcagaatgagtcggacgccatggggaaatggttgatacaagatcaatccagctgacgccagatgagctcgattgctgagaccgatcaagaccatactatagggacagtccacttcatggtcagcactgacaagtgatccgggactcacagaccctctatagcactgacagacagggatatttgacgcgtatcatactcaggggaaatgagattgagtgtactcgtgacgcaatactgcagagacgctagtcta

SEQ ID NO: 299692 - DNA, 361 bp, Homo Sapiens
gggacatgctcagatatagttttgagaaaccactataatattgttatctaccttgcgctacatacagtcgattgcgagcactgacgcactagtatggaaaggaactggtggcaactgtcagtagcactggtgtcaatggaacagagatccagtgatgctgcagaacaacgatggacccataggagaaccgcagtgcataagatcaatagcgcacgcaccagtgagaaccaatcgctagaatcaagatgactccatatatgggacggtcaaatacatgatgagcacttagaagtgatcacagaacaacagacactgtagagcacgggcagacaggtatatatgggctgaatcatattcaggg

SEQ ID NO: 299693 - DNA, 361 bp, Homo Sapiens
ctgtgtgcctgtgggctagtcttgatgaaccatggtgtgaacgtaagcctccttctgctacatactgacgctggtgagcactgacgcactaatatggttagccatttgtcacagctgtgactagacctgggatgagtggaacaggactctatgatgcctacgaacataatgagctgcatatagacaaacataacgtcagaccgcacggtatggcagccatggatatctgtcttatagcgctgatgaactacctatactcgggacgatctaatctgtgatgagctcttagaactgctcacagaacagtaggaccgctatagtgcatgcatgtaggcaacatatgactggattgtattcatgg

SEQ ID NO: 299694 - DNA, 408 bp, Homo Sapiens
agctgatagatagtcattgttggatcgacccatatcttactgggctcagacctcaccttgtcatctgaggcatatcccacgagtcacaatgcttggaaccgtaaatgtggacttcgccttagaaggtgtctctctggacatgttgatggtctcgacagggaacattctgatgagtatgatgcatcaacctggcatggagatattactctactgcaatgattgcaatagaagcggaaatgctgttgcttgtctagcacctaggttggcctgtgcgtgcatctgtgagacgaccgaggaggcgagaccagcggtctcgatgactgtctccagctaccagagatccgctggatgccacatgaagggattatgaggttgatatggtcgttccttccgactgactcatgatcc

SEQ ID NO: 299695 - DNA, 408 bp, Homo Sapiens
cggagaccctccacgatagttctctacaaccatggcgagaacgctcgcgggcttctgatacatgctgtcgatgatgataactgacgcgctaatatggtacgcatctggaggcgtctgtgagtagaccaacgatgagtggaccagaactctatgaccctacagacatcatgagacgcagatatgaatagcatagtgtcagaaggaagcgatactgcccagtggctgagaatgatataacagagctgactacatatatggcatgagtctatgtcatggtgagctcttacaacatctcacagaacaatagagccaatagagcgcatgcagaaaggcatctagtgagtgtatcatattcagcaggatcctgtccaagagtggcctgatgaatctgatcagatacttatacca

SEQ ID NO: 299696 - DNA, 345 bp, Homo Sapiens
gtgacatcgtctaacatagctatcagaaaccatcatgatactgctatcatgctaaagatgcctacgatcgattactacaactcacggagtagaatggaacgcacctggaggcttctgtctgtagcagtacaataattggaatagagatccataaattatgccagtgggagagaatgatgggatcaagcagtcgcagactataggcattgtcaactacatagtcagcacatacaacctctatcgggaacgacaggcacgcgagagccctgacagatatgtatatagtaggtgtatcatattcaggtgaaatgagactgcttctggccgcatgatcaactgaagaaa

SEQ ID NO: 299697 - DNA, 398 bp, Homo Sapiens
gtcacatctggcgcttagaggatggtgccctgaaccatgattacaatataaatatctttgacggctcccatggcatccagtacaacgagtatacaaccttgtcacctccctgcccatagctacatatgctcaatagcgggtatacttcttcatggggaaacagtactgtaagtaccaattccagtaccagcccagtcaggaagagtgacacggcaactccctgacatatgagtatgaacactatgccatgatgcattgggacagctgtgaggacatcttcgagcaactcttctggggcagaacctctgctgataccagacagacccagctgattatccgggactgggactgtgtgccatggctagtggtcgcatgcatggctggacgcatctacatat

SEQ ID NO: 299698 - DNA, 393 bp, Homo Sapiens
gtttcatgtatctgcaagcactagctacgatataccagacccttcggatagacccaatcactgacacccatattcaagaggatctatggtatcctgacattgctgctgatcgactgcctcgccttaagcgccagcagtgtgacacctgctcaacaacggcatctgcctccatgtcaactttgctacatgcaggctatacatgaaggccactatccagagcaatgggtttccatggctgtagctggccacatttaattgtatgctgactggaagcacggtgctgctggtaaaagctgctacataggatatatatcagtctgaacatcacaggagggatggccgtgaacatggagggagagtactggatcgatgacagaactgctagtgatgtgc

SEQ ID NO: 299699 - DNA, 406 bp, Homo Sapiens
agacattgagtcagaagttcctctaaagatggaggagcctcccgtggtggagccgaaacctacgccagaccgactgcttgtattgaaagaactatggaatgatactactgatgtgctactcctgtcgccctcttgtctgctggtctgggtggtgggccctctctacctgtggctattttcaagttgagaactacacacagggcctgagggagcaagtgatgccttttcggtatgctgatatctatcatggcgctgtggcggaccgttcaaccttactggatgctgatgctgtagatgagttggatatatctaaatatgctggtcaaattgttgagagatgacattatctctcgaaagtatactgattgctgctgcagtgtatatgatgaacactgtgggtaacatt

SEQ ID NO: 299700 - DNA, 397 bp, Homo Sapiens
ggagtagagggcctacaaatcgtaactggaggaacaactgaccctgttggagtaggatacgcgagcacggttgtacaaggtgctgcaggtgtagcaagccctgatgggcgcggacatggaggacgtgtgcagtctcctggagcagtacctgtgcgaggtgcaagccatgcttggacatagcactctggagctgtaggtgctcttcgactctgacctgtgcaagctgactatgctgcttcttcgcgatgcctatgatctgcagtagctcctgtccttgtaccaggacggggcccgttagggctccgagcgcggactcagtgacatacgtgagcgcctgttgcccctggtgcaacagggacgtgtgcaggccgacactgtgtgcttcctggccggacat

SEQ ID NO: 299701 - DNA, 399 bp, Homo Sapiens
gggctttggggctacatgtgtgagtgaccatatcagatggtgcatgtggatcttgctatgctcacagcactatgagactgctggactggtatgttgccagggccctcttgtcataacaggctgactatacctattttggtatggagttcagaagggctacaaacgttatagcacatgatacgagatcggtggacaaggttcatatatgcactgcgcaataaggacacttgctggcacttgtacggccctgtcagtagtgccgaccgttaggaactcggtaccagcgtgggcctccgtgacattgggagagccagagataacattcggaaatccgtggttggaatctcatgcccaagggactgcaaagggtcctatagagaccacagtgtgctcagagca

SEQ ID NO: 299702 - DNA, 394 bp, Homo Sapiens
gtgtaatggactaccatttgtgagctaccaactcgcacacatcatgtgcatctggctttgctcacagcactaggagattgttaaaaacgtatagagacagttctattgtttcattaggcagtatcaatacagtttctgttatggagttgagaagcgcaagtctctgcgaaggtatgtgctgacagctcgctgggcagggtttatacatcactgcgcgttaagagcacgtgctgaaacttgctggtgccagtcacgtagaattgcgtatttgacacttaagacgctaaaggtgatcgtttacctgtgggaatacagatgcttctctggcagaggcgtggtggaagaatcatgctcaagtgacatgaataggtgctagaccatttccatgatgcag

SEQ ID NO: 299703 - DNA, 355 bp, Homo Sapiens
acacgcttgtggttccatgcatgtgtgtagttgcgaatcactctgtagtgcggttgttccacgagtaaatagatacagggctgagcatattatggcctgactgatcatagccattgcatagtatcggcagaagagtccgtactgctattatggatgaactatgaatgatgtccctgaataggctatgtcacgtatagccggagactctattgagacttgtgactaatcacatagttctctcaccgtggacccatgacgctccagagcaacgatttgatatgcctatagtgagacgcttgcatgctgaactacttacgagccggatgcatttgatcgctaatcgctacatcaaact

SEQ ID NO: 299704 - DNA, 345 bp, Homo Sapiens
acacaatggagagggtatcctttctaggccttcttttactctgtacctcggcttattgcaggggcgcgtcacccagagatgcacacaccagtgaagttgctcatctgttatccgagtagtgagattgaacatggcatgggcatgttgtggatagactgagcttacaatcttcataagtgtgcattagtagatcgtgctgctattgaggatgaactatctgtattggccctcagagctgacacaccatgcaaccttgactctctacatgaaccctatggtgatgctggctgactgacgcgcccatcatgaacctcttacagatggatgcgcacttgcatcacaaag

SEQ ID NO: 299705 - DNA, 395 bp, Homo Sapiens
  misc_feature (379)..(379): n is a, c, g, or t
gtcaaccttactcgcattcggcacaatgcagtgggtatcctctatttccgtatttgctatctatagcgaggcttattgcaggggagagagtagcggagaggcacgctggagtgttgttgcccagtcggatataagatgggctagacgatataccttaggcctaggggatgaacgcctttgctcagtgtctggagcgccgtacatttgacgatcatgtccagacgaggtacgtaggaactgcttttgcagcaccctgggctgtggatgagtctactgagaagagtgacaggtcgctgcgtaccatctaccgagactggtgatgcacggttgcacctgatcgagactcctatggagtattggctgactgctgagccctcangatcctgttggaaatg

SEQ ID NO: 299706 - DNA, 343 bp, Homo Sapiens
gagagctgtacttacaagtatgagctccattctggaataggtgaggtgtgtcgctgaaaaatatgtatattctgatgatttgaggtggagagatctgtagatgtctattatgatcacttggtgcaaagacgagttcaattcctgagtatccttgatgactttctgtctcattgatccggctaatgttgacagcaaggcgttataagtctcccatcattaatgtcacgtactctaactctctgtggccggcactcaggacttgctttatgaatactagtgctcctgtattgagtgcatatactgtgatgtatgggtcttttgatctttgcaggatgcaagactg

SEQ ID NO: 299707 - DNA, 344 bp, Homo Sapiens
gtggactgccgcaaacttagagacgaactctgggactgacaccaggcgcagatcccttctcataccaccctgggccattcttaggcccgcattgacgtattgatctgatgacatctcggccgtgcccaacatcattaaggctcatgccttgcacaagaattccgacgatccttttatcctactggtaaggacgcgctgtttatggaccattgccaagtgttaatgcaagctcgagccaagatggacgtctcgaggtacctggactattagtaacttgatgccctacggtgtctaccggaaggcagataccgcgcatctcggtctgatgaatgctgagctctgtc

SEQ ID NO: 299708 - DNA, 411 bp, Homo Sapiens
acggattcctccttccatatgtgagcctgagagttggggccacaccaccagtgaggggtgcagtagtcactcacagactcagacaagcaacccactggcttgcctgtcccaattcccagtggcagcaacagtgcctgtggctgcagtggtgtacagagaaggggtcccactctgtgtacaagcctgagtacagaggccactctgccagatgtgggagagttgcggcccccaatcccagacagtcagctctcaagcttgcccacctgggtttggctgcagcaactgctggggcaccatgcagagtcagagaagggattacactctgcaaattttgtgctcacagccccgtgcacgaagctctcaaggactggaaagtgcatactctggattcctttgttccacagaccatct

SEQ ID NO: 299709 - DNA, 410 bp, Homo Sapiens
gtctgatgctgtacagatggtgagctacagtcttacgcaacacctgtgaagccaacttggatctcaacaatatgagagtgttcaagaacactaacagcaggatcatgcggatattagacagtatgacctcagattttggtcttgagctgctcaatgctgtctacctgaatgcctagtggaagacatcattgggtacggataataccatcactggaaccctataacttgtgctgcaacttatggagcccccatgatgaatagcggatttacactgtggaccattaagtgaccaaactttgtgagccaaagcggggcagctgcagctcttccgcaatctgagaatggtgatacagtgaccgcataacgtgatacatcgtcttgatgacgcggaacacaggtcttagtcaatc

SEQ ID NO: 299710 - DNA, 392 bp, Homo Sapiens
gtgcaatgtagtaccaaacgtgagttaccattctatttatctcaagctcagcttattttacgcacgtcactaggagagagtcacacaagaatgaggataggaatatgcttacatgatgggcaagcagacacagatctaggtctggtgctgatcatacctgctaaggagatgcctaatcgtacatcttaggagggtagggaatatgtgacactgtgcactgaaccagctgctcatgcctgatggaggcagccactggagattgtgacaaatcactgtatacgcttaagggaacggatcatgtgcggcagagcctgttcgttgatgctatggcgtgatggcagactgctgcgcattgcaaggaccagcgtggaaaagtatgcttcttgatgcag

SEQ ID NO: 299711 - DNA, 654 bp, Homo Sapiens
gtttactaagctgaactataactctagacctaatgatatactacctcataggcgattctattatctgaacttacatatattaactacagtgacataattattttgtcatagaaatttagaactgtactatgactgatctacattgaattaagtgcctaaacgttaagcccatgatgtgactgatcagatctgcaggtactgacacaaagtgaaatgctcttgattgatgcaaatacttggggcaagtgcttctgtcactcgtaggatactggtacccagacctacaagatgcaataagcgcagtcagataggatatatgctttaactaatcatgatacaattactaggcagatatcggcatataaacttctgaaatactgcaatgagagttcaaaaaaatgactacatagataacacatgaacgacttccttatttgtggccccttaatccttatgcatatagttccagaaagtgactaacctgttaatataacaacaagtctatgtgcgcattggatatgctaaagcactagagaaattttgctaagttagcaattgttggacatattaataacttcttgcccttgatgggggggcccgccctacaaccgaacattgacgcttggaatgttaattggaacggcccaaagagca

SEQ ID NO: 299712 - DNA, 632 bp, Homo Sapiens
gtttaccaagaagaactgaaactctgaacctactgaaatagggcgtcataggacatgctattcgcatgaacctacagatcgctactacagtatcataactatgttgtcataggaaatgaggactgtactatgagctgaaacacatggaattaagtgccttaacgatcaacccatgaacgtgacagacagaccttgaggtactgacactaaggaatatgcactgcacagatgcaagtacttgaggaacaatcatctgtcactcgtaggatatggtacagcccacctcaaggtgcaaaacgcccagtccgataggatatgacatttacctaatcgttataccaaactatctgatatgggcacataactattataggtccaagatggacttacgaacagtgaccattgagatgacatctgaacgacttccttagtgtgcatgcgtaactctctgtgcgctctagtacgagaaagtcatttaccggttctatacagcaccatgtcctttgagggcaatcgtcttggctactcaactgggggaatgtgccgcatctaggaatttatgagaatgggaataacttgatgggcccacacgagcggcctgcccttcaatagtcattgtaggttggaaatga

SEQ ID NO: 299713 - DNA, 666 bp, Homo Sapiens
gcgtaacactcaccgcagagtctatcggcgtgacggtacccgtgctcctgccccagctgcctgggccgctgcattctgcaatgcctgcgccattgaacccatgcctacctctcaagcatcagactgctgtctttacggctgctgctgtattgtgccctaacactaactttgccactagcctgtttaccacgtgggaccctgccagaggggtttgcgtatgtctgagacaccctacctgatcctcacacgctatctgccccatatttcactggtgctctcagtcaccatgcctaacactccgggcagatctcatttactgacccagatagtgccctcagagtaccttgctgtatgctgcacacaaacttccaccatcggttataacgtagtcacacacggtaactatgatataatgactatagtacgatctaccattaacgtgcgcgcgacttatgcagaaggaactcactatctttgatgaactgtcactttatatacgcataacttgccctttgaggaatcgatccccactgactactctgactcgagagacgaaccttcgcgctccaggaatagcgactaatctctgtacccatcacggagaggcgctgtgtttcaatcggtgctatatccacggacctgagagcaacacctggcccacaggct

SEQ ID NO: 299714 - DNA, 622 bp, Homo Sapiens
  misc_feature (595)..(595): n is a, c, g, or t
  misc_feature (607)..(607): n is a, c, g, or t
attgactgaactgactgtgctctctcgatcgagtgtgatcgtagctcatggcacttgcaaatggctggacatacatagattaaccactgcgccatctataatgtgtcattgaaatgtaagcatgaactatgcctgcactgcactgccttaagtactaaaacgtgaaccaaatgttgtgaactgtgttaccgggctgaattcagacatgatcacttgctcataacagatgcaactacttggggacagtccatatggcatacaaagtatatgatggcccagaccatcgacgtgaaaaaaggcatggcgattaggatatatgaatgatctaatctgtttaaagcctagacagtaggggcatattaacaactacaattacttcaatgtatgagctgacaacgtgcttacatgtgattacacatgctacgacttatataatcagggatgtgtgaatctctatgataaagactatgcccatcgtgtctaactgcattatctaaagcacaatgtctattgaagctacagtatacgctaatagacttcgcgagatcatgttcatgctatcacattgtggatagtatagacatcgactacttgnttttatactgangggggccgagtccca

SEQ ID NO: 299715 - DNA, 617 bp, Homo Sapiens
gtttagtaagctgaactataactctcgacctaatgatatagtgcttcataggccatgctattatctgcacatacagatgtctaattacagtatcataattattttgtcatggaaatatagacatgtactatgacctgtctacatagaattagagtacctaagtgtgaagcccatgtatgtgactgatcagtcctggaggtactgaaactacgtcatttgatctggattgatgcaagtctttggggcaaatgcgtctgtcactcgaaggatatgtgggcccagacctgcaagatgctgacttgcgcatgataacattcttagttactgctatgagacgttcataacgatgactcacatgtgataacacatgatacgacttccttaattgtgcatgcgtaaatctctatgagctctagtacgagatcttcgtataacctttttatataacttcatgtcctttgagcgcattggatttgctaatacattggagaatgttgccactttatgaatttatgggaaattgaataactcttttgtcctaactgatggggacacctgtcattacggtctttgaggggagaaactctaaatgggcaggggcttaaagtgaatcactt

SEQ ID NO: 299716 - DNA, 603 bp, Homo Sapiens
ctttatcaagccgaactggaactctggaccgactgaaatagtgctacatctgccaggctaacatctgaacctgcatgccattattacagtgtctttatgagttgtgcatggtatgagagacatcgaacatgagctgtgctcatgcggttagggccttacggtggaagccatgatgtgatggatcagtcccgggggcactgactcttcgtcctgtggtctgcagagaagaaagacctggtgggtcatgccactgtttgtctggggaataatggaccgcgaaatgccaggggagaaactctcactcctttagcacttgagctttagctgaacggtgctccaactttatatgatttgcagcagctaactatctttgctacacatgtgtgacttgagaaatcatgacctattaagatgttctgtgaaacaactactaaatctctgcctggcctatgtccgtggacaggattgggtttatccactaatttggggagtgatcgccgctgtatggtattatgagaattgctaataacatgttgtgcgcacttctcttgaagcccttcttaaggccttgaggttacatattcagcagcgaacctcctaaac

SEQ ID NO: 299717 - DNA, 648 bp, Homo Sapiens
ctgtaatgcgcattacccaccctttaaccgtactggaacaggcctgccatttgcccagtgctaccctgcgaccctgcgcactgttttcgatgtgtaggcaggcctgcacatattagtgaagccgacctatgctaattcaagatgctatcctgagtggtcagatgaagcacatcaacatggctgtacatgcaccgcagatccgacattaaggactgtgccccgcacttatgacatatctgtatggtgaatctacttgtgttctgaggtctatttgtcagcacttgcgcttgactgaaactcctacaaatctacgactcaacatctgctgctactgttcaaccactctgcttatgaaccgacatagattcatagtggtcccatgtatcgcgtgtagtatctcgagctatagacaaggcgtacgtacaccgtcctatactatgcctaagaataacctttgtgcctgaattaccgggagaccctaggtcgatatggtacgctacgtatgccatacagcggattctaagatgtattcacatgctgggaaatacccaccgttcgaattgggacgaaggctatgacctttgggacccgagggtttactttaaattttaggtcttaccgcttctcccggcaaacattttacttacg

SEQ ID NO: 299718 - DNA, 615 bp, Homo Sapiens
cttgctcctaccatgccttataggactacattgctgtgacctgtacactctgtctggaccagactctacatgagttgttgctgaaagtgtgaactcactgtgtgagacccgtacctaactgttgaacgatgcatttcatgggcggaggtattagaagctatatacagatgactcgaacaatgagggaatcgagaatggcgtctaatgacctttattgaatgcgaccggttacgcttattttgatgaccctggtgaacaacaggatcctctcatactgacacacttaacaatggccggatgacaccacttttcaagcactgaacgctcgtctaaaactagacaaacatgaacgcgggaatgcgcatgcacaacctgaacttctgaacaccaacgttattgacaaccgcaaccgccatcactacaggggtacttacatgacaaaatactaaatctttctaatgctttgatgctgtgatgttaccagctcacttctcagggagagacgttgatccctacggtacagtaaaggtatacaaagcggttgcgcgtcttgtcctaaggctcacatttacaaaaagttgggcattggaccgttttaaagttactagtgccctt

SEQ ID NO: 299719 - DNA, 620 bp, Homo Sapiens
ctttagtaagccgaagtattattctcgactgaatgatagagtgctacatctgccagggtatcatatgcagacactgtctctacatacagtgacattactagcttgtcatggagacatacacttagggtatcacctgttcacaaacggctttaggactatctcttgagcctgtgttgtggcgactggttactgctgtgacagagacaccgttcttcgctctggattactgaaaatctgtgtgaaaaatagctctagacagtaggggttaaatgtaccctgcatctgcacggtcaagagagctcactcctgtagtatatacactttgactggacccggcacgatccatactaacttggagatctaaaccatcctggttactccggtgagacgtcatcaagtctgactatatatgatattacacgatactggtgtcagtatgctgcacccctaactacttaatacggtcttgtatctttgcctattaactgggcgaaagattctccactgtatccatttccgcgaaatggcacataacttctttgtccgtggctggtgctgcaacccattcataccttagtgaacgtttttaaatttaactggcggcggcttaagacagttag

SEQ ID NO: 299720 - DNA, 624 bp, Homo Sapiens
atgaaatgcgcattacccacccttaacccgtactagaacaggcatggtcttttctcctggctagcctgcgaccctgaacaagtggatcgatgtgggtgcgggcatgaccaacttcgtaaagactatagctgacacttctagagactacccctaccgctcagaagaagcatacaagatagctcattctgctgcacagatgccttatgaagcagtgatacacgcactaatgctgtatatctgtggtgactctacctacattctgagctctatctatcacaactcacacttgacatgaaactactaaaaactagtgctcaacatctgttctactgcttcaaccacgctgctcatgaacctgaacttcattacaagtggacagtcagatacatatatcctattacgagagtaagataaggagtaaaggaaccgtgcagaaggatggtgaaacatgaccatagcaactgacataacgtgggactcccagatcgaactgtagcggcccgtaactcacaccagatactctgagatttcatgatattgctggaaaagaacaaacctaaagaatgggatcctagagtgaacacttttgagaaatgatgtacctatttattaaagctttaggta

SEQ ID NO: 299721 - DNA, 685 bp, Homo Sapiens
gtgtccggctcagcttgggcttgctagctacgagtattgtctgcgacactacgctgtccagcactgggtccatgcgcatgttggcacagccctcacgccgatgagacggaattacatgagcatctgagcaaatgcgaacgctgagcatatgtgtgtcgatgcattaggctacttctggatgcaagcaagctctggactgccatacgaaccgactgataactgtagatggggatatctgtgctgagaaccgccgactggcacgagaaatactattgtatgtaggctgctagctctatcatagcatggggattgattatctttaccgtgccacactatatgggaaggacagtcagagcgagtttaatggaaactgtctttaggagaaagtgttcgatgaggcgatcagcattgaccacagcagtgaccgtctggcgggatgaatcgacagcacgaccattctagggctcgaagatgtctcagagcgacttgctgaccacaagacaaagtgttgtgatcttgcgctccatcttcaatgacctttggattgctggacgagatgtactaccagctattgatcccgaaaacgcgcaggggcctgattcagttaggcgaaatagcgtcaacatattggactgcctgccctcgcagctgcagaattaacttcttgtggccaatacgaaatggc

SEQ ID NO: 299722 - DNA, 641 bp, Homo Sapiens
tgtaattcatagacggtgacgctcggtgtaaattgagatgtggacctctctccatacatagccgctcctcctgcatgacactgaacagctgtgagctggacttgaccctgaggaccgacatgtgtgaccaacacgagcctttagaacatggtggaactcatcatgcatggagcacgtattcttactcatagcgactgcaaatagcctccgtggatgaggtgaatataatgcagagctttattgacatgctttaacagaatggagaaagcgcgatataaccaactcgtcctggtggcactacattgctaaagcatctgatataagatggcggcgaactttgcatagtaataaaactgaggtcttcctatggcgatactgcattattccttaagccagatagatgatgcatgttgagtacttactacagactatgtgatgtctgccggatcatatgaaaccttgagagtgatatgaggcaacgtaccaggacactgaccactatggtcaagggatcagacttctcatagtgttaccgtggaagtttgcacatacctaataaccccatgctcaggattaacacagggttctgagagagttctagaacatttattattcccatggtttggtttacaacctggaaa

SEQ ID NO: 299723 - DNA, 604 bp, Homo Sapiens
cgtagtccaaacacggcgtcaacgcatagaagtgggtgacctcctctctccatatagagccgtttatctcggctaattacaccggcgcgtgttactaagatgcgcacctgagtgacgacaggtgtccagatcatgattcgtgagaacagagtgacacacctcatgcatggaacaggatgccttactatatgcgaccgaaggcttctatagcacctttggaaaatatagaaagaagcctcttgattgtttcaaacagaatgtggacacgaggagactgtaacacgtgaccgctaacactacatccttatggtaacatatgttgcacggtggcgaattttgatgaaacctatgacggaaggtgttaataggcgtgcacagattgaacctgtaagcaacaaagtattgcccgatcgcatacttcatagcaaaaacctgctgtttgtggacaaagcaaagaccgtatgactgatatcatgctgggatgcagatatccgaacactcggatcaaatgctagactgacggtggggtaacagttccaactggtggccctattattcctggcttaggataacatgaggtctggattacaaatagtacaggaag

SEQ ID NO: 299724 - DNA, 609 bp, Homo Sapiens
atgaggtgtgctgatgtattattctcgactgactgacagagttgtttatcggccatggaatcatatgcagtcactgatgttacccactggtgcaatgcttgtttgtcatggaagtgtacacctgtggtatgacttgtttacaaaccctgtcagtgacgattcctttaacctgcgttgtgctgaatggctacagcagtgacagaaactgcggtcttcagtctggattgatgcaattctgtgtgaaattttgctctaagaggtgggtgctaaatgtaccacgccctgcccggagaagagagtgctctgctgtagtgcatacactttaactgaacccggaacgatgcatatatggtttagagatcagcctgatactgctgtcataaagctgtgcctttatatatggagactggtccgatcacgatactatctaacactcttaataaagtttcaactattttgtgaccacaggtctttcttctttctatgggagaatatttagacgttttcgattcatacgaaattgcttcccctctttccctgggctgggcgtgctactacttatccgatattgatgcgaccaaatttactttgcgcgcctaatagcttact

SEQ ID NO: 299725 - DNA, 606 bp, Homo Sapiens
gcccaagagaactagtcccgagttgttatttttgagggactgtagagggtctccattttttactgcatgatgcgcagagaaacgaggtactcagatgacagaaacttatggttcttagacacgcagctggctttacacccactgaacaaagactcagatgatgaatctttggatcttgatatgctttatcttattatcaaggtgaccggagatgctttcaaaagtcaagttataagcctaaagcagtttgctttgcactaacaagtgtgttaccctccgtcggcaaacaggtctcgtaataggaagccttgctgtactgtctacaaaggatgagaaacatccttatcatgtttaagttgcttttttgattgccttggcgttggtataacgacctaacaaagggagagttgttttttctggtgccgatttcggcaccaggagcccttggccagggaatctttgaatggaaaaatggttggccagcccaagcttgccctttgttggggtctggaaatttacgatttaccactcgggagcatgagccggttctttattttggggggaaaaatggctttccatgtacctgtcctgaattcctgtaggcta

SEQ ID NO: 299726 - DNA, 174 bp, Homo Sapiens
ctttactaagctgaagtagaatactcgatttagtgatagagtactacatcggccatggaaacatctgcagatacagatgttacccacagggccctttccgacgaacgcttgagcctgtcgaagtggtgactggctatagcagtgacagagccagcgtactttggtctggattgc

SEQ ID NO: 299727 - DNA, 502 bp, Homo Sapiens
agggggtggagtgcagctgggagagtggcagagccgtgaccggagacactggagccgtgcagcggcgctggaacttcgagcagatctacttttccaacatggcttgagacaggcgccacacccttctgcgcgccccaggccgagagctgctcccggccaacgtggctgggcgatagacacacgctgagtcctggagccagaagctgagccagcgcaaggagaagctctgcaggcgggaacgggagcaccacgcggaggccgcgcagatccaggatgatgtgaacgcccatcccgaggtgcagaggtgctgcagctggcgggagtacaaggagctgctgtagcggtggcaggtgcagaggagccagcgccgggcccatacctgtggtgcgcagccgtgaccgcgctgctgactccaggtcaggccagcataccagacgaggttcttcagcataactgtgtgctgcatacaagacatcttactgatggaagtgtccgcatgttg

SEQ ID NO: 299728 - DNA, 224 bp, Homo Sapiens
ctggagtacagcctagagacagcactcacgcccctgggacgtggtatggacaatccctgccatgtggagaagactggctcttgccctggctctacggctcctcgcgtcgacaggaacagatagccccaagcacatgctcttctgtcagccgtccgcaacctgcatgcatatcaaagcgcgatccaatgtttcacgacaatggtacactgaccgtgattgttcta

SEQ ID NO: 299729 - DNA, 392 bp, Homo Sapiens
  misc_feature (75)..(193): n is a, c, g, or t
ctgaagtgaccacttttattatatttgaggtactgcctgccagcaccatctaaacctgtatcatctgcagaggcnnnnnnnnnnnnnnnnnnnnnnnnnnnnnnnnnnnnnnnnnnnnnnnnnnnnnnnnnnnnnnnnnnnnnnnnnnnnnnnnnnnnnnnnnnnnnnnnnnnnnnnnnnnnnnnnnnnnnnngcctgacagtgagttctgtcatgcatcagactttctgcctcacaattttcacctgtaacatgagaggtgagtggtaagcgctatacactggcttcggtgatcagggcattatactctggtgactacatcttgaggatgtccgggattatgctgactatcgaagcatagccaaagactacctggtaacacagtgcgactg

SEQ ID NO: 299730 - DNA, 607 bp, Homo Sapiens
  misc_feature (63)..(158): n is a, c, g, or t
cccaagtagctggggctatagtcacaggccaccacacctggctgatttttcaattttttgtannnnnnnnnnnnnnnnnnnnnnnnnnnnnnnnnnnnnnnnnnnnnnnnnnnnnnnnnnnnnnnnnnnnnnnnnnnnnnnnnnnnnnnnnnnnnnnntcagccaccgggcctacctaagaaaaatatttaaatttaatatcagtaactgtggggaattggttccaggaccccctgaggataccaaaatccatggatgctcaagttccttatataacatggtatagtatttgcatataacctatacgcatcttcccacaaacttttaatcctctctagattatttatgatacctaatacgatgtaaatgctatgtaaatagttgttatatggtattgtttagggaacaatgccaaggaaaaaagtctacatgttcagtagagacacaacttttcattctctttcctgaatatttttgatacgcggttggttgaatccactatgcagaacccacagatctggaggacctactataatttaatttaattctaagcttataatatgactcgatggaggagctttttgcctagagcttggcttgtgagggg

SEQ ID NO: 299731 - DNA, 619 bp, Homo Sapiens
  misc_feature (124)..(292): n is a, c, g, or t
  misc_feature (373)..(381): n is a, c, g, or t
  misc_feature (488)..(488): n is a, c, g, or t
  misc_feature (597)..(597): n is a, c, g, or t
atttgaaataactaacaggctcttagctaaagcatactttttatatgtatacattttatagtagggaagtggcttagtgtgggcagatagactagagttcaaactttccttatctattgagacnnnnnnnnnnnnnnnnnnnnnnnnnnnnnnnnnnnnnnnnnnnnnnnnnnnnnnnnnnnnnnnnnnnnnnnnnnnnnnnnnnnnnnnnnnnnnnnnnnnnnnnnnnnnnnnnnnnnnnnnnnnnnnnnnnnnnnnnnnnnnnnnnnnnnnnnnnnnnnnnnnnnnnnnncattgtttgcatttaactattatgatgatttctaaaaacctttaaagccttggaaaaaactagccccattcctcagcctgnnnnnnnnnaatcaaataggaatttgggaaaaaatctaaatatgtgcaatgatctgcttttaaaaaataactatcttgtgaaactcactagttctttatagtatcaaaagtgattnttggctgctgaggcagcatggcacagggactaacaataaggctcaacctgcccagcctcaaatctatacaaaatacctttgtaaccttggacaagtcgcttacctcttnaagcctcaatttctgcatcaat

SEQ ID NO: 299732 - DNA, 214 bp, Homo Sapiens
ggaccaggagaactagtctcgagcacatttttatcttttgaatgcgatctttaccattgcctattacacgtggcacagagacaagagtcgcaatgattactgaagatttatgctttttatacaggttgatggccttacaccaacgatacagatgaccacattgatcagctgttgatctatattatatatgtctaattctcacggtcggctgctg

SEQ ID NO: 299733 - DNA, 651 bp, Homo Sapiens
  misc_feature (358)..(416): n is a, c, g, or t
ggagaggccgctattttgaggtcacaccaggggacctctcagtgcagataacacatatacaaactacacactcagagggttaagtgaagtgacagggaagcaccgactcataactctaaaccttagtgccaggcagagttaaatgtagtatcatcgatatgcgtggcagaagccagcaaggtgtggcggcgtccctgagtgatagaaatgacattagttctgcatcccaagccccacgttgatgtactattaggtgcgtggctggaggggtggattccaccattcgaatgaaggaatctttacaaggcaagttcgagtttactgaaagaatgctagcacatctttggagaccttttannnnnnnnnnnnnnnnnnnnnnnnnnnnnnnnnnnnnnnnnnnnnnnnnnnnnnnnnnnacgcacatgtatatccatatagatatttagatgttttaaccactcaaggccctccaaacatcctgtgatatcagatattgccgacgggtagcactgactacggttgactctgtagctcttgactctccctggctgatagtccaggctgaagaaggtgttcctcatgtgtgcgtagagcccctggctcctgccacactttgtgctgtggccagagggcccagaatttgtcttagct

SEQ ID NO: 299734 - DNA, 230 bp, Homo Sapiens
ctctaacagactgcaccgtactaccatgctacattctcgacactgtagaacgacagactgaatgcgtgagaataatcgacagcttatgcatctgcagtcaaaccggacggggtcgcccaagggtctacaccgactgtgtatggcctgggctgagccctactctcttgtggatatgggatgaactgcaaatggctcagccaggatagtcgatgctgacatccacgaggcca

SEQ ID NO: 299735 - DNA, 291 bp, Homo Sapiens
ctgagagcaccatattgtgaacatcgctgcgcatgcgaaagacagctgcggtgcatacgttttggtggatcattcgtgcttgatccaggtagaaatagtctcatactaagcgatgcacatcagacgaagttctatatatcctttgttcagacttggcaaatgtgcatgtacatttacgcatgccgtggtctctatatatacgtatacatgcatgatagcctatggttaataacttgacaataaaggggacacataatgcctttgtatggtcaagtactatatatatcctaa

SEQ ID NO: 299736 - DNA, 210 bp, Homo Sapiens
cacgcctttgacacaatggcgagatgaacctctagttcccttcttttgctctatagctgggcttattccagggtagacagagcatgctgatgcacacagagagggctgtcgctcatcgcattagcgatatgggacacggaaatttgagcagccttggagacggatgccttcgctgagaagccatgctaatgtgcatttgaagatcctgtt

SEQ ID NO: 299737 - DNA, 251 bp, Homo Sapiens
agaaagttctgtgcgagcggcactacatctgccggaattacattgtgtggctctgggcctacctgaccatatgagcatgtgatgtggaggcgtaagatcgcccctggcgaggagaatgagaacctctcggctcgcatcctgtacccgggactaacgtcttatacttgcgagctcacggatctccctcggactagactctgctcggagagctccaggtaagacccctgcaacgagaccagctccctgcgaac

SEQ ID NO: 299738 - DNA, 365 bp, Homo Sapiens
ggaatattaatcaaggaattaaagggcattaggaatgctatagtattggaagaaattacatcttaacatttcaaagccccatttcacttaagagtaaaatctaatctgatgttttttactctgaattttattcagtaatttttattcataattcatgataattggtaatgtagtataattgttagtaaatgcagtacaaattggtctactgttttaaaaagttttccgcagaacagtgcatttatggcaatgctatgtttaatgagttagggacatcaaatatatagtagttccttattttcagttgtgaaaatgaaatggctaaagcagaagagacgtctattttagtcttttatgttatttct

SEQ ID NO: 299739 - DNA, 412 bp, Homo Sapiens
ctcctgagagcagggcttctctaccttggggcactatgaacattctgagtggggcgccctgaacgagtgcccagatgcttgtgaggcccagatcttggggtgtgcagccaggaagggctctgctagctttcccaccttccttctgacctcttctgcccctcactggacccagcccgttggcttcaggatgggccccacgggacatgctttcatggaacctgaggaaagaatgcacttacaacagcgccgggagcacagaggcttcccactaccctttccgagaagcacgtctattttctctaatttattcagtgccgctgtgcgtgtgtggcctctcaggtaaagagtgatttcagctaacatgcaccatgcctgccacctacctgtactggagatttcagactgatgcctc

SEQ ID NO: 299740 - DNA, 167 bp, Homo Sapiens
agccttatacaggaatgtttcaatgtctatgcctggactttaaacatatcctatggagagaaaacacttcttatatgaaaaaggaatacttttgggtacaagaaattccatccttggacctttagggcccacggaggggggcttaacatggcaggaaaggtgtatcg

SEQ ID NO: 299741 - DNA, 369 bp, Homo Sapiens
tgtaacactgtgtagatgaagaaggctctgtgcataaggccagtgagacacaacactgaatacacgttacattaaatgtggctacaagttactgcaatcacatgcaatacctgaatataccatgtattacctggaatagtactacaatgactctcgtgttgacattgaggtcttaagattaaaaatcatattttaaaaaatactcagcaatttgtggtctgcacagtcaatattttctttcttcatttgtaaggaacacttaagaaaaagttttaccccaatcattacatttgaaaatatttaaatttagcaagcacatcttcaccaagagttgaatataatgtgagaaagctactcaagacagttacc

SEQ ID NO: 299742 - DNA, 270 bp, Homo Sapiens
gggctagagaattctttgtcgtggggactgtcctgtacatagtgcctggcagcatgtctggcctctagccactagatgtcagcagcacttttccctaccctcaaggtgtgataatcaaaactatctccagacatttataaatgtcccttgggggttgaaattatctccactgagaaccactgtgctgggcttctacccttacaagaaattttctctcagtcattcaatgcttctcaaatcttggtgtccataagaatcatctggggccat

SEQ ID NO: 299743 - DNA, 406 bp, Homo Sapiens
agagaatccaatttcacacgtgtacaacatgtgagtcatagcttagcgtgtttggatgcaatgctgatagatcacacagcatcattaagcagagtacgaaagtccagattccacaacctaacttgagaactgtggtgacatcgtaaccgacccagaggcaaacatgaacttcaaaccatcaaaacatcaaagcacagtcttcagagggaatggcaaacccaagcctatttatttttttaaaaatgggccctcaggctttttctgaactatgtacaaggcagaggaagagccaggccagtggtgggatacctaggggacaggtaggtacagtctgcacaaaagggctggccagaaagttaggcactcattccattcaccgaagttccagatagggtcacagtcctta

SEQ ID NO: 299744 - DNA, 366 bp, Homo Sapiens
gttgaagtctaagctcattaagttcagagattaggtctcctctttctatattatcttcctatacctgacttaatatgaagtatatttaataatgctgcagtgttgtgtgacaatggtagcaacctgtgcagtctcaagggcacagaccagttaaatgaattacttatattcctataataattatgacagaagaaaatagggaaccttgaattctcattatccattaactcttaaggtccataaacctggaattcatatgtgatatcagcagcattggttccagtggatttaatggaactaattttaaattccccggacaaagagtgcctttacttagagtaaagcaagtagaggttcttatcataa

SEQ ID NO: 299745 - DNA, 356 bp, Homo Sapiens
atggcgcagagcgaggcactgcatgctacttctaccgcgagcaccttggcgaggcccattttcagtctgcccatgaacgcggccaaccttagggcgcgcgagctctaccgcgccagggctcgagaggagccctgcactgtgcaccaatatcatgtggacattactgtgcaccccacagtggttgagcctctgctcattaagggaaagatcgaactcggccaaacatgttaaggactggacccgcgtacacatgttctgcggatcgtgcatgaaacagaagcgcccgtgtccaaggatttgctattcaaactctatgctggccacgatccatgaatgcattcatgggcaagatgccc

SEQ ID NO: 299746 - DNA, 385 bp, Homo Sapiens
gcagtgcattatgtaattagcaagaatattttatgccagggtttgagtatataaatacagaatcattcaattattaaacattcttaaagtcttcagagtgtggcagacattaaataaggaaaagaccaaatgcaagcaacatgaaaacctcttttctaatctaaagaaattagagaccattggcaatactcttatcatgattcactgaagacttttttttataaacatgtgctctctccatgaagattcattcaatgacattaattgagtatccatctgggccacgtaatttattagacactttctatattttctcatttaactctggggaaactcagactggtgaaattagtcactcagccaagttcagctcgaccctagatct

SEQ ID NO: 299747 - DNA, 126 bp, Homo Sapiens
ttagtgggagtaagcactctcagcaatgtaaagacagaattataacaaactctcctcagacataggcatcaactagactcagattagaactactaaaccactactactggaactgacacctgtctg

SEQ ID NO: 299748 - DNA, 411 bp, Homo Sapiens
ggacactgcaggccctcgtaccttgtaacatgagagcaggttggttccagaaaaggaaaaggaaggggctgagctcagatccttctcccaaattcaccaggcaaataagtttgttctcacccctgtgtgggagatagggaacacatccagaagtcactccatgtggatacataaatgtgaaataaatacttcccccaacaagagttataagttttatattattgaccctcacaacaactctgggaggcaaaactaggaggttatagcagtgggaatccaacccaggtatccctccctgggatcacacttcaacagttccagccactggggaactcaaaccacatagacaccatctacttacacataaagaaggcactgaatcataatagcttccatgtgtcaggcccttga

SEQ ID NO: 299749 - DNA, 404 bp, Homo Sapiens
  misc_feature (80)..(81): n is a, c, g, or t
gttacagtagacataatattgagaaatagaaccatatacattggaataaaacccaataaattaaataaacaaagatactnnggttttgacaagagaaattgttggaaataatgttttacaaggttgaccaatctcactttagcttcctttctccattgtaaagtccggcatggataagatttgaacgattaatattatttaaatgtatactcaatggctgttgaaggtgcctacctcttaaacaatgttcagactaatgatgacagcaatagacatccgtgtagttggaatgtggaggaaaaatgaacaaacatatcaagaaatagtctcttaaactataaattaagtagaatgagagatatttaagataaattcgggattagtgggaaaacagcacaaatcta

SEQ ID NO: 299750 - DNA, 408 bp, Homo Sapiens
tcccatgctgtcaaatataaatactttggactacccaatgaaaatagatactacgaggcaaattacaatcaaaatggtttaaagatataatcttgaatattctttaatcttttaagtaattacaaaacgattccaccagcttcaaagttatacatgaccatgtgatttctccagttctgtatgtagatgctcacgaaactggctataattatacagtgtaatattccttttcatatgtagagagcaaattattggtaatagaaacctaccaattaaagtaatactatatgtgttgtactcttaacctgaatgtttgccaggtctagtcagtgtttagatgtgagtttcctttattcacaagaccatttaataatatatgaactcctgctgaagttatgttatgtatat

SEQ ID NO: 299751 - DNA, 361 bp, Homo Sapiens
ccggcctatgactggttttgactaatgcgagttgtggtagggcttgaaagaaatcacaaactaaatgtaaaatttaatttgaaaaatgctgtccaagcaggaactcacatccaggaacaaaatgaatggagaccagaaatccagatatgtatgcccaagatgagatggggcacccagagacaggagagtctattacctggctcaaagaggtcctggagtacactgccactggagacaagtaccactagggtttgatgatgctggtagcattccaggagctggcagagcccaggaaacaggatgctgatagtctccagcaggtcctgtctgggctgttgtgtgaactgctgtaagcttgccc

SEQ ID NO: 299752 - DNA, 393 bp, Homo Sapiens
ctgagacctgaagagtgaatagagttaaccaagcaaaaaaatgtgggatgcaggttgccggggagaggttgggtgtcagctggggtcaccaaagggatgaactcagaagaggaagtatattttattttatttcccatctgaattttctagcaccatagtgtctgcacatttagattttattaaataaaaatgtaaagtagtatattttgcttcacttcctgattgcacattcctagaatattggaatttatattttaactaccacagtgcctcgaataatcctttgcatataatattttctctactggtacttgatttaatatactaacattttttgcttgatttggaatggagtcggtaaagaagaaagaatttttttataaattatttagt

SEQ ID NO: 299753 - DNA, 400 bp, Homo Sapiens
gttttgctagtgagaaaacaggttgaatgtgacttgcggtgcgttgatggattatagacataagaagcacatggacgctggtccgtcatgtcaaaatcccagatggcagcaagctgctaatattgacaggttctaggattcaggtttcctttttgctgaggagcaaatgctgaatgttagtcttatgccctgtgggtctgcatatttaacagcagttatcaggccttggctaattttgtttataccaaggcctcatttctttaccagcgtgttgtaggatggaccgcatcagcagttgcctctgcagcatttcaccctggcccctgatctgcaggaacctccccaaccgcctggcttgtctaggcctgtagctgggaaggaagagacgaagacacaggga

SEQ ID NO: 299754 - DNA, 401 bp, Homo Sapiens
cactgtgctctcggctaaactgtgcacgctcttaaagagtcatgcctcgttggctacgctgttgtgcgccggcctgcggctgtgtctggctgtgcctgacaaaagtgtgatatgtggtgccgggtcctatcatgagagcgcctaagtgtccgagagaaccgcgaccggtatggccagcgtccaaatatcccctaggtccagacttgattgagttgaataacgcgttctaacttgagatggataaaggccaatgctggaaactaaccaggttatgtgactttggaagcaaagctttgtgtatgacgcgtaacatggtctgcatggcgcgataccatgtggcttccaagaaatatgggctcacagaggggccacggagtttttgataagccggtgctgtggag

SEQ ID NO: 299755 - DNA, 372 bp, Homo Sapiens
agaaaatcgagattaatatattctgtctctttctcaaattaccctttccacttgctctacaaatctatgtaaagcagtttgttttttcatgtgttaactttaccttggcctgtgttatgggactggctgacatgtctaagactggatgtgtatatttattatggtggctaaaaatcatgaaggtcatcacttttcaagagtatatataaaatcaaattggtagtacattagaggtacttttcagtgcaccatgacattacttaaatgagtgctggaatgtgtacagggctttcaaggttggaaaaacatataccctaaattatattgacgtcagatatgaattgagtatctataaaatatcacgcgtatctc

SEQ ID NO: 299756 - DNA, 343 bp, Homo Sapiens
ctcgcgtttaattcggcacgagaaatggtgctgtatgagaatacaagggacctgtccacgatgagggtcaggaaagaccttctgagggaaataatgtgtaaagccgaaactgatgtctacacaagtcaaaaagttgtatatacacaagtcaaaaagttgggtggagcatattccatttgaagaaatggaatatgtatgccatatatatttatttcatctggagaaaggaaagccaaggggaaggtggtatgtaacgaggcttgaaagacacgcacggcagagctgtggaaagaattgaataattattttatctaacaggtatttggtaagtacctcctatatt

SEQ ID NO: 299757 - DNA, 435 bp, Homo Sapiens
  misc_feature (58)..(90): n is a, c, g, or t
  misc_feature (131)..(191): n is a, c, g, or t
  misc_feature (327)..(327): n is a, c, g, or t
  misc_feature (395)..(395): n is a, c, g, or t
aacacagagggcgacagagcacggagaaaatgggctctcgtatatcagacagatgagnnnnnnnnnnnnnnnnnnnnnnnnnnnnnnnnnatagagaatatatatacctctctctcacactatcacatgtnnnnnnnnnnnnnnnnnnnnnnnnnnnnnnnnnnnnnnnnnnnnnnnnnnnnnnnnnnnnncgtctaaagagcggtctgagataggagtgtagaatcacgatgacacactgtcgcaaagtgtctcgagcacatctagatgagtgagtattgtgagaagagacacatatgagggaggagaggtgcacatatactctcntcttgagtatttgtgtatagaagaaaagagaagagagagaggtgtgtatatgagatcatactgacacnagagaatctggtgctcggagcacgaaagacatgtgatgtg

SEQ ID NO: 299758 - DNA, 402 bp, Homo Sapiens
acacaacctgtgcacactggatatcaatatcccacgggacttatttgactaccttctcatatccatgcacgaagagacagactagccccaacccgcagttctacttggtagacccgtagatgacacacgttgtacctctgtgattggcgccaccggtaccgtcaagatcacacctgggctatggctacctgctgcctatgaagccaccagaagaggaggtcaatgtccatgcacagattgacagagagctcttgtagaaccgtccgaccacagtttggggactcgggcaagacagcctacatcgaggcacggatccacgagatccatagatttgcatgcttgaaccccatcagattcgctccgcacagtcaacaagggcaccttgattggtgacttatttct

SEQ ID NO: 299759 - DNA, 343 bp, Homo Sapiens
cctatacaacgcgtcctttaatatatattttgggtgtgtgccacggcctgtagaattagaatttgatggctttgatttctgggacttcctgatcatttttgaggaggaggagttcctaactaagctggagggcacatactttcttcacatgaatggggcacccatgatgtcagcgaggacacgtgtcagatagatgcacaggccattacccagaaactaagggcttgtaagaataccttaatgagattgtgccagatggaataaattctgaatcctttataaagcatctctttgggagagagtctttcttgtgaaggttaagtctcaatcctctcatgcacga

SEQ ID NO: 299760 - DNA, 618 bp, Homo Sapiens
  misc_feature (382)..(492): n is a, c, g, or t
tttatattccttgggggatatactcagttatgggattactgggtcaaattgtatttctgcttttaggtcttttaggaatcaccacaccaatttctacagtggttgaactaatttactccaaccaacaatgtttaagcattcctttttatccacaacctcaccagcatctgctattatttgacttttttaataatagccattctgactggtgtgagatggtatttcattgtggttttggctagcacttctctaatcatcagttatgttgttgaacttttgttcatatgattgatggctgcatgtatgtcttcttttgaaaagggtctgctcatatactttgcccacttcataatgggttgttttttcctctggaattcacatnnnnnnnnnnnnnnnnnnnnnnnnnnnnnnnnnnnnnnnnnnnnnnnnnnnnnnnnnnnnnnnnnnnnnnnnnnnnnnnnnnnnnnnnnnnnnnnnnnnnnnnnnnnnnnngaagctagaccccttgctacaccatatgcagaaatcaactctagatgcttaaacacttagatgtgaaacccatgactctagacacccttatgacatcataggcagtaccactttggacataatacc

SEQ ID NO: 299761 - DNA, 274 bp, Homo Sapiens
gaatacgagagctcatgcattgacccgctggtacctgcatggacctttatggaggattgctgacagctgagctgacttgccgaaccctgcatgcgaatgacgcagcatgggatacctctcgtggcacgtacatggactgcgagactttcctgtatatctgactgactgtggtggcctggaatctctctatagtccagcgcccctgaagagtcttcatccacctgtagacatttgatgctgtcaaagggaagcgcgtgctcttacactaaggcgg

SEQ ID NO: 299762 - DNA, 179 bp, Homo Sapiens
cttgcgtgctatgtgcgagaacatgtggccgagaatcatctgttgttgcgaccatcgtatgatgttctaggagagatcctaggtgtatacgacagtgactactacaatgtgaatgcccaataactatgactatacttcgatataagacattaggtgtgtaccctgaagcctgacacaga

SEQ ID NO: 299763 - DNA, 734 bp, Homo Sapiens
  misc_feature (331)..(331): n is a, c, g, or t
  misc_feature (349)..(349): n is a, c, g, or t
  misc_feature (442)..(442): n is a, c, g, or t
  misc_feature (446)..(446): n is a, c, g, or t
  misc_feature (504)..(504): n is a, c, g, or t
  misc_feature (510)..(510): n is a, c, g, or t
  misc_feature (570)..(570): n is a, c, g, or t
  misc_feature (603)..(604): n is a, c, g, or t
  misc_feature (606)..(607): n is a, c, g, or t
  misc_feature (682)..(682): n is a, c, g, or t
cggcacgagctggctaattttttgtattttagtagagatgagttttcaccatgttgtccaggctggtttcaaagtcctgagctcaggcaatccacctgccttggtctcccagtgttttaggattacaggggtaagccaccgcgctcggccccacctgctaaatttaagggcaccaaatctcccggtgctttgagaccatctaacaagatattccgtttctcctcttcctggattcctggtgaaccaaagagatgggagaccccctggtgcttgctgaatggcttcctaacacacactggtgctagttctgctcgttcttccgtgctaaggngcttcctcaagatacggngagaagtatcctctcctctgcagccctggtgctgagtcttaattgccagcagagtccactctctcttggtatctgccttttggacttcatctnatcncactcttgtatgccagcctgccaatacttaacttaagatccattgtggatcttgcttntcctgngaacacacctttaagatggtagtttcttaacttttgcttacttaactatgtgcttcctanattagtgccacattccctttctctctattggtnntnnatctgtgtgaaatctaccacaagctctatcaaccttattggttacttggtaagtctctttagcttacttatcatnttaactttaacagacctatagaggagacttggattacttccatatatgtaaa

SEQ ID NO: 299764 - DNA, 524 bp, Homo Sapiens
  misc_feature (122)..(123): n is a, c, g, or t
  misc_feature (129)..(129): n is a, c, g, or t
  misc_feature (153)..(153): n is a, c, g, or t
  misc_feature (205)..(205): n is a, c, g, or t
  misc_feature (209)..(209): n is a, c, g, or t
  misc_feature (215)..(215): n is a, c, g, or t
  misc_feature (294)..(294): n is a, c, g, or t
  misc_feature (378)..(378): n is a, c, g, or t
  misc_feature (389)..(389): n is a, c, g, or t
  misc_feature (403)..(404): n is a, c, g, or t
  misc_feature (449)..(449): n is a, c, g, or t
  misc_feature (451)..(452): n is a, c, g, or t
  misc_feature (457)..(457): n is a, c, g, or t
  misc_feature (485)..(485): n is a, c, g, or t
caggacagacctctagcaagactgaccaaaaaaacagagaagttataacatcaggaatgaaacaaggagtaccactccaggccctgcagccatcttagatgaaactgaccacttcctcaaannacacanactaccacaactcacttgatatanaatagatcatttgaatagctctataaccattaggagattgaacttacagctntagnactccncaaagagaagtcttcaggcccggtggtttcattagagaattctatcgaagaattctatggttatagaagaattaacatntctatacagtctcttctagagcatatagaggaaggaccaacttccagttcaatttatgaagctaggattaatcctgacacttanaactcagatanagaccagtacatannaaatcctttacaggatcaaccatccttaatgaattatgaagcacnannatatntaaccaccatgtgtaccacataggaatntaaccaataccatagtaaaggaatcatactactggttgg

SEQ ID NO: 299765 - DNA, 429 bp, Homo Sapiens
gcaggaattcggcacgagagacgtacttgaggaggagcagactggacgagcacaggcagtacgatgaaggtgctgaggtctgcgcggctgatgacattcctggctggatggcaggccacggtgtagcacgcggcggagacagagtccggagcccgagctcgctccagcagaccgagcggcagagatggcagcagatgtgaactggcactgagtcgctgatgatattacctagcgctgtgtgcatacactgtctgagcactgtgcaggaggagctgctcagctactaggtcacatcagctaactgagggcgatgatgagacgagaccatgaatgagtagaaggcctacaaatatgatctggaggaacaactgaccctcgtgtcggatgagacgctgccacgtgatgacaaggaggatgaggcggagtagg

SEQ ID NO: 299766 - DNA, 565 bp, Homo Sapiens
aggaattcggcacgagcggagatccgcgtgaggactgcatgcgagaggtctgtgcgtgcctgctgagctgctgtgctgcatgactcagtggttgccgtagagggcactgttgagctgtattgagtgaggcctttgcttagagatatgatggagtatcagagtgacccgaacttgatccacgatccatgggaacatgtggccgtctgttctaggcgtcgtcatcagagcttgtctacggcgctgcgtaagtatccagagatccgcaatcatggaggatatggaacacctcctgtgtctggagcatgtaggctgatgaatgtgatgtgaactgctcgctgtccacgcactacgtggaggcgtgtgatcacagaacgcacgtattatctgtattgatagaatgtgatataagggatagcatcataggagataccatgatataggaacatataggtcacacatgcgcgtacatatacctgtgatctagatacagacttctaacgacatacacgaatgtattatatatcttatgatagtatgcagactatagagtaggctttgataactc

SEQ ID NO: 299767 - DNA, 225 bp, Homo Sapiens
caggaattcggcacgagcaagaatgcacactaggatcagctgtatgactgtgtgcatgccatagtgtgtttagagtactatgtgagcacgaatgcttatccttacgagacagacagtgaccctgatgtgttcctagactcggatctgtgtaacatgtaagatgcttggtaacaaatgatcgaggatagccagtgtctgatgctgtgttgacagataggagctcac

SEQ ID NO: 299768 - DNA, 434 bp, Homo Sapiens
gcgtgcaccgggagtgcagcgatccccgatgcactgagctgtcaggggtctggatgtggttatcaagctgtctgtgctattacatccttacggcattacactcgaatgctgcgttcgcgtgtgacgtatcttgacatacatgctagcacgacagctatgctgcctacagcccagctgcttgactcgctcagattcgatacacggtgccaagcagttgcacgcgcgcgtggccagcttacgcagagatgtcgcagaccgcgctactcaatacatagaccctgactgatctgatacgcatgcagcacctgctctatgcctctgactagaccaacggtctagcggtccctgccatcattgaaggctacttgagcgaccctacctctagctcactggctgacgaggttgacttagacaggcatactcggaacattgca

SEQ ID NO: 299769 - DNA, 431 bp, Homo Sapiens
gcacaagccgttactggtgcacactgcgtggcaagtcgtggctcactgccttgatacctacagaatgcagcatgatctggaatcacgaccactttcttaacagacttatcactgggatgactgtacaagatgtgcacttgaatccccgagcatgagtgacctttaatgggctgcgtcatgaactcatggatcctagggcaaagggtttagggcatagcaatcctaagctccatgagacacctgacatccgtcctcgcatgtcaatcacattgagccatggagaaacttgctgaccctacttcggtgtaacgtgtgccaagtgtatacctaggtaagaccaactctgagtcactgcagtcgtggttcacagaacagcgacaattgttgccctatctaacgccattgtctcatgtaacatgactgacacgccc

SEQ ID NO: 299770 - DNA, 424 bp, Homo Sapiens
atcaaggtgactttcaatggacttcagaagcttatgaaagcactcttgtgtaggaattacaaggacttcggccagagtgcgctcctacttagactctccataatgactttgcattgccattgtgaatgagctcgtgcagagactcaagccagagatcactctattcccgagagtcctggttactctgctacaccgagctgaggtatgaagatgccgtatccacctggacaccgaagacatcgtgatccaggactattgccgtatgagctacatgtccagtatctggatgataatgaccagtaggtatgcactacatgcgatcataatgcccgtggatattggtacagttcggcagctgtctagggacacagcccacaatgcggtcatgacgatgattcgcatgatgcagcgatcacaacgtgaa

SEQ ID NO: 299771 - DNA, 376 bp, Homo Sapiens
ataacacaacttgtcatgacctatatagagatgtgactgttataggtcacgaaaggtacaccatggaggcctacgatgacttaagatggctgattaggacgagagggacacaggcacagatgagcaacatgcacatgtgcagcccacgaaaggcttggacctactggacgtgcaccagaaccgatgcaggatggatgagacccagagggcagaggagcagctgtacattgtgcactacaccaatggcattttgcttgacctcaatgtgcagctagttcttaaggtcagtcaggagcttaatgtactgagcggaatccacgaatgggtgacctgcctagctcaggctctgctgtagaaagactgggtcacaagctgg

SEQ ID NO: 299772 - DNA, 429 bp, Homo Sapiens
catcatcaatgaggtgtactacggctacacaggcgctttatggagtgtgcttgacaagggagaagagcgctttgtgatacaccatactgtgccacacagcactgagtgtgcaatccctgaaccatgggctaagaatatgagtgagcaagactatgagatgctgtgccttgatggcaccactgaacttgcctacgatgatgcaaacaggcatctggtcagagtcgccaataacgctgagatcacacggatagactatgacgcttgcgttcactagattgtacgtcgtcagccgcactctatttgcaagcaacgtagctgactgatcgagcaagatctgtgtggtccgatcgggaaccaatgaccttgtgaccagagatgacacagtcagcctgtacaaacttcatgtcataaacgcgtatgatacctact

SEQ ID NO: 299773 - DNA, 421 bp, Homo Sapiens
ccaggatggggcagaggacgatgatgatctgaaggacctgtaagatgcataggatcctgacatggaggatgactatgactatacagctgtgaacgatgaactgtgatacgcaaagccagacccagtctctgtcgagacatgtagcaggatagacacccagccacagggcacgtctacgaagtctgagttattacttgaaggaggtcgtcacctgacacccagtgtacctatttgaagtgacacctaacatgtacacactgtacgttacctacctctattacttctgctgatgagaagatggaaaggtatacatatacaggttgacaaacctgatagagatagctgtctgaaaccatgacgtactatatcatacatgatgtgtgtacacagtgctagatacctgttttacgagcctctgtgt

SEQ ID NO: 299774 - DNA, 638 bp, Homo Sapiens
  misc_feature (616)..(616): n is a, c, g, or t
tccaattctttaggcttcttcattttaaacttcatgcagactctctttcttcagatgttataatacagttgattgggtttaaacttactggttaacagtctctttatatttctctcttgctaaaaattaagaacaaatcaacatgtttagaatttagggtgttttgaaaactctcttgagtctttataagtcctttgggttaactctaaaagtagttaaagttgtctgtattgatttcatagtttaagctccagagtattccctaattttctccttcttgttcctttgtgggcatcttcctattgcctcttgcataaactatacttgcttgtttctaagaccaatattgagcttttggttgaaatagtttgagaatttcttgggtacaaatttttgtcagatacttttcctacccatcactttttatatcattaaaattaataatacacatgtattgagattaaaagagggaagatttttgaaagatgcaacgtgaaccttttataactagagcagaaagatttttagcctctttaaaggaaatcctggcatttaggaaaatgtgttttcataacaacatgtttcattctctcattaacaatttcttactgcatanataaatattgaggtaagtgtga

SEQ ID NO: 299775 - DNA, 104 bp, Homo Sapiens
cacgtacactattccactcttgaataccacaacacgatcatgtctcattgctacactgtgtttttttacaatggagctcagtctagcatgtgcactcaagacgt

SEQ ID NO: 299776 - DNA, 336 bp, Homo Sapiens
cgaccgtggacgcctctggcataatgaacccggcaacggcatgttctctagtctctatctctacgtgctctaaatgcaccactgtatgtctaacacaagctcataccaccacagctactaagacactgacctactttgcatacatgccagtgccagcctaagacaggatcgagaaatgttagaaatcatcacagaggacattatgttgatgatgcggaacctgggacacggtgtagctggatcgagccaacacgcagctgtcatgaatgctcatgatgaacctgcaatacaggccagtgatttttgaggaacagatgaggcacatgctggccactt

SEQ ID NO: 299777 - DNA, 666 bp, Homo Sapiens
  misc_feature (478)..(478): n is a, c, g, or t
attttggaaaaatgaatgcaataataaacataaatgtatgccagcaattccagaagtgtccttagatttgagaatgcttgcaatcgagaatcctggccaccaaccacaactgagcagtcatctcataccagtcctggtgtcctggcaacccttcgaaagggcccaggaaagggtggggtaagaggaagaaagggacactgacttctcattaagatagcaagctaggtctgatgccatcccctgcatgcaaatgaggccaggctccaactttgccctgggtttgcaagattttagttatgagatgtcccccaacaaacaattcttcttcctaccccagaccaagaaggaggcatgagacagacccctgacttgaaatcacaaagaatgttctggtaagagaaatctggctctcctaaagttgttttaggagctcgtgggccagtggtttgataagatgcacatctcgcatccctagttntagggcttctgattcgttggttctggataggcccttggaatcttcatttcatttagctttcctggagcagatggtcttctcccactctttgagaaactaagacctctacagggatctatgtccaagtttgtcactaattctgaccagtataagggggaactttgacaaaagctgtaagtgcaagagag

SEQ ID NO: 299778 - DNA, 295 bp, Homo Sapiens
gtcaactgctcatcactaaggtctctaacactggatctgacctctctggcgtcacagaggaggcacccttgacgctcatgatggccgagcataatgttgagcataccatcgacgagaaagtacctgaggctgctgctgccatgtagatagaggacatacccatgtattgtccaactagctggtaagttaacaaacccttggtacttatacagatcgaacaagataccgagctacagcttttgatggacaaagtgcataatgctacccacaaatcactgcctgtcgctcctcagct

SEQ ID NO: 299779 - DNA, 638 bp, Homo Sapiens
  misc_feature (214)..(242): n is a, c, g, or t
  misc_feature (603)..(603): n is a, c, g, or t
tttaagtttctgtatggtaaacttaatgatacttccagttcttttgctgaccctacaggcagaggactcagaggcagttccgcttctttcctaataatgctgtcttgcttaagccactgtcacaatatttacaggtagccactcacaaatagttacactttaaaaattcatgtaagtctgagttttggaatttgaaatacacttcccactgggnnnnnnnnnnnnnnnnnnnnnnnnnnnnntgtttctaggcaaccctttacaggcttattaaaccttaatctataatgtagctgaaatactatacatttatgatgaaaaaattaggaaaatcatatttcagatgcatattagttccactatatgacatttaagtaggattttatatggaatagtttggctcctttaacaccattgttggtggtgagaagggtaagtagtggtgtcacgaggttctagagagaagacattgagaatggtcctcgagaaagcccatcccatctcctgtgtggcatggaccagccatctgcatgtgagacagtcttaagtcacatacttgtatatcaggagtattgcatgatcttactagatgcataatgtganaaaattcatttagaataatcttgagtgagggagtg

SEQ ID NO: 299780 - DNA, 578 bp, Homo Sapiens
  misc_feature (388)..(388): n is a, c, g, or t
  misc_feature (415)..(415): n is a, c, g, or t
  misc_feature (452)..(452): n is a, c, g, or t
  misc_feature (508)..(508): n is a, c, g, or t
atcaggatgaaatcagactactaccccacaatggaggtaaggaagagtatgcgtggaatacaggagatcccttagggtgtctcttagtattaccatgccctgtgattaaggtcaacgggaaagtacaacaacccaatccaggcaggactacaaatggctgacccgtcaggaatgaaggtttgggtccaccaggcgaaaaaacatgaccagccgaggggcttgttgaaggcaaagggaatacagaatggatattagaagaaggtagttatcaagaccaactatgatcacgtgactggttgcagaaaaaatgactgtaattgtcatgaatatttcctccttattttgttaagaatatgtttgtgcatgtacacacctttactaaggactntatatcagcatttaagtgttgctactntatgtaataatatttaggttaaagacgggtgcgcttncggctgtacgaaggatagttgcattatgttaggcgtaattatgacccttatgtatntatttgtagattaagtatgatttcaggagatgtgtgtgaatgccaagttgacaagcggtgggctttgtgt

SEQ ID NO: 299781 - DNA, 507 bp, Homo Sapiens
  misc_feature (364)..(364): n is a, c, g, or t
gtctgtagtcgtgcagcatcggctggtgtcatcttggtccataatacgatgtcgccccctcaaggcttcggcgacatctaggccatttgcagagacttgacgcacgcttttctatatacatggatccccgacaaccgcaatcattgacgccatgtcggattatgcgagtgaccgatacccctgtcgcaacctagggataggcgcacctccaattgtaggaagaaggacagggcccttagctggaaagaagtttggaaaccctgaggagaaattagctcacacgatatcaaatcttgatgagctgactaaacttgagaagaatacatatcaagagcacgctgatacggctaggcgcacagtacangatgcggagacatacagcagaagcacggaaattacagctagaggtcacaactgtccaaagccagttctaactccttatgaagccaatatccctgctaatgtcatgaatgttattgcatgacagaaattgactgaacccactgc

SEQ ID NO: 299782 - DNA, 178 bp, Homo Sapiens
ccaagactacgtagatcagggcagagttcttctttgtgaaactatccgagctgtcatgatagagtcatctgctcttcctcaactaccagagtacagaaacatcatacacgcagcaggccatgcacctaacaccaactccatctgcgcctcttcgtcgaaaatggttcctaatgacctt

SEQ ID NO: 299783 - DNA, 472 bp, Homo Sapiens
  misc_feature (388)..(388): n is a, c, g, or t
taattaactctaaaaaagcaattatataaaataatatgtatgtaattatattattgggcttatatgtaaatgtaatatatttgacagtaacagcacaatggagatgggtgggaggaaacctgtattggtgtaaggaaatggcgccagatggtaacccaaatctataggaacaaatgaaaagaatcagaaatgataaatagaaagggaaatataacaagctctatgaatatatgcttactctcttctattctcttagcttctttaatagacataaaattatataaataataaaatgtattggtaggtttgtaatatatttaaatataatgtgtataacaatattagcacaaaaggaggaagatggaacagagctatataggcgcaattntaaaattttttgtgaaataagttagcatatatcttgaagagattctgatgagttaaccactaataaaatctaataaaataactc

SEQ ID NO: 299784 - DNA, 624 bp, Homo Sapiens
  misc_feature (439)..(439): n is a, c, g, or t
  misc_feature (547)..(547): n is a, c, g, or t
ctgatgtgtcaggaggagctatgggtccccattgccttctgtctccaggacatctgccctgtcttctccctgcccccgtttctcccactcccttccagccgcccatgataagcacgcggtctcccttccgtgccccacacgaaatgctccccatggctcctccactttgagggtaaagcacaggcccccagaaccagcattcaaggcccctcctgaccatcatcatttcctgcttgctctacccaccatgtccaccttcccgttcatcctgtgggcctgggacaggagctccgaaagatcacacacacccatcaactgtcaactctgcccacgttggaaacagtgcctgtggcaggtgcaggaggggaccatttgtcttggctgaagttgaatctgcgggtggctgaagaagctgagactccttgggcctcatgggctntgcattagcagagcagacagtggggggtccctgaggacctctgggcttttgcctgaatgctgggaactccataggcctggccaacttctcatcaccctctttcagcanacctttctgtcttctgtcctggtagtagcacagctgttccatgtcgtgaacccttctgccagcctggtgaggcccat

SEQ ID NO: 299785 - DNA, 215 bp, Homo Sapiens
gagctttcattttcttttttatagctaatagatcactgattactgacatgcgaggattcataccataacatggcgaacccaccatcctcccctatttatattccaacctagtatttctcaatctacgaattacctattatgactctagcctaaagcaatcctctaatacttaaatcacttccaaacaaccattaaactataaacattcaaattct

SEQ ID NO: 299786 - DNA, 346 bp, Homo Sapiens
gtccatgttggattccagggagagcagatagtctgtcaaattgagagaggtggccgaagacgagagtgaaaaaggagaatggagtcaggtcatggggtggccttgaggtcacactaaattgttagaagttgacctctcagacagcagaggccccccatactttggctaggtattaggaagagtcctcaggcaacaatataaatgacagtgaagagaggtaggaaagttaggttagaacacccaccggagttctcaaaggcaaactcagtctcatcaccggttggcccataggatactgtgttgtgggttaattctgcaaatatcacagcactctagcatccttttg

SEQ ID NO: 299787 - DNA, 306 bp, Homo Sapiens
gccaggtgcactgcgtgcgcacagcgctctattctccctcgtctcactctcactcccgcggagacagtgctgtctctgtgcctgtgtccttggcccaggacccaccctgaccaaccgggaacaatacttaggctcagctctcgagaccggaacgagcgactctactccagacagcatcaaggccttctgagcttgccgggacccgagaccgtcggcagggaagacaaccgggcctgacctaactgaactgactggccctagcaggtgtacctgcgacattctagaagccctacataccaacgctga

SEQ ID NO: 299788 - DNA, 335 bp, Homo Sapiens
cggaaatgcactagagcttccttgtatagaatcgtagccacagcgtttacgctgatataggctaggctatatgacactggagcccgtgtcaagacatatagacacgcacgtgaaagatgaaccattgtcatcaagcgcattctatcatgggctaactcttatacctgtgagtgtaaggaattaactaggaacttcatcccaaggagagacaactcttagacccagcgaaccatacaagctacctatagaacacatgttagagcacaaccggttctgtggcagaatagaggcacgagttatatgtcgaggcgacatactctaccagaagcgatgat

SEQ ID NO: 299789 - DNA, 405 bp, Homo Sapiens
caatctcctccccactcagaccagctcctctccagtctcaggccttcttgtgggtataactattgggatcttccagttgtcctgtcttccatctttccacacaggtcctttctctgcctggccctaatggaaatccaggttttatctgatgggtctactttcctcacaggcctctctgatggagacttctcctttcaatgccttccacctgaattcccagccccaaattcacagcaagagcccagcatgcattggtcacgtctacctttctgactgcactctctttagcaagttcgtccctgtctttattcccttaagcataaatattctccagtttccatacttggcctgtatgccttctctttaaatactgtgttctagcctgaccagtggtccacgtttgcc

SEQ ID NO: 299790 - DNA, 154 bp, Homo Sapiens
ggtcttttgaaaacacctcatgtgttcaattacacaataatatagagctctcagtcagtgtgatcattctatagagtgtgatcattccataggtcacatatttactaacagtcttcagtattagttgagtaggctctttaaagccttactgtta

SEQ ID NO: 299791 - DNA, 383 bp, Homo Sapiens
ggcacgagaggaagagaagcatagaggaccgtgtgcaagaggaagcccgctgtctagtgtaggagacgagagagaccacagcctcaccctgtgatcccactttcatcctgtgctgtgctccctgcacatgtgatctgctctcattattatctcatatacgtgctgattataaagatcagcaatgtcttatacttaatggaggagttgaatgagtacatcaagatattgagcagtctctggatccagatctgcactaagttttctcctatcatatgatacttctcgagaacttacaacatattacttagaaacgttgctcttatgccacacttaggactctatagattgcgttctgattaggatggagaaggagagcacaacct

SEQ ID NO: 299792 - DNA, 415 bp, Homo Sapiens
cgacgagctcgcctgcgtctactcggacctcacactgcacgacgatgaggtgacacgcacggaggataagaccaatgcgctcattatagcagccgctgtacatgttgagcctttatgtcctggctagggtgcataggccctggccaacgtcatcatatggagcctcatctgagatgtaggggccgcagtgactgctctcgcaggtggtgctgtaccagcagtaggtcctgccctcttactgctcgttgcttaggctgaggagaagaaagttgaagacagacagaagaaaccgggagactgatagacacgtgctttggccttttggtatacctctctataccagtgtcatataagcttactttaagcgtcattaggcccacatatccattcgggtgggcacggacccactctcccc

SEQ ID NO: 299793 - DNA, 431 bp, Homo Sapiens
gcacgagctcaacttagctactcgatacctgtagcgagagtacgagcagcatcgccgatagtatgcgcggcgtgccgtctacaggtgatctatggagagagttctgcgacacgtatgctatcacagctgctctccgtgaatcatatatacaagatcccactcttagctggataacgagtaagaatctacatagaagacctatatgcataagccctgtagagagaggagccatctctagaccgccctctcattccactacatgctgcactcacagacccgagcttatggcgctatggactagacgtcctttgagacagatcaagatgtatcaatggagagaagacactctcctgaatcactgcactgtacagatgagcatgcacatcagctgttgactataagatccagatctactctaccgacatgtgtca

SEQ ID NO: 299794 - DNA, 426 bp, Homo Sapiens
ggcacgagaggagatgaggtgtgcgttatgaccccactgagagatgaggaagttgtcactctttgcacatggtctcccagatagtagatggcagaactggagtacctagctcagctaacttcaagtccccactctatttattctcccctacaccccacctggtttcctctatgggtgagaggaggatcagtcctgtggtctgtgaccttagactttctgcttagggtgtatttctctttgtgttgggctggttcagaggagtgaggcttggaggaaggtgtagacgggttccttggtatcaagatttatctcccacgacaggctatgataaggaggtgatgagcatggacactgtgcttgctgaacctgcctagccagaggtgctgagatgtgcttgtgcagagagcagatgtctagaaggacaag

SEQ ID NO: 299795 - DNA, 350 bp, Homo Sapiens
ggcacgagctccacctgtcttgtagtggactcgtggtcctcgtcatgtgccagagccctccacctttctcccctcctctcaagccttcagagaagtttctgtcatggagttcactcggctgcctcaggtgctctggctcagccaagaacattgtcagggctgcgtggtggtctctttgtgtggtctctggacttggtctggcaactgacagcctcagatccagccttggattctaaacacgaggatcctgcatcgaagctgtgtggtctgcccacagatgatccaggcctcagtgctcctctgtcgctggtgtataggctgtgatcacactgctatatataactacttga

SEQ ID NO: 299796 - DNA, 413 bp, Homo Sapiens
  misc_feature (193)..(234): n is a, c, g, or t
  misc_feature (328)..(328): n is a, c, g, or t
ggcacgagcgagcctctacctgtgcgctctccgccctgtcccactgtcagcgccgcgagcgcgcagagggggctctgccctgtacactaggggctcccgcgggctcggggctgcgccgctggccagggccagacctcgcccggccggccttcttccgccagctgagctcagagacatccgaggatgcctttannnnnnnnnnnnnnnnnnnnnnnnnnnnnnnnnnnnnnnnnnatgctctcgcgaatctgtgattgggtacgttgggttccacactctcacccctcgcgccgggttcactcgatgcacagaccgcgtgcctgagtantacattatgcataataatgtgcgtgtttatgcatatctataggagagtagatctaagtgtgtgtcatgcactgtatataaataaa

SEQ ID NO: 299797 - DNA, 291 bp, Homo Sapiens
cgagaagagctagtctcgagtttgttttgagatttgttcatgttatatacttctcatagcgtattgtacagagcttcgggtgcacacccaccgatgcaagataccgatcagttaacttttgaactctacacgttttttcttaatcctatgggaacctcacatgctcttataaagtgaagtgatacacctaaggcagataggctagcaggaacctggttgctacccttctagccatagctgcatctattcatgtctgcatcgtctgaccttttctccactgaatccgaaagt

SEQ ID NO: 299798 - DNA, 611 bp, Homo Sapiens
  misc_feature (195)..(273): n is a, c, g, or t
  misc_feature (332)..(453): n is a, c, g, or t
  misc_feature (479)..(487): n is a, c, g, or t
  misc_feature (509)..(509): n is a, c, g, or t
  misc_feature (514)..(514): n is a, c, g, or t
gagaaatgggaggaaagggcgagtgagatagcaaagagaactcagaaagtaataaagccctgcagtaatcagagggctgaggccaggtccccagtgagcggctgaacacacagtgattcaaacccactccagacctgtgttcttaatcattaccttcacctggagggacagacctggccttgggcaagccacccnnnnnnnnnnnnnnnnnnnnnnnnnnnnnnnnnnnnnnnnnnnnnnnnnnnnnnnnnnnnnnnnnnnnnnnnnnnnnnnctccaatttagggggctgtatggatattaaatgagagctccggaaatacccatgccagnnnnnnnnnnnnnnnnnnnnnnnnnnnnnnnnnnnnnnnnnnnnnnnnnnnnnnnnnnnnnnnnnnnnnnnnnnnnnnnnnnnnnnnnnnnnnnnnnnnnnnnnnnnnnnnnnnnnnnnnnntagaaggaacaacaacgaacaaacannnnnnnnnggcaagattaagtgagatcttncattngacatgcctggctaaatggcagtgcccaacagatagaaactatgggtattgtaaggactgcttattgggtacatatgctgtgccatgggaggtggag

SEQ ID NO: 299799 - DNA, 145 bp, Homo Sapiens
gtgtcagtattttcacctttgtgtaatccccttccctagaatatccactggatttagtgattcagtactgacaagtttggtagaatgcagcatagtgatgggatatcaattgtgatattaaattaaaaggactacagcaccacta

SEQ ID NO: 299800 - DNA, 374 bp, Homo Sapiens
gatgaccaggcgaactgatcatccgtctaatcccaacccattgtcccggtaccacattcccgaaactaccaagcatccttctgttggctttctgtcttcttccatcctgtgtgattagtgtgattccaatacactgctttgtgtaattccacgaacttgcacctggactgtccttgtgatgaggattcccagcttccaaacttaatggtgattttctatgaagagctctgggtcctggatgtgtagtaagaacgaggaagttcaagaggcatcagccagataagacaaggtgacactgttggcagacatttccatttgtctctgctggatcttaacccctcaggacagtgctgcaaagaagccctcacgtggtg

SEQ ID NO: 299801 - DNA, 401 bp, Homo Sapiens
gcacgaggggatgctccaagagtctgtgtgggggtttcccttgggtcttggcaaggcctgtgctgcacatgtgtagagtgaggctctgtaaggtctaacagagagtagctgctgttaatgaagaagataataaaggttgcatagttttggagacattggagttccaatccaactatagtgggaatactctattgcttaccttggtcaaccacttacaaccctaaaaaggccatgctttggaagtaagggtcatgtcctagagtaaggaccatgctctaagactaaggacaaaagcaaaataaacccattctaacaaagcatataacaaagtctgacaggatcaagagtattccttactaatctaactgcctacaagagaaaaattcaataccctttaaagg

SEQ ID NO: 299802 - DNA, 422 bp, Homo Sapiens
ctgtgtcccagggtgtggcttagactctatctctcgtgtcctatgcagaggatcacatcacaccgatttgagctcaggcctggaggcgcacgagagagagattgcgctgcggggatagggaggcatcgcagcgtaagactcggcattagtgcacacttgctgatctaaggaaatgtttacagaggcataagcctggcatgggaatttattgaacgatctgtcccgaagtgctaattataagaggtcaccattgtgagatggtctattggcacggatgccttcatactatatgtcgcaacgaccttactacagatgccccctgtaaagaccactttggaaccataacttacggacgtgcaagtgacccatctgctagatacgcttgcttattgcacagctgatctatcaagctcaagatcctc

SEQ ID NO: 299803 - DNA, 425 bp, Homo Sapiens
ctgtgccccagaaagatgtgcgtaagtcccctgtagagctgatttacgtaccgatgtgtgctgtccagactgcataccgggaccgtagggactgtggctatcccgcaatcctaccaatgtgcgcccagccagataggggaaggtgccgagcacctggctgaaggcgtctcggatgcgcctcagatcaccgcgtgaacgggctgaagattcgccagcgtgagaagaaccaccgcaagtaccgtaagatggtgaagaatacgcgcatactgcggatgaaggtccacgagggactcctgagacaccagcagacgataggccccctgcttggccctgggacggcatagagctgcgaacacgttggtttggcacaaattacttgaaggaccctatctctgcgacttgcatatcaaggacgagcaagacct

SEQ ID NO: 299804 - DNA, 400 bp, Homo Sapiens
agctgattcaaccccatgtgctgatataaggcgcggcctaatgctccgtaagtaactgtgacgacattgcaccgggaactggctctctcccacacagtacactgagagtcctattgagcctgctgagcccatgtactgtctgaaggaagagctgactgtctgtggacgagattgcatggaccccgtgagagagccagggccagcccctggtcctgaactctcacctgaactttcgggcacttggcctgttgccctgagctgcccggaaatggcttaacacattccaccggacacacattctgtgggaggtgaccggctatgccacgcacaacctacgcactggagccagcgtcattcgcacacgtgaatgatcccctcaagttcattcaagtgctctcgg

SEQ ID NO: 299805 - DNA, 369 bp, Homo Sapiens
gaaacattggcactttccagttaggtggatcccatgagatctttgcttcctggtcagagtagctcattgtttcagctaaaaatagttgtattctttagttaatataaattcatttctaaactaaatgcaaactcatttcccctttctgtgccatgtgtccttcagccgaggaactgcgtactcgcaaaatgactgccagcttgttaaagcgggttgatagatcattttccaataaaaggtattactgcctttcttctgagatttgggcttacaaagtacactcacttcttattatactgagtttgctttcttggaagtcaaagaatctgattagaatttgttgtcaaatcctgtgtttttaattattta

SEQ ID NO: 299806 - DNA, 294 bp, Homo Sapiens
gtgacttgatttaagggaaaaaatgactggctatattcagtcagatatggcaaaaagtctcaaggtgttaatgtgaatgattaaggtcttggggggggtgtcccctatcagactacaggtgtttagaggcacagaaaaaggtgcagttgggttcttaatgtgaaatgatgagaagcacaactccagtgtgtctctttgtgtagaatgtcagcagacaccccctgctagatgtgctggatcatgggaaagcatttccatttgttactagattgttcagaagttttaatttatgat

SEQ ID NO: 299807 - DNA, 370 bp, Homo Sapiens
agttaatgctgtcttctaagttgggtgaattgcatagctgaggctgcttgaattaaggcattgacaccacaaagcttccatttccccatctatagagcccccctaggtgcccagttacactgtggtaagagattgcccagataagtacagcagaaaccttcctgaccctgactgacagatacttgctccagagccaagaaacagtcacatgttggcctcctgcaccgagggagatgatttttattgatttcgctcttcacacagtgctgacggtgtaggcctgcagaagagcaagctgatgaaaataaagattgtgggttgccagctcatgtttgtccttatctccaaggcgttgaagtgtcatgatttt

SEQ ID NO: 299808 - DNA, 345 bp, Homo Sapiens
cctgagtgagtctcagggtccccaagggtaaatacttggagaacatctggcctacgggagtgaagacactgtaaggcagcttgaggcgtgttttttggacttactttattatgccataatgatttttatatgcattgataggtatgtatagggtcagtgctaaacttttcaggtaatccaccatgtgttaatttggtctcatacaccaactaacccaccacgtttaattaacctgtcagcaaagggaaactatatttaaataagccacttaatacaggtacctgaaatatgtagcaagagaaatttgtcaaaccttttagagaattagtggggtagacccaaatc

SEQ ID NO: 299809 - DNA, 270 bp, Homo Sapiens
gggccttaattcaagtaaaaaccctttctccttcgtgggccctgggctcttgaaggtctgaaggttcttgtctgagcacggaagaaggaaggacccaatgcacaggtgtcttgcaagtccgcccgttggcttacagcacccacctggaacttgcctgtgaccggttggtccaagtgcatcttacaggcctgcctgtgcacacctgtgggttcactctttacaaagttttgtgaaatagtttccaatgtcataaaagtgcaataaaggtac

SEQ ID NO: 299810 - DNA, 394 bp, Homo Sapiens
acacagaggatatatacacagagcatgagggaaaatggagtatgtgagctcagatgaggatggcataataggtttggggtagacccatatgaatgtgtctctctcaactgattcgtagatttcagcagaataataatctatagtcattaacttagagtgaagaatcaccactctgaaagtgggtgagtgaaccaattatgaaaatgaatcaaattggctatacagcactgagggcccacttgagggtaaagggcatataaaatgagcccagtgagcatgggtgagtgcatatcttttttcaactctgtgctccttcattggtgcatgtgagaactacatagagaatgctatctagctatggttagagagtttccacaggactaccatggagggg

SEQ ID NO: 299811 - DNA, 236 bp, Homo Sapiens
gagagagcgcctgctccttaagtgttcctgtgacacgtgccactgtgtttaggaacctgtgcgtgcacatagacatatcaccagcactgtagacctcacaagtgctctcagacttgcgctttggatgccctctcttgggaatgtgcccagagctgtgcagatgtgtctctcctttgcaattttgtgctggcttcccttagactaaaagtgtgcagaacccttaattctgttaagtc

SEQ ID NO: 299812 - DNA, 372 bp, Homo Sapiens
aggagtatgtgagtatataagtaggtggaaaggggaaaaaatcacctgtgtcttaacatatcagtctagggctctagagagatatgagccaactgcaatatacttcagtgccttgtggatattaattgttaatgaaaactgaggattgtagggtgcattgccaggaccaaaagcaaaatgcaaaaggtaagtttcagaggtgggtggagagaccatacaccatacctggggtaatgtgactgaatccaaagcaggttattttcatgtgttcttttgaaagagtgatacctatgtcttggctgatgcacgggaggtagaggaaaatttattagatatttggatatgtgatgacctcagaaggtaaagtgagga

SEQ ID NO: 299813 - DNA, 380 bp, Homo Sapiens
ggaaacagtgagactgtgccagactatgggaagactatagacctattagctgtattccatgtgatcttttgttggactttgtgattggaggtgagagtgtagaaggcataatgcacgtttttgagacacagggaaatgtgaatatagcctgtatgcctacacttaagtctgaagacatgtaaaccatggctatactaaccaggcaaatatttgaacccttaaaggaagaattttcttaatgtgggaatggtatcatggttgtatagaatgtgtcctcctcttgggagaagtgtgttgaaaatagggtttgacgtctaaacctattttggtttggcaaaaaggacctgtgtctgtacaaaagaagtgtgagccagtatggc

SEQ ID NO: 299814 - DNA, 425 bp, Homo Sapiens
ccgggctgtacgaattcggcacgcgaggagatgtgtttacaagcgtgtctctatcgtgggctcacagagcacgcgctcgtgttacatcagcggagtgtgttatgtgttgtagcgtgtgtgggtgtgtatataagacgagctatatatcacatctgtagatagatgtggcagtgtggacactgcgctacccactagatcacgcatgctattgctgtgccttagagaatcttaggtgtgttgatatcgcgactgagaaggattgagtatagtaagagcttgaaggcttataaaagccgtgaaaagggctatatatgggggctttgcacgcatttccgggaccacttaagacttgaattgataggctcctgtgggcttggaactcacttgtttcagggggcttgtgattgcaaatcatgcccgaaggg

SEQ ID NO: 299815 - DNA, 337 bp, Homo Sapiens
gaagtgcctcctctgtgctcatatcacatctcatatctctctacacagacactgtggatgcccctttcttgtggagcctttctgtgtgctctgaagttagctatttctagacctggactatttctcatgcttattaagtgtgttaatgggtacacaaccactgagaattgtgtccaacacactataaactttcaaggagagaggctgtggcttcttcatggttatatctgcgtggaacactgagttcatggcttttacacataattggtcaacagagcaagtgccatggaaaggcaattcaatgggtaaaattacctcgtacttatatcttactctt

SEQ ID NO: 299816 - DNA, 379 bp, Homo Sapiens
  misc_feature (96)..(96): n is a, c, g, or t
tgtacgaatactgcacgagagtatagacacacactctactatatacacagctatacctgtgggagatgttgagtaaaactcgagatgtatatgtgntgcacaactatatacatgtgactcttcatattgagaatcttagacattgtataaatcacatgaatgtgaactctatataggacaggtactatattttcgtaagacaccaatatttactcggcattccatataataaaaaatactttaagttgataaccaactgaatatatgaagactgcgatggaattcaaccacatgggtggttgcgtgtacacagcctttgcaaatattaataccatttatcatgtgccacattttgcaagacatttaaggtcaacattcc

SEQ ID NO: 299817 - DNA, 621 bp, Homo Sapiens
  misc_feature (20)..(20): n is a, c, g, or t
  misc_feature (34)..(34): n is a, c, g, or t
  misc_feature (47)..(48): n is a, c, g, or t
  misc_feature (55)..(55): n is a, c, g, or t
  misc_feature (61)..(61): n is a, c, g, or t
  misc_feature (64)..(64): n is a, c, g, or t
  misc_feature (70)..(70): n is a, c, g, or t
  misc_feature (109)..(110): n is a, c, g, or t
  misc_feature (122)..(122): n is a, c, g, or t
  misc_feature (203)..(203): n is a, c, g, or t
  misc_feature (489)..(489): n is a, c, g, or t
  misc_feature (559)..(560): n is a, c, g, or t
  misc_feature (599)..(599): n is a, c, g, or t
cgcgcgccgttgctaggcgnagatatatcgtgcnaccgacagtagannataatanagaacntangatgcncccatcataaatagtagtagtgatatgtagatgcacaannaaagagtgtggnaagatgtggagaggacactctcgtcgacatgcgtcgtgggtctctttctcttcatcgcgccttctctttctcacgagcgcnccaaacactcttcggtgtctctctcacagggcgtctcacgacgcacgagagacgctctgtagagcgcacgagtgtgcgcctctttctcttctgacacacacacctcgtgctgtgtacacacacctcttatatcacgacatcctgagtgaggagacctctcctcgtgtggggtcatctctgcgtgtgctcctctgcgttctcacgacaagagcacgcgcacgagatgcacacgacagagaggcgcacgaggcgtctgtggcgtctccacaacacatcttctatagtngcgcccacatcgtggtcgcacacgaagagcgacattcttgtagaagagcgccacagagagagcgccctcnntctctctcttctagacgacaccctctctcgtgctgtgcncagacgcggcatcttgtgcgct

SEQ ID NO: 299818 - DNA, 398 bp, Homo Sapiens
cggcacgcggggaaatctcatacccagagacagagaagaggagacatgtgcctcgagcatatggctccctctcaagctagccacagagtgtgagcctaaggagagcgtgtggcatcagatggagtgatggacacaagaggcatacccacattcaaaggttataattggcaagcttcctttctcttgtttcccaagtccttcctttaaggctgggtggtggaacatttggttggtaggctggcagctgagagacctggtgtgggagaaccaatgggggccaaggaagacttgaagcacaaagggctagggaagttgggagcatttttgtgagcacacaaggtgggaagaaagaatgcgcgagaggaccgaatgtgcctaatagggaagacccacgtgct

SEQ ID NO: 299819 - DNA, 375 bp, Homo Sapiens
agcacgtgaggactctttggatgaggataaactcataatagctgatgaaggacatatccaggaacagaaacaggaacagtgacttaaaccaggaccaacaacgaaagagatgtggcctcatatagagagtgagttcgatgagaaccacaacaagtctggcaacgaggccgcgagttcccggaggccacgaagacacgcggtcagatcaggacttaaacagtgaccaggcattcagaaagagaagggccttcgggtctgagcaatctgaaaatgagaatgtgcacacagggagaagccaccacgagattcttggaaagaatttttgccaagtttttccaatggcccaatcgattcccgaatcgagagagggacttg

SEQ ID NO: 299820 - DNA, 406 bp, Homo Sapiens
gctgtaggagacggcacgaggggaagagcgccaacataatcatgtgagatgccgctatgtatagtgccgcgtaacacgcccacttcgccctgtgctttaaccacagccactgctgctgtgccgccttccggacctctttgcacgaggacatctatgatgaggttgtggagcggaacgttgcccgcgccaagtcttgggtggtcgggaacccctttgatatgcaagaacgagcacgggccgcaagtggatgaaacttaagttaagaagatactcgggttcattaacacggggaagcaagaaggggccaaactgctgtgtggtgggggcaatggtgttgaccgcgggtactctattcagaccactgtgtttggagaagtgcaagatggcatgaccatatccaaggagg

SEQ ID NO: 299821 - DNA, 391 bp, Homo Sapiens
cggcacgagaggctgtagcactgaaaacagggttcattataaatattatatcacagtgtggagtgtggaaaggctgtggtgagatgggatatgggtcatgccacatgtttgtgaaagggaattgagaatggctcaatggattagaataagggacttataccttctaaaaatgtgtgatggagtcataggcacagaatgggaaggggagaattcacccattagcattttaagtgaggagtgtgacgataccagcaggttatgtaaacaacacccattattacaacttaatccctgagatcacaatttttaggaaaaatttcttacatttatatataatttggcttccttgagtagctttcctctgagtagagaatgtgggatcctgtgtatt

SEQ ID NO: 299822 - DNA, 355 bp, Homo Sapiens
ggcacgagggctgtgcagagaactacatctcgtgctttctgagggagaagacactctttctctaccactatactgtgccgcactcacctttcaaatcctcttggtccctgtggtcctgcagcacataaacgaccacctgtgcacgtcccagcttcagaggagcattttcagcgccctgtgggtggcctcggacttcttcgcgtgccacgtgttcaacacgctgtgcccacattacctacagggacacaggacttttgccacatgaactcaagggccttcgctggaaagaaagctgggacatcttgatccgcaggttgaagggtcttggtcaatgtacgcaatgagcacagggggt

SEQ ID NO: 299823 - DNA, 412 bp, Homo Sapiens
agcccctgagctctcagacgcgtacacattttccaaaggagagagttcaggccctcgtgtcactgtcagcagaacgctgaccatgtgagaaactgtggtgtgtcttggtcttgaccacagctctctcatagcctttggcccgacagacactgggaggaaggcttttgtggttcccaaagaggcggatacttcctaaggatccctcaaagcaccggtaaccaagcctctcaaaggctctactgtgtgccttcacttctacaccgaactgtgcttgaaccgcgggtaccggattttcttggatgcgcacccagagacacagacacatgagagactcatattttgggctaaggatataggatacacggttacagtgggtgggtctgagaaattattcgagggtcctgaagacaca

SEQ ID NO: 299824 - DNA, 102 bp, Homo Sapiens
ctgtaggagtacggcacgaggggatactgtgaaaggtggggtcttgcgtatcactctccttttacctcgggtttgacatatgagaggggtatttaaaaactt

SEQ ID NO: 299825 - DNA, 389 bp, Homo Sapiens
gaggtgtgtggcgcgcgttcgagcgcgctgtgtggcgcggtgaactcgtgctccaacgacagcagcgttctgtagctgtgtaagcgcgaagatagaagaagagcacaggcagcggcacagaagagcgcgcccccgggttcgcagagacccgacacagaccggcgccgccgcttggcccggggattccaagaggaaaggccgttcgggcttcacacttaacttcgtgggcaaacgcacaagcgggaacaaactatacccttaagacacggaatatgttccaagaagcagaagacacgaggatgagggattaacacagttaaggtgacgcgtgggccaagtacatggcagaagtgaaaaagtgccaagcttaccactgcgcggaccatgat

SEQ ID NO: 299826 - DNA, 355 bp, Homo Sapiens
gcacgaggcgagaacagaggaagctctggacacagacagctgtgtacacacagaggacatatgtgaaatgggtaccaaatgggacacttgagaattatatgaccggaaaaagcgcatatttaagctgtgacaaggagaatacataggccctgagaaagagatggaaatatctacatgccaagtgagcctgttggttaagtgtgttggcacggagaaagcgctgtaggcatttctcaatggaattgtgggaccagatgtgtgagacattatggtcctgggcccaaaagagaggatttgaagggtcggttgaggaactgtgcacaaatatagggtgtgaaatttggacagggcaaag

SEQ ID NO: 299827 - DNA, 391 bp, Homo Sapiens
ccacatcagagaggactacacactgagagtgatgaacgcgcctgactctgactctcctctcgaattctatgagcatgcgcaaggctctgtgggaggatgaaagagagcgcgcctgctacgaacgctctcaacgagtgccacatgaatgactgtgcccagaactttctggacacagaacgacgtgatcaagccagctgactatgtgccgagcgagacacagaactggttcgctgtcgcgtgctgactcttggaatctttgagaccaagtttcaagtggacacaaggcaacttccacaagtttgacacgggtggccaacgcgatgaacgccgcaagtggatccactgcgttaacgatgtgactgtcatcatattcgcgggggccagaaacaac

SEQ ID NO: 299828 - DNA, 398 bp, Homo Sapiens
gagaaatgtgcactgtgggtattgacctgatggacatgggtttggacatatctgtagaccacaggagatgatgtggcccggatcagatgtgacctccgcgacatcatcactctgataccaggagacacttaacgtgattgagaggtgccccaagcccgtgatatggtggcgcccatgggggctggattggcggaagtgtggaccttgtgaccggctgtgacattcgcgactgtgcccaggatagctttctttcacagtgaaggaagtggacgcgggtttggctgtcgatgtaagaacactgtgaagcctggccaagggcattgggaaccagagcctgtgcaacgagctgtgctttaccggccgcaagaagatggctgacgaggccctgtgcagtgggc

SEQ ID NO: 299829 - DNA, 345 bp, Homo Sapiens
cggcacgaggcacatactgtgttgctgactacactgtgaaggtcgccatatgtggagcatatgtaattactacacattagatccttgtgagactaggacttaaaaattattgagccaagaaacataggtcctatggattttcacattcaaattgtgtaattctggttaatggtggaaatgcctcggggtggtggtggttaccaaattaaacgtgtgactattagcacttatataagaactggtatttatacacacgttccttataggcagaattttgtgcagaacgcgagtgcttttcttataatgcgtggtggataaggtggtttccatattacctttagagaa

SEQ ID NO: 299830 - DNA, 355 bp, Homo Sapiens
agtatagacacacctctactattacacactatcctgtggagagtgataaactgagtgatatgtgtcaactataactgtgactttcatatatgagatttcttcagtcatagtgtagagtagcacatgtagatgtgagctctatataggacacggtactatattttcgtaagacaccaatagttactggacattccatataataaaaaatactttaatttgagtaaccaactgagatatatgaagactggatgtgattcaaccacatgggtggttgctgtacaagcctttgcaaatattaactaccatttagcatgtgccacattttgcaagaatttaagttcaacatttcaaactg

SEQ ID NO: 299831 - DNA, 376 bp, Homo Sapiens
agcaatcgcattcatcagaggactctctctatagtgtatatgttgaggactgtggtataagagatattccaggagaaaaaggagaaatgaattgaggacatttcaagcagagagtctagaatgggcacaaatatgtgagacctttgtgtaagaattttatatcttggatttaccacttctttatgagaactaccgatatacaggaaaaaggcaagggagacaaaagaatgggaggagatggaaagaatgaggcagacccattactgggactgtgaaaaacaaattcagatgtatgtgatgatttaccccaaaagacattggatagggaggaaacgcttatcttaagaagtgcgcaatatcttataccaaaacacga

SEQ ID NO: 299832 - DNA, 394 bp, Homo Sapiens
ctctttttgtggcattaaaggtgcgcgatacacaacgcattacactatagagaggggatcacgagagccgacaaattacccacgtgtatggcttttatgagagaatgtctgcgaaagtgtgggaatggcaacggttggaaatattttacagaactctttgaatatctttcacattacaggtttagtagataggacacgatattctggcttcatggtgggctctcttcatatcatagacacactggatcatattagaaccctggatacggttacacggaaggttcacatgaaggcccaatgtgtgaactcggatgggcagataccgatgaacgcggtggatggggtatttcacacacgtggtgcttgctacacatttggacaagacatttctgag

SEQ ID NO: 299833 - DNA, 355 bp, Homo Sapiens
ctgtaggaattcggcacgagtgagggtcacaagtgacagagttaaccacagagcctatagcactgttgagagctctgaactgtgcccagagcaaccagattttcctctgagttgtagctatatttggtttccttgtgcattttaatgtcgagtaggatagaaggcacaggactactaactgacctttgaggtgaagtggttgcaaggaaaagctggcctttctggggatagataaggtgaccattcaaaattcacctgtggacttttgggaaacctgtgacagaatgatgagccagacaccaatgtggtttacgggttataggtgagttgaggagtattcacatatggccacaag

SEQ ID NO: 299834 - DNA, 360 bp, Homo Sapiens
ggcacgagctctcgccgcatactgcacgagtgccacctctcctcacatagtgattcacggttgatgcacttgctgtcaaaatcccagcacgagattttgcgcatagcacgagtattattttaaaacctatatgaaaaggccaagggattaaagtggccaaaaccattttgagaaagaagtgcaccatggaggaatcaacctttctgagttcaagacttgctggatagcttccgaagtccacaatttggagtattggtcaaaggatatacactttagatcacgtggaacacgaattgcgggcccacacaaatatgcacaactgagtattggccaaggtgccaagataagtcattgggggaa

SEQ ID NO: 299835 - DNA, 352 bp, Homo Sapiens
acgagggcgcgcacactatgcgcgctctctctctgctgttctccagatctcggatacacgcgacaccatgtgtttcggagacactgagaagcgcctgtgcggctccaagtgctcaacgattacctgtgggacaagagctacattgaggggtatgtgccattacacagcgcatgtggcagtatttgaagccgcgtgcagaccaacggctggcgacttgggtgaagccctacagtggtataatcacattaagtgttaccaaaaggcatgtggaagacacttcaggaagtggagctacacgataggaagatgatgatgacattgacctctttggatctgatgatgaggaggaaag

SEQ ID NO: 299836 - DNA, 414 bp, Homo Sapiens
gggctgtaggagttcggcacgagagagctctcctgtgacacgtatctgtgatatggtggggggaaactcagaacgtgtggctgaggtaggagtgacacgagcctgagaccattaccgagtggaagagcaagggcctcttgcctgtgtgaagatagctggacttgggatctctttcactggctctcttcgagcctttcaagccttctttgtggagctcacaatggcttaatttgtgcaaatatggagcaggcacatttaccaagactgtgaaggctgtacaagtgactattcaggcttcaaggacatttttcagcgaatttcaagtggacacacaacaaccggctgtgactgtgacaagtgtcaatggcagagatgtctgtggaatacacgatggaagtgacaggagaaggatgt

SEQ ID NO: 299837 - DNA, 289 bp, Homo Sapiens
gcatgagccaccgcacctgaccaatttttagttttttgaggaacctccaaactgttctcgatagtgattgcactattataatttacattcccactaacagcatacaggggttccacaacctcgccagcatttgttattgcctgtcttttggattctgatgaccagtgacgttgaatgcctttccatatgcctgtttaccattcgtatgtcttcttttgagaaatgtctgttcgtatcttttgcccatcttttgatggaattattagttcttttcctatagagctgattg

SEQ ID NO: 299838 - DNA, 378 bp, Homo Sapiens
gggaaaatgaaagaattaaagctaacctgaatttgaaagcaacactttaccactgaagactaaactaaagacttaaatcagtatagatacagataatgttgaggagtgctggaaagaagtataggaaactcactactgctggtctcaattgttttgtgtgaatggagacttattatctgttgatgaagaggcaattgtttcaggtggcttgagaaaagagaggagactatggatcatttaccatgggaaatcaaatagtaaataaattgggggtatataaatggatttcaagcaatgctgaatgtttgccacagctttttagtccaaaataaaatatgacttcaatagaagtggtcatatagtttttctacaatattt

SEQ ID NO: 299839 - DNA, 233 bp, Homo Sapiens
ctcgtgccgcttttttaaagttccatacaccaaatgatagtcttttgcggaaattgctgcagacttccatatgatcagtgtctcatcccacattccatatgctgctgttcacattctattcctatgagctacagagactgtgtactccttacaccctgctttttgacatgatcagatcctttcttgtccccttctgtttttaaatgatcttccctctttccttttatctccac

SEQ ID NO: 299840 - DNA, 325 bp, Homo Sapiens
cagagactatgtgtgccactgtgaaggctccaccttgcgcagcaagctgagtgaacaggtaggccctgtgacccactagttttgcaataacctgaatacggagacagagggcctgacgcacgagatgagcaaggatctgtaggaggcgaaggccaatgtgcagccttacctggacgacatccagacgaagtacaaggacgagatgcagctctacctgcagaacgtgaacccggtgaccgcatagctgcaagaggtcacgcgccagaagctgtacgagctgcatgagaagcttagcccactgtgctaagagatgcgcgaccgctcc

SEQ ID NO: 299841 - DNA, 351 bp, Homo Sapiens
agaactagtgtcgagtattgtcacgctctttttggctgggccctgctgattggtcagaagacagctcagttaaaaggcgaagttgcctctctggatgctatttttctgacgactgtttctaaggctggcagaaatgagcagataacatggcatgagtactttttagagcatgtgcatggtactgatacctgattctgggcagagctgcttcttctgacgtcatcagatgtgtgcgagcacattggatgtactgacctttgaggaatgccgagtattgtatcgttctaatatttactattctgaaatgacgacttaacctgtcggtttcccaagtgaacgatccaggtttcc

SEQ ID NO: 299842 - DNA, 166 bp, Homo Sapiens
ctgtacgagaatttgacgagaggtgtttatatgtctggaaatatcacgaaatgtctggagctgttcagcggtcattgaggtacctaaggatatccttagagaaaatgaaaacagggcacagggcaggaaagacaaacgtaaagtcgatgaaacgatggaaagggta

SEQ ID NO: 299843 - DNA, 161 bp, Homo Sapiens
gcttcttctataaccggcagctcggatcagaagccgcagctaggggaagcaacacctagggaacaaccgggataacaggttttactgtccgatacccccccggaatagcgtcactgggacatacgaaattttggactcggaaccaccggttaataaatcgg

SEQ ID NO: 299844 - DNA, 225 bp, Homo Sapiens
gtgggtcccccgggctgtacgagtattgcacgcgaggagttgctgtcacatcatataagcctgagaagacagagttttgtgcctatagagcgacctgtggttagagaaagctgtgatgtgcacacaccaaaggcctggtgtgaggaatgtgaccttagagtcctgagagggacacagggatggaagtgcgcgagccagaagagctctgtgttggatgccctgact

SEQ ID NO: 299845 - DNA, 310 bp, Homo Sapiens
tggacactacatataggatagagagacactagagaggctctaggagacacttcttgaggtgctacctgagctcggtgactgaattacggacatttaatcattaacacacttagatgctgatgttattgagagtgaacgaccacaaggttacacgaatcttctgtgagaattaggacgagccttgagggagatttcaggggaggggtctagcttcttataatgtctcatattaaacggaagtgtaactatcctttatattaattggacccagatttacatcaagaaatcttgaggaatatttatgtgggca

SEQ ID NO: 299846 - DNA, 350 bp, Homo Sapiens
  misc_feature (284)..(284): n is a, c, g, or t
cgacgttagccagcatacgtagggtgactcccgccgtctgctgcgaagaaatgttggacgcgcacgggcgttgcacgagccgctcatactctgccgcgcgtctctcgtggggagaagatatacacgtagcgctctatacacacatactcgtgccgcgacactacactcttcacaaacctctatgtgtctgctcgtggggctctcgtgagagcactatagaggagacacactcgtgtgacgaggtctcagagtatcagaagagaggcgactatttcagaggcgcnctgtgagcgtgtgagctcgtggacacatctatcgcggtggcgcacagtggtgtcacagaacacctc

SEQ ID NO: 299847 - DNA, 299 bp, Homo Sapiens
ggctgtggctatggggctgtccgagagcacacaccgtgaccactcacacactagcgccaaggctctgtgggactgcattcaggcattgctgcagagtggcgcggataaaagggacgagtgattggaccactggcccaccagcctattgcccctcagatcggaaagtccaggggtggtatgcgaaagcgcgactgtggatgtattccaatttactgtatatcggaatcacttccatgtgagtgtgtgtgaacgaggtgacggggatggcccttggactgaccctgtactggcagagtgac

SEQ ID NO: 299848 - DNA, 339 bp, Homo Sapiens
agtgtatgcacacacatgttcttgctgtatagacatagactaccatgatattttaacgtgtagcacagcctgtatatatacatccgattctacatcgtcttaaatagcttaatatgcagtttgtcctcaagtagcacggcctattacttagtgcaatgcccctgatagtgctgacatttacaggtgtgtaaaggtggaacacatggaaacagactttccccgttcttctgtgtatcggggataggagcaataacattttgaccataggtctaagactcccagaagaggtaaggggcctggtctgggatgagtgtgcacagatggaatatcggttatttg

SEQ ID NO: 299849 - DNA, 220 bp, Homo Sapiens
ggaccccgctgtgtgcaggaattttacgcgaggtttttaaaaccgagagtgtaaactttgagaggggacaccgttgagatatcagagggccacacttgtggcacggtgtggagaacctgagagccaggcaggggtgtttgcttataaaatacaccacaggttctaactccggggactaagaggggtaaccgagccagggaagggaggaccactggggggt

SEQ ID NO: 299850 - DNA, 366 bp, Homo Sapiens
cggcacgagaggttctccatagtgcgcgtgttaaggcgccatgaggggtgacagaggccgcgttcgcggtgtgcgcgtctggtccagaggagagcccacaaagagggttcaaggccttgtgccacatattccatttgacttctatttgtgtgaaaagggcttttcccgggtcaaggcaggacctggtgaaactttctttaatgagggcttgctgaagaggaatcaagacctcggttccaattctggtgaacagggatctattctttctctggtgacaaaaattaacaatgtgagtgagaatctgagtggggcttcagggacatttgaagggcgaattggagaagttcgacaggtgggatactatat

SEQ ID NO: 299851 - DNA, 170 bp, Homo Sapiens
gctagaggggaccccgcgttgtaggagaattttacgcgcgctgtttaaatctctcgcactatcacgcaaagtctgtagatgtttatgtagcactgagccacattaaggatacccttggcgaaacagacaacacgggaaatggacaccgcaggacccacgcacacctcctt

SEQ ID NO: 299852 - DNA, 111 bp, Homo Sapiens
tacgaatacggcacgcgaggatactgttaaaggtggggtctcgcgtaccactctccttttacctcgtctctgacatatgaaagggtgtatttaaaaacttaatcacagtgt

SEQ ID NO: 299853 - DNA, 354 bp, Homo Sapiens
tggacactacatataggatatagagacactatagaagttctaggagccacttcttgatgtgctacaaaagttgtgtaagagataccaggctgtttaatcattaacacactcagatgctgttgtcatgtgcagtaaacgaccacacggttaccccaattgtctgtgaaatctgtgacgagccttgatggggattacagggtaggggtctagctgctttcactgtctcatattaaacggcagtgtaactatcctttaattcaattggacccagatttacatcaagaaatcttgatgaatatttatgtgggcaatacatgtgtaacttgcacaagtgtaaatattgggcttgataga

SEQ ID NO: 299854 - DNA, 543 bp, Homo Sapiens
  misc_feature (462)..(462): n is a, c, g, or t
tgctagtaagcatagtaggtgtcactcccggcgcttgtacgaagtaactggcacgaaggagaagatgtgtagagatgtcacacgagtctggtgcaacgctgggctgtgaagcacgagaaagagctacacttttgagcgtaacactatacagagagcgtgtgtgtgagagaggacacaggtgcaagtgcacagaatgtgacctctaaggtgtcagagctatagcgaacatgtgtctaaacacatcttgtagagacgagagtgtgacactattttgagcgctctagaggagatatagacatgcgtgtgatgcgtgagagcgctcttctttatatacacaacagagactctctgtggaagacgcgcctctacacaagatgtctctttctagaggtaggacgtgtctatagcgccacacactcgtgacacgaagcatctccttctctctacatagtgaggaatatntctacatcatactacacctcatagtacagttgtagacacgaagtagatactactctcgtgcatacagctgtcgacagtatg

SEQ ID NO: 299855 - DNA, 394 bp, Homo Sapiens
agagggtaccccgggttgtgcgagaattttacgcgcgctgtgtagatatcggggagcgcacatgtgaggcggtggtctctctagatgtgaaagcgtggctctgagagggagagctgtggggctgtgctttggtcctcacacggccttcacagagccaattgcgcacaggacacatagtataagtgaaggcttatggttaaaaacattccccaattatcctaattaaattttggaattaatctaaatttatatatatgaggaaggggcccaatttttataagtttagagtggcggtctgaggacctggattcaaggcaataacgcggcccccttacattacacagtgacggttgtgagaaggaatggcaatttgcgagggagagagcgcgactat

SEQ ID NO: 299856 - DNA, 282 bp, Homo Sapiens
  misc_feature (164)..(240): n is a, c, g, or t
gtggataccccgggctgtacgaatatggcacgagaggagagtgagaaagagggagagtttcatataactagacttttacctcgagttagacatataaaaggtgtatttaaacacttaatcagctgtgtgtggtggattacgcctgagaatccagaactttgtgnnnnnnnnnnnnnnnnnnnnnnnnnnnnnnnnnnnnnnnnnnnnnnnnnnnnnnnnnnnnnnnnnnnnnnnnnnnnnttgaagcttaggcctgagaatctcactgaacccacaaagcct

SEQ ID NO: 299857 - DNA, 365 bp, Homo Sapiens
ggcacgcgagttcacaggtgatctcgagctcgtgtaaatgtgagctgctttggggtgtgctacttttaatatggcatgtgtattactcttggaatatatattagagctaaaggagaaaaatttcgatactttcagataaatttcaagcactatattttttagcttatcttaaaagtggcctataagatatttatatacgttagggaggtaatagcggttggtggcaataacttctattttggaaacatttggcatgccgcgtaatgggttcatgaagagtgtaacaaaggggctcttgagttgggtagcacaggtggctgtgagcacgtatactcatcactatggtaaaggctttattaactaga

SEQ ID NO: 299858 - DNA, 436 bp, Homo Sapiens
cggcacgagctgtgactcacgaggacaccttttgtacggtcactctctgtgctttgtaggaaagagagagagggcagagctctcagaggtacagaagtgagacatataggaatcaggctctacacttcaaggacacactatactaagaccatatttaacacctctgggatatacactatgagaaaatatatacacagtgttgcggtctatagcacatttgcacaaaagcgcacgatatcttatagcacactctctgagtgcgtgagatgacactacgggtctgtgccccacatatactatcacactctctcttctgcgttgtgagatacctcttataggaggatacgtgtgtcacatgacatatcattagacacacgaacactgtgagagagactgtgagagagatgtgcttgtaagagaaagagcgcacgagagc

SEQ ID NO: 299859 - DNA, 421 bp, Homo Sapiens
tggcacgagctcatgtacagaataaacgcggctgagatcatatttaacccctcgggcacgataggagcactctaagagtgcctgtgggccatatgagggcagaaacgcagacattggcaatcactggttcacctgggccatataatcgagatgggcacacgagcactttccgaacgaggttaccttgggagagggaaagaaaggttacacaggactttggctacttttaaggcttgagctatgtggcaagccctgacaggaggcggacttctgggctgtcccgtaaccgggaaggactggtaggtgctaagcttgagctaaacctttggcagcaggtgaatgaggtgtggaactctaagatgaccggcaggtatgagaagtacgcacgggagcttgccgaagctgtgaagtgcaactacag

SEQ ID NO: 299860 - DNA, 524 bp, Homo Sapiens
tggataccccgcgctgtacgaaaatttcacgcagagcaatgtgtgcgagcaggggcctcgtgagtatgacatctgtagtaatagtatatgacagcgtgtcgagtatctctcttagaagagaaactcgagaggcgcaagaaagagagagagcatatcgcgaaccacagagaaaatttgagattcacaattacactctattatatgggcgcatacacaagtctgtaagagtatcactatttaaacagcctcttggactcgtggagaaacctataacacacttagacgtttcatatttgcgctctacacagacatgtgatacacgacgagagcgtctggtgcgacagtggaagcgaagagatctcttatagtggttgagagagcatgtgtataagtgtatcacacaagacacgcgagtcacacaataggtgagacacacatacatggacactagagtctctatataacacaagagaaagagagcacgagttcagacacatttaaagagtgggaaacacacattgcgc

SEQ ID NO: 299861 - DNA, 400 bp, Homo Sapiens
cggcacgcgcgcaggcacagttattaaatgcgcagcaaccatctcctgtgaagcgcacaagcccctctgcgattgggagagggaagtatctccccccaaggctcatgaagatctcattcacaacaatgctaccttcctgtgccatacacgggccacatggtatcgagtctaaaattgagggcctagctttcccagagaacgttggccacaaagctgccagtattggggaaaggattgggccacgagtgaccaacggcaaaccacgtgacaaagtaaatccacatttatacgcctctatggagaaaatgcgcaggtttgtctgagaccacattacacaaatgtgtgggcaaatcagagatcttaaaagtgctgcttgtgagtcaacacactaatggaagac

SEQ ID NO: 299862 - DNA, 388 bp, Homo Sapiens
cccgggctgtacgaatatggcacgcgaggtgtgaggctctcttaactcacagagagactcttaacacagagttccacagaaaaatgtgcacacacgggcacagagtattaaatgcgcaagcacacattgcctgtgaagcacagcaagcccctttgcattggagaaggtgaagtgtcttcccccaaggcttaagaagtttgcattcagataattggttacttcctgtgccatactcgggccactggtattgaatctataaattgagggcctaacttttccaaggaacgttggccattaagctgtaagtattggggaaaggattgggccaggaatgaccaacgtgaaaccacgtgacacaagttatttcactttatgcacctctatgtgg

SEQ ID NO: 299863 - DNA, 473 bp, Homo Sapiens
ctagtgggtatcccgcgctgtgcgagtatttcacgcgaggagtgaggcgctcttaaatcacagagagactcttaacacagatttccaaagaaaaatgtgcacacaagggcacagagatataaatgcgcaagcacagcatatggctgtggaaggacacaagcgcccctttgtgattggagagaggtgagagagtgcgttcacaccaaggcgttataggagtgttgcatatctaaatatatatggttactctcactgtgcgcataacatcggtgcgcacatgtgtatctgagatctataactttgtagggctctatactttttccacaggagactgcgtgggcatatagagcgtgtgatgtatatgtgggagaagagatatgtggccacagagatgtgtcacaagcgtaaacacaagtggacacaagattatattcacatttatagcacactcttatgtgataggaaataccagc

SEQ ID NO: 299864 - DNA, 252 bp, Homo Sapiens
cccgggctgtacgagtatggcacgcgaggagtgaggctctcttatctcacactgagaatgctaacatatatggccacacacaaacgctctcaatgggcctattacataaatgcaaagcgagctgcgtgcatgaggcgaacaagtgccttatcgttgtagagagttggagaagattcacttatggcggatggaggttgcatgccaaacattagtaactctatgcgccataatgttgccaacgtgttccaatct

SEQ ID NO: 299865 - DNA, 399 bp, Homo Sapiens
ggagaccagactcgtctgtgggagagctgtctgtggctgtactacatgctcggcactgttgtgaccacaacacatgtgttggcagagtttttcacagtgatgcctacagaggcgttagaggctctgtacaccggccatttcactttctcctttcccacaaggcaagtggggaagcactttggcccaagccaaggagaccccaccttgagccttaattcctaatgggtgcaccttttaactggatcttttacaccttccagattctggccaacctttaacagtgacaagtgcccaagagacttggctgagcagcttgggctggttttcaatttcacctgtgaggaagcctgtggtcaagctcttagattcacactggcatgagaagggattctgggctct

SEQ ID NO: 299866 - DNA, 525 bp, Homo Sapiens
  misc_feature (103)..(350): n is a, c, g, or t
  misc_feature (372)..(476): n is a, c, g, or t
agcccccgcgctccgcgagaactctacgcgccgagttagagagaccccagacgagagcacgagagacgacagcacagcagtttttgcgccccgagccgcggcnnnnnnnnnnnnnnnnnnnnnnnnnnnnnnnnnnnnnnnnnnnnnnnnnnnnnnnnnnnnnnnnnnnnnnnnnnnnnnnnnnnnnnnnnnnnnnnnnnnnnnnnnnnnnnnnnnnnnnnnnnnnnnnnnnnnnnnnnnnnnnnnnnnnnnnnnnnnnnnnnnnnnnnnnnnnnnnnnnnnnnnnnnnnnnnnnnnnnnnnnnnnnnnnnnnnnnnnnnnnnnnnnnnnnnnnnnnnnnnnnnnnnnnntctatctctacccccgctccannnnnnnnnnnnnnnnnnnnnnnnnnnnnnnnnnnnnnnnnnnnnnnnnnnnnnnnnnnnnnnnnnnnnnnnnnnnnnnnnnnnnnnnnnnnnnnnnnnnnnnnngctcccaacccctcacccgcggaccacaccaccggcgcacctccgcccg

SEQ ID NO: 299867 - DNA, 377 bp, Homo Sapiens
  misc_feature (306)..(316): n is a, c, g, or t
ggcacgagcgagacttataaaagacacgagactactgaggagctcagaaactcgttgtgtctgtgcgctaagtgtaatctttcacgcgcatatagagtgtgtgcaggttctaaatggcatgtgtaggctgcgtctgtgactgaagaattttcaaaccagagtttacaccctttaagaaaaataccttgtgaatggatggttactatctggcaggaaactcggacttaagaagttgaagcttccggtattttatgaagcacactttccttgagctggttatattttatttcatataccatttacccnnnnnnnnnnnaaaatttggagccattcttatgaagctcttgagattgggggtacacaaatcaattttatta

SEQ ID NO: 299868 - DNA, 376 bp, Homo Sapiens
cgtgtggaccccgggctgtacgaaaactttacgcgagatttttaacactgcgcacgcgtcgagagaaatattaaatatatgagaatcatatagtgtgagaaagagaacatgtgtgagaaattaagagaatgggttaacacaaaaatttgtggagagaagagaagactcaaaggggaaatcgaagtggagaggacacttaaacacggggactctggatgggggaattcacggaaaatatggaagggcacttaataatggcaaggaccggtctgaggggaccatatgcgataaggtatattaaatcctacacaaatcctggaagggagatatcaaactcttaatacacctaatttacacgggggacctacacggaaga

SEQ ID NO: 299869 - DNA, 560 bp, Homo Sapiens
  misc_feature (128)..(157): n is a, c, g, or t
  misc_feature (244)..(244): n is a, c, g, or t
  misc_feature (370)..(370): n is a, c, g, or t
  misc_feature (372)..(373): n is a, c, g, or t
  misc_feature (422)..(422): n is a, c, g, or t
  misc_feature (472)..(472): n is a, c, g, or t
agtggatcccccgggctgtacgaatatggcacgcggcgagatagaagccctgagagaggcacatgtgactcgtgcgcaaagcgtatcacacgagtacacgagtcagacacagggcacagtgcaaatcnnnnnnnnnnnnnnnnnnnnnnnnnnnnnnttgtgacacaagatctctgcgtttgtgcgcgccacagctgtgagatgcgacatggcgctgagactctgcggttacatgtgaagactntcgcgctctctcgggtgtcacagcggatatctctctgtgctctagagctctccacagtgtgcgtgtggagatatcacagcgacactcacacacacatagcgctcggcgtataatatttttgtgttntnnttttttagatgaaagagcagcgggtgtttacacgctgtgtatggcacgngatatgagctctgagactctctcgagcactctgtgagactcggcacacanctctgggctctccacaagatgcgtgtggatatacacgagcatgtagagcacacgccgcgccgcgcacaatatgtgctctctcttcaca

SEQ ID NO: 299870 - DNA, 365 bp, Homo Sapiens
ggctgtacgaatatggcacgagagcctctgcacacagaggacgccactgtgctggggcgtcttttgtgatttggctctgggtgttgacagtaagtgctttttggatagagaaatataggtagaaagtgtctaacacattggttttataggcacacaaaaacacaggttatactatactggaccttattttttgaggtcttaataatgaggaacattcacattttgcattgacagggaattcaagaatgctttatataggctttaaaggaatcttgactatggcgtgcacatacattagaacatttacttagagttacagataaatctgagagcgtacttcaaggctggaccacatggcaatttga

SEQ ID NO: 299871 - DNA, 385 bp, Homo Sapiens
agtgggtcccccgggctgtgcgagacggcacgagcgcgtttttcacacagaggagggggacctctatatccctgctctttctctctagactcggtcatatccacaggggtgtgttcggcgagatgcgacacacagagtgagggtgcgtcatagggttaaaggattgggagaaggaaatttcaaaggctctgggtggagtggccttggtcagaatcttcagcagggtgcaattggagagcacgtgaaaataggggatgagaggaccggatttgcgaaaacatggggtgctgaagagagagatggaaaatgtgacaaatcacattataccctttttggagacaaattatgcacacgggcgacttttcgcggaacctataggggacaa

SEQ ID NO: 299872 - DNA, 323 bp, Homo Sapiens
agttgaagataccagccagggttcctttaggacagacctttacccacacctctctcttacaacctgaaaagtatacctctcccaatatccatacgcagcagcagcaacccaaagtcaaagtatccgtgcgcacgacacacttggctgactatatgtcctgtgcgcattcgtgccagaaattcgtgtctcttcagagtctcatcctcaaaccaagccttcaaaacgcgtttctcataacactctctgtgcacttatgtttataagagagctctggatagccaagtgctcttcccattcacagagttagtacctctgtgtaccac

SEQ ID NO: 299873 - DNA, 362 bp, Homo Sapiens
ggcacgcgagacacgcgcgatctgtaatgtgttgaaaggctctatgtgacactgtgtccgctacacgcagatagcgggatctgaggcgccagcacctcagaacaaggaccacaaagctgtgtgatccacaagacaactttcaacgagagaggaatttctattggcaagcccaagccgcagagcttgcaggcttaccccggcttcatatagcttaaaggccctaccaagcgagccactgagtattttgcggaaatgggcaaatctgagctgtagatgcacaagaatcgacagaagctgtagactataacaggctgtcatggagaggtctgaagggtcttcagaagagagcagcacgagagagc

SEQ ID NO: 299874 - DNA, 374 bp, Homo Sapiens
gctgtacgagtacggcacgcgggaagctctaggcacacagagcagagcacagaggcactcagatataaggaggacacacagagcacacatgaagagagagagtggcgatggacactcataccaaaattggcgcgggaaacctggcttctctctggctgtgaacctcgggcttctctatctatatgggacaccggcacaaggaccttttaagagacatggaatttcacagggccacacactttggctttggtgggaaaagtgtttggcctataggcagggtctctggaaatttgacacagagtgctataaaaagtgtggaacgtgatcagaacacagcttgtgaaagagagtgatattgtgcttacaaatcggag

SEQ ID NO: 299875 - DNA, 368 bp, Homo Sapiens
cgggctgtgcgagtactgcacgcgagacactctacattactatcagacacacttagacacaccatatacccccatatagtgtatgcgatagagaaatggaacctgggcacaatatatatggccgcaagggaaagagggaaaattatatacccagcgtataatagcaagggcttaaccctataccttctggataatggatttacttggaataaccttgcaaggggaggccaaggttagacaccccggaacccggccagcgttcttaggacaggttaaagagcgcacccggctatgtagcaaaatatatgggaagaattatatggggaggcgactttaaattggccacaggaacctcttaatacccttgg

SEQ ID NO: 299876 - DNA, 302 bp, Homo Sapiens
cgagcttgttcaatgtattgttgggccttataaccacatcatatcgaagccacttatgggcactaacatacactatgcccttatccaggctgcaaggtgtctattggcaagggtctactgtcaagcttgcacacatttgtggaacatggacatctggacccagatctgtatggaaatgaccttgccatacacgccttactgagacacaggaaccgtgtcatcaaagtttatgaacctagtcgaataccaggaggcacagttcaacatgtgtcacggaactgcacgtgaacggattgacatag

SEQ ID NO: 299877 - DNA, 404 bp, Homo Sapiens
gctgcaggattcggcacgagtttggtttgggccagtaagggtattccgtgcagccatcaatcatagcactggtgcctgtggagacaccggccactggagaagatccagaggatgaatcacagcagtagacatggtatggggattagaggtaatggggcatgcttgtttgaatggagagtgagagggctgtgggagatgctatggaagatggaaatggtgcttgtggagtgttggttggagggagagtgataagctgtggagctcccgtgacatagagtttagacctacaggtttgaactgatcagggattgcccaccgaatcgctaccctttgagacaaccggaaatacttaaatcgattgggcttacatcctaaccatcaaaggccaatgttccgttctggcg

SEQ ID NO: 299878 - DNA, 342 bp, Homo Sapiens
aattgatccattcctccattagcatgtatttatctaggtcttattatgtgtggggcctgttggggcagtaatgaacgaagagtaatggcccctgactgcatgggtccctacagtctagtgtaatggactataattgggtagtgggtgtcattctgtctcctcacttagacttccaattccttgctggtaggaacctattttctggttcttttggggtctccacacggcttaatacagcactgcacacaacatacaaccagtagcaacagataatgtatagtgagttattgaatccttagtctcatggagtgggcaggatatgacggaagaatgtgggttctg

SEQ ID NO: 299879 - DNA, 250 bp, Homo Sapiens
cctactttataatagtgtcaagaacagtggcaagtgagagagtcctgcagagcccttgacacagaataagagatgaaatgattgtacaatgcaaacagcatttttgaatatcgtggttcaatgaatatcttgtaaatctttgttggagtataattcaaataccatatgattcatcaattagtatttaaaattaagtatttcctagtaaattcacagacttgtgcattcaacgtaacaatcagttttatct

SEQ ID NO: 299880 - DNA, 350 bp, Homo Sapiens
aggaagtacatagcctgccagcttcagaagcctgtccagctagaggcgtggtgctcactttcacacctgtagatgtttgtccaagggtcaacctgagattcaaacccagggccttctggcccaaaacaagtaagcaagtagcagcccaggaagtcaaaccaagatctgcgaggttccaggagcctgaaccaagtcatgtgtttgccagttcccactgtctcattccaatgctgagttgcccctgggatagagcaagtcttccttcaccccctgtaactgttagggccaggtagagacagagggcaggtgtgggtgggttggaggatcccctttcattcacattcagcagg

SEQ ID NO: 299881 - DNA, 397 bp, Homo Sapiens
  misc_feature (230)..(256): n is a, c, g, or t
gtgaagcacaggtgctgagacttggaagcagggacctatttgggaagagtgagtagctgtaggctgtaatgtcaatattgtgtgtttgcactgtgcggaggaagaaaggaggacattggagatgaggctggagagataggttagagctagattatgaaaggggactgggtatggcaggcagctaaggaatttgagttttattttggtgaacgaggagagcaaataaaggnnnnnnnnnnnnnnnnnnnnnnnnnnnatcttggaagatttcatagagaaacctactacctaggagtgaaattgctgggtcctatggtaacttcacatttacctttttgaggaactgccaaactgtttttcatagaggctgcaccattttagaaatatctaaaggcgg

SEQ ID NO: 299882 - DNA, 348 bp, Homo Sapiens
  misc_feature (225)..(255): n is a, c, g, or t
gaatatctgtcctgcctgtggtccttgttgtaatgtgtctttcccagaatactgtgttgtacatgttgctccaaagggtggattttagtgatgaactcttgatgaatatttagatggtggcatcgttatgaaaagtgttactggtttctacaaaatgaatcacttttggttatgcttacatttctagagtgtatcacctcttgataaattaagcacaaaggcatnnnnnnnnnnnnnnnnnnnnnnnnnnnnnnntgcagggtggaggaagggaaatgtatactatatatgtgtctcattggcttctgttcaggactcatctggaattttattctggctcaatttttt

SEQ ID NO: 299883 - DNA, 238 bp, Homo Sapiens
cgcatgtctaggtgaggcgcctatgcaacattgggatgagatgctgcgatgggcgtatgctgagaacatactgcggatcatgacagaggagctggacttccagatgaacatctaccgggaggagctgagtgagaccaagcgccgtcatgagacccgactggaggcgattggcagtgggaagcagcgtgagttcgagagccgggtgcatgatgcgctgcaggaactgtagtcccagcat

SEQ ID NO: 299884 - DNA, 341 bp, Homo Sapiens
ctctaatacaggtgataacattactcacacaatggaaactgttttgcacacctcctcttctaccttataggaccagactttgctgagagacctgaggcaaatgaggcacaagcatgtccaaaagtatgtagacgttgtacaagagatctgctcacaactgtataagcacaagattgtgtctagatacacactgtatacagtaagatgccgactaaccctgagagcatagatgaatctggaaatccatggatgcacagtcctctacaatgtcgcttgacatctaaccttgtatcagaatgtgacgaaatcatcacgaaagtacgtgcataaagaaagtggtg

SEQ ID NO: 299885 - DNA, 388 bp, Homo Sapiens
gtgtgattttgcctatcatatatatcgcgcatgtgctatgtttttcatacatactcacagcgtcactgtccacaccaaatgtggtgccttgagagcgggaagaggttttaattgcattctctggtctgtatgtaaggccagatgatagcctgtcttatattgtgaatgtgctctatatttaaagttggagtaaggcctgtactatgagatgtgctaccttcgtagctttagaatctatacgctgtgagttccacacgtacacccttaatggaaggtttgagcttagccccaaggtcctatagttcgtctatgcgctactttggaagccacactgtgtgaggtatcagctgggatatacacatgctgatacttacatagttacatttta

SEQ ID NO: 299886 - DNA, 310 bp, Homo Sapiens
ctctaatacaggtgataacagtactcacgcgatggaaactgtattgcacaccgcctcttctacattgtcggaccagtctgtgctggctgacctcatgaaaattaggcccctgcagacccaaaagtctgcagaagttggaaagagatctcctataactgtgctagcaaagttgtagtagatacaactggtaaaccctgtgacttctacccctagagcttcgtgagtgctagtaatcagctatgacagtcctaaatgtcccgagacatttacttgtggaaatacgctatcccggtgcctgtatcttagtgga

SEQ ID NO: 299887 - DNA, 278 bp, Homo Sapiens
ccccattatgaagatgtctcaaaggccgcgctagaatggacacatccataagggcacagacagtgtgaggaatgcaggggaccagacttactggcatgaacgccagaaaaattccaaacagcaccgaacaggcaaatacagagcgactcaccgacaagtagggacatgagtcaggagcaagccaagtagaaataaaacggagttatgccagggtcaccgccagatgacatgtgaatggagccagagctgtggtagagtttagacacaagagagagcgc

SEQ ID NO: 299888 - DNA, 295 bp, Homo Sapiens
ctctgacctcaggaagaacagtccttatcagattgccaatggcgtacgtccacccagctcaagagtgacctagcactgcctccggatgtgtttcgcagcacacttacgcctctggatatccaagaggcgtcctatgccgcactgtgctcacgctgccggattgctatcaatgctaccgagcctgaacactacttgtgccactggtatactctcttaaccttaaggacctcctatgcgctctggtcgtatcctatgacctgtgactcaatgtacccgggacactattcatcagtga

SEQ ID NO: 299889 - DNA, 411 bp, Homo Sapiens
ctgatatcgagccgatgaggtaaagaacactgaggacactgtttcccagacgttgtcttcttccttacaggacatgtagttgctggaagaccggtgtcactggcggcagaggctagtccccgatattggactcgtaacgaatgagtactcctcataactggaagagcaccaatcatatatagatgagactgacaatcggaatatgctaactaaccttcgcgtgctaagctcaatcctgtggaacctgtgacgcaaattacacaagatagaacatgatgtctgagctcaaacggtatattgtggtaccacatgcactgttagacgcgatatttctgctacgtctggcttagattgtgaggaggttatccagtgaggacgtgaaccatgtgtcaagtgtctcgatcaaccaga

SEQ ID NO: 299890 - DNA, 407 bp, Homo Sapiens
acggctaggtgtcccacgtgaccacagagcgcacattctacgggcccgtcaagagtcataacgcggtcaaagctgatgaaggagagttaggagcccactgtgtacttagatgaggaagagccatacgatgagagtgcccggatacatgattaaagcatatcagtggaagtgtatctatttttgcgatttgcataatcatttgtagcaggacactctgttggtgacacatactgatgaccatatttagaaagttctgagcacttggtatatgcagattaattaacatcactagtgacactgacaagagcaactgcttagaacgcatgatgtgagagtgtgtgacaaatccacaaagggaactgtagaggtgtaatacacatgttcatactgggcatcttgtatatgcc

SEQ ID NO: 299891 - DNA, 360 bp, Homo Sapiens
cgcgacagacaggttgcgatctgatagtcgtgttaacaatgtgagatcaagggtgacaagctgggtgacctcacacagttaatgcatgatgaagagtacatgggttaatcatcctatgcaccggtcattcttggaatatgatcgctcctgagtactgcgattgcgtattatagactggagagaccgggttttgccacttcaaaagactgtgtatcagttgtgagccgagcccatctgactgacctttgaactgttactccattagttggaattggagttctgtaatccatgagtggtcctgatccctatacagacatactgcgcttgagactatattgtaggagcacggatctaccatac

SEQ ID NO: 299892 - DNA, 361 bp, Homo Sapiens
ggcgccaagcgcagctcgatcagatggcgtgagagtgagactgagctccagggcgatcagatcactctcggtatagccgtacctcacgatcaggatgaaaagcatcaggcctgtgagagacgtatggagccagccgatgagcctgctatacaacatgaacgactgcgtacttcaagctcaaggagcatgggcccagctttcaggagaacacagaatgtgagcaagagagaaaccctagaacacggcatcgactacattttgcacctgcagaacgtcctgaactggcatgccactattgtgacgctgcatgatcagagacccgcgccgaaccagtcgtacaggacgccgctgaccaccctaa

SEQ ID NO: 299893 - DNA, 363 bp, Homo Sapiens
cctaacattagtcactgtgctctccagagatcacagggggctgtatgtgtcatgctgactaagagacacacgtgtctgggacaggcacaccagcacctgacgctgtggcccgtgcccaagatgatccgaggaactgggtaggctgaggcgaccaaatcacttgctgccactatcatgcgatcactctggacggctgcgagggacactgtatgtgcacagtctgctttagcattggaactacctgcccgttcactggaagcatgcctgtcatcccgacatcttaggcgcgcctgtgcaagctgaacgcttgagagaagcttatatggtcccatctggacagacatgagactgcctgcatatact

SEQ ID NO: 299894 - DNA, 398 bp, Homo Sapiens
agcttacgccgaatgcagacacactaacaggagtgtatataaacaaataggagccgcggcttttcacatattgcgatggacaagctagcattcttgaagttggacttgatcagaggacacacttggacgaatggccagttatattgctaaatgacaacttgcgcaagctatctgacagactgagggtgcaaattgaggggtgggagaaatggactgacagattgaccggaacttagggaaagtgacctgtggatcattaatagttcccaagcatggtcctggacagagcgttaggagagctttagtttatctcaagcctggatgggagagagagggaggagttaaactgggccagacacagagccctggatcgttgaattgctcggggaagctctggc

SEQ ID NO: 299895 - DNA, 343 bp, Homo Sapiens
agtatatgcctagcgcgcagaagacaatacagtagtaccggttcttatagggccgtgtgcatccaagagatcacaaccggctgctataccgactggggtctgatgttagccagtcgagatacagtctaagtattaagtgggttacaatagagctacgctatttccaaggctggaaattccagactattaaacggatacctgtgggtatacgtcttatggagtaccataggacctgatcatgagcgacacatgtgaaagcttgcaacagtttctagaggcatgttgtaatacaatgacacaggagaagggcccgcgtagaaactataactgacactgactcctg

SEQ ID NO: 299896 - DNA, 354 bp, Homo Sapiens
agtatatgccttgtgcgctaaagacaatacgggaacacacggagctagattcggccgtgtgcattcgagcgttcacaacctccggctatgcgcaactggggcatggtataaaccactggagtttcaatgtaaatctcaaatgggtcacataaaggccacggtatttccaagtctggaatttgaataccattggcaggattactgtgggtataagtcttgtgaaaatgatcactgagattgtggggactagtaattacgcagagatattactggtcgagatgcatgttgcaatacaatgacattggagagttgtacggataggaatagagactgtaatgagatcgctggaactct

SEQ ID NO: 299897 - DNA, 350 bp, Homo Sapiens
actgtgcagagagtattgagttctacaaccatcttgatcagtttaacaatgacagagagactgttgaaaggcagatttaccaccgttactgcatggagcgagcttttattcattggactcacgtgttgaccatggactatgacataactgctatagaagctgaacatatgctgaatagaaaggctgatgtacttactccaaacggcttgtgtgctatgattcaagaatttgttcgaggtcattactatggtcatctcgactttgatcttgataagaccatgcttctatagattggtcgcaggtgttagatttgaatcaaaggagctgacatcattctatactgcctatac

SEQ ID NO: 299898 - DNA, 353 bp, Homo Sapiens
cgctaacctcctgcgcaccgttttgcagatgcgcagccagctataagtgcgcaccgactatggcctgatacagccgtagggccagaagctggcgggtcggtctctgtacgacggttgcaacatgggacactcaaaagtcttcactggtagctcactgcacaccgattaaggcccagagaccgagcgacgatatcgagcagaatggcacttagtcagaatggcatcacctttcaaagctgatggtcaagaaccttaggagtcctcgacaccgctggagatgacatgcgcgtctatcaggtgcataccgtgtaggcgcctatgatgaaccgtttacagcgatggttaccaccaca

SEQ ID NO: 299899 - DNA, 396 bp, Homo Sapiens
ctgatggcttataagcaacagaaacttatttctcagttctgtagtctggaggtccaagatcaaggtgacactgtggtcaggttctgatgagggccctcttctgggttataaactacggacttcttgtatccttacatggcagaaagagcgacagagctctctgtagtcccttttataagctcactaatcccattcatgagggccctaccctcatgacccaattaccttccaaatgccccttcttcaaacaccaccactttgggggttaagatttcaacagatgaattttgaagggacacaaacattcagtccatagcatcacttatcaagctagtatttaatacctcttaggccccgtggaagggaaaatagataggaacctgccctgaagcttca

SEQ ID NO: 299900 - DNA, 288 bp, Homo Sapiens
ctggcacctacccgcattaccatatgggaatagtgaatcaagcctggctccctgaatcacctgctgcatgggagaggtgaccctcagtaactctatggatcataatgcctggacaaacctgataccttatgaagttgtgcaaactatgacgctactgcctaggggagcccaatgtaagagtacatacaccagactagataggccatgaaccactatacgaacatactccgtgtatatgagcatacatagttgacatgagttatagctcagagacacactaacgctacg

SEQ ID NO: 299901 - DNA, 410 bp, Homo Sapiens
ctaatatcaattcatgaacgagtagcgcaggcttactaccagagatcttagctcactctacacacggtatctcagactaggctcgatgtacaggtactaggagctatgtgtctctatccgatagggtatgatggaaatgattactcaaacagtttatgtcaaggactattacttaatactggtgcctgatgaagtagctagaaatctctcagcccggagagactatgcttatacttcaatatatccgacgtgcatgctagccacaggaagaaagaacacagagttatgtatcaaagaaatgggaagacactttcgagaaggctgcatgcctaccagagacaggagaggatcggagttcaggactgaatcgtagttcgacacgtaagaggggcagctaagcttttaggtcc

SEQ ID NO: 299902 - DNA, 264 bp, Homo Sapiens
atgagacctagtatcgagtgatatgtgccttcttaatcatagtttgctggggtctatgctctcaatggacatgatcacgtgcgaagcttatactcatctcacacttgccatcacttagcatactgttagacatactattaggtgcacagccgtaatcctgaatgtggaatgcccagacactcactataagcaccgctcactcaaagtcgggggacagtgcttgctagacaacttggcttactgaattcacgctctgcactggtc

SEQ ID NO: 299903 - DNA, 407 bp, Homo Sapiens
cgcatataatgttcaccacaaccctgcttttgatactgtgatcatattcattcttagagatagggaaactgagacttatagagctcagtcgcacaagactcatatgtcagagagccaaactctaacccagaacactaattggcacttgagctctactttaaggcataagtaggattttcgtcagagaacctgacctaggcagaaagagtggcttcaggcattgtagagacttcacatccatgaagcgttttcacggtatgtagagcagacctgtgtggctgaatgaatggaatatacgggagttgacatggttacagcaggacatgaagatcgcgcgcctgatcgagaagacccttgaatgctgaggaatctctactccagctaattggctacaggttgatgagagt

SEQ ID NO: 299904 - DNA, 265 bp, Homo Sapiens
cgttactgtagtatatgtagatatatacacatgagactatcaagcacgccgatcgtatagagtgtgtgtgtaatctgaggagtgtccactgatgtgggagaaggaacactttgcgagcatccaaggatacactatggatttctggatgctgaagaggtttatgacaattcttgctaagttcctacaggggatgatcgctattactcctgtgaagatcatctagcggctatttaggaatcctgatagacatgcatagcatgcacag

SEQ ID NO: 299905 - DNA, 383 bp, Homo Sapiens
tggtgttggaagcgcagagtatatatgcagagggtgctagcatcataaccacatggggggcgtctgtgtatcattatcatgatgatataacaatgtgtgggactgttcactgagtggataactggtttatcctgtattattttacaggctacaagtcttatctcgagagagagctaggagttgtcaggaatgctggatgtttcttagaggcagtcgctccaaaggccttagaggaactgttaatatccgtcacataaggtacgatgatccatattcagagaggagactgcacattagacagggaaccctgtttgctcatgacttgcatagccacgcgcagcgtattgtgcaagtattgagtcatgcacagtggtggcagttac

SEQ ID NO: 299906 - DNA, 360 bp, Homo Sapiens
  misc_feature (216)..(216): n is a, c, g, or t
cggggtcggacggcgggtaccggggtgggtgggccgcggcaccttgttcggccagggactgtggcgtgcggcctgagcttcagagggcagcgacgcccggacagaccgggacctggagctggttctgctcctaacgtccgagcccgccggccaggggcctcgggacccggccaagtcccacccccgctcgaggtgaactggagtcccggaagcggngccgggcggaggagaggtaggaaggcgtgcttcagacactgtcgctcttctcgtcgtttaacggcctcagatatcgggacacaacggtaaccgcaccgcgcgtgtcattccccctgcgtgcatttttcgagcggagtggcttac

SEQ ID NO: 299907 - DNA, 356 bp, Homo Sapiens
gccaccagggctccatataatagggacatcagcttccgtctgaatgtaccgcgtatggttctctttccaatgagtccatcagcttattttataagaaggcccttcagtgcaatttttcttaaccccagccttacttgctacacaatttccccaatgccaagcgtccacaccttcaaaccaaactctattttggttacattcgagtttgtctggtcagaactgctgagtttcagggctggaatggttatattttaaactttgccctgaaatcatatataaagtagcctgtgatttattttttccagggattactgccaaccatacttgtgtgccaatttgtaagcatccagcagcag

SEQ ID NO: 299908 - DNA, 236 bp, Homo Sapiens
ggtaaatgacgcgtgatctcgcacacactgagtctacactggcactgacgcgcgagaggcttctactactgtggcttctgaagctgctatggaacatgaagtacatatgtatacagaagagacgacagatcacatggccaaccagagcaatgagagtgtaatgagcggcttacagttgtatggctggaacacagggtaatcaagcggcctagaattaccgagcggtacaagactat

SEQ ID NO: 299909 - DNA, 233 bp, Homo Sapiens
gaacaagatttcttttcagagctaggagatccactatagaatatgaggatacagagtctctgtttagtttacctttgatatgatgtcatgaccatagcataacaggattcacagcccttccttaactctaacatgtgccttcaactaaatgagttagttgtaggtactgaggtaaaacccttacattatatgggaaaggatattgagcacgaaagctaaagtatatttagctg

SEQ ID NO: 299910 - DNA, 247 bp, Homo Sapiens
cacaagtgtggctgctcatcggattaaagatatgtgagatgacaatttcaatgtcttggtgtttattggctttggtcattatcttgagcagtgaccattactagatcatgttaaattagcgaatgctgttactgaatacgctaacccatgtgttgctgatgagtcaactgacaattgtgaccaattacttcataccctttttggagactgattatgcacagctgcaacatcttatgaaacctatgga

SEQ ID NO: 299911 - DNA, 600 bp, Homo Sapiens
ctgtcttgtaggtgttcttttcgactcaccatgagcgagactcttgatacacagcgcgcatattgcacgctggaacgcgcacaggaatatgaaacaagggaagctgtgaaaagctgggaattagcaatgcgtttaaacataagagggaggttataccctaggcttacatttttaaccgagaagcatattccatatagtgtggcatttacggtaatcgcggcttaaaaaggtatagtgctcatgaatctggtaagcctattcttcaaagtatgcgctgtgagggtgccctagagaacacttgagcgcatttacttgtgcaccttcattatttgcccgttggaagagaatggtaagtaaatcctgcacactttgtttatctcatttggatgccttccattcctgagagaagcacatgtcctataagatgtgcctgaaaatatttgagactctttcaagtgtgtttctgtgtatggagaaacagcttctctatggacggtttgagttatatagagagggtatacagtctttttctgtatgtcatagtccacgcggtccaactcttggcctccattttaggactttgtaaactcacgtcttgtt

SEQ ID NO: 299912 - DNA, 596 bp, Homo Sapiens
  misc_feature (52)..(98): n is a, c, g, or t
ctcaggtccactttctctatacccaccaattagaactccccacagggccctnnnnnnnnnnnnnnnnnnnnnnnnnnnnnnnnnnnnnnnnnnnnnnnacttgctacctgctggttgagcatgatgatgcctggcctctcccccaagcacccccaccttcagtctcctcctgtcccttcctctgcaatcttctgcttggctttcatcagcatccctcttctttcatggatctgtaaggaacacactggttctgttactccctatgtgtttttttgtgctgcttcctctgtctcacctgaccaacacacctgaacctgacttctttcccagtcagagctctcctagagagtggctaccagagtaagaataaactggacacaagtcagaggagaaccacaagggcatctgccaatataaacaggtttcctgtgaaagggacatctggtcacaggttggacacttagacattaagccattcaccaggataaagaattatcccaccaaaggcacactgtaaacatacatgaccaaactccttggattccaatcaaggcagggctagagtttatagtcaatttccaaagagagacctcaag

SEQ ID NO: 299913 - DNA, 586 bp, Homo Sapiens
ctatgcactcctcttcgctgtcgacacacagacaccactctattaactcagagtatgcatatgaaacggaaagtgccaactggacacacggtccttcctaactccggcgacctagcaacagggcttaaacacactgtctgttagtgcaacgaagctatatctacatcatgagagatttcgcacataaagtcttgatagtagacgagttttgcaaagtatgacctgacctaatgtaaataatctgagtttattgcgacgactatacatgcatacccctgcatgaacacacattttgggagatacttcagctacgagaacggaagcagaacggatatgatgtccacgagatactgagacattgcagtgtcagcagttggcaagctctatattctggttcatagacctgtcctttgatgatgaagatgccagtattctacacagctatgactattcttactccaactgtgtacatctgtgatagactttgaataagaatgtaagcactggtaatatagactctcacacactgtctttatgaccttgaacactctatggacacctcatagcaacttgtcagtcattttaa

SEQ ID NO: 299914 - DNA, 429 bp, Homo Sapiens
  misc_feature (106)..(106): n is a, c, g, or t
agctaaactagaatatgatccttaacaggggccatcttagagctcctaatgacctccggcctatgcatgtgattgcacttgcactccatagcgctcctcactctangcctactaaccaacacactgaccctataccagtgatggctctatatgacaccagaaaggtcattccaaggccaccacacactacctatgcaatcaggtcctccatacctgataaagctatgtcttacctcagaaattcatgtcaatcggggatttttctgacgcttttaccactccagactatagagtacccctcaaatacgagggaactgggccgcaacaggcgtgacatcctctgaatcccctaaaagtcccactgctaaacacattcggattactcgcataaagcatatgaatcacctgagctcacgcatagtcgaatag

SEQ ID NO: 299915 - DNA, 606 bp, Homo Sapiens
  misc_feature (449)..(449): n is a, c, g, or t
cgatttaggaagatgcacttttctttgggcctcatcctacagcagcattgaatcaggagaacgaaacagccttggctttgttcatcatcagtaagccacgaagatcacggcatgggtcattaagatttacagctcaaatgtaaataattcaggacccacaaacaataattaaaacctctcctgttttggctggagacctgtccatctgggtacagatggttgtaagagctttttaatgaccttttctaatgctggtgaatgtgtctttggacaccatctgaaccaatggatgaggagggtggaaacagcacgatggtggcagctgaggaattaaatgggctgaatttgctagacatctgcagaaacatgcaatttgctgggcagaacattgttacagaacagactgagtcaattatcaatacacctgtgacacacccggatgccagctntggctgacaggtgttaaccagctgaggagcacgaggaagatcacaatgatcaggagcaagtgaattccaaggtttctgctataacttggaccccttgcttgagtggtgatcttctgtgtggacacgggtttcctagttacactatacacaatgagcc

SEQ ID NO: 299916 - DNA, 213 bp, Homo Sapiens
  misc_feature (94)..(149): n is a, c, g, or t
tttcctactctgatcccttccttctcttcatgccacctgtgtcatgttgttcccttctctcttgtcctctcctgtttcaccactctgtctgctnnnnnnnnnnnnnnnnnnnnnnnnnnnnnnnnnnnnnnnnnnnnnnnnnnnnnnnnagattgcccttgcccctcttcgtccttctttgcttttcttcattccttcgtttcctctttacta

SEQ ID NO: 299917 - DNA, 261 bp, Homo Sapiens
gcgactcatccacactgacagatacactgagcatatccatctacacaaatatctgacatgctaataatgtcggaccctcctgtatcaaatacaataactaaccatagagcacaaaggtatcaccaaacacattatatgagagcactaacacatataacttgtgcctacatgaactaactataaataactctgcggggagagacagatcaaataccctctaacacaaacgaggtccataggatccaggcgatatacctatcg

SEQ ID NO: 299918 - DNA, 326 bp, Homo Sapiens
cgcacacccattcaatatgaaagatcaggggctgacctaggcctcgctctgactgacgggctacccgtgtcagcacacttggacatccatgagaaccctcaactacgcctagtatcgagcgcactgaccggtactagtgacggcgcatatgcatcaacgacagagcgcattactatgtcaccacagcacgaactgtccgaatatgccattagtaagctgctctaacaactccagcctatgacctacgagttatttaataacctgctgaacgagaacaagggtcagccgcatgaaatgagtacagatctcaatgctgagcacatccg

SEQ ID NO: 299919 - DNA, 395 bp, Homo Sapiens
agacggtccagccgcagacgctggcgcgatcgctagcggagtcacaggggatcatgaactcagccgagccgtgcctgatatctccctgaagagggaggctcgcttcaacagatcaagggaaccgatgacgcattagtctcgagcttgaactctctcggacgactctcaaacgtgtatgctgcagagactcacatgttggccgacattgctaatgctgactcagaccattgcacacatgaaagacgaactggctgccacagaaggatggacctgtgcaaagcaccacgtcgcatctagacattggagctaggaaagagacacctagtggagaacctggagctcctgaaggagcacgaatggtgaccaagatgctgtatactagctctggagagacc

SEQ ID NO: 299920 - DNA, 343 bp, Homo Sapiens
cttggttcgagctttattctgtgtagagctacgtaacgcatcctaccgtgaactccgtagctcgattaacgtatgtgttaactgcgacttttaataaaatcgcgcaagatatgtgatgtggaaaacggaaaccaactcatacaggttgcaactgacctagtagtagctgatcctgacagattgcataagggtaagagctggccatagttacgaattttttgcatatggatgtgatccgagaattgaaatgcgtttggagtccacgtacccggtgtatgttcaagtagttcaaatcagatgatgaaactgtagaggacatggagatcatcgtatctgcacaatg

SEQ ID NO: 299921 - DNA, 350 bp, Homo Sapiens
ggccgactgacgaccatcgtggctaaacagggactgatgggccggaaggtggagaacgcacgctgtgaacgtgtcaacatgtctggtaatatctacagaaacaagttgaagtacccggctttccttatgaagccgatgaacaccaagcattatcgaagaccataccacattgctgccctcagacgcatattcagtcggaccgtgcgaggtatgctgcacctacaaaaccaagctaggtgcaggcgctctggaccgactaaaggtgagtgacagtgtacaaccgacctacgactagagatagtaagactatctgtggcgactgtatcacgaggtatgctggaagtacagcc

SEQ ID NO: 299922 - DNA, 339 bp, Homo Sapiens
ctcccgttgagctggagttgaggagcctatgctgatatcctgacattgtaacccctctttctcgcgagcgtgctgagcggattgtagctgacggcttagccaatgccctatccagatgtgactgcacgctggtcccacgggtgtagctttcaagcttcgaccctggatgacgatggatacatgctgtgctctacaggtgaggttgtcatccatgagtcacagatgatgccgtgagcacggtacgacacgaggtttccgaatgctgaacacaatgtttgggaataggctactatgcgaatgagatatgatacccaaagttgcttacggatccaatgactg

SEQ ID NO: 299923 - DNA, 369 bp, Homo Sapiens
accaagccccagctacattttcataccgccgtgctcacaactagggctggtacgaaggacttgatttggaagcttctgaaacaataccaggaacactatgggcaagacatgtccaatgagttccaactatttaagactgctcatgggaacgacctgctgttcaaggactctgaccacatgattctaaaagtgcccaccagcatcaatgacaagatgtacatgggctattagaatgtgactgctgtacacatgctatcggaaggcacatgccaagaagccacaacagatgaatacaagcctaactattagggctctctaaaccactacgagaggcactgagtagatgagtgcaatgataaccgtgtagat

SEQ ID NO: 299924 - DNA, 404 bp, Homo Sapiens
attgcctgtagctttattcactcaatagatacgtaccgaatcaatgcttggactggggcgcaagatgtccgtacctgtaaactcctactataatgtgattaatgctcaaatgggaatatgaatagaccctgaactcctgcagcgcttgaagtctatatatcactgtggatactgagacattcgatatggagaagagctggacgacttttcgaccttcttcgtcatcaaggcactgctcgctgatgaattggacggattagtgcctgaaagctctgccacggatctgccaggctcattgctattcctgtgtgagtcctccaatgatgtaaatgctaaagttgttcccaagagattttgcacagtaattgtactgccgacgctactctctggagtgtaagaactca

SEQ ID NO: 299925 - DNA, 340 bp, Homo Sapiens
  misc_feature (53)..(95): n is a, c, g, or t
cttgcttcgagccttgctctgcctagatttggtgaccgcaacggtaagtgacnnnnnnnnnnnnnnnnnnnnnnnnnnnnnnnnnnnnnnnnnnngtgacacgagtagaatgagatcctattagcatgcagatggggacgagcttcccatagtcacgagacatttgccaaacattccactgagtactcgcttatcgaatgttagaacgcatttggccacagaaatgcggatgaatgctgtcttgacacgcccatataagtcatcattcccgctgtatgtatgagttgctcaacttatataatgaaatggtctaggaacgtgagctcgacttactgcactg

SEQ ID NO: 299926 - DNA, 395 bp, Homo Sapiens
ctacagtttactacgaatctatatctgttgtggaatagcctcagattttaattactcaatattgagagctttctgagcaacttggagagtacacattcgagaatgctctattagtatgttccaccatgaaagtgccccaagtgtcaactataacttttgcatagggatcaagctacctatgattattgccctacagctgttgctaacatcctgaagcacagacaatgtactgagcagcagactatctatcgcgcgtactgatccagctatgtggggtgaatgattataacgtcatgcgagacagatacaccacctgctgaacactatccttgctggacaggctatcatgctatctagatatgtgagtacatgaccctttcgatcccattgagtat

SEQ ID NO: 299927 - DNA, 351 bp, Homo Sapiens
aatgaatttacagctatggctaacaacttatacggtatgaggcttccaggtgtagtggtcgaagtgactacttgccctgctaaaccaggcatacctgtaaagtctttagcgcaaggaaagattcattcacacagctatgtagtgtgagatggcacaacgttctaacgagcacatatggcaaacgatatacagtggtgctgccagggaacatatgtgtgatccactgagtccaggctggtagtatcgtttacgagttgactgcatcagagatggaggacataatgcggtctctgaatctatacttgagcagactccagctgcgcctactagaccatgcacttctctcagagt

SEQ ID NO: 299928 - DNA, 397 bp, Homo Sapiens
attgttagctggatgctcacacactagctgcatagtctagagacacattgaaactggatatctacacatattgggatggacaaactagcattcttgcctttggacttcaacatgggacacacttgtacgcatgtagattgattattttacaagacccacagccaagctttctgccacactgtgggtgcttgtatgtgggcgggagatatgaaccgacatatgtacgagcccttactgtaagggatctagacctgatcatctgtacacagacatgtgcctgagcagtgtattgacctagcttaatgctatctaatgcctgtatgggcaacatagggaccagtggatctggacggtacaaacagccctgtatcggtagattgtgagtttaaatgccgcg

SEQ ID NO: 299929 - DNA, 274 bp, Homo Sapiens
gataaattggccgtaataccatacaagcggctggtacactatacattctgatcctgtatctcagtgtcgactgcgtgcactgctacatcttcagcgatgatcgccttggggactaaggctgcttataaggatgcaatcttgaatgatccaggatatactctaactgaggtaggaatacttgacagtcatgatggctggcacaatgttgtgaatgctattgacctagctgacggacatgtacagatgagcaccggccatggcctgtatctcaacg

SEQ ID NO: 299930 - DNA, 313 bp, Homo Sapiens
atgaacttgcctgtactaagtactgagtgaaacgttagagatacttacttattatgagcaccaactgcgactcgtgtgactacggacactctaacactcaggggccatcatgcaaaggcttcttacgaggatgctgtctaatattagccgatagtctcaagagcacaagcatgtataccaacactcacgtatgctgaggtcattgctctgattgttatacttattaacaatgcactggctgacacactggacgagctgtacgaatgtcactggagcacgagacgataacggtaaagcagatgctgaatgtgag

SEQ ID NO: 299931 - DNA, 417 bp, Homo Sapiens
caggcgctcacaatggggcaagggctgtcataccgacgtaggctgtactacaatacagagtctaacataactatggtgtgcccgaaccactgagcttagaaatgtgtacctttattccaagaaaggtggtgaagcaccaaaatctgcgtgtggtgtgtgcccacgcacacttccacgggctcgtgctgtgagacctataggtcttatgagattgtgcgaaacaaagaaacatgtctgcacggcctatgtgtggatacatgtgagcttaatgtgttcgtgacaagatcaagcgtgctttccttatcgaggagccgaaaatcggtgcgtaagcgttgaaggcgcaatctccgagccttatagcgtagtgagacaatgaaactcttttgcggatctagatgagaagacgctgtccaaaaa

SEQ ID NO: 299932 - DNA, 262 bp, Homo Sapiens
cacgagatgcaacactgtgaggggggacccctatgtccctcttttgtctctgtacctcggcttattgcagaggcgcggttaccatagaggcacacaagagcgaggggggtcacagtgtcccagatttccgagaccccattgaagatcacgcttagatagcgaatgaagtgaccggatttgcgaatacatgtgtctctcttgcagctgctgacaattgggacgaatcacttggtaccctctttggagacgaaatattggcagt

SEQ ID NO: 299933 - DNA, 333 bp, Homo Sapiens
taccgggtagtgacactgtattttagactacaaaccacactctagatgtgttcatgaaaagtgtacaaatgagaaattttctagcaaaacatgtgtttaaacatcagagctcaattggattttcttccttttgcaaccaggcagtctttcaaactattgacagagagataaatctcacggtcacacctgtgggaagcttactgtgtggacagacattggaggtaccccacgaatactttctcttcactggctcgagggaaacacctcttcaaggaataaactctctctcacacgcctctctccaatagacaggttggatttgcaggatttcat

SEQ ID NO: 299934 - DNA, 365 bp, Homo Sapiens
catatataccttgtgcgctactgctatgggcacaaacctcaccctgtgtggctcgccacctctggtgtttttctcacgcctcacactataacaagaggttcatgggataaacagcggagatttgtatctaaaacatagattgctcgcataaatagcccggcactccccaggttctttttctgtgtaacattgacaggattaccgggtgtgccattattgacacacagaacactgtgatcacggggctccagactgtatctgaactcttacttgtgggaaaccagtggagacaacatcattgtgtagccgctcacaatggatagagattctactggatgcgggaacccggatgagacacaaatcat

SEQ ID NO: 299935 - DNA, 365 bp, Homo Sapiens
ctgagatatacctcctcgtaaagagcctctctgtgggctcataccctgtgtctgcactgctgtgtgataaagacatcatgctgaccattaaaccacaggagcacgggtccacatacacgggcaatccactatgctgtcgagtggccatcgcaacccttgagaggtttataagaagaaaaccttgcgtgagaaaagcgcacaaaatgggcattatcttgagaaaagaactcatgaagctacctcttgaaggtgtgactggcgcgagaaggaaggtgtgtctacaacttcgagataatggactcttgggcaagccaacccatggcgacattatcaaggttgcgcctccgctgttgatcaaagaggat

SEQ ID NO: 299936 - DNA, 411 bp, Homo Sapiens
gaacgagttgcgagaggcattgtgcactctggactgtattagcaactgtcgtgtgccctgacatgcgcacaagctcggagctccccgttcaggtgtttccccaacctgacacagaggccgaaagggtcggagctccgagcactcacacatcatgagttggtgcttgcaccccccgttattaacactctacttctatgcactttgattgctctattcaacatgcgtggcatacgtgtgggccagagacatctgcgggctgtcatatgaaagacaccgcagtgtttgtccaactacctgcgggaggggaaaccttctgtctgcttatcaaacctaaggttaccttggtctgcgagcgttggaagacatcttacatggaggtgtaatctatacatccgctgttttacaggtgat

SEQ ID NO: 299937 - DNA, 363 bp, Homo Sapiens
ctcacacatcttgagaggggccttgcgcacccgggaaataaaactctacatctatgctctgttatttatatctgtaacatgtgttacatatgttgcgttcagagacaactagggtgtcttagaagaaagatacggtggctattgtgcaactacctggggcattggagattatctgtgttcttatataaaccctaggtgacaagggtctacacggctttggaagacatcttacatccaggtgtgtacagaacattcgaagtctaaaaggtgatgaaagccaatcgactctctgttaatcctgacgaatcattagaacccgatacgaatgacactccttctttgaagaccaagagagttcgagat

SEQ ID NO: 299938 - DNA, 379 bp, Homo Sapiens
ccagggagattccacacacttataaccatgagacatgtattattgctactattgtgtgctattctagataagtcccaaggtgtgaacgacaatgtagagagagggttctttgtgcccgcggtcattgaccccttgacaagaagagagaagagagcgttccagcctgagtgcctgtcccacacgtccattattggaggtgggctatagggctcgttcagacaaagacagctggcactccagacctgggggtgttgtggcctacaagatatgagttgcaagaggctttgcttcaacaaggaaggccaatcccaaatagtggcggtgaggtaaataacaatgtggaaactcggtgccacacctcctctgtttcctgttaaag

SEQ ID NO: 299939 - DNA, 374 bp, Homo Sapiens
ctctgacatcttgagaggggcctcgcgcccccgcgatataaatctctactcttatgcgtcttttatttctctctttaacacgtgtggcatatgtgtgcgtaccacagacaactggtgcgatcttataagaaagaatccggaggtattggccacactacctgtggcattgcagaattcctgtgtacttatcaaacccaagttgacacagggtctacacggctttggaagacactcttacactcaaggtggaaacacaaacatccgaaggcaaacacgctgagtaaaagcgatccacactcacttataatcctcgggaatcatctaaacccaatatgatagacactgcttctttgaagtccacgaggattcgatat

SEQ ID NO: 299940 - DNA, 330 bp, Homo Sapiens
gagaaaagagctataagagaaggagcagtttatgattgaagaaaacatgacctgagctgaagaagtgaggattgattggagtgggctagaatgagctatagtttctaactcatttgtaaggagagagacaaaggagcattggtgcctcagagtgggtgtctggtgagaggaccctttgcctttaactgtagataaagtgtgggtatgaactgaggcttcttgtattcaaacttggcctatggcctatgtagaggccctatggtctacttgtggtggaggaggggaagatttggagaatgtgtaagcttgagaagtaaataaagccgcaat

SEQ ID NO: 299941 - DNA, 235 bp, Homo Sapiens
tgacccggagcgcttcacctcgtaagaataactgtgcatgtaatacaacaattgccgcgctaatgtgcgccttcaagaaccttgtccaatacttcttgttcccatctcatccggagagggaacctgctgacaaactgggaagcacccgaaacaaccatgtgggccaaacattctttcgataccccgcatcccaactcgtggaaactgggtaaagggcttgtacaatggagcgcaa

SEQ ID NO: 299942 - DNA, 225 bp, Homo Sapiens
attaacccgcgtgtatctgagtgtgggattttattgtatcacgagggacacagggtaaaatgtgcctcccggtggtcaattgttgcattacacacaaacgaaacaggattgaaaggcacaacagaccataggaccagacactttttccgagaaccttacttggacacattctatgctgaacaaagggttgttacttacccatagaagaccttggagctgaaacca

SEQ ID NO: 299943 - DNA, 364 bp, Homo Sapiens
gtttgctgtgggaaggacgggcatgtctaggcccttgtgacattatgcctgctcttaccagaggctgataaaaggatgtggatgtggtaattgaataagggcttttgggaggcgggtgccttgtcgtgggatcttgggggaagtaaggatctgtgtggagcttctctgttgagttctatgtccgctagtaagaagacattctgggaattggtgaagagaggagatttaatagtcttttcttgggacacagtgattccagaagttgtagttgaggaaaggtggttggaagtgttgaactgtgtacacgtcagtggagaaaggaggagctctactgtgaaaggtgctatgcttcaaagagcgtgta

SEQ ID NO: 299944 - DNA, 298 bp, Homo Sapiens
aacacaacacaatcatataattcagtggtttttggtgtattcacaatgtgtgtgcaactaccaccattatctaagtccagaacattgtcattacccccctctgtgcaaccactaatcatcttcctgtctgttctggacattccatattaatggaatcatacacataaatggcctttctgtgtttggcttctttcatttaacataatgcttttaagttcatccatgttgtaacaagtatcatttcattcatttttatggctgaataatattacattacatggatataatgcattttgtt

SEQ ID NO: 299945 - DNA, 205 bp, Homo Sapiens
tagaggaagagttaccgggcctcttttcactaccccaagtgtgtatctaacttatgcaccatggagcagctaacaatcttgttccttggaggcccctacatccggatggactatcagatatctatagggtgatttgagatatttaccactgcagctggtgaagggccctccaggtttcgatcaagatcaacacctctttggtggc

SEQ ID NO: 299946 - DNA, 339 bp, Homo Sapiens
tttacacagggtattctggggctgcttccacccattcgctcttcacagactgctattcctactagggtccaatggccggcagactatatctcaagcttttagtaagagcgctgaaaggcagaaactcttgctccaatccttgatattcgacacaaataggtttgaaccgctggaaatacaacacatgttaaatcttatggcaaagggtaacaaatatatcagtgattggaacacttaaatgagaacccaggacctgatcaaaattcacacagcaggttccttgcaacactttcagagccccatgcgttataatacccaccgccgagaattattggcttt

SEQ ID NO: 299947 - DNA, 365 bp, Homo Sapiens
agatctcccagcttcactgtgtgggaccaaacatccggactctatagattgctttctgtgcgaaatggagcaggtcaagggcacccgccactctgaattcagtagtgagcgccactctgagatatggactgctgattctgttggagcacccacaggtctaagataaagtccacgaagagattgatgatgtgattggcagacacaggagcccacgcatgcacgatatgagacacatgccttacactgaggctgtaattggcgagatccacatatacagtgaacttgttcccaccggtgtgacccatgcgctgtccactggtacttagtgtagaaactacctcattgccaagggcacaaccgttatg

SEQ ID NO: 299948 - DNA, 186 bp, Homo Sapiens
ccgagtctaaagggtgcattgtgtggggcgcggggaacgtcacagggacctgtcactctacacgtgggcgggtgaactttacatggcccgcgactgtgctccgccgttgccgggcaccagacaagagggtccaattccatatttggatgatgcgcggggcaggtctagagaccaagtatcacgaga

SEQ ID NO: 299949 - DNA, 166 bp, Homo Sapiens
ctgtgtggtagcacccgccctgtagagtgactcctctataaattaagagacacatgcgcggtgtgttttacttagccccgacaaagaccagaatgtgtgcactatcttatatgagcacacggctccaggtggagcgcctcaagggcacaaattcattccgcaagaa

SEQ ID NO: 299950 - DNA, 750 bp, Homo Sapiens
  misc_feature (44)..(44): n is a, c, g, or t
  misc_feature (49)..(49): n is a, c, g, or t
  misc_feature (97)..(97): n is a, c, g, or t
  misc_feature (110)..(110): n is a, c, g, or t
  misc_feature (125)..(125): n is a, c, g, or t
  misc_feature (342)..(342): n is a, c, g, or t
  misc_feature (482)..(482): n is a, c, g, or t
gacatgtctgactcttgcgctatcaactcctcacccgagggcgngatcnatgatgtgatgcagcgctgcgcgactacgctgcgcaaaataggagaanaccttcggagaanacccatctgcgccanggcactgccggcacgttgaagacacaatagaggaacacactcggggggtgccacgagatattgttggagggaagcgcggactatgtagtgttgtactactttctaaggacgtcggtcgaaaactcgggcgcgcctctagactcgaagagactctaaatgcgcgagaaccctctatgagcggtgcgcgcagacgcgtattacaacagaggaaagagcntctagtaggcgatatggcgcgccctgcgacatacataaattggtggataaaggaaggggctcctggcaaacgggagatgagaacccatgttaaatagcaatcgcgaagagtgttttgtctcacaacatgacaatgttctngagggcgctgtttagcaacctctcaatgctaaggcgcctcacatcgtctataaatagcggagaggctcgcggaggctcatcagaacagggatatactcgcggcgtataatagagcagacacagagtcccaacttcgtaacacaccacacgggtgggtaaatgagccgtaagagcggtggagaacacaccctggagacctacacactacggtggtgataggagagacccacgcgaggagccacaagagatgttaaagaaagctgtggga

SEQ ID NO: 299951 - DNA, 426 bp, Homo Sapiens
ggtgcgcctgttcagaccttttgaagagccgggattacaggggggtacccaccacgtccaccggggtccttagagatgtttttgggcacacaaaaggctcttaggtcgcgactctcagacattatgagatatgaccctgctcgcgacaaaactaataatgtacacccccactaaatggtgggtcaagtagagggtgtgtggtataacagtaacagagtcctaagctccgtgttatacaaaagagaaccgagttctggctttgccatactggggatatctgaaaacatgagtcctctatttaacccaaggaggcctaggtatacacggtatcggaaacatattagggtacttcttatcatgacactagatggaacactcccctaaaagctttgccaatcaccccttatctgcccgcatcttgattac

SEQ ID NO: 299952 - DNA, 334 bp, Homo Sapiens
tcggtgtttagactatggggagaacactggggctgaagctggctcccccttacttccagaggaaactggttactgctggagacctggtgtgcgggccaggtttttcgaggattcagactgttttttcgccgggtgtgatcatgatcaagctttggcctggagtgacctgagatcatctaactgtgagaggatttcaaaccaacaacaaccagatgtgtgtcagctcagccgggctttagagccatatttgccatgtggttgttcacaagttgcgttgagcgggggtggggcttcacccaaaggaatgggtcacccggcagaactatgggaggtg

SEQ ID NO: 299953 - DNA, 420 bp, Homo Sapiens
cgtgagcacagattagcactctatcgcgaaacgcacttttgcgggtgagaagatccctaagaatataccgcagcgggcgccgggtatcacaagaaagggtataccaggtggtgtagggaacatgtgtacaaagagagacctcgggccgtatgatctctacagattgccacatatactttttgtttcgcaagagatattttggcctttttgcagatgactctagtctctttctccacaatatgagggcactggcccccaacacagaatgatcccgttaaacacgctcacacatgccaaagacaaacacctctccattacctacaacgagagaagtgattacctgatgtgaagatgttgtcaatgagaacaagcgggatctcattattcaaagactgtgtgtgtgccatctttctgtgacta

SEQ ID NO: 299954 - DNA, 664 bp, Homo Sapiens
gacaagagcccctcacgggagcccaggaggagagatctccagccacagcatagagacttggtaaaccttggaaatacatccaagaccagccaaccagagatagacaatcttaatcctaaagaatagccccaaactgaggacaatacccaagccatgttctcacatctttatggagaaagtacatattagtctggatatgacaggcagaaatcagaaccaaggggcagcactagacgcaacttttagagcacaggttccataataacttcttaactgtaactttacacatactgtccagactcagaacacagtttagagcctgatataaagagtaagcttcagaccctagactaagcatcagtgtctagactagaagttcacttctcattaacccaaggctaagactagtatttagaggaatcgcgcgctagagttccagtgctatttgttcttatcctattacacagaagttttaagccttaacacatagaatatttgatcaacgctcagattgacagtccttcgcttaatcttataagtctctacatttaagactccatgttaaacaccaccacctcgagcaatttggtttatttccccgaggcctcttcttttaacaaccacgcagaaagaattaactgtttttaaccaccactctcttccg

SEQ ID NO: 299955 - DNA, 383 bp, Homo Sapiens
ggcacgagagtgaatatactgtgacatcataaagcgtgtcatactctgccgactatatcaaacactaaacttataccaaggctggcgcgcggtaacacgagaacgctcttagcaaggcgcccgcacaccacctgtgcaaagaggcctccgatactgggtgagcccatgtatatcctcataaggttttttctctgcatgacatttcttgagcctttaacactccagtctagcacctacacggcaaatacgagggtactgactctcaacaggctaaccgcgctatataccctataagtgccacttataaacacactcgtgttatttgcatcaagcggagtagcactgtgcattacacatttaatgccgctccattgtaccctcct

SEQ ID NO: 299956 - DNA, 514 bp, Homo Sapiens
  misc_feature (63)..(63): n is a, c, g, or t
  misc_feature (88)..(128): n is a, c, g, or t
ttcttatctctaacactatgcatactcttgggtataacaggcgcgcagagaggccattgaaanccctttggaaaccttcgaggaggtnnnnnnnnnnnnnnnnnnnnnnnnnnnnnnnnnnnnnnnnntggcacgagagcgtgcctgatttgaaatagcaaacacactctaacttattactcgagaagcttagacaaaccatttacccaaatgaagtctaggcgatagagatagagatctgtggcaatacatatataaccgtgtgggaaagaggaaaaaatattgccgagcctaatataacaagggctaaaccctataccttctgcgtaatgtgttaactatgaaaaactttgccaggagagccaaagcttagaaccccgaaaccagaccagctacctaagaacaggttaaatagaacacccgcgtatgtagcaaaataatgggaagatttataggttgaggcgaaaaaactaccgagcctggcggaagttggatgtccctcgtgaatataact

SEQ ID NO: 299957 - DNA, 376 bp, Homo Sapiens
caccttttggggggtcactctctgtcttttggaggaaagagaaagcgggtaccgctccagtggtgcagaagtgagagataatggtttaaggctgtacctccataggcactcttctaggccattttaacccttggggttacctatgaatatattacaaggttggttctatgcaggctgtgcaaaggcacattcttaagcaccttgtgaaaaatcttttcaagatattatgtctagaccgtgtgaagggagacctgcggtttgacactctgcttggtcccactatatatcacctcctctctggttgtgaatgctgttaagagatgtggtctctgacttgtcagaccacaacactggagagcttgagaaatggctgtgg

SEQ ID NO: 299958 - DNA, 479 bp, Homo Sapiens
acttccgctcaacgacacaatcatataccccgtcatatgcattaaatgtgtcgctacttgcagtatctctcaatactcaacccctttacggtgacacgcgttgcttgcgcacccgaagagctctgaggacatatgtgaggccacaccgcactccccgtgtgacacctattgcactgaacaccacggaagaacccactctggtgctacgctacagcattgtactttgtacacgggcacatgcgtacatatgtgcgactaacatgtcagccctataggagccctaggactaggtacttggcacatccaagaataccattacagcatctttgccaagtatgtgcgctctattataggagcacagctgtctacctcttcgcccaaagaatgtggaccttgtcgattgaagtaagattataacgaagtctttaccccgacattgaggccacacggcattaaccttcacgtgataaccaccatgt

SEQ ID NO: 299959 - DNA, 268 bp, Homo Sapiens
catctagataatgtgtactctctaaagagtgctgtgttcctttgcctctttgtgcccatgcctctctgaacttaatttctgtgtaactgaggcgttttaagcttaagtgggaaagccacacccttagactgtgtccttaagccattttgaccaatttatgggattaactagtataatcttagatggaggtttagtctgaggcatattaagtcattcagagatcttaacagtaggtgtcatagtcattcactgagttggtgcttgctgc

SEQ ID NO: 299960 - DNA, 415 bp, Homo Sapiens
ggccctccagatgccgcacaagaagagagacgctctgtgtgtacagatgtgtgacactgctagttctcgtagggatataaaggcgccagatgtatcagaagagggaggatatcaaaggccgtatatgtctctcttcaccaaaggtagccacaggccgggacatggctgactggatcatgctgagctctgggagagaatctatgtactctccacaaaccattgatgaagacacacgcgacccatggtcaggattgagaactatatacatcgttgacacacgggatgatctggagagacacggacctgacaaggttaatgaacttaggcaccgattcggacaatgctgtgccaatcaagttgtatgtgaattgagcactgagtgacacatgagaggaagcttccaagacccaaacag

SEQ ID NO: 299961 - DNA, 361 bp, Homo Sapiens
agaaaatgtatagactcactgcacattttgaaaagagatgcatattatatgtggagagatttcagatcttttagcccagacttatggtctcacgtctcctacattttgtttctctggtgataattgtaacggacgccgtgtgggtgacaagagcacactctccatcaggcggagatctactttctgaggtggctatagtcggtgcagcacaactggcacggtgagtgagcaccgtactagaggatccaactcgtgtcctgcgaataacactgcgttacgttgtacttacagagctctgtgttccttggaggcccactatacacccgtggtagagctcgccagacccttataattacacccg

SEQ ID NO: 299962 - DNA, 361 bp, Homo Sapiens
gggttagtgtgtgtgaaaaaaactgtataaagcagtctctattgttatgtggcacaacaaaaaggggtttatcgctttgtgtgcgctgttgaatactgtggttaagaaatatccgcgattttaacgcgtggatcattgtgaaaaatgcgttatactctttaaactttgacgcgagcacgaaagggcgtaatcgtttttaaggagagaaccgcggccacataaagttaaattcttaaacatacgcagagacttgatttacacccatgtggcaactccgggttaaggagagcttacatgccagtgttccccgtgccaaccaaagactgttttgaacgttctcttaaatctgaggcctggtttt

SEQ ID NO: 299963 - DNA, 355 bp, Homo Sapiens
cgatagcccacccactgtcatattatttattctgggtatactctctgaatttttatctgatgtgaaatatctgtagagaaccagccggcaagtgcgtgttttggtcattttgctgaattcaagagtacctcataaactatagtgtctgcctgtcacacactgtccaatagggggtgatatactttctgagttgaatatattctgtgttggacaacggcaacgttataagaacacaatttttggagatcccaaccatgtgccttgaataacactggggaagggggagttacaggcgggttgtttctgggggccactattacccagggttgacatgcatcttgttatttacacatcg

SEQ ID NO: 299964 - DNA, 347 bp, Homo Sapiens
tttttgtatagaacagcccctaccccaatatggcgccccgaaatggggcttacccctttgcgtgcgctgttatatacctgtttccttaccaagtgctgattttacacgggtgatccgctcgcccatagcgctcttacggccatattgcggcattctccgagtttccggccacaaggtgaacatatgtgataacgcttactctctttcttgtgcagtgtcagagagtattcttttcaggaagactaaacactcttgggattctggatgttaaagaacactatgattactgtatctcacttcacaccattgtgttgttttgacccgtcttttaaatcaccatctgtagt

SEQ ID NO: 299965 - DNA, 354 bp, Homo Sapiens
gtatagtgcagcccaggtctctatatgggagcccagactggggtctactcctaggcgtacgctcttaaacccttttgtccatacatagtgctggaattacagggttgatcacccacgacctggcttgatttctggcattttacgggatccaaaaaattacagagcaacaggtggacaaatgtcagaaagcttactctctgttttggattcaatgtgacagaatactctattctgagagaaaaactgacaccctgaaagagaaacattttaaaatattcacaccctatttctgaaaaacccttacattaaccggatgtgatacaacgctatgttcaccggttatgacctaccctc

SEQ ID NO: 299966 - DNA, 342 bp, Homo Sapiens
tgagaacggagagacactctttatgaaatacctatatgagattgccagccgacactcttacttttatgccccgggactccctttatttgctataaggaataaaggtgctcttacagaatggggccaagcctgcggagtcctctgccacacagagactcaagcgtgccactctctacaaatttggagaaagagctctctaagcgtgggcagtatctcgactgagccacagattttccaaagctgactttgcagaaagtttcgagttagcgaccgatcttcccaagttcacacggaatgctgtcatggagatatgccagaatgtgctgaagacagggcggacct

SEQ ID NO: 299967 - DNA, 356 bp, Homo Sapiens
caagctttagggatcaccggagaaacatgccgctagttcagtgagctttccagctttgttgaccaacaccggatggtcaaaaactggcagacagttttggcatgtgaggaaggtcatgtgttcagaacactatcaactcgctataaggcttaaaggtttgcgtaaaccgcagagtgattctgtcgttgagaaggagatttacaatgagcactatctgcccatgcagtacaaggtggtcttaagctgggaccagcccacctctttcgtttatttcctaaatatttcttagcattttgcgcaactaagatgcaccttctttaaagagaaaagcaagcaatctcttgtatttatttgcc

SEQ ID NO: 299968 - DNA, 379 bp, Homo Sapiens
gctgtgcaagatggagctttagagcgtgtgcaccgcatcgcgcaaatgcagcatacctgcacacttgatacgggtaccagaccctgaaagcaataccaggttcgctagggtcacaagatagaggggcgtgggctattggctctccttggtgcgctgctgcataattggctgacttgcagtatgggcattgctcccccagaagaagcacccgaaggcctaatcgcgtaatcctaaaacaccgaaggagaaatacgcaagctgtgaatgaaatatacattggagattcgggcctattatagcagattaccctgagtgttggcgcgctaaaaagccttctgtctgccatggtgccaaaaaagacagaatgtattgccgggag

SEQ ID NO: 299969 - DNA, 348 bp, Homo Sapiens
ctgagaaccaccttatcatggctctacatatgatgcgtaagttttccacactggcgttcattgatatctacacttctttaccttataattcgtcagaacagatgaaacttttatcacccatgtatgccttccattcttaaatttctcctgagactttactctctatgcttggaacaccacagtggctatcttacaggtcatttacaagatgctttacaacttgacatggctgaccagtttaccagtttgggacattctatatcttacccgccaaccagagggtatcccatatggaagccaaatgggggtttatacctgtgaaataagggtggaattccactgctggca

SEQ ID NO: 299970 - DNA, 352 bp, Homo Sapiens
aggagaagttctgtgttctagagcactatatgactgccatgtatgccgtacatataactagatacatccctgtgcgcaccacgtgaatcatgcctgtactccaagacgtgaggcgaatacccagtgttaggagctggagcctcggcttcagaccgaactgttaacaagatgtgcacatagcggtacaaagtgtacaggggttaaatagtcagaagggcatcatccggcaggactactgaactgccccgttcaggcagctttacagaggataaccactttctgtctacaagataggagagttccaagacgtgaccggaaactcccttactggctgagaccccaacttctggca

SEQ ID NO: 299971 - DNA, 393 bp, Homo Sapiens
aggaaaggtgcctgtgctgatgtctctgctgctgtgtctgtgtcctgttgtcccccaggagaaccacgatgggcgttactctctgacctatattaactggctgtgcaacatgttgagacgttcccggcttcaagcccttgggtcactcaatggcctccagagctttagatacccccgtaagacaggaaggctcaagccatgggactctggagacacggtggaggaatggaggattggaagcacgacagtcaacttcccaaagccacggaggacatctttatggagaccctgaaagacacttgggaggattacaacgaccgtaacgggtttacgcattgcaaggaatggttggacgtgagaacgggaatcacagaacctgtggagcattctgga

SEQ ID NO: 299972 - DNA, 325 bp, Homo Sapiens
agcaaactttccgccaatggggcgtcactatgatttacatgtgtcttgctacacatactacaaggcctatagtgcgcaccacattctataccacaacctgaacacgggaaaggcaaagcctgcaagatagcagaagagtgagatatgctatgagcccaccgagggcacatatcaggctaggagacaagtctataccgactactatacgacaacgaaacatgggccagacttagttagagttccaattagcctccataaatgcgaccctaggacctgtcaacctcatattgttgctcgaaacggagaaagccccccctacggatgg

SEQ ID NO: 299973 - DNA, 330 bp, Homo Sapiens
cggaagcccactctgtcatagtgttgtacagctatatctcaatgagtaacctgtgttccgcgagactgctattgtacctgtgagcgcatgcatgatgtggacccgtgggaagaagcaagtcatgcccaaggatgatatagcctgggctttccgatgtaccttccgtatataggcgtgaccctagaacgtggcaggagcatcgaactgagacgcctgaattcatggagaacggaagacatcatacagtttcacccgtttttgctggcaataactgtatgctctatggaaatggtttccaggtatcgagactggcggtagcagtttttctcg

SEQ ID NO: 299974 - DNA, 203 bp, Homo Sapiens
ggagattagagcgcaatttgcagtctatatagatttacactgactctagtcattgtgtcaaatgactgtagtatcaaagggaagaatgtggagtttgggagctttgtagaaaagggattttcagcagtgaacacaaatatatgaggttctaaggaaggaatgaaagcttgaagaatttagtctttggcctggattttcatttt

SEQ ID NO: 299975 - DNA, 410 bp, Homo Sapiens
cgctcgggctctctgtagcacagtcgaacagtcagagtctagcggtggatctgtgtcgtggagcttatgagtgcatcgtggacccacaggcgaatatgtgctcctgtggtcgaagagcaagactgtagatcgggtgctcaatagctatgagacatatacgatagctatgttaaagatatacgcataagcccagtacataagttctggtgctatagaaccctgatagacatggacttcacaggaggcatttaagaacaagatacacgttctaagccgctgatgactcccatatcctgtatacacctttggacaagatgttaaacgtgacggatctgacagtttaagtgtatgcgaaagagactattctgaaacccaatgatgagaacacacggaatcccgagaaagaggca

SEQ ID NO: 299976 - DNA, 349 bp, Homo Sapiens
aggagagagagatgcacatatatcagctcagagcttcacatatatcaatggtagacattaagacaccgtgctaagtgtggtcacgaattgaacatggtcaactaacatggcgataaacctgcattctctcggatgaacactcgatgcggcccctatttagatagagcatccatgcactgtggcgttctaactaacacttgggctttagtatgacactcatggcaagtgacttaaagcatggaaacgcgaggcgcttttatgacggtcagaatactgggtttgctataacatatccttaaatgcacggacctgcgatagtgcgtttaagagatattgtctttaccagccg

SEQ ID NO: 299977 - DNA, 355 bp, Homo Sapiens
ctgtcgccacatctcaggatgtgccatacagacaccagcactctatcaatctctcctgaggttatcaatggcaaggatcaaatggctggactgaccggcataatctgccgaatgttgcgaagggcattttgagaggtgaagattccaccgaggctgttaaacatggcttgaatggggtcttggagtggcatcatggggctcgacaactttattggaggccagtcactattgaagttatgtcagaaattgtcgacgctatcggaacggaaggtggcagtgtttctcggatagggtgttacggcaggtactgatgtgctcacagctctctctataggcgccaaggctgtgaatgtgg

SEQ ID NO: 299978 - DNA, 343 bp, Homo Sapiens
cgcaagcccactctgacttagtgtcagacagccttatcccaacgataaacctgtattgcggataagcgataggacttgagagctcacgcattaattagacccgcggaaagatgcgagattaactcgtagacacgtgtgcaggagcgccgaagctaagaaccctggaatcactggagctatctaagaacagctatcggagttcaccaccttatggtgcacaatcgcgggaagaacttaggcagaggtgtttaaagtatcgagactggaggtagcagtttgtctgagatagggtcctaggtcagcttttgatgtgcgcacaggacaccttatattccctcggaaa

SEQ ID NO: 299979 - DNA, 211 bp, Homo Sapiens
cgcaaactcactctgagtttctggcacacagccttctccaatccataaacctaaatatgcggatagcctatggatattgacaccactcgcacgcagatatactaccagtaggtaaagactctcaatcattaccaagcattatatacctgggacttacctctatatccttgtgcataatgaattaactcggataagagacagcttaggtata

SEQ ID NO: 299980 - DNA, 221 bp, Homo Sapiens
  misc_feature (57)..(112): n is a, c, g, or t
cgccagcttcgtgtgaggctctggctcagaactgactatacgcgcgatggactatannnnnnnnnnnnnnnnnnnnnnnnnnnnnnnnnnnnnnnnnnnnnnnnnnnnnnnnaatgactttaatgggtaagttatgataaagacctgtgacttatggctaaatcttggacccactttgtgggctcggacagttacttcagaggcagatctagacctggact

SEQ ID NO: 299981 - DNA, 377 bp, Homo Sapiens
  misc_feature (352)..(352): n is a, c, g, or t
ctcagatattgtgtggtgtgaatcagctgtacagattctgacactacgcgggtaccggattaaagtctataatgttctcaagtgcgtgtatcggggcttaactatgctaaagctgtgcaaggaaacaggttaccgaaagtagatccggatcttgcagttaatatcgatacagcaagatctggaagaatagtgacgccgtggacttaccaagtggctttggcagaagttctgatactttaagaataattgggtcacactcacacagattggaattgatgtgtctcacttaatggcctgattctggtgacgctggctctctgctgtcgaacgttggacccttgaaagatctcanattgtgaagcgcgacatgaagagag

SEQ ID NO: 299982 - DNA, 473 bp, Homo Sapiens
cgcgagcaacccgagagggttgggcctggatctgaccaagggctacatatactgtaccgagtgaggcgcgatgtcacgaatcgcgtcgaccttgatggacaggaccaactgtatgactgctggtggacaaggtgtgacggtgcaacggccttaccgtgttactacgctgaccagagcctttactggaccgacctggacaccaacatgatcgagtccatcaacatgctgtgagacgcccgggctggtgccttatggtcattgagggcattgcagtcgaccgttggccacctttcagcctcgccgcacataccctgtggcctgcaagttccccaacctggcaagagctgtggccacacccacgagtgcccaaagcctcacactctggtgtgggaacagttcccgtgcacccctgtgtgactttgctgccagtatagacccagaggctctggagactgatgtgttctgtgcacatg

SEQ ID NO: 299983 - DNA, 498 bp, Homo Sapiens
agctgatattgagtgaggtgtatgtgatgtacagatgcggacactactcgggaacactctggaaagcctatattgtgcagaattggttgaagcggagcttatctctcagaaagcttgccaaggaaaagaggtgacaaaaagaagatcttgatctgacagtgaatatgttgacacgcaaattaaggaagaaaagagacgccgttgacctaccaagaggctttggcagaggtgttgagcctgtaagagtaattgtggccacagtcacgaaagtggaatagaagtttcttatgaagtggtctcaaattgtaaatgcgctttatggagagagacttactaggcaatcctgtgtccaagatgaagctcaatgaacgttgacactgttccatggatagtattatatatatatatcagaattgcgtcttagattatgacttactagcgtgacaaactaagtacattctcatgaagatcaagtctgagatgtgagctctgtaagaa

SEQ ID NO: 299984 - DNA, 361 bp, Homo Sapiens
  misc_feature (137)..(145): n is a, c, g, or t
tgttttccgtcctgtaaccagaaaagactattgttgtactgattgatgttattaaaatagccccattgtatcacagtcctttgtacatctttaagcttgaatccgtgtatctagtgtattgcagaattttcataaannnnnnnnnatttcataaaactcatcgagaatatacattttcttcacgttgcaaactggaaaaatgagtgaagtatagtgaaaggtaaattctaattttgcataaaattgtcatggaatttacttggataaaattctcccctaatgtgattgtgacataaattcatgtgtgggaaagaaggggcagacaggaaactgaatgcttaattccttaaggaaataattt

SEQ ID NO: 299985 - DNA, 334 bp, Homo Sapiens
tctcgaagtagataaggaacagacctttgatgggatttctagtctgcggcatggtgctgagggctattgtgggcactcttgagtacaggattgcctcgctttgaaacggtaaatccaaagggaggaaattatgtggacaaaaccgatctatggctttactcacctaagatggagagctagggagcactaccttgaggaaaatatcaatgtaaatatatttgactatttgagactgcctgacaggataacctttattgcagatggcaagattgaattgctgctcctgggacttacatcctcaacttacatcatgaatatgatacactgtaaccgg

SEQ ID NO: 299986 - DNA, 423 bp, Homo Sapiens
cgaacatcatgcacatcaactacgaggctggaatgttggacaaccactcgagcctggctccttctgagctctatacgctgacccattactacctcaaaggtgtcagcacccctggcattctcgagagagagtctgctgccaagagtcaactgtgaaagtgactcaagggcacggataggacacatggcaacacacctgcttggagctctataggaacctgaacgaagtcgcgggctagcatggagctggccgtattgactaccgtgtgcactgcttccatggaatgaaaccccgctgtatgtacacagaccgcaccaggcaccatcctttaccatgctcatatagacatagaggtcttaaccattgaccgtgaagggcgcactgaggggctaccactggagttgcaacttgcctagctggcgg

SEQ ID NO: 299987 - DNA, 318 bp, Homo Sapiens
agcatatagaagaactctgtgcatgagaactgagacgggggggataaaccatcttaatgagcgtggggctaagcacgtgatgtcacttgcactccataacgagcctcttgctaggtctactaatcatgacacattccgtatacccatggtggggcgatgtaacacgacaaaggacataccaagggctcaaaacaccacctgtgcatagcaaatatatctgaggctttgaacacttcaggctaacccctaccccgcaacttagggggcgctgagccccaacaggcattacccggcgttattccctagaagatccactcg

SEQ ID NO: 299988 - DNA, 219 bp, Homo Sapiens
agcttatgacagtatccggggcatacacaatgagagagaggcagtcagcgcccctgaagcgcatgttgaaatacactgggcctcactttgacaacagaacaggagatccagtatggatagtaatcaattatgacagacttggccaagatataggctgtgctctgctatcaaggacggagcttagacacaaggcaatcactgtgcatatgggcctacact

SEQ ID NO: 299989 - DNA, 281 bp, Homo Sapiens
agggtgtgtctttatatgagactcaccctcatttttacagcgacaccagagaaccggcatggattgtcatctgttattacagaggtggccgacatatgatcgcgactctgccatatgagagggagctcataaagaaggcgatcagtgtgaatctggttaagactctgttccagaacgtttgcacacagactgcgaaagagaatccgtattggcaactgaaggacagacgtgcagataggccaagatctttgaaacgcactttttgcaccactttctgtctt

SEQ ID NO: 299990 - DNA, 174 bp, Homo Sapiens
ctcttgtgttttttgttcaagcggagacagctagtgtgtctccccttttagaggccatcgccacggtggactcgacaaagacctcctatgaaccccaaggcgttgccgaagcccgtgttagaatctgtcgaaaagcctgtgttaacagaacctatgacagtgacacttttctag

SEQ ID NO: 299991 - DNA, 462 bp, Homo Sapiens
aggatgtgctcacgcgtggaccctcctccgcttgagcttatccgcgatccagactttctggacctgtgcatgcgatcactctttaaacgcaaggctctggtcaacccggaccacatgcacagatacatacacatcttggcgtacgcagaaagcgtgggtgagacctggaagaaaggaccacacgggtctgggaatgtgtggagactttaggagacaaatatcctgcactggcttgacattatcttggaattttggctgcaagaaatattgaccctccctagcatgaggcatgtgttatcttgtgtttctgagtaaagaaagcactaaacaggtccagaaaatgagcgcgatgtgtccaatgctctgcagaccgtaaattgaaatggttttgagcttctgtacactgtgtgactgcgacacttgacagacgtattgactcccagcttaagacgacgattgggt

SEQ ID NO: 299992 - DNA, 517 bp, Homo Sapiens
  misc_feature (78)..(89): n is a, c, g, or t
  misc_feature (227)..(237): n is a, c, g, or t
gacagtgtttatactctttggggtgagggatgagaaccgggtggatataggatgggtgggaaacccacttctcactannnnnnnnnnnnataccctgtgaatatgtaacccattgttaaaataatgtgtaaaatcatgtcccggagtttcctgacttaaaaaatagatctatatatatctaacggtctttttccatataaaggcattaataaaggtgtgtgctaaannnnnnnnnnnaagaatgcgtgtattgtctaatctcaaagggcccgtaattatttgcacgggccttgccatgggtttgttctccttcaaaactctcaaaagctgtgactaagatatattatgaaaccctccattaagaaatttcatactgcgcaaacacacaaaccttaaattattgcttgcttattggaagaaccacttaattgagattatctgcgggattttgcccactgggtactcacatgtttcctaatcatgagatcttgggtctcatcatcaaggggataaatta

SEQ ID NO: 299993 - DNA, 628 bp, Homo Sapiens
gaacacggcagggctgtctgaggctctggggacatgagacacatacagaagcactgacagtgttctggggaaaagtcagacctgggagccaataaagcatacccagcttcacgtgcagcaggaactaggtagaaaggcgaaattccacagcaactggaactggaaaatggaacacgggtcctgaggacacattagaaaaacatttggtaagaatgcgctcagatggggatgcagagtgccaagtccttatgaaattttgcctgtatttggggaagaagtttttatatgggaccaagtttggtgagacacttaagaagacatttctcaaataagacatttttatagactgtgacacgatatatgaaggaaatgtgttttatactcacagcaaatgctgtgaatgagtaatgggtttttgatatgctggtatggggcacgggcatggagatgtgcttttcaagtgtgctgttagaagaacctcttgtggagagtgtagctgaccaatagactccagactctctcaccaatgactgtgggcacagtggagatactcaaatcaagccattcctgcctgatggggattcctttaatgtgcaactctggctcatggactcccatctaactgtgc

SEQ ID NO: 299994 - DNA, 364 bp, Homo Sapiens
ctccacattcttatctgtacactctcccttttcacaaaacgcacagcctcataagacctcgcacacgagactgccatctctgtgatcccaagacgtcaacccttgccccagaaatgctgaattttcttgtacctggtcatcaaaaaaggcgagtgatcaaagagaagggagctgcttctccatcgttttcctgaaaagaaaccctgtctctttcctctctcctcaagaatgggccttatcgcctcacagaggcgaggacacgggcatcccctgcactgcaaagtttggtgggacggattctctactgtgcaaccctttgcctccactattggattgttttcacacccccattcttcatgctgtg

SEQ ID NO: 299995 - DNA, 474 bp, Homo Sapiens
agggggccgcgagaggatctcgcggcggggcggaggtgagagaatgctatacaaagcctctacaccgggagccctagcggaacgccgctgacgtttaatccagctgaccctgccaagaaaccggacgaaaccgacccagaacttaggaaggcgtatgcccggcggccctacaacattgttggcacaggtgtgattgaagggagacggttaaccacccaagagggggctctcagcgacccctgggtgcgtgaccgcaagaacaactagggacggccatgcccgggggtgaaatgcaacgctaaaggggttttagaactttgagcacccaagttcatcctgagaatggataaggtactggaatcaaggttccagatagagagggctgacactcaactggcccatgtaactcgccgggcgaagcgtcttaccctaaagggggcccaattggacagctttcatgacctaacttttgcg

SEQ ID NO: 299996 - DNA, 403 bp, Homo Sapiens
gctggctctataacctatgtccgaagcccatgctctcaattattatactcgactgcctcttaaagatttcctctatttgaaaggtaatttaaatttcggtgggaaaactgctggttattattctcaagaataaactccacaacttatgtgattctgatagtgcaaactcaccagtatcctaccatgaatctgaggatacgttatcattactgtaattactgtctaatctgaaccatgtgaaaataacttttatttctctagcaaagggctattcacagaatattgcttttgacccatagagagcttcttcttgctgtcattttaggaggcatatccctttttccttaatctgtttggctcagagctaactgtgaacttcagaagtgtttgttttgccttttta

SEQ ID NO: 299997 - DNA, 299 bp, Homo Sapiens
gcagtatggaggtggagtcaccatctgttctcaaggatgggaaacagactttaactgaacattaggaatgagctgtattcacctggcattggtatcaggcgctggatggattacaccagagaatacattacattaggaaacacagtgcctggctcatggtggaccagagacagatggatggactgttttttgatgtgaagactgaattagccctggcagtgctgtttcccagggccctatctctgggagtcctcctgctggaagggaagtgctctcatagctgatagttaagacatgta

SEQ ID NO: 299998 - DNA, 366 bp, Homo Sapiens
  misc_feature (343)..(343): n is a, c, g, or t
gctgattgaatgtgagttttcaaataggagtctttttctgcaatttgtttgcattttttagaagtgcaaacagtaagtaaataaaagccttcggtaataatcatgacaatacaagaggctgagctaggctacaggggaaaactattgtgttgtaaagttgcatcgctattttatattaaaatgtaatgatcagcatcatgaacaatgagctcttagtgttttatttatctgaaaaaatgtaagtatctgtaagcaatactagtaggtaagatttcactgtgtgtacacatacacatttgagattgtatgagaacatataatccatatgatatgttgtacattntatggaaatgtaatagaatctca

SEQ ID NO: 299999 - DNA, 490 bp, Homo Sapiens
tgctgtgtagccctttgacacgtctcacagtaccttataacacatatttatagtgaggtttgagtaacttggaagtctattttagaccaaatacacgtttggttaatgttgctaggcatagagtgtagcccttctcccttcatatgagatcctttagacgtgacaagacccgcctgtgatgcctagacccttctcccatttagaaggacattactgaatgcaaatttgcaaaaagctatggcagaacctgtggttaaaatctcataagattcaaagagtctggaatttaagaagctaagggaaaatatatgtgcagagcctatcttctaccagtcagacttggttttgcttacataagtttattctttttctgagccaatgttgaattgaagtaatagtgatcacagcttatcacaggtctctaaagattattgcctcctttactgtgcttatgaattaacaccaatttcttccaaatggaattctttat

SEQ ID NO: 300000 - DNA, 664 bp, Homo Sapiens
  misc_feature (504)..(504): n is a, c, g, or t
  misc_feature (635)..(635): n is a, c, g, or t
gttatgtctgtctttatgtgcatgtgtattcattgggtagctcccacttatacgtgagaacatgcaatatttgagtttctatttttgagttagttcacttagataatggcctccaccttcattcatgttgctgcagttttaggtaatttggaagatacacaaagtacacttattggggatataagatgtgctggttctgtccttttacctatccatatattttcaccttatagggatatatttatcatattgctacacctcacttctcaaaatcctgtgtaaatctaagggttatttttaaggtttaattagactatactcttagaggagttagtgaaacaagctgaaccgtagcaagggcaagtttccgcacatgacccgaagcatgaatccaggtggttgtcaaggcccaggtagcatttaactcttggaaggcttacctctccaaactttacaaacccagggtaaccctatcagtcattgtgaatcccaggcttgtaattngctcgtaatttctttaacattgccttctgagaatggctgcgtatctactttccatgttgtaatataaccaggagacacaactggagggaatatgcccgaataatagatatattaaatagggtagtagattntggtacctgttatacggagactacatttt

SEQ ID NO: 300001 - DNA, 662 bp, Homo Sapiens
gggccacgcactgcctgtaccgcatggagagaggtgtgtaaggatatcaggatgactgtgcatagtgtgccgaaaggctttcctacacggctatatccaagctcttcctctgcataggcctacacagagtgctgtgagcgtgctaagacttgaaagatgagtgacagatctccaaccgagagtggtccaggcagtcctattgccttggataaacccacagggcccaaggtattacgaccctgtcactgaatagcatgtctacacagagagtgtggcctagggccatggctggaaatgcagctggaccatcggtggcatctatatcgagcgaggactgtccatggaatccacactgtgtctctggctgtgcaatggccctgtataaccttatagggcacggttacagtgtaaagcacatgcgaatctcaagtgtgcgaccatgctttcatgagtccagggactctggttaacctaggccatgtaacctgtactcatactcctgccctagcggtacttgaagagctactctcttgcctcacttgaatgagctctgtccagcataatggaccagtgtatctgtgagcatcatgaaaccacgaaagggcgtgtcataggcaaagtgcatagccggactctggaaaaggacgggcattcaagcagag

SEQ ID NO: 300002 - DNA, 651 bp, Homo Sapiens
gagagtgtgacagtgagtgcctgtgagtcaaaggacgtgctgcagtacctgtatctcaggtaggatgcgaacgccgacgaatatgacctgtaacagcagttgcactaccacctgcgcgaactgcgcactgagctgtcgcgactcacgcgcaaagtctacatcctgactaacagatgacgtcctgatattggcttatcaatctgagccgctgatagtgtgtcaccaatgggtgaccagatacctgtatgaccgatcttatgatcataattgctcaaagctagctgggctttgttcagggtgagtatgcaataaggtactaatgcatacagttacggcagtgtactaggagaacagcgttacagcactgagatgggtgtacaagcacgtggaacagccctgaaaattctggcacttgattaaaggacccgcggcacatcactgcactgcaccctattctgcagaagtagacattgagaccggacctgctgcaaggctttcgagctagaccattcttgctgggtcattgtttgcaatatgcacccccaaaatgtacgaccttagggcattaacttggatctccggctaatgcagacctgtaacttgttagcacttcttcaggatacaacatttcttacggtacaggtcaacgta

SEQ ID NO: 300003 - DNA, 559 bp, Homo Sapiens
  misc_feature (431)..(431): n is a, c, g, or t
tgatactgttatggtaagatattgattttaagtttagtagtcatgttgttagatttgttatgtatctagatagtgaattagcattttgtatgtgtgggtctatatctgttagtattatccgacatgattctagacattattgttttaattgtactaccaacgatagtatataacattcaggctctggttcttgtgtaaggagtatttctgagtctccaggacgttttgattacatgttggctaataagcctaattatattcgttcgtgattcgtgcacaattctctatggtttgctttgaaggtatcttgtgacacatgtgtgagtcctcttcaaggtagtttactttttaacgtgttgtgtctggtttttaatataactctctctactatatttcaagctgacagtgttctttatatctctctataatanactcacgctgctactcgatatataatcatatgacttaatgtttgacactctatataacattatttatttaatattgcagattttttagttttatgtacattcttatttctatactctttcgtattcct

SEQ ID NO: 300004 - DNA, 320 bp, Homo Sapiens
  misc_feature (130)..(235): n is a, c, g, or t
  misc_feature (266)..(266): n is a, c, g, or t
  misc_feature (270)..(271): n is a, c, g, or t
atatataaaatataattgggaaaacaaaagaagagctatacacggatgagagatacagcataatcttagaacagatatagaggccctacaaaggaaagcaagataaagtgacaaagaataatcagtgagnnnnnnnnnnnnnnnnnnnnnnnnnnnnnnnnnnnnnnnnnnnnnnnnnnnnnnnnnnnnnnnnnnnnnnnnnnnnnnnnnnnnnnnnnnnnnnnnnnnnnnnnnnctctgtttctacatgtgccattgagcaaccngcannacaccagattgacactgcataaagtctatgattgttctctgtgagaggt

SEQ ID NO: 300005 - DNA, 588 bp, Homo Sapiens
gggagccgccgcaccaggcctgatgtgtaattattttgaaaggtatcatcctttaatctgccctagctaaagggagagctaatagatcatagacagaggtctgaagtacgcaacactgtgttggagaaatactggcccagaactcacatctgagatctagtcctgcctgaggcctgagcaagaaacctggagattctgggactccatcgtaaatgtgaacagcaagagtagagtttgaatgtgagcgctcttttcacctctgtgttgtggcggagagttcgttcacgtgaagaagggaaaagcaacgggagaactacacatatcttttaagctcaggtagaacaatatcctgatggctcgacatagctactgagttagataccatgtgtatattcgttcatctatgccttatgaatcatcctgcctagccttttaaagaaactttccctctcccctataggggagatgagtggctctcggccgctattgactgtgtagaatagcatgcagaccaaatgtgggtggacatatgcacgaatctttgctgtgccaccagaccgcacagacttagtgacaagaaactgtgtt

SEQ ID NO: 300006 - DNA, 405 bp, Homo Sapiens
gttccaccaccttctaacaaaggtaggcccagaaagcagtttttagtttgttgagtgtgattgtaatagctgtacagatataaattggggaagctgaagtaaagcccaattgcatttatgtaacagaagtgatttagagctttggaaagcaaggagatgaggacttgaaagatgctgaatgaggctagaaggtaaagtttggaaccttcctggagaataacataaagaggagattgagggagatttgttttttctctagagatattctgggcttgaaatgcagtgcaacatataatgtctacaattgtcatctcctctaaaaatcttcagcaaaattggtcgcttagtagtgtttgaagattgtgacaaacactaattgtacctagaaagaatcacaaagggaga

SEQ ID NO: 300007 - DNA, 373 bp, Homo Sapiens
  misc_feature (355)..(355): n is a, c, g, or t
gactctaaatctctaaatcttggagtctggatgcactattcatgtgataggctaaaataactactaataccttatgttcgaacagcactttatgaagtgattacacataaaagatcttttttgatataactgttatacggcatatcttccattttatagacagggtgagttgtttgatgcgtaagatgagctgaaataggaaaagtgacagaaaatttacagacctatggaataatattccacaatggggtattctttataattatctgggctgaatagcaccatccaaagttcttaaatcatcaacaatgccatttttactgtagaggagaagagttatgatcctttgactctntaaattttcttccttgac

SEQ ID NO: 300008 - DNA, 270 bp, Homo Sapiens
  misc_feature (151)..(159): n is a, c, g, or t
tgctgtgatccatgtctcttctttccctatttctcgctctcttagttaatatttatgttcactgttatttttctcttttttgcctattcttatgtcatcctgtgctctttttaatttctacctttttctttcaagactcctggttctcggnnnnnnnnncctttctatccacttcttctccctgcttttacatacttcattcatcttttctggcctgttactactgtctttctcactctgctctttcttcctttctttaatttttcatcc

SEQ ID NO: 300009 - DNA, 400 bp, Homo Sapiens
ttgggaagcagcgatttctccttagtcacagtcagagagggtgatgcgacacactgggcttcactgtgctcgtgaagcggagccagggtgaaaggatcatatggcctaaccctaaccctaatgggagtaacttcacctgcgtcccacaggccccgcaagagtgacgctgccaggcaggcgccgccctgttcggttcctgctgctgtcgctcctcgctccccaccaccttcagagctccggtgggtcaccatggaaagggaagccgctgcctgcaaggccagcagacacagaggtcaccctccaattttttcgggtaacattctgtaaggacagaacaccaggaggctactcctaccaccaggagcatgtcaggtaaacatccagagagatgaaggaagaa

SEQ ID NO: 300010 - DNA, 372 bp, Homo Sapiens
gtgatcattaaagtcctgcttagtatacaatatcaggaatttttaatctctgactttcgtttctctattgtattccatatggcctgtctcccaaatcactctcagagaccactctaaggattagattttctgaaatgtaattgactgtatcagtcatccccaggggattatttagaaaatccaggcaatttttaaaattaaagttaatcatttctttagtagtccacagacattttcattaggacacaacctttatatcactatttatatcatttactagccatgcatctaatgatcataaacaccagaagtggctgtagccacttaaacacatgtggatgtcattgcctttagtgttttccctccaaaagg

SEQ ID NO: 300011 - DNA, 629 bp, Homo Sapiens
aagtagacccagagtgccttctgtgaactatgtacatggcgccaggatcggtgattctttgagagttaagtatatgtactacaattcaggagactagctgaactttttggaccctcatacactccagacctatgttgacactgactagaatggaactgagaatgaccagacttttcattgactgcaggccatacagcgaatgaacatgctacacctggatccttcacttgtgttgggattactctgcgctgatataaaagactttgatcactgacgtagccttgttcactacggaattctagaggagaatttaaggaggttaggatgagatcagagacatccatgacactggccttactatgacctacagccaagcgatacggtgcaaccactagggcatgattcattgactctactggacaactggaggagcatgatctgtacgaagatttgagatagtgagtgagatcaagctgagaactcagcttgaaggtgatgtctgcatctaggacccatggtaacatgagacttatagcgtagaacctttctagtaaaaaggtgccagatttgccaataggtacgatcttaagagtgatcattactgtggccatcactggttataaaaattc

SEQ ID NO: 300012 - DNA, 482 bp, Homo Sapiens
ttttgttttttaatgtgtacttgatcttatgtgctattcaacgtgagtgtggtgcttaaaaataatgtattcctaagaagcaaaaataaggacctactttcatctttacctctctgccacccaccccgactcttcatcttagtaatgtgtgggagatatggtatctccccaaacagcaagaggcagtcttcagctgacgtgccctcgtgtgtggaacaaagacaagccatcgttgctgtgccctatcagaatccctgactcacagaatctgtgagtgtgataaaatggttgctgtttatatgtcattaagcttggagtggtttgctaaacagtaatagataattgaagcagattaaatgtcattaacacaaacgagaagagcagttttgaggtgcttgaaatgcttgcaagctacctgtaccagtatttagagatgggaactccagagagctcagtctaagaacacaagtctacccattttg

SEQ ID NO: 300013 - DNA, 347 bp, Homo Sapiens
gtgtggtgatgtttgaccatattgtgaactgtaggagagttttgtaatatatttgtgtttgctgaagtagtcactaactccatgaaaaacaaaatatataagatatgaggtgtaagcagacataatcatagtaaaatatgtagctcagctgcaaacaatacttacagtcctaataatctaagcacaaagtactgatttaaccggttggggggaggccggcccctgcgctgcgctggctgtttggtttttgttcctgttgtctttgtgctgtctctgtccctctgttgccttgccgttcgcctccttccttcgctttcgcgccttcgcgtcttcttctcggttctgcc

SEQ ID NO: 300014 - DNA, 584 bp, Homo Sapiens
gtaaattcacggaggttgaaacctaggctgactgcgtatagtatacaaccacactaacatacttacatatgagtgttaatggcattatgtactattggctagcaagatgacacagctgccacaaaaactaacgtgattttaggtgatgttgaaatgacggtgactaatctgctgcactccatttctacagaacagctgttctaaatacaagactaactataaaaccaaatttctttatactctatctgcatatccaggggtatttcaacaggcacgcctgagcgagcttactgaacatgtaaacagatcccttgggaaatggtcttgccatcactagaaatactaccactatcttgctgactgttaaccactgatgctgactttaagtgaaatataattttagatacattgcattggaattgaactcctttacttctgttacggcattattggctgtgattatcagtaaaccgtaaagagctgtgcatttgcttaaggaatggaaagtttgcatactatgctgactttttagggaagaatctcatgtcagatgcacgaaatgatgatctgaatgaagaacccat

SEQ ID NO: 300015 - DNA, 576 bp, Homo Sapiens
gggaaatgaggcacatatatataataggtaagtaattcaattcaacagatacttattgtcgaatgtctgctatgtggttggagacactgtgataggcactgataatgggataaataggaccgatgtctaccctcaaagaattcaaagttaaaccaagttaagccaatgagggaattttaatatgaaaagtgctatacacagggtttcccaccccaaggttgttggagaggcagtggaggaagagctgattatataagcttaaacaagaaaaacaagttagagttagcctgataaaaagagggacaggaggggcatagaaagagtattttgtatggaaagcacaacttatacaagagcccagaggcaaaagagagtttgatatgtccagagaaactgcaagtccttcagtatggctgaatcatggagtactgttgaggaatagtgagagatgaggctagagaaagaaggatgaagggaattctaaacatcagagggaacaccattagattttcacttaaggcagatgattggatgcaatgtgtgaagcatggattgtagagggaactcatgaggtgc

SEQ ID NO: 300016 - DNA, 574 bp, Homo Sapiens
aaataatacatttctctctaatctgcaaaataggacacgtatgagaaaatatttgccaatcaaatacactttatagctgatctaaagtgcttacaatcataccaaagaacagaacctctcatcatcagcttaggctttttcagctaagaaaggataagatggaccttgatttttaattttaattcttgcaatgtcacagagtaaaggtcattttacctaatcgtcccatgtaataaagcatattgccatatgtagaacatacagctaactgagatttcactttgctttctgatatttaaccctgttgtaatattggctgtgtgaacctgagaaatgaaaaactgtgatgtcgttttagaaatggggaaaagttgcccagggcaaacaagcatgaatatatctgattatattctgtcccctggttcctagcaatgcctcttatgattgtctttcagatatgtgatttgtagtggcaatataactgagatatggagactctgataggtcctgcctacatgtgatatttttgtagctaacatttgactagtggcagggtaaacaaggaaaccgaagc

SEQ ID NO: 300017 - DNA, 579 bp, Homo Sapiens
  misc_feature (147)..(167): n is a, c, g, or t
  misc_feature (189)..(431): n is a, c, g, or t
  misc_feature (452)..(452): n is a, c, g, or t
gccagttctatgagttttgatgaatgtgtcctgcttcttcccaggctccaccatctcttcccctaaaggcaaccaccattctgatttctctcaccaaagactggacaggtatagttagttactgctgtgcctggcttcactctcacnnnnnnnnnnnnnnnnnnnnngagacatagtctcgctctgtannnnnnnnnnnnnnnnnnnnnnnnnnnnnnnnnnnnnnnnnnnnnnnnnnnnnnnnnnnnnnnnnnnnnnnnnnnnnnnnnnnnnnnnnnnnnnnnnnnnnnnnnnnnnnnnnnnnnnnnnnnnnnnnnnnnnnnnnnnnnnnnnnnnnnnnnnnnnnnnnnnnnnnnnnnnnnnnnnnnnnnnnnnnnnnnnnnnnnnnnnnnnnnnnnnnnnnnnnnnnnnnnnnnnnnnnnnnnnnnnnntggccttacctggtatggttnttaggttcatgttgatgcctggagtttcagtaattccctcccattcgttgctgagtagcactgcaacacatgcaggcaggtatttggggatcttttcacctgttgatgggtgtctggactgtttcca

SEQ ID NO: 300018 - DNA, 577 bp, Homo Sapiens
ggtaccttcatcccgacttgtggtctattatatcgccacaggagaacagacagaagaactagtgtctgaaacagtctaggtagatatttgagaaaaatgtggccaccagctccaggttgatctggctcctgatgcagatgcgtattattcacgccacactgtgtgtcttaatatggcaaccggaatggaattctgtgcggcattagcaccaaaggacagtgctgtatatcgagctcaaggaggagcctgcgcacgtggtgccctgaacaatttcaatgagttccacctagctggacttatcgttctcactaatgcaaatgctgacgactgccaagaagatgaggttccttgtgaagataacctcaggccacgacgagcgctgccaaagacgatagaggatatagctgctaaatataaacattcagcagcgcagaaatggtgttacgatggagcctgcgttaataatgatgaaacctgtgagcagcgcgctgcacggatatgttagggtcaacacgcacaaagctctcactggatgttgtgtagaaataagccagctccgtgctgatatatatcataa

SEQ ID NO: 300019 - DNA, 415 bp, Homo Sapiens
gggaaataggcgatgctagcctcatgtgcgtccacacactcttgagacgtactgaggagagagtcacacttgcatatgactgactgggaagactgtacgctcccacaggacctgagcagtctctaggtctgctatctgcttgaaacttggctgacttgtcatacacaggcaaggatacctgccctaactgtcccacttgtccttaagctggacctgtgagcagcacatatctaccttgttcccagctaccaggacaccaggctcacgcagaggcctacattgtgcccatgggacacacattagactagacctctctctagtgtacatggtgctaggctatgctgaggagaggccacccaggaagtctcatctgtggagcactcatgcagcatatggggcttggcctgtagcacaa

SEQ ID NO: 300020 - DNA, 413 bp, Homo Sapiens
gcggagtgaacagatctgtctcactgtctttccaggtgccactgtggtatgagagatagactcctgcggctagctcggtgtctgcccaaatggccacccagttttgtgctggaaacccagggtccctgtgggtgtaggcaccgaagggaatctcctggtctgcgggttgtgaagactgtggtaatagcgcagtatctgggccagagtgctcagtacaggccttaatggcttcccttgtctaggagagggggttccccaacaccttgcacttcccaggtgaggtgatggcccaccctgcgttacctcgcccttcttgggctacacccacagtgcaaccagtcccagtgagatgaaccttgtgactcagttggagatgcggaaatcacccaccttttgcattgatcttattggga

SEQ ID NO: 300021 - DNA, 408 bp, Homo Sapiens
cttttccctgtcttccctatactctacgaccgcatcctgaggagacaactccagaggcagatgctgagatctcgctgaaggtatttcataaatcctgtccctactacttctcaccccatctattaatattattctcatgaagattctatgccatcaagtcgacaaagtggagagtgcgaatgcataaagccttgcatgtcgatgcagcgcttattcgaacagttgacaaagtacaggagcacatcagacactatgccaagactgttgagaacagcgagatcctggggctaaccccagggcttaacgctcagaaatggattacagtgcgcagcacataacgagatgacgggacactatctgacaactgctgatacgcggatgatacacatgaggcaatcgtgagggaag

SEQ ID NO: 300022 - DNA, 412 bp, Homo Sapiens
agcacaccgtgactctgggcacatctgacttctttgttgaaggacacacgcgctctgttgatctctgatctgtcgaacatgcaggcgctcttgttcccggacatggacgacctgtgccgccgcctgaggctttaccgaataaaggaccaggacatgctataactgagcaccgatataccaatggtgttcattcattcacaactttccaagccacactcatcgggttctatcgcgatatcaatgaactgcataatctactggttttgagatctggacctctaaccttaagggcaccaagcgcttgcattgtgtgataacccagctgcttgacttacccctgaggacacagacgatgcaaagaaacttctgggaggtatttgaaggacatgcgctcatgggaatgatcccggct

SEQ ID NO: 300023 - DNA, 383 bp, Homo Sapiens
gggccagcggagaagaatacaccgcagagtcctgtgtgggggcacaccagactgaatgagcacacattttgtgctctcatgtgtaaataccaacaagacacctgctattgtgaatcgggcgaagagtttgccgttcacaaactggaagaagagacctcggatgccaacgggatcttatactttgataacaactatgctgtgggttaatatggggtgtttgtgaaagggaccttcattcaagactgggttcacaagacacacagctgagaactatatgccagggtgggcggagagaccttggctgaaagcaagatatcaggctcggaaaaggcagggtgccacacctgcgttggtgaggttatcaagaaagaactttcttttgg

SEQ ID NO: 300024 - DNA, 419 bp, Homo Sapiens
agctcatggtgggccctgtacagatgtgtgggcctgctgagctgtccacgtgtgagaagacctgtgtaagacagtgatttttgcctctccaccaactgtgttcagagaaaccattaaggtaggggataccgagccagtccgggaaggaccattgtgcaggatctgcaaatctggtgcctgggaaccccagactcctcaggagatctgggtgggcatggatcagaaccacttctttccgcgcttaagctgagggttggaccaagggtcaacgtataggactggctgcgtgcatttaatgcaagtgtgtacttctggaagtctgagctaccctctgtggctaactgggaggagacattcatctggggtgggatttcaggaggtcgaatggagagctctttgtttaagactcggggcatgct

SEQ ID NO: 300025 - DNA, 411 bp, Homo Sapiens
cggcagagcaaagccttgatcgttatcgtcgagctccttgtgcttctgataagcatattgtactcctacttgcagtgtttgtggtagggatacattcctcataggacacattgtgtaggtggtgacttgggagctattacttgtgttgagcatggaataatccgtctgaatacttatgcatttgcagaacgggcgggcgtattcggatatgcgcgatattaatacatccggcggggaggatattgtgtgtgactgttaacgcttaggtgtttctgaggcttcgaatgtgtaacacggcaacatgagtgtgctgagctatcgatatctacataaggtgtgcaaagaaagtttggtgtgactaaacgggggacaattcttaggccggtatacaggagtgttctatcgcgaggg

SEQ ID NO: 300026 - DNA, 352 bp, Homo Sapiens
gtccactatggaagatatcaaaacgtctggaagtttggggattgaccagtgttagatttgggttttcagagcgcaggtaagatcattatggagtagaaagagagtgggagggtgtttgaaggtagaatcatgaggaaattatctttaaaggatgagggagagactgggagcctgagaagccagaagcacctggaaaatcaaatgggctgaattacaaataccaagcaaggaaggagagaacttcgcaaaggaggaagtgctactaaacaggccagaaacaaatctgcttacattagctggcaagaatgcaatcatttgttactttatgggggaagcacaagtgggtgcacac

SEQ ID NO: 300027 - DNA, 388 bp, Homo Sapiens
  misc_feature (67)..(264): n is a, c, g, or t
gactcggagattccctcttgttgccctgtctgtagtgcaatggcactaccttggctcacacacaacnnnnnnnnnnnnnnnnnnnnnnnnnnnnnnnnnnnnnnnnnnnnnnnnnnnnnnnnnnnnnnnnnnnnnnnnnnnnnnnnnnnnnnnnnnnnnnnnnnnnnnnnnnnnnnnnnnnnnnnnnnnnnnnnnnnnnnnnnnnnnnnnnnnnnnnnnnnnnnnnnnnnnnnnnnnnnnnnnnnnnnnnnnnnnnnnnnnnnntgagccaccgtgcctggcctggtagtcttttaagaaggtctgtgtaatcccttcactctctcatactaatcatatccgccctgccaggggaggcaggtgctgctgtccacagccctgaaccccc

SEQ ID NO: 300028 - DNA, 354 bp, Homo Sapiens
agagtttgagactgtatgatgtcttaacgaggcttcataccgggagtttcagagaaacatgggagccgagggagaagatatgtaatgcacaccaaacacgtccttggaaaaggtgctgctatggcactcgaccgggcggtgcgggaccgaaggaacacgacggaggtattcaataaggaggaggctcttatggagtgcttgttagagatgtgtctgcaagacatttaataagtctcagccgccgagttagaaacccttaatgacgagctgtaggttgttcacgtctatagaaccctcatgtagagaaagccgggtgtgaagagaatcacgtctcatggatgccgggactacaca

SEQ ID NO: 300029 - DNA, 363 bp, Homo Sapiens
cgcactcccaaacatcgtcttgcataccacttgctcgcatggggtatatacagacctatatggtaccctgtcccactctatataatgccgaaagcgtacgaataaatattatagcctacggaatatatagagagctaacccttatattcttcgtataatgaatcttctagagacttgttttttcggagagacgaagcttcgaccccctaaactctacagattccttatagcaggtaaaagagcacacccggctatgtaacttttttgtgggtaacatatgaattttaattcaaattttgatgtgactaaagaaacctacacattacacttgccaccatacatgtgagtgcgaatatgggcagg

SEQ ID NO: 300030 - DNA, 360 bp, Homo Sapiens
agctcattctacgggagggtgtcttcacgatgcccacaacagcgaggtttctcatcctattagagatttgggagaagagaatttcatagccccggagctgagctgtcttagctcaggctcttcagcaaagtcccattgaagaacctgtgaccctaaccgatgatgcaaccgtatattcccttaatggagacaaagtatgcaccttagcaactcttctggaaacctattgttaaatggctgactgctgtgcacaacaccaacctgccagaaatggatgctgtttgccacacaaagattacaacccaaacctcccccgattgaggagaccatatgatgacgagatgtgcactgcgttacatc

SEQ ID NO: 300031 - DNA, 414 bp, Homo Sapiens
agaacctcatacgggaggttttcttaaagctgacccatacgggcacctttagagaaactctgggaggtgagatagaggagtggtcattcccaccagaccctgcgttagaacatagggctgatggactactggcagaatgttcggagtggcgcagaccggtcattctagccttcaatgtcggtgccatatgaatgggctgtggccgaagaggcagacccgcttatgcaataatgagaatgctcacatggggaacagttgagagatgtctttgcatcacacatatatagatctcgagtgtgcaaatagaagctctatttgacccatgtgtaggtcgttgactcacagaacctatcggtagcggtcaggggggttcaagtctgcggtttctgattgccaggcttcacatattagcgg

SEQ ID NO: 300032 - DNA, 356 bp, Homo Sapiens
cgcaggcaaaaacctcgtcttgcttccgactcgctcggtggggttattacacgcctatggactaccttaccccacctatttagatgtggaaacatgcgatataaatctcatagataacggcgtcacttgaaagctaatcactgtctttcgcataaacttatccttctaaagacttggtctttcagaagagaggggcctccatcggctatactctacgaaattcctctagcggtgaatttaagatgtggacattctaacgtttttgttagttagaagcttatattttgtaacttggcaaaagacctatgcttagactgagacatgtacattggattgcaattgagtgactctctgca

SEQ ID NO: 300033 - DNA, 350 bp, Homo Sapiens
cggagacagaaagctagagtcatatagggcgagctcgagagggtgattacgagactatgtgactaccttacccaaattgattgaatgtggaaacatgcgatataaatcccatagataacggcgtcacttgaaagctaatcactttctttagcataaacattatccttctaaaaacttgctctttcagaaaaatgtgtgctctgattcggctatactctacaaaattcctcaaggggggaatttaatatgacgtcattctaacgttttagagtagttaaaagcttatattttgtaacttggcaaaaggactatacttagactgagaaatgtacattgagctgcaaatggga

SEQ ID NO: 300034 - DNA, 415 bp, Homo Sapiens
cgccgccactgtgctcgcacagtctaacgctctttgctgtggtttgtgacctcgcgcagggcgaccttgattctgttgtttggcgtgggaattaaacaacctccatgtcgagcataagggcgtagatcaagacctccatcatgcgttctgaatgggcaacatccaatgtgatagccatgtttgaccagacacaggttccggagttcatataggccttcaacatgactgatgcgaacagagatggatttatcgacatggaacatttgcgtgatatgcatgcttatatatgggagaatgccactagggcataccttgatgctcatgatggatgaaggcccagggaccataaatttgaccatgtttctgaccatgtttgttgagaaggccaatgtcccaagagctgaagatgtcgtag

SEQ ID NO: 300035 - DNA, 362 bp, Homo Sapiens
ggaatgttttaggggaggatcaccttaggcggactcttgaggcgacctttagagaactatgggaggtgtaccagaggagtgggctttcgcaccagaccgtgtggttaagagcaggaggctgttgtgaatacgcgcgcgaattcctgactttggcttgtgcgatcacacgaacccacattggtggtgccctactgatggggcgtgtcccaagaaaccgtccgagcttactttttgaattaggctctactgaacagcatttgagacacatctatccattacgttgggggcgcacagcgcatacccttcgggacaggtggcttcaatcttactcgttctgatgtgcggggcgcacctattagagt

SEQ ID NO: 300036 - DNA, 353 bp, Homo Sapiens
ggaatgtcttaggggcggggcacacaaaggggattcttgaggccacctttagaagacacagggctgagggaataccgccagaatctctggatatggccttggccggccataccaacctacattggcgatgccctatggatggggcgtgtcccaaggaacaccaccgctcatgccttatgaataaagctctactgaacagcacttgagagagctctttccatcacagatatatagatctcactagtctcaatagaatctattattgatcaaattctaagtgggtggcgcacaggtcctatccctaccggacagggggcttaaatttctttgtttctggtatgccgggctacaca

SEQ ID NO: 300037 - DNA, 413 bp, Homo Sapiens
ggaatgtcttaggggaggggcacctaaaggggattcttgcggccagctttagagaaatatgggaggtgtggaagaggagtgggcattcccaccagaccgtgtggtatagaaagggcgctgatgagagtaccgggagaatgtttggatttggcttggccggtcatacgaccctacattggcggtgcccgatgggtggggcgtggcccaaggaacacgccgactgtgccttatggagaaggtcctacatggacagcacttgagagagttctatgcaacacagatatttagatctcactaggctcaatagaatctattagtgaaccaattctacgtgggtggcgcacaggtcctatccgtaccggaaagggggcttagattcttggtttctgattgccgggctgcacaattagagg

SEQ ID NO: 300038 - DNA, 367 bp, Homo Sapiens
agaacctcttattggctgctctctctacgcggatccatgccgccacctgttgagaactatgggagagtcacacagaagattgtgctttcccaccagaacatacgtttgagaaagagcgctgcaaagactaccggcagaatgcctggattgtccctggccggccattccacccttcaaagcctgtgcccgatgggagggcagtggcccaagatacacgaaacactgttgcgctaatgagaaggctcaacaagtgcaacactttgagataattctctgcatcacaaatatatatatcccagctgcgactcatagaatctcctactgacccatgtgtaagtcggtgggccacacgacacctccctaccca

SEQ ID NO: 300039 - DNA, 374 bp, Homo Sapiens
agacggtgttagtggatgttgtgctaacgcggacacatggcgccactttttgtgacacatagcacgtgatcaagaggaggggtgcaagtggaccagaccctccgttaagaacaagcgctgctatgttacacgacataatgcctggattggcccagaccggccatacttcccttcattggtgattcccgctgggcggtgagtgacctaaggaacaaaccgacttatgccctaacgataaggctcatatgtgaggcctgtgacgagggtgcatgcttcacttatatagttttctcaatcgtccacttggaagctactactggaccatctgtgccttggtcaggcacagaaactcctggtagcggaaaggggggtgt

SEQ ID NO: 300040 - DNA, 374 bp, Homo Sapiens
agctggtgtttgtgtactctgtgttgacggggccacatagcggtactgtgggtgacacatagcactttatcaaggggagaggtgtgaggcgacaagaacgacctctagatacaagtggtgctatgttaccccacctactgcacttattgggccaaagcagcccgaattccttagttttatgactattacctgtggctgagtgacctaaggaacaaactgaaatatgggctaactattatgcccatatggatcccctgtgccgagggtgacaagcagcactttgatgatttctccaacgtccaattggcaattacaaatggacgaactgttccttggtcaagcaataaaaactctgtttgtggatgaggaggaga

SEQ ID NO: 300041 - DNA, 367 bp, Homo Sapiens
  misc_feature (171)..(238): n is a, c, g, or t
gtgagccactgtggacgcagctctagacgtagagtaaacacgtgccgtgggaatcctatgctgacacaggctagaatcaggacagatacttggggacccttctgcatctctgacccgacatgtgtacctgagatctgtccctcacttgtatcaataaagcttctgtgttgnnnnnnnnnnnnnnnnnnnnnnnnnnnnnnnnnnnnnnnnnnnnnnnnnnnnnnnnnnnnnnnnnnnnatgctcctcacattaatggtgactgaagagcggtcgcagtattagctcattcatcgagcaaagacagttggttgctcaagggctgcaagtatatcaacggcaccaacgagaggttgcagatttgtatga

SEQ ID NO: 300042 - DNA, 359 bp, Homo Sapiens
ggaccctgaactgtgttcttctaactgcacgatatgaagaaatctcaggacctctcttttgtgagtgcttttcccttctgcatgctgggttcagcccaggtaaaggcaagctgccaatctaacaagacaatcaagtcccatcacatattatccctcaacatttcctgatgaaggcactttgatttccccaaagcaatgatggtttgctggcagtggagagagcaatgaccttttgagatcgggactttgggacttagacctatgggactttgacatgtaaataaccttagggtctctggagcttttggctttaatcacacataagtccctagaatcttctgaagatatgattatttcct

SEQ ID NO: 300043 - DNA, 371 bp, Homo Sapiens
ccatactgagtagcctggcacaagggtagtgctttcaaacttttaggaggaaatatatgggcctgttactccagagaacaatcccacagtgaacatgcaggaagctcaaggatgcaggatgtggtctcggggtgggctcagacttaccagagacatcgaggctttagcgagttctactcttgtcacacattgcaccagccctttttgagattgaagaagagtgccatctcaagacaaatctagcttattctaagaaatatagactctaggcatcaagaatactactggctactaggaggcccaggagtgtacacttcagtcattatgttgggaaattggggtcccagagcatcaactggtgagttcctaaa

SEQ ID NO: 300044 - DNA, 363 bp, Homo Sapiens
caataatacatgttgaacactgtgtctcacagactctatgactcagacatccaacctgtattacaagggaaccaagttctgcctacataccagcctgtgaatacatgtgcaaacaggtcatatgagccaccgctgccagcactgactgtagtccacaacgcgatacatgcatagttagccagcaagacacagacgcaggaaagtccagctgttgtagtaacatgatgaaagctacgacatgagttcccccagtgcctgcaacatgtagcttatcacaattgccacagagcatagactagatatgctgttgtcagaactctgtataacggctgtctgccaggacccctgtatgtatacagagtg

SEQ ID NO: 300045 - DNA, 430 bp, Homo Sapiens
catacacggcagagagacgccatatttgaactaatactaatatgaagcttccagctgagacccttacctttatgcagcggaactccttttcctagctacatggccttaagcactttcaacggaatggtgccgagctgctgataactgcccactgcatgttcacaaagctagctgagctacagcattatcgacatgcttagtcatgccaacagatactcaactgatcctgtctataatgttttgctgaaagacctttcaaagcttatgcagcagctcgcctgtaccagagatatgctaacgctgactttgatgaaagtgtcaaagaaaccgacggctcatacccgaatagataccgaaatgttgcctaggcgatccggttgacagtgcatatgacactgactgccattatccaggatatgggtccaaataa

SEQ ID NO: 300046 - DNA, 426 bp, Homo Sapiens
cttgatctgagcttcggacgctcacatatgatgagcacactcgggcgctcctggcctataaacctatccttgtattctggcgtatctctctctagagactgggtatcaaatactgaaaccacagacgactgctgcatattagccgagcgatacaaggtgtattgtctaacctacggtggcattagcatatgaacatggttactatatagaccgaacgtgacatagatgtacagacaaggaagacataccacatcaaactgaagacagcacgtcagatgtcgacctaatggtaatggcactccaggtcacttagaatgctggagaatcatgaagagcttatatgcacacaagctgctgcatatcattccagaaacatgttatatgagaattcacatatcaccacagagatctacacatgactcatgt

SEQ ID NO: 300047 - DNA, 365 bp, Homo Sapiens
gatcatgctcgaatatacaccagcgcatattgatctctactgcgagctgccgctacgactagcctagacagattcaaccactctagagtaccgcagggcacatactgatccttacgagggttattcattgaccgtgtaggacaagatacccttatcttgtacagacagcttagactgccctattacctaataccacttagctatacgcgctcactacatctgagaatcgatgaatgatctgatgacacctatgctatgaggtctggagatgtcactaacatatgaagaccttatgaatggcctgttacgatcactatctattcatcgtgatgcaccagagttgagcgagtatcacattacaccat

SEQ ID NO: 300048 - DNA, 378 bp, Homo Sapiens
ggcttttctagattcaacatctggagtgcatatgaacgctgggtgagtggacctgcgggctcctacagagatattctgccctacatgctagctgactctcagaattgtgtgcttacctttcaatgttatgacaagtgtgctatagcttggatatcataacctctctctagaatcacagtaaactttcgcgacttaaaggagaaacgccgtagtacagctgtcatttatgcaagccagagcacatctactctcagcatgatatgtcatctaaagacttgaccaccagacacagctctgaaaggttacactaagtccagaagcttataaccttgcatagtatcagctgtactcattgaacatgaactgcactgttatttt

SEQ ID NO: 300049 - DNA, 738 bp, Homo Sapiens
  misc_feature (94)..(94): n is a, c, g, or t
  misc_feature (105)..(105): n is a, c, g, or t
  misc_feature (161)..(161): n is a, c, g, or t
  misc_feature (295)..(296): n is a, c, g, or t
  misc_feature (309)..(309): n is a, c, g, or t
  misc_feature (311)..(312): n is a, c, g, or t
  misc_feature (418)..(480): n is a, c, g, or t
ccaatccaaggcatttgtccagcagcgcacggtttccctcaggccatatagctcagctgtgatccacggaaaatgagaatttcccaaacacatncttcggactanggggaagggtctggcatcacagcattctagatggaaaatttcccactgttatatcnaatatctgcgctaagagagaaatgccacaggggcagagagctgggaagccaaaaatggatttaccaatcgggcacaatttacattcaccgcagatcagctcgctgatactccagggatgggagctccgctcatnncacacagatgctngnngatagacatactcagcattcatattcaacagataatgcccgttgtccttggcattgagtttaatttttttcccacattagacatccttgtagaaggagtcatttcnnnnnnnnnnnnnnnnnnnnnnnnnnnnnnnnnnnnnnnnnnnnnnnnnnnnnnnnnnnnnnngaaaacttccctttttttaagggccaaacttggtttttgcaggccgaatttaaatttgcccgtcttgaaattccagggcaggggtttactttaaaattggtaaggggggttaaacccaggttttccccaaatcccttcagcgcgacccccttggggaaaaagggccaggaaaaaacccggggggccttaatcttttgtggggaaaaatttttaggggcgggccgggggttttttatatccaccctttggaaaaaacaa

SEQ ID NO: 300050 - DNA, 754 bp, Homo Sapiens
  misc_feature (409)..(409): n is a, c, g, or t
  misc_feature (429)..(429): n is a, c, g, or t
  misc_feature (532)..(532): n is a, c, g, or t
  misc_feature (535)..(535): n is a, c, g, or t
  misc_feature (540)..(540): n is a, c, g, or t
  misc_feature (544)..(544): n is a, c, g, or t
  misc_feature (548)..(548): n is a, c, g, or t
  misc_feature (613)..(613): n is a, c, g, or t
tattaagtgaccgaacgggcagacaagcatgcagggagggccgtcagcatccacagaacttaccgacctgactgagagcgccacgtgcaccaggctcacgtcctgagcgtgtgcccacagcccttggagtgtttacaagaatttccttggttcgatcttacatgtatttcattttaggggaaacaatgcaattccagttttacaaatgtattggggtaaggagacttaagacctcagttaagcttggagaccagtgattaccggggcttgcaagatgataaaatggaagccaggtgggacgtcagtctggctttccatatgcaattaaggaaatcttcattacgtacttactctgtgggaaggatatacaccctagagctcattcactgtttgaaatgtctacagcttnctacgggaaataggggcttncagaatccaggacaagcttgcctctggacaaggctgagcaggctgttagggagcagggggtcccatcccaggccccctgcgatggcatctctctgtgctcccnggnagagncggncggnggcagggagagacggaaatcgggtgatattaaagtttctctgcctttgtgctttgaaaccagcanggcaaatgggattggtgttggtttaattggccccgggctttgaatgaaggtccggtatcttctggattctttcccacggaactccttctggtttgccttcaccgttttttaaagttgaagtgctttagctaactttgttct

SEQ ID NO: 300051 - DNA, 645 bp, Homo Sapiens
  misc_feature (276)..(276): n is a, c, g, or t
  misc_feature (509)..(509): n is a, c, g, or t
gctttggccatgaaggggtacccttatttccttcttttctctttagctcgttattcaggggggttcgtcagtgccacagagtgaggtgtcatcgttaaagattgggagaagaaaattcaagccttgtgtggatgccttgctcagatctcagcagtgtcatttgaagacatgtaaattagggaatgaagaactgatttgcaaaacatgtgttgctgatgagtcagctgaaattgtgacaatcactcatacctttttggagacaaatatgcacaagtngcactcttcgtgaacctaatgtgaatggctgactgctgtgcaaacaagaacctgagagaattgatgcttcttgcacacaagatgacaacccaaccctccccggatggtgagacccagagtgatgtgatgtgactgcttttatgacattgagaaacatttttgaaaaatacttatttgaaattgccagagaccatctactttaatgcccgggactccttttctttgctaaaggnattaagctgctttacagattgttgcaagctgctggtaaagctgcctgccctgtgccaagctcgatgaccttccggatgaagggaggctccgtttgccaaacgagctcagtgtgcagtctccctgattgcgaagttc

SEQ ID NO: 300052 - DNA, 401 bp, Homo Sapiens
ctgggtgcctgccaggctgtggacacaggccctggccagttctataaataaccttgccgggccctgctgggaattggtgccaccaccacatagcccagagagaacggaaacacagggcttctcagcgagcagaccaggcctgcggtgaccagtggaagtgggggacgctttcagggctgggcagcccgacagggcaccgggcacagccaggggccggaaccagttgctcactggctccgcttctgggggactgtgtccctctgtgccccgtccccatcacaccttgctttcccttcatcctgctctcctagcccctccccagactggcggccccttgtccaggcccagccccagcacagcctgcagccctggcagagctcaggccttggccttctgaggtt

SEQ ID NO: 300053 - DNA, 377 bp, Homo Sapiens
  misc_feature (364)..(364): n is a, c, g, or t
ctgaagtcatggtgccggcagggatgccttccttctggaggctctggggacaaatccacttcctcatcttttccagcgtccagaggctgcgagaattccttggcccatggccagcaagcacatcacttctctcatcccatcttctctaaccccggccctcctgcctccctcaaataaggaccgctgtgattatacagggcccacctggattatccaggctaatcctcccatctcaagacccttaacttaatcacatctgcaaagtcccctttgccatgcaaagcattgtattcacaggttctgaggactggggcaagcttccccctcacagtcaacggttctgcgacagatccttaacactcanaaggcaactcaac

SEQ ID NO: 300054 - DNA, 271 bp, Homo Sapiens
agaaactacacaccagtacaactatattgcatagaaagatggccttgcagtatttgatgacatatgcagtaaccagaggataaactaacctgttgacacaatattatttgactccatagatactaccgatgatcaaatgaagcagagtcattaatgcaaatagttcagaggactgtctctcagtggataacatgcccattataacgagtaatgcttacctttaagaagaatgatgttgcactctgagcatgatatatagtaagatgtgcat

SEQ ID NO: 300055 - DNA, 364 bp, Homo Sapiens
gggaaatgcacctgacgggtcgagaataaaagatgcttctctcatcggacttgctctggggagattatttttccccttctggggcgaggattggtttcgggttgggaaggctgcatccccagctggagcgctgaaaattgagtggtaggtcccttgggcttgcccttcgcgcagtggatttgaccagttaaagttgggggaaatgtgggaatgtgatacctctttgctggaaccaccccccaggcccagattcccaggtctgagaaagctagggtggccgattctttcattagcgatcaagttttctaagctgcattttctttctactcacagatcagcagcttgggacggagttccccgtcgc

SEQ ID NO: 300056 - DNA, 416 bp, Homo Sapiens
ctcagagctacgtgagaaggagttccgagcattgttgactctaacggcaactgctactactgtaacacactctgtgcagacacctacggactaagaaagtacttgcgaagtagacatagcctgaggagcaccaaaggttgtatgacttgaatagtgaggaggaagatagggcctgggctactgacatcagtgtcacacagcattggtaacgcattgtgccgtgctgctggaacagttgtcgaatgtcatacggaagagcctagagtctatagggtcgaagtcataatgctgaatgtattggacaatgatcagcccatgagcgaccaacgcgaatccatgtgaccaagattatcctttttcagcacctatatgtagacatggctcctattggctgagtactattgcaaatatgagtg

SEQ ID NO: 300057 - DNA, 181 bp, Homo Sapiens
attttgaggagatgaggaaggctggtatctttcagagtgcaaggtgattttggaatatagataatcttcttgggttgacctaaaagtttgtcgctgacctatgttcctgaactatgaaacatgaatatgtgagttaagaaatagtttctcttgagaaataaacaactggcaaatactttgg

SEQ ID NO: 300058 - DNA, 414 bp, Homo Sapiens
ctcacgcgtttatgacaacgtgctgtgtatccattatagacgtcatattgatctatatctaggatcattacaggggtgtggagcatttatgaggcaacatgtaggaggctaggtcataggtatatctgaagggctagatgaggacattatagccctggtgtctatagtctaaggtcactgtctactgcagagtgcatatgatgacatgtggagctcgtgaatgagagggctgaagccgcattaacatgggccgctgatgagtgaacatctataagtgactcattactaaagacgctaaatgcagaccgaactgtgacatgctgaacgcttcgagtacactatggatcaagggctaactgctttgcagacaagaagctgtccgaaatcactgctatttgcagccgtagcagacta

SEQ ID NO: 300059 - DNA, 361 bp, Homo Sapiens
ataataggtgcctaataagtgtgaattgagagaatgattgacattctaagcaaagcccatggctatcaaggggtggcaagatgggcagggtcaagaggacacctggatgggggtttctgcagctcagaggaggggcgggaccagctaagtgagtttggaagtcaatttcacaaacatcttcacttacaggaatggatgagtcaccctagggggtcagggcaggaagcgggaaaaagagggccaagctcacagctatagatcatgccatcacttcctgctacgcccatggcagacactgctacctcatcatgacacccaactccattgagcctgtgtgtgtcctctcaacacggaatgcttt

SEQ ID NO: 300060 - DNA, 437 bp, Homo Sapiens
ctcaacagatcaagtgcagcaaacggaattatcgtagcgtggacagaacgtgcagaaccatagggattattgcagattctttgtcaaagggccacactggaggagccttggaagatggtccataccatatttacagaagctgacctgcttgacaaacttacagaataagcgttgcattcgaaacatgattgagacctgccctttgctgacactagtaatgacaggccctctcagactgagaatcattcaaggtctatggcagtagcaacgtcgcaactagctcctatgagtggacgacgtctagatgaacggtagaattatgccatcgctttacggtcaccacagttagggacttgtatgcgaatctgtccatgcctatgattcaacatgagcatgaagtcaatgtaatctactgctcacactgatgataacactcc

SEQ ID NO: 300061 - DNA, 431 bp, Homo Sapiens
cgcaacggctgtactgcattagcagcattgattagagcaatcagagaccgagaagcactatatcacttgcaacgctgtacctgccccaatgcaactttcatcgtgacgctgacattaatgcttataatgatactgtcattaacccggactagccagtgtacgcttctgataatgacttaaatcgagcatgtcagatcagcatgagccagacctccgtaccgcagtaccacagacctctaccaaggtcaggatgctcagcccgcaccaccatgtgccactagttgctatagtcaacgtcctggacacgactgatgtatgtatgctgtgtgtcagcggctacactgtcgaggtatcgatccgctctaacttggcctcatgacggcatcacatcacttgtatgtactacccgtggcacactgatgataacatcc

SEQ ID NO: 300062 - DNA, 429 bp, Homo Sapiens
gccaacgtagctgttccaactgccgacatgaacgtagagtagagagatcatgaggtatttgttcctcacgcactcccactctgtgcccacttgcagcattgagggcgcctgtgttgctgctacatacatgtgtcactggagcagaccccattcccaaagcttcaggtactgcaatgcgttaggaactgaactcagctcagcgctgttgtctacctaggtccaacatgcccacagtgactgaccatcgctagttccctatgcctgcccacacatctgtcactagagcctagattaaccatcctttaaatggaccctttgagcttgccatctgcttacgatcacagacactgaccgattctatctgaatcagtcctgtcctttattcgaacaggtcattacgtctagatacacaactgaacaccttgcgat

SEQ ID NO: 300063 - DNA, 384 bp, Homo Sapiens
ggaattcggaacgggacccactccaccttagtaccagacgtccttagagacaccatgtacggacatgacgtataagcgattgtagttgcaacctgatgccatagatgtacgctccggggggaaagatgaataattcttacacatcataggatagcaaggtctaacccgtataccttgtgtatactgtatgctctagacctaactgtgcacggagagccaatgctacgaccctagttaccagacgagctacctaagcacagctataagagcacacccgactatgtaccagctgagtgtccaagatagaagcttagttcaactttaaatttagacacagagccctataaactgactagttcatgtaactgtaaggtcaaagaggaa

SEQ ID NO: 300064 - DNA, 385 bp, Homo Sapiens
atgctctacactctgatcgtcatcgtgtgacccggtctcaccaaataaaactactattagggtatcatagatattatcatgaccaaccacatactttatactataagagctgtgtacactacatataaataacttacaaaggccacccactatttctaattgtatacaaaacgtttacttacctaaactattactagggccgtatagctagtctgaacatattagaggaggttgaacactgtgaaatatgcctgttgtcccaagactttgttaagccagacatgagctagactccatatagattcaagagccctatatgcagtctgtacgacatagactattcccaagtcttactctcacatacaataatatgggagatacactg

SEQ ID NO: 300065 - DNA, 432 bp, Homo Sapiens
ctatacacatgcacaccagccacatgaactctattcgcatggacaccatatccactgccatgattatcactactgtggatcttgggacccaccacctgatagcctgggtcactgatgacatgtaccacagtcgagcatctgggctcgtaagacagggactccgcatatgcggaccctgtgaccttgaatgtctacaagcagtatgtgtgaaccgactaagtcatgtcatattaggtttagaagctgtcatttctgacgacaatggtaacagctatacatggtcgtaccatagacatcctctattgccaggcattcaactctttactcaatcagagtctaaactatgtccagtgtagatcaagagtggtgatacacgagattgcatgatgattacacagtacatttactaaatcgttgcgattgctttgcaga

SEQ ID NO: 300066 - DNA, 429 bp, Homo Sapiens
atgaataatagcttagcggagatgctaactctatttacagatacgtctcattatcggccatagttatgcgtacagtttattcagggtgactgcgcgtgatgtgtgctgagaatgaagatcttatgttactgccgcatcagctctagtgggtcacgactaggcctatgctgtctaatgaatccagaatgactcctggcggtcatggccaatctcagaagccatgtcatcatactttgagagccgtacaattgcagcctatatgtgaaccgtcatgctagatcatacgttggtcaagcagcagtctacggtatccaactgctcgaggatatgtcgtttaccctaacgctcatttagaacaacgtcggtggactatgatacgtgtagatgatcttgcgtatgcaaactctgtgcttactgtgagctcacttt

SEQ ID NO: 300067 - DNA, 449 bp, Homo Sapiens
atttttactatcttagaggctaccatacctctatttacaaatcggttacactattgtacctaattatgtctaaagtgtattcaggcgcaatttacctgatgcctgtagtagaatgaagatcttatattactgagcgcataagacctagtgctacacgactatggcatatgctttcagatttatctggaattacttcagtcaggtgtgcccaatctaagaagccatgtcattgtactgttagatacgtacagttgagcccgctctggcaactatgatactagatcatacgttggtcaatcggcagtggcagcgaacctactgctcatggatatggcggttaccctaacgctgatttataagatagctgtgaaattgccgacagggccgattatatttcgtatgcaaactatctgcttatactatgaggaacagttctttgtgcacttaga

SEQ ID NO: 300068 - DNA, 413 bp, Homo Sapiens
taaccacgtaaatggtggaaaatggaagcaatgaaacactgtgttaacctaacaatcagttttggatttaggtcatcaggctgcgtgtggtagaatgaagatttcacttttatttactaaacactattggaggggtaaaggttgcctttaaacagtgtcatcccattatttctataatagaattgtctcacagaagccctaaatcaaaaatttcactttgggactatgttttattgtatcctttctaaagtagcttggttcccatcaacttgagataggcctaattttatgtcctatctttgactttagtttttgttaagtgtattaaacatcactttttttctgatgaaatgagcaatccagtaaatgcagtctcttatcttgtgcttattaactacagaccatgctggttt

SEQ ID NO: 300069 - DNA, 392 bp, Homo Sapiens
gtccgtaatatctgagagcagtacttagctgtatagaacactcggttaaagtattgtacctgagtatgtatgacggtcatatcataggtgattcacctgttatctgtgtacaatctagatcttatcatacggatgcgtaaatcctactggctcaagactaggcacaggcttcctgttaacgtttagaaacctacaattgtgcccaacatagtaagtaccatgatagtacatacattaggcacaccacactcgctgggttccaactcactcaggtattgcgtggttacgctaacgcgtccataccagaacgtaagtaatgagtttgacggtcacatatgtgctcgtgagcatacttgcgtctcacatgtccgggtgtctatctgttgaactct

SEQ ID NO: 300070 - DNA, 385 bp, Homo Sapiens
gggcactgtgtaagatagcaaaaacctgaagactgtgcctgacggaggatataacttacatgagcaaataaaaatgtgcatgatgtgttagcatgttataatcagcatacagtatcagaccaggcatatgtaagcgctgagcctcatggcacaaatacttaaaactggctacagcttagaaaaggcatatattaccctgaactagaacaatctgagcttccatgaagttagtactgatctggactttgaagatgtccgataggatatataacaagaactgtattacgcaagccacacaaatagcagtgcgttcattctcagtgcacagtcaccgatgtattatatgcatcacacagtctctatgactgcttttccattcaattca

SEQ ID NO: 300071 - DNA, 388 bp, Homo Sapiens
gtgagctgtacgctagagagggaagctcaagtgatgacaccatgttaaaggttctgtggagagataaataaaactgtctagaatgaggcaagcacagctaggctgagactgtgactacctatcatattgatatcagacgggacacggagacgagctcaatcagagacaagggcacagcagatgcttgcagaaccattgatgtcgtgaatgaagtacagtactacacgggactaagcaagtccagatcagaatgctgtgaaccacacaccgcagactttagttaggacttcagagactaccaactagtcatgtggtgaccgtgatgatctgttagatggctgcagacaaccaacaggaggatcagctgatgcattgctaggatatgcag

SEQ ID NO: 300072 - DNA, 443 bp, Homo Sapiens
cgtctgtgggcgcttcaggtttattgggcgactgtagatcactctgacgcactagactagacagatggatactcatgatatgagaatgaccgctcgctgacaagcttcggggagattggctgtgcgctaaatgctggatgccatgaggacctgacggagaatgtcagactcaggcactaaaggcacgtcgtgcctgaaccatgctgcgatcacgatgagccacattctgcttttgactcgactgagtacttctttgaagatatgaccctcgactgtgcacatgtcgatggaatggatagcatgggctgacagggtgcagacgatggcttggataccgtgctcctacagacagaccatgggaggagagcccattgccaggaatgtcggtattatcttagcactgttgactgcacacaagctgtctaatgcactgcatgcatagg

SEQ ID NO: 300073 - DNA, 291 bp, Homo Sapiens
gttggaattgttttgtatttatttgatgaattgagatagcttccattatacaaaacagaacaaaagctccccaagttatttattttttttaactaaatcagagcaaggagatgttatactttatctataagattggcaaaagtcaatacaatgggtaatatccaaagttagtgtatggggcattttgacaatatctgatgacatttataacgtatattcccttaaacatggcagttttgttctaggaatttatcccgtagatatactcagagtacaaatgggtacatactg

SEQ ID NO: 300074 - DNA, 387 bp, Homo Sapiens
attccgtgtcgtactcaaagctctggcatacaggacgctgaaacctaagagagggccattagtgccggcacacacacctgtgtgccagtacagaccgcagcagcccgatgctgtcagctactgccccagacactctgtggaccctgcctgtactgacttaccgtatgccatggcgagattctgtatctgcagagacatggctgccttatatcgtgcatcattggttctgtgcagaactgactaaattctgtaccgactggatgtgctatggcctaggcactcaaactattgtaccggagcagcattcagtgttgctactgactacctcaacggaattggccacatatgtcatagcatgtgaaacataccagagatatgagagctcac

SEQ ID NO: 300075 - DNA, 133 bp, Homo Sapiens
  misc_feature (52)..(62): n is a, c, g, or t
cgctctcccatggtgtcctgctggctgtcatgcattttaatcagactgccannnnnnnnnnngttcaaatgattttatttatttgtacgcacaatttttttaatatgccaatagttagtttacttacttaaaa

SEQ ID NO: 300076 - DNA, 383 bp, Homo Sapiens
cgcgatagatagtctgtgtagcacgtgttattccacatgtgcgtgacggcgtgatgcacaccagagtccggttgctcatggcagtaaagatttgggagacgcaaatctcactggcttgcggtagattgtctgtgctcactatctctatcagggtacatttggagaccatgtaaccttcgcggctgtggtaactgcatttgctgaaccatgcgatgccgaagagagatctgtaaactgggacagatcacttcataccctgtttggagacagatcatgcacatatgcacgctattcgcgaaacctatggggaaacggctgactgctgtgcttaacaggaccctgctagaaacgaacgcttcttgcatcacagagatgacaaccca

SEQ ID NO: 300077 - DNA, 394 bp, Homo Sapiens
ctgcaggaattcggcacgaggacctttgctcactgtctgagaccccttccttatagagcacctcgtgtgctggacagagatggagactgcagatagtgacagaggatgctgatatatattaagttttacaggtgcctttttaagagacccgtcttataaatggcgtacagggaacctcaagttgtgaagaggaaatccatgtgtaaggctttgtggctttaggtgccagtggctaaggtaggtttaaagactttggtgattttagaaaaagtgcatctttcattccctacatggcagataatacccttctatatggtgaaaccttagagattaccttaatctggtaggaacagaagccagagataaagcccgaaggtagcccattcagggctgt

SEQ ID NO: 300078 - DNA, 116 bp, Homo Sapiens
agaaaatagtgagagaacagatcgaatattgggcgcttgtggcacatattctataaaaaggagaagttttgaaatgtgtatatatttaatttaactctaaaatatttgtaaggcaa

SEQ ID NO: 300079 - DNA, 415 bp, Homo Sapiens
cggagctcgcagatctgagcactcacacatgacgcgcagctcattgaccgcccagcatgcaaatctctacttccatgctctatgatagctctctataccatgtgcagcatatggagctaccagagacaactgttgcgtagtacatgaatgactcggtgattatgtgcccaagtacctgtgggattggagatttacagcctacttatcatacccggtagactcagatctacagtgctttggactacatcctacgtcaagcttgacacaaatgatgagaatgcaaacagctgttgaaagcggtccaactcacttgtaacactgaagaatcgttaagaccaaatgtgatagacaccgtgactttgaagaccacgagtatggtggaggacactctcaaatgtggagcatcgagcttaac

SEQ ID NO: 300080 - DNA, 363 bp, Homo Sapiens
  misc_feature (259)..(296): n is a, c, g, or t
gttgtgtcccaggagtttgcatttcactaagtgcatcagtagagacctgtgcatattcagacttaagaaacatcaggccttagacttttgaaaaaccacatctttaaattctgtagcagtgaaagtccagagctctcacacaagctctggtcttggcttaaagaagggaaagaaaaatatatctcacttttaccagtgagcttacaactgaggaaacaagacgtaaagtatcaaagatcaataagatgaaagaaggcgnnnnnnnnnnnnnnnnnnnnnnnnnnnnnnnnnnnnnnccatgatgatgagcaggttttattcaaatggaagagcctctggtgtggaggggcttgccaaaggcca

SEQ ID NO: 300081 - DNA, 356 bp, Homo Sapiens
gttgtatttcatcttctcagggagctaacactgtcctgttattgtgtcagtagattttagatcctgagtcaaaacagcatggctgcttctcatttctctttcagcaatttgagggtaggagttagtacacggtagctttttcagtcatctagattcacacttcctcattgttagggagtgctcaaaagcagagagtcaaatggctgaatggtttttggtatccctcaattttggatccttttgcacctagaaacattaactttccctggcatcctgttacctgttacctgtgagctgccaaaatagtaagcggtgtatgattacattagtgtctgtttagagatttatttcttggt

SEQ ID NO: 300082 - DNA, 408 bp, Homo Sapiens
catgtgcattatcttgtgttatcttcacaacaccatatgagctaggtagcattagtggcagtccccttttacagatggaagaactgagacagaggttatgggctcaaagctgggatgtgcatctagcagccagacaccttcatcttctttctctctggtgctcagtcatttctaggagcatctacagtacaacgtaaacacaatagtttacggagtaaaattacacctgctgccaaaaacaggaattttatcaagtcaaggagaatggtggtggggatcttcttgaacgtgtcagaggaaagccttggtaaatatggatctggctgagggtagcacagttaaacacggaggcagagaaaattaacaaagaaggtgataagatcggcacatcaaagagggtgattataa

SEQ ID NO: 300083 - DNA, 498 bp, Homo Sapiens
  misc_feature (31)..(31): n is a, c, g, or t
  misc_feature (41)..(41): n is a, c, g, or t
  misc_feature (53)..(53): n is a, c, g, or t
  misc_feature (66)..(120): n is a, c, g, or t
ccccatcaccccatgccaagaggcgatgggngaccttcacntccctttggatnacccttggagaannnnnnnnnnnnnnnnnnnnnnnnnnnnnnnnnnnnnnnnnnnnnnnnnnnnnnnaggcacgaggagaggacagcctctcacagtgtgaaacatggtgactataggggcacaaaaccggggacttctctctcttccacccccaacgataagatatcggggccaagggacccaacaaccccaccctgaggggaggcctagcactaccttcctcaccccgatgaaagaacctctgatcagggcctgcgagacatactaaacccacaaacctggccagcagcactcccctcacccgtccgcacctacaacagaccctcctactgcgccaaatgtttccgcgccccaagccacaggagtcacatcccagacctccaacccagagccaaaggggctgagtccgaatgtctcgtacgcccacacaactgaaactcgacc

SEQ ID NO: 300084 - DNA, 306 bp, Homo Sapiens
cccggaccgagagcatacatatcaagacagcatgagtcgtgaactgcttctccaaggcattatactccacagcactaactatcgtgcaacgactggtatacctctgatccaaacgctgcagacgctgatgccgaagcactcttcacgtgcttgcgaagcctgagagccgacctgagtgtctataaagactggtattgtgacaagacgtaagatgtgttctatgaaggtactggcgaggcccatacttgtgccgactggttaggatgtgttctctcaagtcatgggggagctcacgctatgtatgga

SEQ ID NO: 300085 - DNA, 420 bp, Homo Sapiens
cgcactcggtgagactgataccttagagacatgctgcaccgtgcgtaacttacagggtcattctgaaacttgagcttcattctctatccgtctacgggatatctataaggattagccaatggaacatgctgcttacacgaccatgatactacctgtggcaccgaatgctgcctaccaggtaactgctgaccctaccacaggcatagtccttctcattgaagctagaatctcacggtctcactggaggcactgagcatattttcaaccacatcaccaggagctgacaacttgtctaatacctagccaggaatacccattagatttccacagagccatctaatactgcgctgtacatgtggatattgacttgatgcccacctctgtgtccacgtggatcgagcatatatgcctaagaggaga

SEQ ID NO: 300086 - DNA, 419 bp, Homo Sapiens
ggatcttaggactgcttagtgtgcagcgttgagactagcgtgtgcctgtctccagcttttctgagagagagctgactcctggatgttcgaggtactttctgagccggagagttcccaaagcttatcctgccatagcttccacagtgtactcacagatattccctatgaacacatggtgagctgccattaacatttgctggagtgccctgtcgacagagcgcacacttgacacgaattgcctaggaaaccatgagccagcccacaggtaactgtaggaaggctgtgcgaagcctgatttggagaagcgacaatgcaatcgcgcctggtcataggacgctatgccagatggatcggcagtcaataccttgctgttgtcacggaagcctgttgctcgcctcgtctatgaagcggtagagcaa

SEQ ID NO: 300087 - DNA, 424 bp, Homo Sapiens
acgcactctttcgtacgatttgccacagttgatgacaccctttgcccatatcggggtcgactgacacagatggagacctcgcgcagtagcgattgtcctgcagggtacagaggatgaagtataagctctcatactataccagggacttactcatataccttgtgaacaatgaactaattaccaattactgtttaccgagagccatttttattacccctgcaaccataccagctacctaagagcagctattagagtacaacctaatctgtagcattctattgcgtagatttattggtagaagtgatgaacctatcgagcctgtggatatcctgtaggtccagatcgacatttatgtcaactctaactcaggccacagaaccctataaatcccctacgcgtacttaagtgatagaccaatgcagtc

SEQ ID NO: 300088 - DNA, 415 bp, Homo Sapiens
ctcactctggggctaatttaaccctcctactaaggcatatttttttctgagctctctactgagagctctggatgttcagtgaagctgcttagaactcccatgtctcccagccctatgcaagctctgggaattgcgatcacttacacgcttcctagtagttggtctttgcctggcctcaatggaatctcacactataacatgtaccgcttatttggctaaagactctttgagactccatgcagctttatggaggtctattaatatctctggctactttcctccttggaggaactcttagaaaccttagattcctcaggcttcccaaaccgatctctatcttcttaactcagtgtgaatgcgcattttctgcttagaatcctcctcctcatccttccatctatataggatctttagg

SEQ ID NO: 300089 - DNA, 416 bp, Homo Sapiens
catatgtcttgccgagtagcgatgttcaagctcttgtacgctgaccgagatgtctccacagtttaggagaatcataagctcaactccagagagagcacctgactgaacctcgcccgcagggtgtaccaagagaccgaaattgtgggagagaaatctgtgggggaagaagatttttggggacaagctgtaagtgacggttctgcgaactttgaggaagtggagccctctaaacatgcctcttaaacgttctaaagagtcatcattggcgatgtggatacatattactgagcctagttgcacaagccgtctgaaactaatatctatactattgattctagttgcaggtggcggatcaattgtgctgaacatgcccatgctgtggcagtcggagactagaggtataacctattcatgga

SEQ ID NO: 300090 - DNA, 411 bp, Homo Sapiens
cggagatttaacactgtcaaggaggagaacgttgctcacgtgcgcgcatattatgtgaacgcgctctatgaggaacagaggaaacgggtgtgcgagaacattgccccgcacctgaacgatgcacagcatatgatgccgaagacagcggtcaagaacctgactgtggagcaacctgactaccggagccacattcaggctgttctggacaagtacacatggttggaagtctaagaatgcggactcacacctttgagcacatcggatctcacttggccgcaagggagaaggcagatatgtgagggcataaccctgcacctgtagcagagaagcttaacgctcattcgtgtgacccgctcattactggatgaagaatcttctgagctagaagtgccaatgcaagctagaggctat

SEQ ID NO: 300091 - DNA, 365 bp, Homo Sapiens
ggtgtctcgctcacagagatacatatctatgaggagactggtctcccatacgacctgtcacactgtcccagcgcattttagtcctttccacatgagctctggagaggaacgtctcaatctggaggtgccaaggataaccggctgcagagcaacaaggggctgaacactgtagagaaccgacggcagctccgaggaacacacttatctgtggacaggtccactcagccagagcatctaaggtgagagcctttttccgaggccctttacagaaggacagacgtgagagctgtgtacaatcatacctaagcggaaggtagatcgcggtgagaagcgaggacacccagatggggttctctgccggagcc

SEQ ID NO: 300092 - DNA, 226 bp, Homo Sapiens
atcttgtgcatgttctagaggaacgctatatttattaatagtacgcgatgagataactgctaatacctatattcatagaatggcctggaggaaacctctacattgatattttactacatattgcactgaatacactggcaaatactctcagaagcttctgtactggctttgtcgatactatttatcaggattcaataaccagacaaatgcttgaggatgatttgca

SEQ ID NO: 300093 - DNA, 388 bp, Homo Sapiens
cggtctgtagcgaattcgtgacgagcttctctatagcgcgcgaacaacaggttgctgttcatgctgggaccgtgagcagagacagccaaaccctgtacaacaagcgcgccagaaatgctctaacccagtaagtgcacctgccgagtgcaccgcatgagcatgggcccgtgatgtagtcgtgactgacattcaggcaggcttataccctacattgacagctgcgccgactgtagagaggaaccggcggctcacgtgcaccaaggggatggctaagactacggtcagtgcccgagtcatggagccgagaagtcccgctggatcattgcaagcatgtatctggactcattgataggcctagaccgaccatgtgggccaagacattttttgg

SEQ ID NO: 300094 - DNA, 420 bp, Homo Sapiens
atcagtcgatgtctacaacaaagtcacacccgccattaccaaacttgtgatgcgtctgtataaagagctgtgaggatacacacacgctgacatcttagtctcgtctgtgagcatttccaccaagatgtccctgctatctatcgggggccaagctatcacctaaggtctgagcctggagggcctgggattcaacctgccagaaacacgtgtaggccacattgagcacggtttatcggagccttcttgaacccttgcctgtccagacccaaactctaactataaggatgaaacttcctggtgctagactagctatttaagcctcggcagctctattcggacagtataatggagctctatggagcttctgctttgtctggcaactcttacagattctgagacaactgggaggcagatttatgc

SEQ ID NO: 300095 - DNA, 412 bp, Homo Sapiens
gggagacacctctctgtcacacgcttcagcctacactacactctaagacatgcggcacttgcctgtccaaatcatcgattctgcgattcactgatcttagccctatattacccatggaggctttgctacgaagagggacctgaagggacatgactttataccttcatctgaggagcaactgcgacaggtataaagaagggaacatcaggctgtggactggagccagcacacctgacgacatagccattctaactggtcacctttgccaactatggaaactttcctgggactacacgcttttcagaacggcataatcattggcatataatgccgctgcagcgaccctttagcttgccgcttgacatacacctgctatacccattgagatcgcagtgatctaaccatgtgctta

SEQ ID NO: 300096 - DNA, 374 bp, Homo Sapiens
atgacttgatgtctacttagatgtgattacagtgttcagagaactcatgatgagcctgttcacgaatgttatggctaagacacatagataagacctgtggtgaccatccagactttgccaaatagacttcctcgtgtttcacccctcaatccctttttggacaccttacaggtgctgaggtctgtgataatgaaaagcattatgtgattattatgacattatgctgagtttgacttcatcttactggggttccccttacttttttggcaaccccatctgtaggctcttcctatactcaggcggtttacccgtcactgagagaagtgtggaccatcagattgcgccaacttcacgagttcgctttgccaccaggc

SEQ ID NO: 300097 - DNA, 340 bp, Homo Sapiens
acacgctctcacactatctctgacgatacacctgcgaaccatggcggctaccacgagagaggtgaccagtgaggaccatccagactgtaccaatagagggcacacggctgtcacacgacaacccacgagaggagacactgcaggatgagcctgaggcgaagcacccagagcagtaccaaagaccccgtacaatgcgagactgccatacaagggcaaaggtcggacgaaggacagatcagatcagccttactttgaacgtggcttgagcaagcgggactggcactcagcgtagcaagaacaccgcgtctaggcacgcactggacaaaggcggtagaccgcg

SEQ ID NO: 300098 - DNA, 369 bp, Homo Sapiens
  misc_feature (85)..(101): n is a, c, g, or t
attacgtttcttgaatttttgtgtgtttagagtgttataagttccaacaaaatgtgaaagtacagacatttgttaagtcatctgnnnnnnnnnnnnnnnnncagtaatagggaaccccaaccttttctggaaaatcaggatcacattgcattttatagagaaacaggaatagcttcatggagtgatgtatggtttcagaatactgctgccaaagcttttaaactgggttgtatctttgcaatgataagcataatttgccttgtagataagataaaattgagtggatggctgctttggtccttgagatgggtattctccatttctgaaataaccatttgtcaatgtctttctcaaggtggtagctcagag

SEQ ID NO: 300099 - DNA, 358 bp, Homo Sapiens
cacataactaaaacaaaagtttcacacatcaatatttatcttacccagtgcactgaactctgatattttccattctaattcatcctatttcaatttttaaagtaggtaatcaaaactcactaaattcatttttaaactcatagctcactgtattttgaaacactgagtattgagatgtgcttgttaattttacctatcatagatttaaaacttttctaattcttctactttttctaggtatttctgtgagccaataacacctgctaggattgcttacctgtaaggaaggtgcacatttgtcacagtcatacagtactgccactgtgtaatgtcactaatggctttgatcaatcacagg

SEQ ID NO: 300100 - DNA, 360 bp, Homo Sapiens
catggtattaattattcctaaaacccacttgcttaactttacaattaaactagataaattatagataacattttagctttttatatgaggagggaaataacgaataagaacagggcgaagagggtatctgtagggtccaaatggttgagtagaagtgctccatgcagaaaagagggagggagcccatctctccttcattcagcctgggaaattaattaatgatgttaagagggcaaggtatgaagctatattaaccaaattgaaccttattcagatttcttactccagagcagaagccattcaataatctttttgtctttagatatttaatttgttaataacaacaacaaagctaagaat

SEQ ID NO: 300101 - DNA, 219 bp, Homo Sapiens
acgatggaacacgagcaaggctggccaacaccccgatgccgacaaaacaggtgatgagctggcagatctggggcaagcccagaacctcatggatgggctgcctccaagcgacagcaaccagctggcctggtctgataccgaactgtaaaacatccattaagtaagaagcgcaaaaaaagccagagcgcgtaaaacacatacactctggctacagaacct

SEQ ID NO: 300102 - DNA, 111 bp, Homo Sapiens
ctgggttgtagaccccagcccatgttaggcagtctcaggaattgatcctacctattaaagcaaccaacacttgtcttggagaatattcatatcaagagaaaagtcttgctt

SEQ ID NO: 300103 - DNA, 213 bp, Homo Sapiens
ctttggcaggaaggatggcttccagaccagctaagtggagcaagcatgttttgaaggacactggctctaatagggagttagcatggggtgggtcacagaacgtatttgatcaggcaaagaggactcttgccatccaagcctgttccctcagataaatggggataattcatatgtcataagccaaataaatgagggaatgaaacatacgtaact

SEQ ID NO: 300104 - DNA, 284 bp, Homo Sapiens
caaaattatactcaaggaagggaccgagctggtttgcagagccatagctttggctttctctctgtcaaacttgatgccataactaaatgtcctgatcttacctcaaagatgaacaagccctctctggatttcagccttctaattcactgaaacaaggacaaccattctaacgtaactcaatggagaatttaaaggcattaaggatgctcaaaactatctagaaactgactgaacttcatttgatttccagctttgccatgtgaccttggacaattatgtatccc

SEQ ID NO: 300105 - DNA, 372 bp, Homo Sapiens
ctcagatgacacatcatctgagactcgactagccagcgtgcatgtctacattatggatctcagatttcgatgcctcattggacgaactgaaacgctccacccttcatgacattgatgaatatacctatccagctcctcttcccgtggatcagcattgcagaaaggagactcaccttgatgagacttcagagaacctttcgtattacgttaacacatgaggccttgccggcgtcagctcgagaatactaccagtatacatgagctcaatgtactactgtgacgctcgaagagccgaacgaatcactaccaccttctcaggccaagggtgcagagagagcaaacgctgtccataagcacttaccagacaagcac

SEQ ID NO: 300106 - DNA, 348 bp, Homo Sapiens
gacttgtttgccactgtagagttttcagttttctctgtagattcagtgtgacaaagagggaatacataatttgtgaccatttaagatgctgatattttctggaaaaggatatagatagtagtagtgacccgcaggagcctcacaataatgtctaaagatataaactgagtagatccctaagtactcttctctaaattataaaatgcattacctaggctttaatagttaaaagctggaatttattgaaccgcatctacttgatttcataatatgcattgattttagtatgttgctgttctgttatctgtaatcaactataacagagtaatatatttggtgttctggccc

SEQ ID NO: 300107 - DNA, 224 bp, Homo Sapiens
ggatcgctgtgcgcggagtgaatacgcgatagattagccgcagtacgatacgcctggcaatactgtacgacgaggagtacgtcttacagacctggcagctgaggctcatacatgtgtacttggtagatcctatacccttgttagtacaagcgttaccagagtgatacgatgatagagtgcgaattacgtaggctaacgttgcattgtcaagtgcagactgtctg

SEQ ID NO: 300108 - DNA, 363 bp, Homo Sapiens
atttttcagaaggatgtgataggtgataaatgaataaaaagagtacctgttttaaattatattctctctcatgacaacacattggacagcaaagttcttttttatctgagtagaacattgtatctcctattagcagtattttatttttactaattgataagtatgcatagaggtctccagaaatataatgtgtataaccttacaacctttatttggtagatttattattattgctactggtttgtaattattttaattctcccacgttgactgttgttacccaattattaattgaacaatttagtatctctttacacctgtatttcacaaagtttggctatatcatattatatcacttatgtt

SEQ ID NO: 300109 - DNA, 409 bp, Homo Sapiens
attaggcctgacctgcttagcagcgtatatatatacaaagagagactcttttcaggactcctatggcaggtgtgtcttacaggaaggcccacgcctgcccgaggtgtggccctgtcttgagagacagtatgcatgtggcagatcatcagggaacgcattacatgtcgactctgaacaggtgtgacgcctgttggaacaaagtgtatgacagcggatacttgcatcatctgcagaatgagcacattgctgagaaaccctacgaatgcgtgtttgggaacgccttgtgtgcataagagtgtagtcgcatagctcatggctagtcatatgattacgtgagagcgggaggacattcttgctcagggcggattacgtcataatgcgccactcatactgagatgtaaccagtcct

SEQ ID NO: 300110 - DNA, 401 bp, Homo Sapiens
agaaggtccatgtaatgacacgtgatgtgaggggccttgcacattcaatatgaaggtgactatgtccaggctgaagcaggaagagctgtgacaactgaagcagatgacagtgcgagaggcacacaggctgtctgataagaacgattctggaggaagagtatgactaccagttgcgatggagatcttgtgcgtagttaaccgaccacggtggactacaatctacagcatctgaccgacgtatgacatacctacggacgcaaaggattgtaggatgagcaggagatcagagcattgcaactgactgatgatgctgacgaaatatgataaccaagtgcgacatgaccatgctactatgaagtgcagtgcctagttagagtacttatgaactatgaagcatggat

SEQ ID NO: 300111 - DNA, 424 bp, Homo Sapiens
ctgcaggactgcaggacgagcggacgagctgtagagaactgacatatctcaccagggctcaaagccatgatttctgatagcagccgcaccaccttattccaaagtacactgtagatgttcaaacatattcatttcgtctttcacccttccaactgtcagtgtcgctgactactcaacttgcgatgagtgtaagcattacggtcattatgctccttagattgtgtagacagggccctgctcatggatgagtctgcatttcttagaaaaatattcgtggtgcaagatcagctggaaagctaaacccataccctctttgcagatggctagcagcttgagacattcggctaagaacccatgggaaataaaaaatccttgctaatgtggcttgctttgcaaaccaggattattatttgcgctgtgatag

SEQ ID NO: 300112 - DNA, 392 bp, Homo Sapiens
gtgttgcgttctcctgtgtgcacaccgcgactatctatgactgtgccttccaggttttcaccgccatagctaatgtcagactcacagttcctaactatcatggagcctgtcagtctggcgaagtaacagcgatacgcgcaggttacaatgcctagtcctgaccatatgctctagagttattgcaactttaatagttgagttcaaactatcttatggtatagtagcactgacattaactgacgttgattcttacacacagtggaatattgtactatagagtacagacgcagtgtcagtgtcactagagtgccctgtacttaccagttatgatgggatatttaatgcagagctgagatgttacgtatgacatgaccacagtgtattccatgcct

SEQ ID NO: 300113 - DNA, 437 bp, Homo Sapiens
gccgttctactgagggctgctgagatcaccatacaggacaacagtggcgacgtacctcatagaaagagcctccaggacagggtttattatacaatacctaagaagaaacatataaactacctggatcaattgtgcaccactaagtactccctgccgagtatgctagagctgtatcaaggccacataatgagcctcatatctcaactgatactgactgatattatatgtgacatctacatcggtacatccaaagcgccagccagtggctacattggaagcctgaccatgagcttgttactctgtacagacgttaactccactacagtgcagaccttacacagtagcatctgtattgatcactacatgagagttaaagtctccaatgactcttcgccactgaagctgcatacggtgtacatgaggatataggaagatgc

SEQ ID NO: 300114 - DNA, 405 bp, Homo Sapiens
caacgccctttagtgaccgagcctccttatgctgaccatagtgctactgggacaagggatcatgctattcaaggctggaagttgcctgatcatgcgaactcaaagagttacatgctgctgccaccaccatcctagcggattctaggcgctggactgagatatgaatgccttacaagagatcgtactaaacgttgagacctagtgtgtacacgtgtccaaagtatcgactgagcatctgaaggctgttatcgacgatagctgacatgatatcgattggagcggtacgtctggcgatgctaagacctgactaatcgccgagggataaacgcttgcaggtacccggcaagctatcccaagcttatgacctcacagtgacaagcatctctacctaccacgccagtcaga

SEQ ID NO: 300115 - DNA, 371 bp, Homo Sapiens
ggtgagactggccaagacatatgagagcactgttgagaagggctgggccgctgtggctactgatgaatgctgtgcccatgcgtgcgaggaatgcaaacctcctgtggctgagcctcagggttgaatagacaaaacggatgagctgttggagcagctagcggatgacacattgcagaatgcgctcttaggtcagtacaccaataaagtacacgatgaggcaactacaactgttgtagaggtgttaaggaacctaggtgcagaggacaggaaaagtcgttgacatcctgtagcatagcgaatgacctgtgcaggagactctgtattcgcggagctgtaccagaaatgtgagccgcatgagcatgcgagcatgc

SEQ ID NO: 300116 - DNA, 204 bp, Homo Sapiens
  misc_feature (155)..(155): n is a, c, g, or t
ggtgcgcgatgacctgtggcagatacatcaggttcgatgatgccaggaccagacgagggagcctagatccaccctgcgccaataagctatcctgacctgaagagttgggcaccagggttgatcaccagaaacctgtattcgagtcactcttacantctctgcaagacctatagcaattctactgacaaatgagcatgtacacga

SEQ ID NO: 300117 - DNA, 425 bp, Homo Sapiens
cgacgaccaattcaagcggctgccctatcaactttcgtgggtagacgtcgtgtctaccgaggaccggaaccagatgtgtaactcgcatgagagaacgccactaagtgccagacccaccagatgctgcaacgcatcatgcgtgaacatgcaaccatgcttttcagctcttcaagtcgcctggacatacattgccacagagtttaatgctgtaacatactcacatcatgcagacatattcacactgtgtgagaaggcgatacagatgaacataccaactgcacttgatgggcctagaacacacatgcccaaggcaccctaagagcaaccgaaagctggtatggatgatgttggcgctcatgaggagaagcgctgaaaggctgaccataaggagacctgttttgccaagtagagctaagaacttggtg

SEQ ID NO: 300118 - DNA, 423 bp, Homo Sapiens
cgggtgcttgatgcacactggggccaagcactctcggctggtgcttggcggtgacataactgcgctcgaggcacatggcctagctcaagacatctataaaccctatcgtatcaccgtcatgtaggactctatggagtaggacatcaatgccagacttctagcactgagaccaaggcatgggaaactattcggccgtatgaccaagtgcctatccaacaaatggcttctgagtcatctgggatacatggaccaacgtctgaacatgtactaatggaccccattattaacaccatgggcctaggacaacgaagaatgttccttgctaatagctttatgcctgtagtccacctacggattcaaggccagcgagtttgatagctacgcaggaccaaggatgacacttctgagctattgaatgagacg

SEQ ID NO: 300119 - DNA, 439 bp, Homo Sapiens
caaaaaaaatatataaataaagccgggagattcaaattaccaagggagtatagccaaaagatggagaccagagacatttttccattcatgtaaacatagagaagatagagacaacacaggaaattgagaaggaacagctagtaaggtaggaaaacctgggacataaaatgtcttgaaagctaaggcaagtgacatggaagtgaaagaagtgcttcaagagggaaaaagccattgctagtgctgctgatgtatcaaataagatgagtactgagacctgaccactgcgttaagcaacatagaggtcagtgtccatgacatgctggaaccagagcttgattgcagttggttctagaaaaaaatgggggaggcaatgtttgagagcatatatagacaactcttttcaagggatttgctatagggagaaaaaaagcgatgggac

SEQ ID NO: 300120 - DNA, 406 bp, Homo Sapiens
aggaattcggcacgagcccaaatccacgcgaccttactgccagacaaacttagacatatgattttctaagaggcagtctatacaatagcaatagaaacctgtggctgttgatatcgtacctttagcataagaacaaaaattataaccaaccgtaatatgacaaggactgacccgcatagcttctgcataatgaattaactaaagattactttgcaaggagagtcaaatcttagacctccgaaaccagacgagctacctatgagcagctgtttgagcacactcgtgtatgtatcaaaatatgtgggaagatatataggcagaggggactaacatactcgacctggtgattgctggatgaccaaaatagaagaccaggtcaactatgaagttgcccatataacactgt

SEQ ID NO: 300121 - DNA, 421 bp, Homo Sapiens
ccgaaatcttctctatcttactgccagacaatcttaaacctatgggattctgagatgcggcctatgcatgagcagtagaaacctgtggctgttggagtcgtacctccaggatgagcccaaatattgtaatcaacattcaaatgtcaagagcttgcccgcatatgcttctgcataatgatttaactgaagatgccttggcaacgacaggcacatcttagaacagctaaaccagacgagctacctatgagcaactggatgagcacactgttctatgtggcaaagctgtacgaagacatatagtggggggtgactaacatactcgatctggtgaattcgggatgaccacaatggaaaccagttcacacagaagttgcccataaaccctataaactctgtgtaattgaacagcgtggagcccctc

SEQ ID NO: 300122 - DNA, 411 bp, Homo Sapiens
cattaacagattattgaccaacaggcaggggaggttaatatgctccaatgaataaagagccatcatatattttataatggagactaacaggttgatgttgctgagaaaataatatggactttgcattcaatgatgtatcttttcacaaccatatctttgataaacacaatttgggttatactggcagggattaagtagtggaaaatctcttagaagaaatgtgcttctactgtcccccttaccaaaatagaacagatgagccctaatcagagctggtaactgtaatggtgattgctctgaggaccaatgtatataaacatcactatttgaatacctagatttgggcaagtaataaggaggaaagttttgaacctgagatacccagattaaagtaggaccttttttgaagga

SEQ ID NO: 300123 - DNA, 400 bp, Homo Sapiens
gtggacactgagctgaattgaaggcgtttctgggaaaacatgggttttttatctgaggatccatcgtgccatcgatatgagttgatttcacacttacgaaagcatcatttaccaacaaagtttgggaaacatcctgcttgaatcacaaacactactgtccgagacaattcttgccactagtaaaaacagacatatggtcaccattacctgtgctaatggaggcgtgtacaccattcgcaccatctggaaattacccataatgtatgactatgcatatctctgtgcctagctgtgaactacgatactcatcagaagatgtaagtactgtttgaactgggctatgctactgtagagaatgtgttacttgcaatgtctacaatggtcaagacataaggagcct

SEQ ID NO: 300124 - DNA, 425 bp, Homo Sapiens
ggtgatctgggcgtcgactgacagctgagagagtgacgttggtgaaccacagcagcgatccagacacaaggtcctgcctgtccagctgactgatgcaggtgccacaacagactgggagtgccatgcatgatgagcttgctagtgaacactgccgaacgctcttactttgcaaccataacgcccgtatacagcgcaagctattggctggtgcctggattagaagtacctgcctctcgggtacaccaatcctgtgaactttgaagcaactgcactgcacacggtataggaggagacctgacgagagctcatgatctgagcctgccagagatgagatcacaggtgacgatcctgaagcccctgaaggctctgatggatgcacacgacttatactgtgataaggagaacctgtctcattcccccttttg

SEQ ID NO: 300125 - DNA, 364 bp, Homo Sapiens
gacaagtttgtcgtggaagaaatgcatttctggagatacaggggtttttatcctgacttctaatgctgccacagacatgactggactattgatggaggaaccaccgatttttcggccgtttatggtgcacctccacgctgaatcacagacactcacgtccttgacgtctcttttaacctctccttaccctctgatattatgtgatcactgtaaacttaccttttttcggtgttatagctcttgctaaccagaaccataataaagtgttactgctaatcatcatatgttataatacattaaagattctagtgattgcaggggctactttggacaacatatattgtgcatataattggggccccca

SEQ ID NO: 300126 - DNA, 425 bp, Homo Sapiens
gcgagccgcagccggatctaatctcctgggctgacgtgagcgcgctatgtgacgctggcactgggctcggattactctgtgtgagccgagcggatgcgagtcgtctgctctttagccgacagagatgttggtctgccacacaggccggagtgccgagccgtgaccttacattaccgtagaggctccctccgatgctcaagagagacgaccagctccacctggacgggatgtagatctaccagtctgagatgctatagcaacctcaccaagcggagagatgtagccttatgttccctatacacacccagccatattgatacctacggatggacatgctgcttatacactacaggggctggatcatgcgttgacgctagctgaaatctttaagcgcccagaggaactactaggattgaggccgcggc

SEQ ID NO: 300127 - DNA, 373 bp, Homo Sapiens
ataaactgtgtctctcttaagcaccgttcattgtacatcactggggtgaaatgctagtgcgaaacatggctctgttataccccgagagaatgatgacggaccacaggtattatactcgattcttaccagcttattccaacaagtacactttggagagtatctgagacaacccagtatttgattaccaggtgtacttgcaagcaccatgagtgggtgacgctgaactgaaacaaaacctgagtcgtactatcataagcctattgagaacaagccatgagagtgttttatacatgcataaagcctgcgtaacgggaagactttacttctattgaccatatgagaccatactcaacaggatgggcactgatgagga

SEQ ID NO: 300128 - DNA, 418 bp, Homo Sapiens
gccaagtttgtcgtggaatacatgcatttctggagatccagggggttttatcgtgacttctaattctgccaacgacatgacttgactattgatgaaggaaccaccgatttttcggccgactatggtcaacctccactcagaatcacagacactcacggccttagacaaacgatgttatggcacattcagagaagtgtggcttacagaataagtgttctccatctctttaacctctcttacctcctgatattattttatcattgtaaacttaactttctttggtgttaaagtgctttctaaccagaaccatactacaagtgttactacttttcatcatatgttataataccttaaagattctagttatatcaggggctattttggactacatatattgtgcattaattgggcccccccc

SEQ ID NO: 300129 - DNA, 417 bp, Homo Sapiens
gggaagcttttcttggaatgaatgcatttttgaagtctcagggggatttcttctgacttctaatgctgtcacagagaggcattgactattgatgaaagaaccactgatattctggctgtttatggtgaacctccacgcaagatcatagagactaaggtgtttgacaatacgtgttatggcatttcacaggagttgggggtatagaatgaggttgacccttttcgtgttaacctgtaattaactctgggagtcaatgtctatggtacacttgactgtttttggtgtttagtgactggtgagcagacctatttagacgcgttactggtatgcatcaaatcttataccacattaaagattcgatttcttgcagggcctattttgctaatacatataaaggcataaatttgggcacccccc

SEQ ID NO: 300130 - DNA, 368 bp, Homo Sapiens
gagaaagcttgagagtgagttaggcacactttgaccgagacatgggatgacatgatgctgtccaagcatcaccactacaatctagcaactgctggctacataggtacaagtcggacccggaagttggacctcacgagctaggccaagtgatatgcctggtacgagctggaacggacttctctggtagacagcatgatagcttacatcatcccttgtacaagagctaaagagaagtgtgacaatgactagtgataatctattaccgaggatggagggaatcttgtgtattttccggccaaaccctctacttagggctgtgcaccatacgagactaacactctaggcgccatatactgaccttttctcca

SEQ ID NO: 300131 - DNA, 366 bp, Homo Sapiens
gacaatgcttgcgtgtgagtgagcatggttttgataaagagacggtatgatacgagcatgtaaagctgccacaatgcgggtatgtcaggtgcgagccacctagacttcgtgaacatctgcaaaaggtgcgtgcccaggtgtgaagcatgtacaacatgttccgatgaagactggccgcgctgtctttttagattgatagtgtgctctactattgcgtatcatcgaaattgagtttgtcaatgagtttgcataatgtatatatgtgataccagtacaccttttgctgttatgtgagtagccatttgacttaggtgagccacttatgagcttattcatgtttgaccacatatcctacccaatattttt

SEQ ID NO: 300132 - DNA, 281 bp, Homo Sapiens
tgagccaccgcgcctggtgaaccatttttaaatgtacagtttagtagtgtaaagtatatacacattgttgtgagacagattttccgagcttttatatcttgcaaatatgaaactctataactactaaacaacctattaaacacttcccctttctcctcttatctgtccctggtaaccagcgatattctttctgtttttatgaattggcttggatacttcatataggtgaaataatacagtatttgtcattttgtgactagcttattttacttagctccttt

SEQ ID NO: 300133 - DNA, 442 bp, Homo Sapiens
gtgtacgaattctgcacgagattagagcgttgactatcacacagccttggacatctagagagagaggtttttgggcaaatacctgtaaccatggcccaacgatttcaagctgtgacccaagggcagattaaggggctctcataaattgcccagagcgttgttgccaatggaaaggggatgctgactgcagatcaatgggtggggaccatgggggaccgactgcggaggatcagggtggaaaacactgtagagaaccgacgagagctccgagaaatactcttctctgtggacagattcatcaaccatatcatcggaggtgcgatccttttgcacgcaaccctctaccagaaggacagccaccgaaagctgctcatagacattctgaaggaaaaggtgatcgtggtgggaagtaagttagaccaaagaggtgctcctctctgca

SEQ ID NO: 300134 - DNA, 424 bp, Homo Sapiens
gcctagcccgccttggttctcaagcagctctgggtactcatgggggtgtcttgatacttctcctggtgccaaaggcatgctttgtctcagtaccacagaaccacccctatcatgcccgcctttggcgcaaatcccgtcttcatcacagacactcactttctttcacgaataactgtcgatgcacactttttcagatccgcctgttaatgtatggtcattaaattcccgtttaagctcttcttagctacgactttacttgggcattgtgaacacaccttctctacgttgtgtagttcatgacaaacaaaccttattacaggagttattgcctggcatcagttcctgtaagacgtattagaatcgggtaccctgagtgtctatattgtaagacaatacccagttcataaattgggccccccttttt

SEQ ID NO: 300135 - DNA, 112 bp, Homo Sapiens
tgctaaaccacattgtgtttcaaataaattgggattttgacttcaaaactaggatgcacaatggtgaaaaaaagtccagtagttgacaaaatagaacctcatgtaattggcc

SEQ ID NO: 300136 - DNA, 362 bp, Homo Sapiens
cttcgttctgcgtctctctctgtgggtgacccacatatcacttgtacccatgccacttctggtaccagcaccgaacacgaaggattcctaggaaatctgagcgcttatttcccaccccgcctccccaactatcatggaaaggaacatgggactactgaatctgtttgctgtgttgtaacgacagtgaaggccgcgactttcttgtacttagggtgctgaagtaatgatctgagggatttgctcgtcatttgctgtggcagagatgatgttgacaccctgggatgctgtgggagggactgccaggatactttattctacagcgaagttaattttgtatccgtcgaggctacagtagaggtaaa

SEQ ID NO: 300137 - DNA, 417 bp, Homo Sapiens
ccggactgtatctgtagtttgtcctggcatccgttcactggctgctgccatgcgagacaagtatgtcactctccatcttactgctgtcaaccaatgtcatgtaccagaggcgtgtgaactaagcatttgtcatggtcgggccctgccatacagtgaacaggttgtctcagaaggtaaggcttctctcaaggaggcaacccatgacgctcttatggaactgtgcatggataactgccacacggccagaaggcacgatgattacacacaagactgtggggctgctgtcatccagtggctattgacaggctggtatacctactaggaggcaatgcccgtcagcctaggttcagtgattctaagactatggctggaaggcagcatcttttgctgttatacttgaaagacaccacaattaga

SEQ ID NO: 300138 - DNA, 351 bp, Homo Sapiens
gcacacgacacctttatagccctgaggcttatggggtccacaaggaccatctggctgagctcgtcgctcgtgtatctggacatctacactgagtgcaccccccagtgtgcgtttactgcacagttccttcattgtgacgtgaacacctatgatcctatcttgcatgatgagttcctttttacctgaccattactacgacgaccgctgtcctaaatttgacgagagtcaatactgtggctttgattgctgggagatgaacttcgtatggctcttttgacaacatatacactatcttacttatgaatgcggactgactcactactgatacatcatctatgacttgaatctttg

SEQ ID NO: 300139 - DNA, 418 bp, Homo Sapiens
taggattcgctgcgaggatagagatttgaacagactttgtgggtgagagggagatagaaagagacctatcgagcgtgtgtgagaccacttctgttaaaccacatttgtctttaaaatgcccgtgttgagggtttaaaacttgtttatatctgggagctcttatacctggattaaaataaatttcttggctgcaacgaacctaaatagagagaatttaggtgtttctttgggagataagactgggtttcttggtctttgtttgtcttaacaacagatcccacaaaggaagttgcgtaagaggtgtgcccaaagcaaaggagaactcggatactggagttttttgcacccccaagctaaccgttgccccggttctgaattagaatgtcttctgtatcgagctggaacttaacaatcttcg

SEQ ID NO: 300140 - DNA, 413 bp, Homo Sapiens
agccactcgagggtaatactatgcgcgcttagcgaggccattgacccacatgccgtgtccgcgataggtactgaagcctggggcactatatatcagtgccgcacggtggcgatcggccgttatatccgagcgtcatgtcacagggactgaccccgaggccttgtgtataaggaaatagcgagatcacactttgcgcgggtagccatagcttagacccccgataccagagcatctacctatgaacagctagaggagcgcacccgtgtatggtgtccatgagtgggaggacatatagggagaggcgagagacctaccgagcctgtagatagctggatgttccatatatggtgtgagttcaactgtcagtatgtccacatgaaacctgtagatccccgtgtggatgtaactgggag

SEQ ID NO: 300141 - DNA, 293 bp, Homo Sapiens
  misc_feature (176)..(225): n is a, c, g, or t
gccatattttttatccttaaaatttccatgtgtcactctcttgccaactgtgctctctcatttggtcccttgagtcactctaaactcaaaccctgataaagcagctgatcggtgaagtgtctgttgttactaaagtagaagttagaggcagaacagtggcagagagccctggaatnnnnnnnnnnnnnnnnnnnnnnnnnnnnnnnnnnnnnnnnnnnnnnnnnnggagccaggttgtctatgccctagtcccagctctctcacatgcgctagtgagagatatatacatgtat

SEQ ID NO: 300142 - DNA, 270 bp, Homo Sapiens
caccatgagcattagatcaaggctggatgtgtgtgtgagggactttgcctggggggtacggttagacctagtgctcactgacagggagtgtgacgcgggggacatgtaccaggcactgatatggaaagtcaatactgtccctgaggacaggactggctctggaatcacgcgcaggctgtaggacaccacgtattatggacaactgagcaagttcgtggaggatttcatacgaaatgcgagctgtaaaccatcagaggctaacgatctggg

SEQ ID NO: 300143 - DNA, 360 bp, Homo Sapiens
gcctgcccagatttcaggctctcgtggcctccaacatgactatctcgctgaggctaatcatgtctggctctcgatttaaagaagagtgagagatggggactatgcctgttagctgaacacttagatgccatcgtacgtgccatcattggcctaatttcaagcttgtaatgcctcaggtaacagcgaggcctgatgagagagacgagaaatagggaaaggctgccagatggtcatacaggacatttattgacgaaaagctgaccatctctaaggggcatagctcatgacacaaatgcttaatttgtaacgcacgtataatacgctgatattgttcaatgaagcatgccatgatcagtgggt

SEQ ID NO: 300144 - DNA, 406 bp, Homo Sapiens
atttggcagaatgcagtatcttttcctgtgttttgacatgaaatagcacatggcttctacatgatagttttaacttgttggggtcaccgggagttatatgatggtcaaccccttttcccaaaattcattgtggtagttttagtggaaaacgtaaatcaagaaatctcatatcatactttaataaataaataccaaatacatagtgacatataggtttgggaagaaactagtctgtggggaccattataagagaatcacattatatattacacagtatatggatattggaatgtatcacttgtggggggttctcttcattagcagaacagtcatgtctgtctgtatataagactttcttttttttaaccaaactagcatttcattttgtgagtgacattgacatttt

SEQ ID NO: 300145 - DNA, 248 bp, Homo Sapiens
acgcattattgttcatgtatactagcggcgagtggaactgttcgaacataatgcatggcccttgcactcaaggatctcagaatgtaacctgtttcaattgtactctattgcactacaacacgtggttctaaactgtatgacagacaaatgccatggattgacaatgatcatatgtcgtactcacactctggagacattagaatactcactacacttaaagagtatctgaaggatataagtcgcttaga

SEQ ID NO: 300146 - DNA, 279 bp, Homo Sapiens
gctcaggcctctgcgacatcaggagctgcacctggaactatgggagtttaaccctcgactactatgcactcttatttctatcttcaacatgtgtggcataggctgctaccagagacagctgtgcattttagatgaatgatgtccgggttattgtccaactacctgtggcattgcagatatgctggctacttatcagaccatagtgtacactgatctactgtctttggaggacatctctcatcaagcctgaaacaatacatcagaagtcaaacagctgat

SEQ ID NO: 300147 - DNA, 369 bp, Homo Sapiens
cgcaaacccacttcacattactaccggacagccttaggcataccattaacctaagtaaggtatcactgatagaaattgacacctggcagcagtctatatagaaccgcaagggaaagatcaaggattataaccatgcataatatatcaaggactaacccctataccttctgcataatgaattgactagatatcactgctcatggagagccaaaggtaagacccccgttaccagacgtgctacctaagaacagctataagagcacacctgtctatgtagcaaaatagtgggaagatttataggtagaggcgacagacctaccgagcactggtgatagctgactgtacaagatagattcgtagtttaactgt

SEQ ID NO: 300148 - DNA, 356 bp, Homo Sapiens
gaaagacatttgagatttgagttgtttccagcttttggcaattatgaataaagctacttttaactctcgtgtacaggattttgtgtggacacaggtttttatttcactggcataaatacctttaagtgggattgcagagtcgtatggtaagtgtacctttctttataagaaggtaggtgttacctttataagaaatagccattccagtttctctccatcttcacaaacacttggtattaccagttttttttaaggataccctccctgatggatatataagtagtatctcattatgattttaacttgcatttcccaaatgattaatgatgctgaacatcttttcatgtgcttatttg

SEQ ID NO: 300149 - DNA, 348 bp, Homo Sapiens
gcatctacagatatggaactactagaacttactccgctgaggtccctctagggctttttgactgtatccgtaaccctgagcacacagcctcacgctatagagtacactaagagtactgacaaacgcatacaatatcgtcttgaatacataaccatgagagcgttagctcagtctgtaccggaagcaagcttcgcagaaatggaaaagctggtgaacgacatgccttaatacaaagacagatgtatggctgtcaagacgcttccagagtgtgcaaaattacctatgaagagctgacaggggaggtaggttgatgctcaaagaacactgtgattactctataacgtgaca

SEQ ID NO: 300150 - DNA, 425 bp, Homo Sapiens
ggaagggcagataaagctgccgacgctgtgttcttctttaccttcgctttaatggtcttcacagcacgtcgtgtttatgagtcagaggaccctagagcgacacttgttggggacgggcaggacaccacagcacgacaggcagctcctgcaagtggcggcgggaatgcacgccggagtcggcgtgccagcgcggtggaaaccggttctcaggctctggccgagtggacttccccttacatcagcgggccagctcctgtcaggcaggcggccggcgattggccgcgaggaggcagtcattcaaactgccttttgtgctaggctaatcagggcagcccagggtcccagcggaggtgcgtctgtggtgtcagacacctgtgtctcagctctgccttcctcgggctggctcctgcggatcctttctgggc

SEQ ID NO: 300151 - DNA, 383 bp, Homo Sapiens
aagggacgagcggagaccagaaccatgcgcatgacactgtggtactgtgacacacgcgggagaggcgacacagagagggacacctccatattctgagcccgagctgtggggccatttctcccagatgtggccaattcatatcgcctggttctggaatacacacgacttaagcttccagggaaagaagtacacgaagggggacgcttctgagtatgacacgaagccacaggctggaagaaaaaatcaagctgggcctggacttttccaaactggcctacattgaatgaggggacttacacagaacacaccagaggaacgccattctgtggtaaaatggccggaagcgcaacctgtgcggggaatcagtgcagatgtgccaactt

SEQ ID NO: 300152 - DNA, 364 bp, Homo Sapiens
cgctgtcgcttttttctgtcgaccttatgtcactaggggtgttgcctcattggtccacagggtcccgcgctcatatgaaaaaagaaaactatccctgatagaacgggcgatggcttttcactaacaaaataaaaatccactggatgaacgttctgatcgtgattttctgactctcattatcaatgtgagattataagctctgaaacgcgaggttatacgcatgaagttggtagtattgcagaatccactttttgaccatccttggataatcacactaagattattgtctgccttgccaataatttctacataggattttccccaactaaatacagcaccttgtttattgtagtagaccctcctt

SEQ ID NO: 300153 - DNA, 423 bp, Homo Sapiens
aatgtgtgatcaaggaaatatatttatcaaggcatcctgaatatatatggcgggtgtgtttgatatttgccaagacatccccaaccactctagagaagtgctgtgcgtttgtagatctataatgaatgttttgccataagagttggaagaatttaaaccttttgtggaaaagcgttagaatttaatcaaagaaaatttgtgagctatttgagtatcattggagagtgtaaaatattagaatgtgcttttagtttagtgcaacaagtaagttccgtaagtgttaactacaatttttgtagaggttttaagaaacttattgaaagtgggtatgatatgttaataatattatgtatataaaagaatgacctgtgaagaaaagtatttgaacttgtgtattgaattcaattaaggtttgctgatgaa

SEQ ID NO: 300154 - DNA, 563 bp, Homo Sapiens
ttgtacatctccatcagagctcttgggtgaccaggtacgttgtcagtgggcagaaatattttgaaagaaatatttgtttttgagcagtaattcttaatagtgggcttaaaatattcggtaaaccatgctgtaaacagatgtgctgtcatccaagctttgctgttccatttacaaagcccaggaagagaagattcagcatcatttttaagagcactaggattttcagaattgtaaatgagcactggcttcaagttaaagtcaccatctgcattagccactaacacaaaagtccgcctgtcctttaaagctttcaagccagacactgacttctcctctctagctatgaacgtcatgggtggcattttcttccaatagaaggctgttttgtctacattgtaacttgctgcggcctctccatcagcacttgctgcttcaaggagctgttcaaggacagagcaaggagcaattctttccttaaacctcatgaacttctgctagattcagacttttcttctgcagctttctcacatgcctcagtccccatagaagtgaagagagttagg

SEQ ID NO: 300155 - DNA, 104 bp, Homo Sapiens
gcagcaagtgggttcttgctctgttagtttcctggagaccttgttgttactctgtacacaccaacgcccatttgcctttcaccctgagtagaggcgtacaaggc

SEQ ID NO: 300156 - DNA, 359 bp, Homo Sapiens
  misc_feature (96)..(116): n is a, c, g, or t
tgttgatccgtatagcaactgctttaaggcatcagaaatacactgttattgtgtaaaataaagactgcagttaacaacaatacagagaaggtttcnnnnnnnnnnnnnnnnnnnnngtcttattctgcattgcctatttgaagagactggttttttcagcagtcagtggtggagcacgactgctgggtcatacgcccaggttttgcacgttggtttgtggggtgcaggcactgactgactagtgctaagacgtaatgtgcttttgatggagtttcctttgcctgtgtgtttttggggtttttggaaatgtggaatcttaagaggaagaaaacatagtatttatagagctggttggttgg

SEQ ID NO: 300157 - DNA, 366 bp, Homo Sapiens
gttctgatagtaggcctttttcaaagtaatgtgttgctttctgttctggtataagctccttatttctttgcaaacctgtagtttaaagagcactgctctagaccatcttggaattcccatgtctaccattgttctcttctgtttttgattggtggatttacattttggaatgaggtatgtgactatcagaaagtaatctcaactcctgtgctttgaccttttaccacctcagggtacttgtagaaattcttaatagtggattattgtgaacttcaaaaatgaactgccacttcagcagcatgtctttcctgctcttcagaaactcgttcagagcagtgagaaatttctgtcagtaatctattattt

SEQ ID NO: 300158 - DNA, 403 bp, Homo Sapiens
cgtctgaactatacctgcccgccataatcctaggcctaatgggcttccaatccttaccaatccttaacataccaaacaaggtaaacgatccttccttaaccataaaacaaatgggccaccaagggacctgaacttccaggaccacggcttccggggactaaactttaaattctacataccttccccaatatattcttggacccagcgaactgtgaattcttggccgtgacacaatgggtggacctcccgattgagagcccaattcgtataaattaccatcacaagaggttggctcttgagatgtgcccacacattgcgtttaaacacaggcgcaatcccggcgtgtataacacaacacttttaccgctatacgagagcgggtatactcacaggaaagctctgt

SEQ ID NO: 300159 - DNA, 377 bp, Homo Sapiens
ctcgaggagaagggggaacacggtgtgaggagaatctctggggtttttgcctctaaggtgaaagatagccctgtgggtgaagagagccacctgtgtggtggatgtggaagaatggcaaagggtcacatgctttctatacttaaataagaagggtgtctgtgcaattacacatggctgtcttagactctctggctttaatgactggttaaatggattctctaaccggctttttttaaggcgaattggaaattactggcaacaagggtcttgctatgaaggttccaaatctttagatttaggcaagcaacgcttaactctgtagaactccctttggtacctttggaaattaagatgagagatatagatatatattcata

SEQ ID NO: 300160 - DNA, 341 bp, Homo Sapiens
ctcaggtgtcagtggagctccatgtagaagtcgcactgggggagacaccaggagagtcaccttaagtgcctcgaaccgctatgtcgccacagtaagcggcacaagcttgcacgacaccatgctgaggagatatgaaattggatggtatatgaagggtagagggtatatcagagagagcgcacagcatgaggaagcaggtactttgatatcaatggcctttcctacacaagaatgcttgcactatgtgatggttattggataggaagtagcacactgtgaataacaggtagagtctgaacgctttggatagagatatggagaccgagagggttcatacatga

SEQ ID NO: 300161 - DNA, 394 bp, Homo Sapiens
cgcatatacaccctcgagagcactggcggagccgctatcgggcctaccgtgttcctgagccgcacagtctgtaatgtactcagttacattgtccttggggaccgctttgactctaacgacaaagagtgcctctgactgtggcgcatgatgctaggaaacttgcaggtcaagctaacctccacagtgcaactctatgagatgtactcttccgcgatgaaacaccttgcaggaccaccagaaccagtctctttaagtgctggcagggctggaagactttatatccactaaggcggatcacaagcagctcacgctggagcccaattccgcacgggacttcacatgacttcttattcaatcgcatgcatgaggcggagaagaactccaacacagggtt

SEQ ID NO: 300162 - DNA, 391 bp, Homo Sapiens
ggcacgcggggaaacctcgcgtaatactctatatattatactatacatattgagaaacacactgagacctctttttctaggcgctatatggagagtgagccacaatttgagatattaaaataatatctatatataaagtgacaaaggtatcttctttaacaaactttactcttaatcttagctgtgtatacaattttttaaaaggttggtaaaatatgcttgactatgaggttccacgtgaaaggcgaaaactttcattacaacacggaattttccaaggctggtcagaagggtaggccctaactctctgtgaaagtggtttatatcatatcaactggaaaatggtattaagaaagtgcactgggtagaggactagaccattataggctat

SEQ ID NO: 300163 - DNA, 362 bp, Homo Sapiens
cacgcgcgcttctccacattttaggtgcccccctctaggtgctcacagggctctatcaatatatggccatgagatagctgtacaccacgcgggcattgcgtggactcataccttatatacatggtgtagaaaaatagattattagcaacattcttaggcatacctctggctttaagggactttgtgcctgtgacaaccagtggtttcaggttcctggcgaccatattggagcatggatttaagcctggaaataggacattatatgagaagcgcccaagtggaaggttagaaaatcaagcgcttttgtcagacacacgattcaaggctctaccctataggttattagctatgtgggcttggac

SEQ ID NO: 300164 - DNA, 338 bp, Homo Sapiens
gttacctttatatgagactgtcaaactgtgttccagagtggctataatatttttcattctaaccagcagtgtatgagagttttggttgtgtctgtgtccttgacatgtatcagtcattggttttaaatgttagctgttccaataggtgtgttatctaattgtgggtttaatttgtgtttctaaaaatgattaacgatattgagcatcttttcaaaggcttattgacaatctgtgttttagctatcttactggagcttctctttttattcttttagcagtgtcttttggggagaaagaggttttaattttgttggaatccaacttatcaggtttttctt

SEQ ID NO: 300165 - DNA, 391 bp, Homo Sapiens
cgacaggttgcgcctcttagcacctcctgtgctctccctatatacaggccatatggagtgggttctgctttgtggcagaccgaggggccgtgctcagactcccatgaagggggtcttccctctacacatcggactggtggctgtctttggcctcgtctgcagggagcacggccggtgggctggctgggacacgcagcaagccctggttacaggcccagcggaccctcaaaggtgcaaggactttctgagggtgcaagacctgtctgactcttagaggcccaggccatgagaaaatgacaggcaagatacaaacactacccaatcatttaatacgcgccagaaagtgcgaagaattctgagataccccacgatatgcgcttttggaatagcc

SEQ ID NO: 300166 - DNA, 342 bp, Homo Sapiens
gagaactatatacgagaactcagtctatgaccccaatcaggggcaatatctgtcattaaagagaacttagttcaaggcatgatactgacatttactggcatggcgctaaacatgtctatgcctcatacacatgacacttacctaaacccattgaatgtacagggatatacgtgctattcttgcaaagtggaagcctaacccatataagaacaatgctagttctctattgcgctttaccatttgagataatgccttacaaatcaactgggagggcactgttctctataagagatggagctgcactattgcctaccaagctgaattgtaaacgcatgaccctta

SEQ ID NO: 300167 - DNA, 619 bp, Homo Sapiens
taactgaaaacaggtgacacagagttacctgttatgcgagaaccaaagggaggggtgtgctagccatgtcacatgcaggcgaaatgtctttaccagatagatcctggcggcacaagacagcctgtttgataggcacgatttgtttggcgcgtaggtgttatcaagtgtattggtgattcgacagatgggccagatattatggtacacatggcatccacttcatttggtgtcgctgaggactttgctgggttgaacacaatctgtcacgccattactgtttgattaactggaagaagtaatgctgaccctgcaaggcctgtcatgacttaccatgacccttagagggcaccgcttgacacgagattggatgcttgcttctatgagatgaaacagatttgtgacgtgtgccctagagcttggaagacatcaagctctgtgagggtgttaatgatgtgactggacagtagctactagataacgcgttagactcacgtatgatgtcaaccttgagagagggaaaatagatcttgagactaagttagctatctaaaaattgaatggtagtgtggtatcagccgaaccatctatgaggccctctgaaattatagtttcttacgta

SEQ ID NO: 300168 - DNA, 371 bp, Homo Sapiens
  misc_feature (124)..(124): n is a, c, g, or t
  misc_feature (133)..(133): n is a, c, g, or t
accccaagcttgggaaatgcagaaattaaactcctatttctgtatatcactatggtaaagggttgttggttacctgtaccatcaatccacaaaaggtataaacttcatgtatattctaatatcntgggctganaccagagtacctttaaaattccacccaaatttagttccgagaggcagatggagagtttggattgtctccaaaaatctaaaaggcccttgttttgacaattaggtttacgcatgtggtacatattgaggggcacataatcactggtggattggaaatgcatacctatccttgttccttccctaactaaaacggcatttaaaaggagcgaaactcaccaggatggagaaatcgagagatt

SEQ ID NO: 300169 - DNA, 663 bp, Homo Sapiens
gctattgagggcacctacattgactagagatgtcccttgactggtaatgtgttcattcgagggcggttctctattgcgtggttaccaagatgaagattcagcggaccattgtcatactgcgggactatatccactacattcgcaagcacaaccgcttaaagaagcgccacatgaacatgtttgtacatctgtgcacatgcttgagggacgtccagagtcttgacatcattacagtggacgagtgccggcctgtgcgcaagacagtgtgcttcaacgtgctcaaggtaagcaaagcttgcagcatcaacaagcagttacagacgttctgaggctgctcatgcggacgttatccacaatgaaatacaggtattatgtgattcccgaacaagaacaatcaagaactcaggggggggacacagtccccatgatgcctataacgagtcatattacaaatcacattgcccgaatatttacatcagctatgcgtgcgaaactgttgcgttaccccacttaattgacttagctgaatcccccttttgacagatggcgttatattcaaaaggcctcaaacgcatgcattgtccaaccatttctccagctgaattgttgattgcagaatggaaggcttcatgtctccgttaaaataccgtttaattcttgttt

SEQ ID NO: 300170 - DNA, 650 bp, Homo Sapiens
  misc_feature (362)..(526): n is a, c, g, or t
gaactggttcctcttgaaagtttcagctggcctgtttcagatcctgcttatttcctatgtacttgcagtgcacctagcttatggtaaagatgagaggggctgcctgatccatagttctctgccacgcttctcctggcctttccacttaggatcaggctgtggggaaaggccttataggtcttgagtgcatttcttagtctccaagaagcagcctcggcctcctaacctaggttagcactttcttcttaaggtggttttaggcgctgaaagggggcagtttcaagcttctcttacgtaaaaggaagagttgttctatataaatcagtagttctctaccagggggattttatctcccctctctnnnnnnnnnnnnnnnnnnnnnnnnnnnnnnnnnnnnnnnnnnnnnnnnnnnnnnnnnnnnnnnnnnnnnnnnnnnnnnnnnnnnnnnnnnnnnnnnnnnnnnnnnnnnnnnnnnnnnnnnnnnnnnnnnnnnnnnnnnnnnnnnnnnnnnnnnnnnnnnnnnnnnactgttgataaacctttgtgtacgcgtatttaagatcttatgtctatccattgcatgaaatgataagggaataattcccaagaaacagacatttagatagcaactgactttaggtattacaggt

SEQ ID NO: 300171 - DNA, 573 bp, Homo Sapiens
ggagcgttatataagtcttttgaagcccaacctctattaacgatttacgaaaaccaaaatatatctggacacaattaggcggtgctaatgaaaccagctctcatgcacacaactcctataacatgtataccacaacagcgatctttatcatgctaccaaaagtttgataaacttccagaaaattaccatcataacatccaaaaaatgcaggtcttttccacataaaatctatgtcttcaaacttaaggaataaacagactgaataatttacccaaaactagtaacaaacccacattgctcatgagaacgaaaatcattaaataaatgctgtaaaatgtccaatccaaataaccaaaatgaacaactaagattatcgaccgctactccatgagtactgccttcccttactacatcaaaagatttacttatatatatttttacttaagccgcccaaattgttccttaccaacatgggtcttaattatcataaaacccccaataactatattatacaccagccattccctcaacaacaactcagacaaggctttatctctaaacaaagcatttttt

SEQ ID NO: 300172 - DNA, 614 bp, Homo Sapiens
tggagctgttcctcgcagaccgactgctgctgtgtcaccggtgcaggtatagggcgcggaacggtccagctctgcacgcgtatgtcgcgcggttaggggttgtgatccagactcaggcggatcttgacagaacagtccgtgagtgctcactgggtagtgtgtgcccctggggcctgctggtgaacaacgactatgttgacctgctggaggccttcctggacgtgaccaagtatgactatgacagatcctatgatgagaacttgggtgcggtcatgcatgtacttgacattgcgtacaggggctttatagcccggtgcggtccagctgccaatgctaatgtatgcagtcacagctcccagcgggcattaactaactcatagcgtatactgctacaacaaagatgcacatgacatgctgctcaatgagatggttctagagctcaaactccacaagatgctagtggatgcattcaaccccacagtgctgcatgactacactggacatgtcacctggagttgaccaaacaagccaaagctgtcttgaaccgaatccacctgcttaagttattgagtcccctactggaggacttcattttcttttcttgaccagcttat

SEQ ID NO: 300173 - DNA, 1545 bp, Homo Sapiens
  misc_feature (16)..(16): n is a, c, g, or t
  misc_feature (67)..(67): n is a, c, g, or t
  misc_feature (117)..(117): n is a, c, g, or t
  misc_feature (120)..(120): n is a, c, g, or t
  misc_feature (142)..(142): n is a, c, g, or t
  misc_feature (160)..(160): n is a, c, g, or t
  misc_feature (216)..(216): n is a, c, g, or t
  misc_feature (281)..(281): n is a, c, g, or t
  misc_feature (310)..(310): n is a, c, g, or t
  misc_feature (337)..(337): n is a, c, g, or t
  misc_feature (435)..(436): n is a, c, g, or t
  misc_feature (467)..(467): n is a, c, g, or t
  misc_feature (536)..(536): n is a, c, g, or t
  misc_feature (594)..(594): n is a, c, g, or t
  misc_feature (655)..(655): n is a, c, g, or t
  misc_feature (657)..(657): n is a, c, g, or t
  misc_feature (672)..(672): n is a, c, g, or t
  misc_feature (696)..(696): n is a, c, g, or t
  misc_feature (746)..(746): n is a, c, g, or t
  misc_feature (797)..(797): n is a, c, g, or t
  misc_feature (820)..(820): n is a, c, g, or t
  misc_feature (871)..(871): n is a, c, g, or t
  misc_feature (995)..(995): n is a, c, g, or t
  misc_feature (1018)..(1018): n is a, c, g, or t
  misc_feature (1026)..(1026): n is a, c, g, or t
  misc_feature (1052)..(1052): n is a, c, g, or t
  misc_feature (1077)..(1077): n is a, c, g, or t
  misc_feature (1090)..(1090): n is a, c, g, or t
  misc_feature (1103)..(1103): n is a, c, g, or t
  misc_feature (1122)..(1122): n is a, c, g, or t
  misc_feature (1135)..(1135): n is a, c, g, or t
  misc_feature (1141)..(1141): n is a, c, g, or t
  misc_feature (1149)..(1149): n is a, c, g, or t
  misc_feature (1154)..(1154): n is a, c, g, or t
  misc_feature (1164)..(1164): n is a, c, g, or t
  misc_feature (1178)..(1178): n is a, c, g, or t
  misc_feature (1181)..(1181): n is a, c, g, or t
  misc_feature (1203)..(1203): n is a, c, g, or t
  misc_feature (1206)..(1206): n is a, c, g, or t
  misc_feature (1223)..(1223): n is a, c, g, or t
  misc_feature (1236)..(1236): n is a, c, g, or t
  misc_feature (1256)..(1256): n is a, c, g, or t
  misc_feature (1267)..(1267): n is a, c, g, or t
  misc_feature (1273)..(1273): n is a, c, g, or t
  misc_feature (1276)..(1276): n is a, c, g, or t
  misc_feature (1299)..(1299): n is a, c, g, or t
  misc_feature (1323)..(1323): n is a, c, g, or t
  misc_feature (1353)..(1353): n is a, c, g, or t
  misc_feature (1357)..(1357): n is a, c, g, or t
  misc_feature (1362)..(1362): n is a, c, g, or t
  misc_feature (1374)..(1374): n is a, c, g, or t
  misc_feature (1378)..(1379): n is a, c, g, or t
  misc_feature (1391)..(1391): n is a, c, g, or t
  misc_feature (1398)..(1398): n is a, c, g, or t
  misc_feature (1403)..(1403): n is a, c, g, or t
  misc_feature (1409)..(1409): n is a, c, g, or t
  misc_feature (1412)..(1412): n is a, c, g, or t
  misc_feature (1415)..(1415): n is a, c, g, or t
  misc_feature (1427)..(1428): n is a, c, g, or t
  misc_feature (1430)..(1431): n is a, c, g, or t
  misc_feature (1436)..(1436): n is a, c, g, or t
  misc_feature (1439)..(1439): n is a, c, g, or t
  misc_feature (1461)..(1461): n is a, c, g, or t
  misc_feature (1481)..(1481): n is a, c, g, or t
  misc_feature (1488)..(1488): n is a, c, g, or t
  misc_feature (1490)..(1490): n is a, c, g, or t
  misc_feature (1493)..(1493): n is a, c, g, or t
  misc_feature (1507)..(1507): n is a, c, g, or t
  misc_feature (1531)..(1531): n is a, c, g, or t
tattataatagtatantagtattattatctattctttcactcaatctacccacctattctcagtccnccaagagacaaattttgaattacaatttcacaatacaaccgacacccgcngtngcgttatacaaatactagaacncaagcgcgcacgcgcccngctacgtagacatcttactacacacagctctagcattctatcttcaatcatttagnacatccacatgtctctgattctcaccccactctgactagtgtatgtctaacaaacacatatacantgagtctccaacccaccctcaccttctancttctcacttatattattacaatctcnaccactataaatacatatatctacaattacctctcatatgtacttactcatgatatatattatcataccatacccactcgtatatattccactactgnnacactttccatcttctcacatatgacgtctntacatactatatatacattcacttactacttatacactcttactcatcctatcaacatacacttaagtncttacttacacatcatcagtcatactctcgtctactcactattatacctcatatacantaactcataaacacaccagtctgcctactcactctctactagtcttactcttacactactntntctactccactaatntctactatatctatcattacttcnttcatactccatatcgtttcctatctactatcctccgcgtcttacactcnatacctataccatactcatacaaggactgctacattctctactacacattntacactacaatctatatagtacntactacttctctcacttcacttatacattacatacgtacactacgatatcntatactactgactacttctatacatcatatatcgtcagccacactctatgcatacatacactcacagtctacacatcacaactatatcgtttcaccaacacttcatatgacgcacttattcatntctctttctactctacatactcntcaactancactcatcactacaactcgtacgtgntacactcatcatcaatatgtagtantgtatcacatacncacatcctaccantgtcactactctcatatcntcataattacttncacaantaaagacntatantgagtactantgaatatttacttnctntgtctcgtcactaagattcacntcntgtcgtagtcccgctantcaatcatcatantacatcctatcgtcctcagngtagtctacancactcntcntacactaatcatcatatcttacncatcgacactgatctatctacgantcagtaatccatatatcgcaatactactancatngctcnactgtgatcgantaannttactatcatcnctactanagtcntactangtntcncgttactactanntnntactntgntacgatcatcgtcacttgacantcacaccctactctacgacntcataantnacntccactactatgcntcttagacacatactatacttcantatcgtctcccgcg

SEQ ID NO: 300174 - DNA, 703 bp, Homo Sapiens
gtacaacttacaaagtcacaaggaacttcgggctagctacgacgagggacacactatgtttcttataggacatgtccatcgcagatccttcagttttgcaagatccacatgatgacatgcacgacactgtgaaggtgctgtgacctggcggccactgaaatttgacttgaagtggtcgcattctaagtaatcctgttgattatctaacaaattgtcgcgtcatttgtctttgccggtgctgtggatagttagagcataaacttggctgtggacttaatactgcactgggcgacacattgtttctggagtcatgggaacacacagtgcactggttagggacagactctaagtgctgtacctacacatataggagcgtatctggccagtatcgggtgaagatctatggtcaacattgaccctatgctgtgcgtgttacgagtgccctgcgaagggcttacagcttaccgatcggtatagaggagtacagtatacgtgacaacttcaacttgtttatagatcaacgtttgtgttcttgccgttacttgtgacttaatgcattcttgggtcgagtccgcaactatctgtggtatatggtgactcatattacactttactacccctctgtcctagggattatgagccgccaaccggtactggtcgcaccccatcgagtcggaccctttctgtttttaagcttgtatgt

SEQ ID NO: 300175 - DNA, 648 bp, Homo Sapiens
tcttcccagggcaaccttactgaacagccagacctgcgggtgggtggtgagatgcaggaccaccacgagcacccaggcttggacggcagctgttgagtgccatgctaatgctgctcttgcatggcgacaagaatgaactacacaccaccattattaaagggctgctgacgaaatttttaataacgaaacaaaggcatggggttagtctcatacacgaattatctgctatatctgagtggtacaggtactaatgagagttcgtgactctaatatatagataaagtttatatggtaaaagttatgacagcgtgcgtctcagcgcctctcactgctgttcactgtggaatcctctgcatcttgcctgaatatttcataagaagaggtcattagcatgcatatgtagttcggcctttcgtggtgagagttgatactctcaaagactcactgtttgaacaagagtgaacttgcttgtttagaagaggcatctgcgcttacttagtgctatagcaaggtggctgttcctgactggattcttgctagaatgggatgatgttctgctattgcgccctcatgtcgctcccagatattacttcttaacacgccccttagagggctgccacatagggttgggtcaagggggtggaccgg

SEQ ID NO: 300176 - DNA, 674 bp, Homo Sapiens
cccccgggctgcaggattccggaccaggtagtctccagcttttttttctgtttagctcgacctgtgagaggggggtgtaatgtaacatacgtcacagaaccctagccatgatgacagtctaagaagatcagtcacaagctactaaagcctggcagcaaatagagacagctcataacaatacttagggtacatcagtcattctttttcctcttaaaaacagaaattggtgttagtttctcatcataaatgggctttgttcctttgatttatggagaacttccactgatttcaacatctttatacacaaagtagtcatatggcactacatgtgactccatacatgttacatttgacataaaaaaatcatgaaaagcatgctttgaacctgtggtttaagtctaaaaaggaactaatctgaacgatttatcaatcgaatgagctaagtgggcaaactatttctcatgttgaaatgacaaatgtctaactttagcgaagctggttcggaaagaaggaatgactgactcatcttagctttattagcctcggaacccgatttgtatgcataattgccatgagaggagttgtcttattgaaagcaaattgggtgttcatgctgctgagtcttagcaaatcatcttggacgtttaaacggtccatatccccaccagacacac

SEQ ID NO: 300177 - DNA, 680 bp, Homo Sapiens
  misc_feature (276)..(526): n is a, c, g, or t
cttgagagaggcatggggaaggggatttgtggggcaggggcctggagcttggctgtggctttcttcaggtaatttttgtcacgtttcatggaggagggtgattagcgtgtcgacctttaccactgaggctggaaattggcatgccaataccctgtctgtctggagctgactccaggagaattaagagcctccctcctctattcattcatcatgaggagaagaggccaagcggcagggagactggcaggaattctccagttagaaaaggccctctgnnnnnnnnnnnnnnnnnnnnnnnnnnnnnnnnnnnnnnnnnnnnnnnnnnnnnnnnnnnnnnnnnnnnnnnnnnnnnnnnnnnnnnnnnnnnnnnnnnnnnnnnnnnnnnnnnnnnnnnnnnnnnnnnnnnnnnnnnnnnnnnnnnnnnnnnnnnnnnnnnnnnnnnnnnnnnnnnnnnnnnnnnnnnnnnnnnnnnnnnnnnnnnnnnnnnnnnnnnnnnnnnnnnnnnnnnnnnnnnnnnnnnnnnnnncagagtgagatttcatctccatctcttaaccgcctgttcgcttacatctctcttgctaatatttttgtgggggggcccattaccacaccattctttatatagtctggtggatccctctcgccccctttatctatactgtgagccttataaaccg

SEQ ID NO: 300178 - DNA, 624 bp, Homo Sapiens
ctgcttcgatttcactgcgtgtctatgttccactctttaacacatacttttatttctctgcaggctaatccataacctggtctgaccatagtcatattgaaaacaaccactacctatatatttacgtactgcctattacaagtttattgattctatatcttactctcctacatgccttatactgcctacagtatctctgtatacactacttctgtgtctactgttcagcatacattgatggcacatgctttcaccgacactacatctttattgactgaatttcgctggctatactctgcattctcctaccattatgtgtgtacacatacaaacactactacggctagagaactcctagttcgatcttgctttaagttgatgtgacttcactgtatatgcatgactccatctgttgatgcgcggcttattttgtccaaaattgtcacactgctcttttcctgtgacgaacactctcctgtgtgtcagtacccctttctccttatgcgagaaattgttcaatttattcccgttcttatagaccttttatttgaggtcttttcggactcgcacttaatcccttctggacttacctaaatcttcaaatgcgtagatttgcagaccccg

SEQ ID NO: 300179 - DNA, 637 bp, Homo Sapiens
  misc_feature (579)..(579): n is a, c, g, or t
ttttctttcaacttccacgcttaaacctgctcatatatcagcattactttacgaccgacctatactataaaggcgtggagttcatcacattcactcggtatctagccaccatcccatctgcaaagcattgcctatcaactgttgacccgtcagaattggcaaagtcatgctcctctgacacgtacccgatgcttatttacaacacatctctacatttactattacgagatgtagcagtaactgctcatagcactactacatctgaaagctgaacgttctatgttcatgagctgccatccagaaggtttcttgcacacctatatgccaactcagctctaaccctttctgtgacaacatatgtttactataactgaactgcgctttaacacaactgataccatgctctgtaaacactcttcttttatactaccttcttacacccatacatttatgccacgataccctctgcttttcataaaaagtactcttctcctatgcagaatgtacgcaatatttccttgcaggacacgctctttttctcaaattcaaagatctttcgacatacaaattacgccccgnactaggcaacagaaaaattattaatacccctttataaaaaagaccattaatacgcgtt

SEQ ID NO: 300180 - DNA, 520 bp, Homo Sapiens
ctcatgtctactaatgtgataggcactgaatcctcgtaaaaaggatgcacttattggcaacttgatgaacataggcttatcgacttcgtgagcaatgactctacgctcttgacatctgacaagctagcgcgggcatcccattaatccctgtgactaaccatacccgggaaaaaggcactgagctctagctaagacggacgtccccgggtcaccacctgactgcttggaccgaacaaggcattcgcgttgctccaccttcattaaaccctggctgtccaccatgccatggaacctttttcggaaccctaggaattcccgttttggttgaccaccctttggccggatgcccccccaaccaccaggaggccttactttgcccctatttaaaaacttttttactaccatttatttgcaaacggactcctcctttctaaacccacaaatctccattttaattgccaaaccttttggaccaaaacctccttaaggaccctccgaaattaaaggttgttttttgcca

SEQ ID NO: 300181 - DNA, 591 bp, Homo Sapiens
  misc_feature (53)..(53): n is a, c, g, or t
cgattgtagagatggcaggcgaggaggaaatacacgtagctgcatctgccctnattaccatatgcatgagcgccatctatatcccatacattgagaaatgagactgctacatgcactgagattatagatcagcgagtgggcaggcaggcagatagacttgtgtcaaaaccatgtagaggacatgtcattttccagaggaccacgtgaagatgtgctggaagacagcttattaaatgagagtggacactgcagtgttgaggaactttgctatgtggccatacagactgctttacaatcctgcttttaccagtaagcacgtattgttcacaaaacaccctcgaactcactgaggcggttgagtccggtgataacaacgttaggggcattttacccgtctgaacaccatggggaaaactcctctcctactgatagtcggattttacccagaccgagaaccccttgctttggacaccgacccccactcttgaacataccattgaagggaaccgcttgaaccctctggggaaagtttaccctggccaaataactgccaatcatttccaacccgggccaaagaggagggttttgttc

SEQ ID NO: 300182 - DNA, 617 bp, Homo Sapiens
  misc_feature (484)..(542): n is a, c, g, or t
acaccccgcgcggggttgttcttttaattcctgtccactccctctacttaatctgagtatttattaccaattacctttcccttttcccggtttcgctggcagattcccgaaataaaacgttccctggttgccacaaaacatctgataaatcatggatgcccctatcaatcctccttctgcttcccaaagattccttgtgttcttcccaagacttctaatgaggcttttttctacttttttcctaaaacaaatacgccttttagttatatggccccctaggtctcctgcctggccgtcactttcctaacctccctaagaacccactctccccaatcccactccccatttccttttttcaggaggtacaaacccccctcatctcccccttgcccaattcaccagcactcttcaccctgtcacatacgctcctgttttttccaaaatacatcgttctctatattaaccctcctcaactcctaaaaannnnnnnnnnnnnnnnnnnnnnnnnnnnnnnnnnnnnnnnnnnnnnnnnnnnnnnnnnngcccacattcccctcccctcaacgtaacactctgtttcctttccccaaactaccttaggacctcccccattccca

SEQ ID NO: 300183 - DNA, 353 bp, Homo Sapiens
gagaggttaacagcacggcacactaccctctcttcaactgaacttttactggctgatataggtatacttagttgaggctcgggcaattccgattaaaaggtctggtggaaatcatgagataagatgaagcatatatctctttgttgacaagttctggtggacgtacaaagtatgattagtgagaagtttgaagcaagtctggacgattactcagcaggcctcggcagcttcaggtcggttgtggggcaagcaagttcctgccattgtacgaaaaaaaccaaagagattaaacgaactccttgttgaaataatgaagtgctgcatccctggatgacatttttcaatagagatgc

SEQ ID NO: 300184 - DNA, 617 bp, Homo Sapiens
  misc_feature (322)..(322): n is a, c, g, or t
cgtatctgccgctctatcgcggcttctgcttacagtgctgctacatgtaatccaccaatattacattccgtgaatgcctgaacggatgtactgacgcatactgttcactgtttatagtgtgtcctctattctacacagtatactgcttttatgtcgatgactacgtaagcatggactgcatgatctgtaggcaggagtcaagataaacgctcattttctgggagtgcctgtccaaaatgaagccaacaaataccacatctcaatgaacacttgcagaggtacagccggctgtgcactcatggatcgtcgtttacactgatgngagaaactcggctccttgctcttgacatcggattgttcttcggatcgtatgaccgaaacaatgccggatggcaaacaccagataccagagaacggtgctctaaagatgaccgagatgcttggtgttataatggaattcttgcaccccaccccaccctgatgaacctcctggagttgccagaataccaaggaccttggaaaactctggaccgagggatggcgtaatattgcttattggcaaggttcatggagcccagtgacgcattttggtggggggtttccacaccaatgagtgc

SEQ ID NO: 300185 - DNA, 582 bp, Homo Sapiens
  misc_feature (252)..(252): n is a, c, g, or t
  misc_feature (365)..(365): n is a, c, g, or t
  misc_feature (414)..(414): n is a, c, g, or t
  misc_feature (416)..(417): n is a, c, g, or t
  misc_feature (450)..(450): n is a, c, g, or t
ttttgagtacctgccttcatttctagaatcagacctaacaaggtcagtagaagcctgggcagcagcgggcctggaaagacgaggcagccagcatgaactgctgttctctccctgaccacaaggcgtcgtcttcctccaaggtcaagtaattgttcttgttccgcctcacaagaatgtggggaggaaggacgttaacactataaaatgctgcgtcctaccttaaacttgtactgtgagaaagctggaaacttncacctgtacaaggggtctgggttgcattgttagtttcatttgtgggaactgcttgtcaagagtgagcctcaagtcaaggcagttgtgcctatgagaattagctcagctattangcaggtttttaagacacctttttaaaaatgagctcgccgtctggtttgntnnatgtccctgttttttcggaaggggtttaaaaanaaaactggcccaaaagaggcatttcttaaatggtttggtgaaaaggacggccaaacctttaggattaaccctaatttgttggcgacttgttttttggttttagaaaggcacaacctgtttttattttaaaga

SEQ ID NO: 300186 - DNA, 678 bp, Homo Sapiens
  misc_feature (375)..(375): n is a, c, g, or t
aggaattcggcacgaggttagctacagttgtcttgaagactgacctgaagtgatctacacatatcttccttccagagtgctggcgttacagacgatagccagcgtgccgagtctcatacctgagatttttgcttgcaagcttgtatgtaagattataataccacagctgacgacaggtaagggtaacctgaatcacagtaagttaagtctgggatacggcatgactaatgttttgctagcctgctacaggattgcttggaaacgtatgaacctagactggtggaaagctgatacagacatgatctgttagacatctatgccgtgactatactagtatgacacgcatggtaagaacactttgaaaatagaaacatngatactttttgataacgagagctgcactgtaacagcgacttgtagattgctgcgttggatcatccctcgaaggagagtaccaccactgctactgccaatctaaggtatgcttcaaggaacattcgagaagagaactgttgatggaggcaacttcctacaactcactagaatgaaggtggcggggagcttataatatagagacctggatctggcgtgactgtttgttgataaaactccttggaaaagcaccaactttctggggtttgttgaaatggtaatgacacgataaggttttgtcacttg

SEQ ID NO: 300187 - DNA, 578 bp, Homo Sapiens
  misc_feature (355)..(355): n is a, c, g, or t
  misc_feature (378)..(387): n is a, c, g, or t
  misc_feature (512)..(512): n is a, c, g, or t
tgacccccggctggaagattttttgggtttaaggagcaaaaaattaagctttggaccttttaagggtggctaacaagtacttgaagactgggcttaatttaaacggagccagaaagctgccgaatttatcattggtgtggtaatgtgccggggcctggatgatttaaactctttcccttaaaggagggaattggatttgtccaaagccacaaatatggtgcctttactcaacgacccgctggataatgacagcctgcagggattgagtttgagatctaagctaattcttgtttcgaatagatgcaggtcaactttgtttttaaagtaagtttatttatggaaagaagagcttttncaagaaagcatttgaagccaatnnnnnnnnnnacatttatgctttaggctgtgagaatctttaagtgagagactgcctctcatcctagtgaatgaggttgggttgggaggtttatcaatacccgcttttataggggtcaggactgccccaaatggancctgttcctggcacatgcctgtttggcttatgacttttgcccgcccaaggacccggtgggagggaa

SEQ ID NO: 300188 - DNA, 628 bp, Homo Sapiens
  misc_feature (526)..(526): n is a, c, g, or t
gttgaccccactcctattgacttttgccccaccattgattcagacttgtttactattcataaagcatgtgttgcttaatgattgaattatgacatgccgtaaagcgatgcctgatacgggtaaacgtgtatggaacgtaatgcacataatgaagatctccgtgatgggtgacgtaagttacacaaagtaaagtctcggagacggcactatgtatggatggcatgccatctagaaggatagctggaaaggtaataggctggctagtgattgatataattcagtcatgttcttgtagacgataattctgctgctattctacatggagcacgtatagaagtttcagtctgttaatcaaaacaattgtatttaatgctggagagaagtccacggacacagtgccttctatattgcggcgttggaccatccactggccgatagtaacaccactgatatctgggatacacgtgttgtttcccggcttattcggatatgaggaacagtccctgttggggcacttctgacaatnaaactaaaagggctgagccgatcagtctttcctacagtagcccaatcttgatggacagtgtgtttatgagactcctgggagttcccgcagcaggtcaaattc

SEQ ID NO: 300189 - DNA, 617 bp, Homo Sapiens
  misc_feature (97)..(172): n is a, c, g, or t
gtgttgaaccttgaccgtgaggggtctgcacatatttaccttccacaatgcctgtggtactgacgggggccactgtgccgtgcctcaaaactgtgcnnnnnnnnnnnnnnnnnnnnnnnnnnnnnnnnnnnnnnnnnnnnnnnnnnnnnnnnnnnnnnnnnnnnnnnnnnnncgtaagtcgtggatacggcggtacttatgtattggtagccgtctacaggattgactggaaacgtatgaagctagacggtgggtgatataatacagacatgatctgttggaacatctagcctgtgctattctacgaggagacgcatgcgaataacacttttgaaaataagacatatgtatttttatgtaacggaagtaccatgaacagtgacttctagattgctgggttggtcatctcgtggtggagagtaccccactgctatagcgaatatagggttgttcaagagctatcgagatgagactgtgttgttgttacttcttcacttaatgaataggtgggggacactttttctatgggacctttttgcgggactgtgttttatagacccctgaatacccaacccccaggggttttggaaggtaagacaatatggctgttgcccctg

SEQ ID NO: 300190 - DNA, 558 bp, Homo Sapiens
ccttattaggaattgttccatagccgaccggaactggaatccttccatataggcctagttactgatgagaatgacatgtggggcctatattgctacgttgaagcattgtatgatcatagcgaaaaagttcacaacaatgatgaccgactcatagggaagccgtaattgcatgctgttaattgcagaatatggtgagacgtatctagtcgttagatgcacgagggttatgtagtcatctattaaccgatgggaatggcaatctaatacgatgacatctgttcacttttaatgccgagctttctatcagcgcaggggagtacatagtccgatgatttgacatttatctgtgacgatacgagactacaaagttccgtgaaccccggacttggttcggcacttcgtgggaatgtcacttcattgctgaggatccacttctgccgacgagaaattgagatgcaaaactgggtggtggcattactggcactagtggatagagggataccaggattatatcagagctgtcagcgggaagtgatgatacttcgtaggtataaacta

SEQ ID NO: 300191 - DNA, 586 bp, Homo Sapiens
ctaggatgcattagcacaccaggccttttaagagctgggtgcaggacacacgaatttttagattgagacaggtctcatccgtaggaaacgtaggttagagttatacaacatgatgacagtgactgagacgaatacaacaagatcctaatcctgggtccaacataggctgtggtgatgaccctaaacttctttatgtaatagtatagtaaattagcgctgcccatctttacatacacattgcttctgactggcagaactaatttgtataaagaccagtatctgtgtttactggagcgcctacggtctattatttaagcgtacgccgctgtagacatgacagactgacatggcagtgcactatgattataatacctgcagtaataagtttttaaacgtgtacccagtcacaactgaagctgtccatgtatgccagctcacttgttgcattatggtaggagtttaactatggactgaaagatgcttttcttcactttaactaaaaagtctgtcattttacccttgtcccccataagaattggtatacagctcaggctagacaacatatctattaatggtaagattccct

SEQ ID NO: 300192 - DNA, 577 bp, Homo Sapiens
cttagatgtatgtacagaccatgtcttagactgacgggtgggaggatacgccatttcgcagtactatacaatcctcgcccctatgtaatgatccgcctaactctcatcctcatcccattgaccagacacatatcctagcctttccattggctattcctatttggcagttgtctaacaagctgacacttctctactacaaagatacctagttttaatgaagacaatctgtatcttcaacgcgccctacattctcattatcagccactgggctacatcctcattactaccgtggcctagcattctcacactacgatcgcacttacagtcgatagtaatgctgtctgaagactaacactatactccactaattgtgtgatgctacttatacaagtctgatggcctttcatacccaccatataagctactgtgcgactctgtagctagaaccacgtcttcgatacatatcaagcactacttgcaggactaacatatatgcacaatctgtctccctttcatatttcccacacaatgggttcaccacgccccgctttcacattgacccttatttccgattcac

SEQ ID NO: 300193 - DNA, 589 bp, Homo Sapiens
  misc_feature (450)..(450): n is a, c, g, or t
gacagattgattcaatcttttgggcggctgagctgcggacccaggagcagctgctgctggagcagacggcccggtcgcccctgtgtgggacaccttctcggcgacacagatttaggaaacacctgtaccttctgcgaggccttcaggggttccagaaaactacactggtcagacaattgcagcatgactttccacagccctgattatagcacggatgatttcttctctaagaagatcgtgcctatgagatcaatcctgacttactggaagaagctcatgatctggacccaccaagagcaagcgcatgagacagaagccctatgcagtcattgtattttagacccaacacaataatttttcaggcatggaatggacatgagttttctcacgtctgatgtgctgaacattcatggtgtgtaagagaaataatcaccgcatgaaagatcgatntgacacgatgattctctcacagggagcttcatgcaggacaggccgcataatggacagaatctggaccagaataatgcttgactacaaacatgcctgtactggaatcctcacgaagtttcaaaccggaggccccggttga

SEQ ID NO: 300194 - DNA, 630 bp, Homo Sapiens
cattgatgcaggataacatacacactcacagaataaggagatgagatatcttactcgaagccacactgattcccaacttgactattatcacccgatgaggctaacagccacaacacatgatcgcaggcacatacttattattctacacgctacatagctcccttcccctacttatctggctaatctacacttgcaccaccctatgctatactaaacattctactattcactcataaagccacacaactatcaagctcctgcgccatcaaccaaagatgactagctatcacaatagcttttatagaaaagatacctccatacggacataacttatgtctacctagagcccatgtcgtagccagaatcgcatggtcaagagagctagacgcagtactctgtaaactcgacagctatggtattatacgtgtgagacatctagtctacccactgactaatgacactgtctacccatatcttgtactatacctatgacgcataatgatgacaagcatcgtcttgctacgactaacagacctaagaatcgtcattgggtactgctcaataacctcatattccttgaacaaccagcattgtaaccaaaccccctgtagcttaaccgcgcagtaatcc

SEQ ID NO: 300195 - DNA, 593 bp, Homo Sapiens
ccttgatgcaggtcccatcgctgtctcatttgcggggtagctgagaaagcttacttctggttcaaatgccttcatagatcatgtatacgagcctgtataagtcaatgctacttgatattatgcaggggaaacggctatctgtggagccgagacataccctgtgtatctgcctattggctagtctacacgtgacaaaggtattcatgacagcttcaatctggctcatgaactcacagctcagagaccctctgatacagcagatgatggtgtatagaccactatgctaaccagtaatgcaattcggacatcaacatccaccggggctagagtctggcagatgtgcccatgccgacagctagaccagcagctgcactccttacattatgcatctgcagatggcgacactagtctatcggtgttatgtctgtaagcgccatcatgacagacaaatgctccacagatgcgtgaaagcttctttactgtcctactggaccttattcaggccaggctttatcttaacactctgagctaatcagtgtaatcgaatatttgtactacataggcggtacccaattgacttaaggtatgattcg

SEQ ID NO: 300196 - DNA, 589 bp, Homo Sapiens
cctgcacgcaggtcccggcacaggctcatctgcggggtagatcagaatgaccagtactcgtttacggacccttatatgtcatgagacggatgcagcatatgtcaattctacttcagatggtacagttgtatctcacatattcaaacggaacatcaccacctagtcctttgcctttcacgccaacctacatctagacaccattctccataccaagcaataaaatctgcctcatggaaccaaccatactgcctagctctatcgtcgtactacacgactaaggtaatctcgaacgcctaattcaaaagtagtgtccccaggtctgtacatccatcatgactccatgtttaccattgctgaccgaagtgcatcaattcgtagagatagtgcaccagaccgcattttcttacactatagttcctggcatgggctaccccaagattatgcaggtcttgatgtgctgcacaggcacatgaggaccacaaggttaggccaaagcgtctaatcctgaattggcgagtctaaacccgggggatcatgccaatctgtacaacttgcccacgacccgaatactgataacagctaattattg

SEQ ID NO: 300197 - DNA, 589 bp, Homo Sapiens
  misc_feature (416)..(416): n is a, c, g, or t
cttcgatgtctgagacatcatgagctgatcctgcggctggggaatttacttctctacttctatgctcacctatatgtctcttgaacatgagtcgcatatggtgattcctactacatctgctgcatatgaaatgaaagattcggaagttatggctcaactacctgcggtgttgtagatgtcctgtctactcatgaacccaagtctcccttacgactacagtctttggctgactcgaacatcaagctcgcgacaccacatctgaattcaaacagatgatgatatcattgcaactcacttataaatctgatgaatcctggtcaccacatatgacatacgctgctgctttgaagtccaggaagattgtgcacgatattatcagatatgaagcatcgcttttaacacatgactcatgtatnctgtcattgcgcgaaatctagtatacacatcgtctaaaggtcgtttacctgcacatgaagaacaccagcttggcgacagtgcctggagcctgcgggaggtaacagagccggtttacttaattaacctctgaaactaaccccaatctcctctactgtaaatgagtggttaagaa

SEQ ID NO: 300198 - DNA, 628 bp, Homo Sapiens
  misc_feature (578)..(578): n is a, c, g, or t
cattcctgcacgccttaggcacaactaagtggtgggctttattaccctgctttctctctttagctcggcttatatcaggggtgtgtttggtccagaagcacacaatactgagggagatcatccagttgaagatctggtatatgaacattggacagtctcgttgttgcttgcctttgctcagaatcttcaccagtgctcatgtgtcgatcatgtaaaattagttgtggcatgatctaaacatcgaacaacatgtattgctggtgattcagctggatattgggactattgaattcatactgtttatggagacaagtcatgcacatacagaactcttcttcagacctatagggaaatggctaactgctgcgcatatcaagaacctggaggaaatgaatgctctttgtaacatcatagatactgcccatgcctgcccctattggtaaaccagatgtatgtgctgtgtgcactgcatctcatgacaatgagaggcatttttgatagaatcttatctaaattgccatgagacatcttgactttatgccacgcactacttttttcgcttaaatgtttaagctgantctacagaaagtgccaagttgctgataagctgccgcccttgcaaaagttg

SEQ ID NO: 300199 - DNA, 617 bp, Homo Sapiens
  misc_feature (562)..(562): n is a, c, g, or t
ctcttcttcaataacgcataagccctataaaaaagacgtggatcgatatacgtaattccagatcgaaacgatcataattctatatcaaacattatatagcgagcactaactcccgataccttctgcctaaaaattaccttgcagtaattcctcatggagactcatttctacgatacactcgaccactacctctttcttaaaacagctaaaatatcgcacccatctatacctaaatattgcttacagttgatccgtagagtgttaacataccataactgtgataactgatgcccaacatcaatatttatccttattcaatgtccatcctaaacccttagatgagctcttcattgaaatctaaccctcattgaacattttttgcacctatcaataataaattttaggttgttaataacccagcttcctatgtagcctaatttctgggaggattaactaagggctgcagctctacttcctcttccatataaagttccaaacacctaacttattaaaaccaatcaaattaactccaatcgacccccaggttgactactcaacgttngttttattatcaaccattcaccttcaatacggatcgtctcttccgatttttttac

SEQ ID NO: 300200 - DNA, 541 bp, Homo Sapiens
ctaaattatgtcatagagccctacagccacacagtggcaacgctcaagaagtcaccgctgcggcaagcgattaattgaaatctgtcgaagaatcacactctgtcataaacgtatgctctctatgccctggctgttagatgcagcgccaggtgaacaaaaatcgcttcttgaggaacaacataatgcgagaactcattataatgtgtgcgctgaatgttgatcaaaggcatacagatcctgaaaagtctcgaaacagctgatggatcatcctaacagataggtaaggctatgacacctacatgtgaatatgaatgcagactatctgtagggagctatgattaatgaatggaacgaagcgagaaccacagcttttacagactgatgtgttataaaaaataacattactacattcattctaatgaatgaaaagccttagtatttgaaggagagagaagcctctcctttgggggttactttctaaccatttcataaagttgaatcaatacctatttttaacttatatcctccatgggatttgtgt

SEQ ID NO: 300201 - DNA, 649 bp, Homo Sapiens
gctgctagttcctgtgcttaggggggacatattgaggtaggaatatatggactttgggcaggggtcttactgatagctcttagaataactaggggcataggaacaactaacattattttagcatctagtatagcccaagctctaagccacgcaatattacttccattttacacattaggaatctgagacacagaaagacagaaataacttgtttcaccataaggagagtcatatttcaagttacttcactcaaaatcacatatctaccatggtactgtactgcctcaacaaacatttttagtaattacatagatggccaaaaaattgaaattgtgctatgtctactagcagttgtgacagaattcaaaagctaatcagcactggagagtgtttggaggagattacaatgtgagtttgccagatccattttctaatacgtgaaattcatgggtttatatgaaaacactctttgtactgccaaaactcacaccaacagaggttgcttcccctgttgctttgaggggaagtgaaagaaaggaatgcatgaatttttggtcttgccctgaagaaacggagttttattttaacaccaaggatgttaattttaaagtttgccacagttttagcaaattaacttacctttttttat

SEQ ID NO: 300202 - DNA, 639 bp, Homo Sapiens
gcgacatccacgatgctggcaccaagcgaatccgtgtggtcctatggatggacatgctacctgaaacccactgtccagaatatactaaaatcaacgcattccaagagactagtgcagttgtacttgagtataatcgcccaagctgtgcatagaccaagaaggatctggctgatttctttttaaagctatgccgcctgattactgacgtagcgagcaagatctgtatactaatctatacatggcagatttctcgctgcttttccggcgtcttactgaacactcaagctgtcatctccatacagaaaacggtgccctgcatgaacaccgttgggcaatgcctatactgctgacacccgaaggatcacagacacaaatccttgccactgactagtctatgtgccatctagagcttatcaccgtgactggctgattgtgatacagtaaccacacactttcttcttgcttgtgaaggcgctgatatttattccactctgaggccccactgctaagaataaagactcttttgggtcagaagcagcccactcgtacggcaagaattttcaaaattgaaaacgtggattaattgactgccttttctgaaaccaaattcttgttttgtcgccttctgttaaaaacacc

SEQ ID NO: 300203 - DNA, 619 bp, Homo Sapiens
ccaggatatatttatactgccagccttcaaccagctgggtgcaagacaatccaattctaatatagagacaggacttattaatacgaaaatgacgtgagaggtctactccttttggtacttactgttaagaatacaacaagagcatcttcctgcctccaacatagttcgctggagatcatctgaaacttcattctgacattgcacaccactatatgtgctactcatctttacatacacaagtgctcttactctcaacaattattctaataacagaccataatctgtccttacttgctgtactacgggttatccttaaccacttgccataaatctacattacaacctgccatggttttgtatatgatgatgaaacactcgtttctaactttttaagcatggacgccacaaaattccagtgtcttttatttacacaaccataccttgttgaacttattatagggagttgaacctacaactggaaacctactattcttcactttattttaaagtgaaaccttttaaaaaccaatctagacattcaattggttcaacggtaaccttacaaatttttgaccggttcgggcacatcacattttcgttaaacagctccttttaaaac

SEQ ID NO: 300204 - DNA, 628 bp, Homo Sapiens
  misc_feature (50)..(50): n is a, c, g, or t
  misc_feature (111)..(111): n is a, c, g, or t
  misc_feature (114)..(114): n is a, c, g, or t
  misc_feature (380)..(380): n is a, c, g, or t
ggaattaatcacgaccattattatttctcccctacaaaccttcataatgncgtcatcttataaaaaaacacaatctccccctaatttcaatattttctaccttaaatttgntantgcttatacctatatagtccaaagtaataattacaccttccctgaatttaacttctttgaatatatttcagccaacacacttaacatttctcttcaaatcccacaatattttcttctcacctgttgccaacttatcttctctctcaccgtattggaattctcatattctcagatttcttatttgttgtatttaccacccatctgcaataccccctccttcagaaaataataatcctacttaatttaaatcttggataactatattntttaaaaaatctataaaacattattgtattcttcctacaaaaaagtctcttacctaacaaaatttatcccttaatcaataaaaattatttactgctttaactttttaaaaacacattttaacatttgttcattttcccacattcatatcctaaaatttaaacccccatatttatttcttacttctcccacactttttaagttaaaatattctccttttttaaccacccaattttacccaacatttaat

SEQ ID NO: 300205 - DNA, 603 bp, Homo Sapiens
ccaggatacagtctcatgcatacccctgaacccacaggggccattagcagtggggtcttgtacccttacttttatttctaagatttgcccaattttggcgggacatgccacttgcctttcttgcttcaccttatggatacattgatatgatcgtcacaatgtactcactcactgtctagtgaactctctgcagacactgactctccattaaggcatatggagctgtccttatgtcatgctattgtgtactacagctctgattatcagagaacccatagcgtgtccgcatgaagctttagaagcctgtcattcagaattacactagtatcggaatcacaacccctgcattacgtggcactagtagtttaatgatgtcagtgagaaagttaggaactctgctgtctcaataacactgccctgctgatatcgatacgagccatacatgccacggattgttgtcgtttgcaagtcccagcagctgatgatttgtgatcgtatcatgaacagtcgaaatcgaaatcgtttgagcgacctccataaactacagtgagtcatgtgcacaatgtgtgcaagatctgtactttaataacgacaggctggatt

SEQ ID NO: 300206 - DNA, 363 bp, Homo Sapiens
cgacacctttgaaagttttgtagtttgtctacccttcctagctaccccttccctctcctacttcttttcagcttatctgcccccaccagctaggtctccttttgccatcatcttcctggctgccattgcctgaggacttggggcttgggcctcctagatattaccattacttcattccttgcccattccccagtactgagatatctgcagccctacacctactagctacttagcctgatcacacctccagcctgtacgccagtttagaggccttagggcagagctcagctttctcacccttgttctttgaatcctttcataggtatcattgtgtactagttatcagatactatagcgtattgg

SEQ ID NO: 300207 - DNA, 488 bp, Homo Sapiens
ggaaacgtcatgcgaatgtttattaggaataaaaggttataactattatatataagtgggaatgctgtttaatttataaaaaaatgaggttgtcatgaggattcaaacaagacaatgggtgtctgaaaagtgttttgaaaactggaattattcaattagaataaagttatttataacagttgggataattttctggatgaagatatgtgaaaatcaactttacgaagtgattacagtaagtactgggtgagcatttcatatgacctgcaaagagaagaaggaaaccatgtgctttgcaggaggtaaaatgctcagctgactgaaatgctggaaggtcttatggggtcatatgaatgggcaggaaaatagaagatgacctttgatgcaaacaaagccattatgtgtttagggaaaagtagcccaaacaacatagaaaggggttgcctttgacccagagtgtttaaaccagagaagaattttggtcttcg

SEQ ID NO: 300208 - DNA, 598 bp, Homo Sapiens
catagacgcaatttaaactttaattgaacactatcacatggctgcctctcacgcggagtcctaacaggtttctaccatcgtgtattaaatgagcctgtagcagttgatcatatgaagactcctactttagtccgccctctgatgctgaataaccaggatatttcttggaggagggggtgaggcgaggtgcaatagactagtgtgaagggcactgcatctgtcatccgtcctggactcagtgggatttttctcatgatacgatgcctataccaggagctgctgacctcacaagagagcgttggggggatggcggatctctttggtttggtacaagtcaatccacacagggacagaggttcagttggtcggtcgccgttaacaggcatctaacagtctagtatgaagacgacctccctcatatagattgggccatatgctaccatcggatgctgcactcatgctcatcaacttcatcatgactggataacacagttttacccgtattattgccagtgtttacttcaaccaacatgatccaatgcgatcttcagatggggaccccacaatcttatggcccaaaatctcctgaaccggtcta

SEQ ID NO: 300209 - DNA, 600 bp, Homo Sapiens
gtttatgaaataaaaattttatttcagattacggttatttttttataaacctagcactgcaaacatctgtgcatgagaccctcttttatgcactataaaaaggctgccatgaatattacagttgctgtttggcataggagcctatgcctacatacaggctgaaagcttctggagccgttattttggagcaatgccagctgaaagggtgctagcgtaccgttgggtgaaacatgatccattccctcataaaaagctggatcattaaagctctgagaaggaaatgacaacatgttcaagaaaataaacatgcgtgggttaaacggcagcttacttttaatactaatatacatacatgaggtgtcatgaaaggtcaatctttataagtcatcttactagaaggctaaaaactcacttggaactcaatgctccctaactagagacgcaagcattgattagcatatggcactgacgcagcacagagcaacccgaggcaccattctggtcctgggaacccacggagttaaggcacggccgagacaggaaaaacattcaggctgcacaattgtgtgacagctgtgtgccccagggcaccatggcaat

SEQ ID NO: 300210 - DNA, 556 bp, Homo Sapiens
cctcttgttgataatttgtgagcttaaactctgttttttgagacttccctgactgattcttataacaaatgaattctcttctaagcaacattcaagaggctcttgtgggataaaaagcattttttatggaaatcaacggtatttacaatgtcaatagctgatgtatttttgtggatccagtaaattcccagtctctcaaaagaaatcatttggaaatctgtttattccaatagaaaacatttcttttatgttgttcagtttgttcagtttaaaacttttggggaataacttttcctcaaacatttggtgatttgtggggtttgggccatctttaaactggaagattcctaatgctgttcgtggatgaatgtcagttttaagggttgtttgaaagaaagggcagtcaaagaaggtttctgatcgcggggacctgggcttcatttgattttttctaaaaatttgaagtgggaaataaaaggggggtatttgttttttacgcccccatgatgcaatattttaaagggattatttaaaaaagttccatcttgaggcttag

SEQ ID NO: 300211 - DNA, 595 bp, Homo Sapiens
ggcctaagcgcctttactttattaacgagggcgctaaagatggacaacatctttgacgccctgcatggaacacaaacataggtttatggttcggctgggcactgtccagggaccagggacttgtgtaaacgctcttcactcgctttcctaaacaactgtcagaaacgacgaagcctctctctgattactcaagaggaattcgtaaggtgagactttcaaaaacaatgattgccatgcacattgctatctgctactgatagagcaggcaatgggtacttacgcatcctcatgagggcggcttggcacagcagtaccatttgacgtatgaccgttcatgcccggcttcgtggtaatgacggcaccgcgacaacgagttgccataagtattcagaccctcactgacggctcgacgttggtttgtcacatgccttgacacagatcgtaagagagcccttgacacgtgcctttaaaaaagacatagtttagtcttatgagcggggcttttattatggccaagctgaaggcgctctttacttgcttgataacttatagttagcggctgcctttcaccacatgtcatgattggcacatctct

SEQ ID NO: 300212 - DNA, 593 bp, Homo Sapiens
  misc_feature (217)..(303): n is a, c, g, or t
  misc_feature (317)..(433): n is a, c, g, or t
attgaaaaaaaaccctcatcatagagaggtttcatgcgcatccataatgacatctgatatacattccatcggatggccaacggccctgaaggtacgccaaacacccgactgtcattcccgacagaattgccctcatagagaaaaccgacttaagccaggtgcagatgctaacatctgacctcacggccccttgtgtgtccgcagcatacatattacnnnnnnnnnnnnnnnnnnnnnnnnnnnnnnnnnnnnnnnnnnnnnnnnnnnnnnnnnnnnnnnnnnnnnnnnnnnnnnnnnnnnnnngagcctgtaggtgnnnnnnnnnnnnnnnnnnnnnnnnnnnnnnnnnnnnnnnnnnnnnnnnnnnnnnnnnnnnnnnnnnnnnnnnnnnnnnnnnnnnnnnnnnnnnnnnnnnnnnnnnnnnnnnnnnnnnctcagacacgatggtgcattgactgcatgaacactaacgctggcgaagcacttgtccagagagatctgctgcatatgaaactactgctcttgctgctgtttcaagaacaattgcatatttgctgcaatgctcataaattgatttctgtgtagacagagct

SEQ ID NO: 300213 - DNA, 570 bp, Homo Sapiens
  misc_feature (404)..(404): n is a, c, g, or t
gtttaaaaaatataaaggatagaaatgcacacatgaatagtttaaaggaatgtacctgaccacagaggtaatatatacggcttacacaaggcatactttacaccgttacaacttctactaaaaggagggattatcatacgggccttacaagatgtgagcacttaacgataccggggccacagtgaccaaggaagcttctactaaattgttatataagtctgcactcatcgaaagagcacagagcatgggctaagttacatcccaatgccgagggaagccctgagatcccaatgtgacgtgcaaagggataccgaagaataactgtatatcttgaaaatggcaatgctctgtttcccagggaagaagcataggtatactggcctgctgcaagcaagcatactgtntttgcagctaaatatccaaataaacgagttgtgaggatgacatggcatggtgcaaaaagctgggttaaccgcaagatgacagaagtgttcaaaagacatgagaggacatgggaagcatcagcgcaatccacagaataggaaatgctgtgacgcttagtaactaatt

SEQ ID NO: 300214 - DNA, 572 bp, Homo Sapiens
tagaatgagcatgccagtgttgcttggacagtgacggttagagtgacttgctgatccagtgcacatattgggctgttgaaggtcagtttgtgtgactaaaccagcccttgcccatagccgaggttaatgtgtccatgttcctgacacattcttggatctataaaatgaactgcccctcagggtcaatagcgtgtgaggagtttacatccaatccttaagatttggtacacaacagatggtgagctactagcgcttattattttgtgagctgatcttttggttctatgggcgattaacagtttaatctgcgatacaaagatattttctagtgtccaaagagctgatggtggttggactagcctctaaaatataaaggcgatatagaggcgatttgggggaaatttctcggccaactattaccggtgggggacaagcaggtataacaccgcaaaagaacgttgtttttatctacatttatgtgtttgcactaatgcgtttcagaggcgggggtgcaagcttaaccgcattctcggtttcttggttggttccgggggcttaataagaagatttaa

SEQ ID NO: 300215 - DNA, 321 bp, Homo Sapiens
tcccaggggcgtgtgacccccctgggaatccagttcttggcttttttgaaggaaataatttccccttaggatccccccttagttattcctgtgaaaacaggtcctccttagtgggggtgcaggagcaccaatgcgtttattgggagtggaacagggcccttcccgtttgcaagttgatccagaaagccccccacccaaagtgttaaaaggcccttcttccccttcagaaaagtaaaaacccctgcgaaaccatggagacctttttgccccaattaaagcaattggctggccaatggaggagctaaaatattctctggagct

SEQ ID NO: 300216 - DNA, 401 bp, Homo Sapiens
ctttagggccgggagacagcccccaggccaaagttgggccctagctcctggggctgttcccgcattcaaccactggccttttccacccttgctcaccctactgttccccccatcaaaacagttttgccctgtgaaaaaatccacccttcccccccggcaagggggggtcttacccgggattcctcctgttgttgtggccctgggtaaaagcccccccttaaaacacaagacaggcctgcttacaagggtgagtttaccttggcaaaaaccaaaatatttttcctgggcccctggggaattttaggggtgatgggaaaaaaagaacccggagtggaaggaacacagtttccaattaaccacctgccaattaggtgccaataaaatgccgatgattgggcggg

SEQ ID NO: 300217 - DNA, 459 bp, Homo Sapiens
  misc_feature (139)..(194): n is a, c, g, or t
gaaagaggctatctattacggggaggcagagctactcctggttccttcttttaaatgtaatctatgagaaagccatcttcacaacgggaaatggcatcccccactgcaaaacgcacgactgtcattacctgggaatcannnnnnnnnnnnnnnnnnnnnnnnnnnnnnnnnnnnnnnnnnnnnnnnnnnnnnnngcactccagagtcccgggtagcaggggaaagctttaatgtgatatgaaggatttggacaggtaaataagttattgtaaactcattctgccttatggtcagcttccctctgacaacgcaacgagtctttctcagatcctctcaacctaagcttttccagcggccgctgatagagatgcaccgtgaccatatcaaatagccattttcaagctgaaggtggcaaaaatattatttttctcaaggatagaatgttctctttacgactaa

SEQ ID NO: 300218 - DNA, 538 bp, Homo Sapiens
ggagactggaactcttgttgctggaaaagcaagtgggcggagatactaggctggaattacaacgctttgattcccagagttaaagagactcggccctttaaagacaatttgtggccattaacctaccattttggggaaacaatcagttcagtacttatggacaatatcatcctttgtgacagatatacttgcgtaagaaaaaataaatgtatcctttaaaacatgatggacgaatccaattaacacctataacaaagtcatcatatttgtttcagcacagaaggacagctggataataggaaaagaatcgtatgcctgtatgcttttgctcctagaacagcacagtgttttattctgtcaccctactccaataactatgttcagtctgggaagaaataaagctgtttagcctttgtgctggagccggcaagctggagaaaacgagccaaccttatgagagactgatgtccagaaagtggtcctcacaaaccaggggttaaagactcaggctgagaacaatgaacacgagaccccctag

SEQ ID NO: 300219 - DNA, 559 bp, Homo Sapiens
ttatgggaagatttattaatatcctgggaaaatatttattttcaaattctcatttgctgggtatggaattattgtgataaatccttgcctacaacaagtctaaatcttgtttgagagccatgggttaatggtgtcctcaatacactaatgatcggctaatgatacataatttgtaacgttgggggatacaaaccaatccagtatgtatagggttgagggcgaaatcctgggggtgatctagaggctacaaattaataagctgtataggggcacacaacaaatgatgcatctccatgcgagcgagggcttttacaggcacagtcattgtctgggaaaatggtttgatatatggctgaactagaacgttccatgtttgtttatgcagggatttggcttttaatattgtggatcatgaacatcttgggtggaatcagatcctggcacatagtatgacatcggtctgaagatttgggacgaggttttcaattgaaaaggcggcttagtttgaattattgcggcggtttgggggcacgagggggaattatccgttgaatttatt

SEQ ID NO: 300220 - DNA, 254 bp, Homo Sapiens
gactaaaagcaggaaggctggtgtgacaacatagtcgcttgcaaattatatttccaattcagctacacagttggtgctaggcgcgtgcttgtaatcgacttatgaactgcaactggcgtcggttcatcacgcagaacagccacgccgagaagcacgggactagaggcccctgcgcgacgataaagacggagcacgccaagtgcggatacgcggagacagctccgcgacatgggcactaactgagggttcaaagc

SEQ ID NO: 300221 - DNA, 512 bp, Homo Sapiens
atacaaaagggggcatagtttctaaagcccagagctgtagagctgtggcttgagcctggattaaaagcaatcgagatctttacacagtaagagggtctgaggctgacaaacagctaataagaagcaggtgccggagccagccaccttgcatggtcacttggtgagttgactgtataacccgcataaaacgacgttggccaacagggctggataacacgggtgctggggaactccattgaatgacgagcacaaggtggtgttatttccacatttgaagaaccggctctgggcattcattcctcatttaagcgggaagatgaccgaccatttgacatatgtggccaaagaaggggcaaaaggctgtgcagaccagtataaatgtgctcagcgagcctatcaccttggcaaaggtccaccccctggtgaagacaagacttaccggtgtcgctgctggatctggagcttcagaacagtttagaaccacaagagttatggcgggcttggaaaactta

SEQ ID NO: 300222 - DNA, 586 bp, Homo Sapiens
  misc_feature (360)..(360): n is a, c, g, or t
cagcccgacattaattgcaataagttaaaaaaaattgattagaaaaatttactttacattaacacaaacatgctgtttttaacaaaatggtgccaaatcggagtaatggcatctacggatcatgaattattcttatcatattactcttttttttcttaaagcattcaccattgcacacatgccgaacacaggagtattagccattcatatctgaaaagctacaggatttaagaatcatacaaccccaaacataaacaccagtgacactggcggatcaaaacatctgccaattctatagctttacattgaacaactctggatactcagcgtgttgccaaggaaaggaactcctgtcagtgngatgacaaattgtatagcatgcaattgaataagaaggccgtttaccgctaggccactgacgttactttgaggccaaaagccaagcaccggcattttcaaagctttatgatccatggttctgtccctcctttaaaactctcaacattacttgatcggcagaacaatacacaggagacttatggctaaagtcgcttggtgccccagcttactttaacaatcaagaaaa

SEQ ID NO: 300223 - DNA, 464 bp, Homo Sapiens
ggtcataagcaaacagtacacctattggcttagacattatacattaggagcacaggtttgtatggggaggacaacggataggatacttaatatgatctgcaagtgctacccactatttgggaaatagagggtaaaagcgaagttaagcacgtattaaaatgcatcagcggttgaattaaatgcttatggaaagtggaacaaggtgaatatatattatacaagaggcccataccactttttagggatttgctttttttaggcatcccattcttttttcccaatgaacaaagtcaaatgggtactccactacattgcttcttggttgtcgagccccgcgctagaaaagttatggcttccggagctgacgagaagggatctttcaacagggacaccatgacaggcatgaatggtcactttcagttttctgcctctgggaacactatttatccaggagaaaaaaataa

SEQ ID NO: 300224 - DNA, 591 bp, Homo Sapiens
tagttaactatccaacttaataaggtgggattacttcaaaggaaagagtatcgtgcacgctgcgtgtaagggggctaccaagtatgctgaacctttggagcaggcaacatgcaatattctggtgccagcaagaaccaaaccgctgctcaaggggacacactggagtagtttgctgaagggaggtcccggcataccgcatggaaggtggaatatcctcgagggaccaatatacaccagttattaaaacaggcttaacggtgcaatagggtactggcggatgtattaatgttggggcaacacataaccttgggttgaggaacaaacatatctgctgctcacaggcacataagctgaatgcagtgttgttagaccttcattcagatgcttcatttaagcattaaaaagtgcgatcctctgacctaaaatatctttatgtacgccctgcgcatttggagggcaaaaacaaaatgtacccggtatttactggctacagtgttgatcgaaccaatcgtaggaacagccaactggagccggattgctgcaccacggttgaagcagttggtctcggaggggcgccaccgctatcgatcc

SEQ ID NO: 300225 - DNA, 489 bp, Homo Sapiens
ggctgagacttttattagctccactagcgtttttcaatgctttggcctgcagtgtgacgatggtctcggatcacctacgcactaagaaaggtcctaggcgcaccccaaatctcaccacggactcactaactagggcttgtattcatatcaatggtatgggtaagaaggaaaggctgctgcttcactgatacaggacgatccaccttgtccagatgacatgacatagcggagacatgctgcaaaaccaggacggctagaacttgctagtgaagattactataagtgcacttgctcacacgaatgaaggagagcagtgtggactccagccagcctacattcactacacgtgtagacataacagtatctgaaggacatataatctcggactgggcatgacgaacagatcacaaaggccataacggctagcaatgacacaggatgtctactccttaccactcaagctaacgatattgcgaatctgtgccaaca

SEQ ID NO: 300226 - DNA, 425 bp, Homo Sapiens
  misc_feature (139)..(164): n is a, c, g, or t
  misc_feature (281)..(289): n is a, c, g, or t
tagctatgggatgaacaggataacccgtgaccaattccagaagtatggcccaagcggttgatccggccttcatgatgggccgacttcccatccatgttctgaccttactccaaccaatgttctgtttggatgtccttgnnnnnnnnnnnnnnnnnnnnnnnnnngaaccggcccttacttttgtcaaccccttgtggtgcaccgacagttgcattaagccgttttttaagggtttaaaaggacttctgcacttaaaccgcttttttagaccaaaaaacggnnnnnnnnngaaatcttaattggaccttaaaaagggaaggaattaaaaaaatccggggcccaagggaattggaaacactttttaaaaatccggtaaacattttggggttggcgggggttggcaagtacttaaaataaaatcctcc

SEQ ID NO: 300227 - DNA, 585 bp, Homo Sapiens
  misc_feature (11)..(11): n is a, c, g, or t
  misc_feature (36)..(36): n is a, c, g, or t
  misc_feature (61)..(61): n is a, c, g, or t
  misc_feature (176)..(176): n is a, c, g, or t
  misc_feature (482)..(490): n is a, c, g, or t
ggcgattttgnccagcccgctgtgtgttgggatttnttgctttattgaatttagttgtaanggggggacaagttattatgatgaagaataattgaggtttcttttccatacttaataattatttttttagcatatgtcataatataatcctactataaattttattccagaacacntttataacaatataaagtgttttccataattatgtaaataataattaaatggcaagcaaagaagggtattataatggattttttgttatgctactgtattaccaggacctaataattatattttcatttgttaagctttatatgtatttatcactattttttttgtaaagggataatattattgttgatataggcacacacatcagataatccttaagttctgtttttgcctagaactttattttcgttgcttaaattagaattggttgctttctaggacctgatgctggctggatacctatgagnnnnnnnnnggaactttataaatgtgggtattttgaataccatggtttgttttccccacatttggtttggagggatatacttaaacaggtttaagagaaaatgg

SEQ ID NO: 300228 - DNA, 462 bp, Homo Sapiens
ggggaagggatggggtttaactgagcagcccagattgcactgcaagtactgtgctgaagtgacactcccgacattgactaccaaagagctgtgacgacaagtactgtcaccgcgctggcctgattggaatgataacgcgtcacacacgcatattacccggaagaacatggacaaatgctaggctctatggacatttaaacatgacttggctctgatcgacacactgctgggacccctgttgacttccacatggacacagtggcgggtgcatcctagggtctaaaggatacgtatgcagactctgcccctgagggtgatcatggtcacacacatttatactgaaaggccagcctatgctgctgaggacactatgccacagaggaggaccatatgctgacactgaggaccagagttgcccacaggcatggcgaatttggatgaacaatgcgtgatgccacacct

SEQ ID NO: 300229 - DNA, 102 bp, Homo Sapiens
tgcaaccaaaaggagggacaaaattctcccagggttaacccaaaaaccatgggcagcataatggcaggtcctttgtttcaaacccagttccaaagtcccagg

SEQ ID NO: 300230 - DNA, 511 bp, Homo Sapiens
ttaaaattggctggacttgctatgcctggatccattgccacaaaaaacagggcactttacctgatgtgatgacactgactggattttgctcatacctacaacagcctaaaaaccgtaggaagagtcatctaattgacactactttgctttaatcaatgggtgccctttttgctgactgagtgtatgacagtcctgaacaagaagggttctctgataacgctgtagtaacatttcatgacatatggatcatgcgattcttatgagacagatttttacagtacctctaaagcattagggacaactgtctgaaagcatcctgtaactattcttaggcccaattgctgcagcccgatgtacccactcctgttagagcataccacaccgcatatgaggtacattatcttgctacttgtagagaggtataataaccatgcttggcgagatcatggtgcatgctgagtcctagagcgagaattgtataccggtcacacattacacacactatacaagc

SEQ ID NO: 300231 - DNA, 313 bp, Homo Sapiens
  misc_feature (219)..(219): n is a, c, g, or t
  misc_feature (243)..(243): n is a, c, g, or t
  misc_feature (247)..(247): n is a, c, g, or t
gtgactttttgaaagcatgcccattcatctgctcactcaaatccacccagtacagaggagtgtggtgaggcctctgcactgcagggctcaggagaatcagggccttggaaacgccaactttgcctacaccactagcacccctgtgaagcctagagatgcaagccttgtgtttcaatcttcacccgaaagatctgaagggtgcagtgggcattggtcatnctgggctgtctggcattcatcctnccgnctgggctgagcacagtgatccccttgggaagccttaccctcaacatgcattcttcgtgggaggtgc

SEQ ID NO: 300232 - DNA, 572 bp, Homo Sapiens
  misc_feature (145)..(158): n is a, c, g, or t
  misc_feature (265)..(274): n is a, c, g, or t
cgcttattcaccattattgttaacttgttaggtctctttaagctgactcatatttttaactttaacaaacatataaaggaaacttgtattactcacatatatgtaaaattggtattctttgccatatatagatgttagctgtttnnnnnnnnnnnnnnggagttctgggtcacttagtcggtaacttgacatagcagagtgaccccaaaggctcccttcctcttatcttgttgtccccaaaggcattttgttacaattcctaacnnnnnnnnnngaggtgaggggctgcaatgcaattggatcacaggctatgtattgaagctagccaagctgcatgtaccgggatttacctctatcaatccttccacttcccatccccagtgaagtgtatcacctaaaatcatctcccacaccccgagaggtgtgcaatacatagtttgggaaacactgatctgactacctttttcacagagacccacctcgaattcctttccctttgaaaaaacttttctaactaattcagacctcagtgatcccctcaaccacattcataaagggactgtgtctttttc

SEQ ID NO: 300233 - DNA, 467 bp, Homo Sapiens
taacgaatccactgtaaattgattacagattaaaactactcaatgttcgtcagtaatcgcattagcccctagtcatgttagagccgtatggtgagttgcctcgaccagcgtggtaaactggtgattttccggaatacctcccttacgcgtgattggaaagaagcaatgcatcgtgtcagtttaggataggcacgtggctcagtcaccaaatgcagtattttatacaccgtgtgatatgcttagctcttatactttgttgaaggcagctttcatggaatcttccttgaaagacccttggagatcaatgcacggatacctcttgggcttgccacgagaagaccatgatcccgggcctctttggctctatgtcgacaacaggtgatggttgccgtggcccttataagactcagcattttctaatgccagggcatgagactaaggtgccgtatcctctgtggagagttcta

SEQ ID NO: 300234 - DNA, 511 bp, Homo Sapiens
  misc_feature (270)..(300): n is a, c, g, or t
  misc_feature (407)..(456): n is a, c, g, or t
cacacatttattccagtttattatttagttggtaaaatctaacaccgccacaaatcctaacctgtgttgaatgggtcttaccttctgggaacaaaaacctgactcgtatcaactcctctggtcgtaggttgttcggggaaacggagccttaactttttctaagccttctgggtccaccctaatttcggagcctctatttattgaactttggggaaatgttccataaccctccctttgggaattttgggccccaaaccccaccaattggannnnnnnnnnnnnnnnnnnnnnnnnnnnnnnaaaaaccccggggccctccggggggcccaacaaaccaaaatttataaaaagttttttaagggtttggggattttttccccacaaacccctgtgggaaaaccccttcnnnnnnnnnnnnnnnnnnnnnnnnnnnnnnnnnnnnnnnnnnnnnnnnnncccaccaaagaaattatctggttataaaaaagggaaattaatacccaccctcctc

SEQ ID NO: 300235 - DNA, 542 bp, Homo Sapiens
gagcggttgactgttgctagtgccaaaccaaggatgacaaggtcaccaggactgaaaacacgtgaaatagagctgtgtagggttgccaagagtgcaattatatgattgtgagccatacatcgcgggctggagcttaatgattcataacatttggatgtagtggaccacccctgcttctatttgagtatacggcatacgacaaaaaatcgattgtgcgcgtttaggaagaaactactgtagacttagaaagatctggatgtacgacggaacggaaatcattttgttattgctaagtgtaccatctatcagactggttaccacttcatctgactgcaatacaggccataaagaagggcttggatttttggtgtacccagtattcacagaaactgagcagagacatgagggcatgatcccaggtggttccagggactgaattgcttatgtgagacctttgcgagagagaacagagcaagatatggtggtacgatatgctatgagggaaggaatgccttcctggacgtacactggagccagtgtgg

SEQ ID NO: 300236 - DNA, 476 bp, Homo Sapiens
aaatacgctacacggatccactttattaacaaggtttccgggggaaatgaaaataagggctctcaaaacgatcggtcgttgacagcagtttatggtaccgctttttcttttactttcgttcggacattaattttgaaccgtgtttatgaacactgactccggcccctctataagactggaaatacatgtctcgcatgtcggattttaaaccctcaagaccgtattcttgtgtactgttgaaacccaggccctcattcttgccaagagcactgttgccatcccctagatagtaatagatgaaaagggcgcgtgaaagaaaacacggatgggaaaacgttcagctaacctggctaatgctgtcacccccttgagttaagaatcgggcccattgacactggaaccttttgcttgagcagcctcgtaggggcttttccgaaaggcgcccccaacttaatttaagccctccaacataaata

SEQ ID NO: 300237 - DNA, 541 bp, Homo Sapiens
  misc_feature (503)..(503): n is a, c, g, or t
ggatatcagttttcccaggacaatttgtggcataggcgatcctttccctgtttaattatcttggcccttttgtcaaaaaccaatcgactatatatacgcaggtttgttccttggctctccacccagtcccactgatttatatgtctcacgatatccatgccacctttcccctacaaagcgttctctcctcttcagtaccctgtcccacaggtttaaaccttatcagcagccctaatctctaatctctgcctccttaggtcagaggagtcccctcatgctcttttttctctctacctagtgatgtcatagtctagcaattgctcccagatagagagccagggcaaatggggcttaccccaggcattttcttttcctcaaggatcacaatcctggactgtcttgtttcatgcctgaaaacagttgcctcatatgtttcatctagttttatgtttgtttatggcaggaagcctagtccagtgccagttattgcatcttgaccaganatagaagttacagctttggcttctaaccataagttgta

SEQ ID NO: 300238 - DNA, 459 bp, Homo Sapiens
tgggttgacggccaaataaaagcggcacattgaatagagaaattgaaggtttataaacaggaagaaggctttgcgccaacgaagcagacaatctgaacattcagcgtgagatctccatgttccctctgtgaacgtaccggaagggtgaaaagctaaagggcatgcatacgtgttgtgagcagaatgggatgtgatttacaaaactagtggactaaatgccaaatgacttgaaacatacctctggcgtgtacaccattgggcacagctagtgcctgaccgcgcataacagtttgggggatatactgtcgggctcagcatggggacacaccagttaacgttgtcataggatgatatgtgctattagtgctcacactgtagacaaagcggttaccgtaacgccacttcttcactgtaagttcaatcaggttactcttcacgttttccaatggataggtcatc

SEQ ID NO: 300239 - DNA, 593 bp, Homo Sapiens
aaaagacaggcaaatcgtgattgggggaaaaatgtccccagacaaaatgaagggtggatgataaattatgccaggtaaatgaacctgactgcgtccaaagatgcatcaatccatactgcgtggcaacactgaaaatgcttgctcgactattgccaaagacgcagtcttatacctatacctgtgaataaaagcttacaaccctggcaatagctacggcgatacgttgtggattcaaacaaggttgatatcagagcttgtcgtaacccaggcactaagctatcgctaggttattagaagtctcctatgtaccctgttatttgcagctgtgtgtaaacagagctcttgatgtgcatacctaaggaaacattttacgtaaggaaggagtcatggggtgatatttgcatataaaacagtgcttaaagcgctaggcggtggggacctcaaacacattatttaaaggccagtgccttctatctctggatgagactgtcatgactgatggtcttagaacacgaaagacgctcgactctcttagcttatgtaatatgcatactatgctgtatggacgctagaaagtcatctctttcagaaga

SEQ ID NO: 300240 - DNA, 455 bp, Homo Sapiens
aatcaacttaagtgaagtagctaaccttacctaccatattatcgatacataagcagagcgcattgaatgcatgcttcttgagctccgcacagttcaaggcacactatgacttcatgtgggttcaatgtgagcttctctaccactgttgacgcatactgcattcaagatgtactcatatgaacttcaatcatttcattggagcggacaggtgaaaatattgagtatgaccatttacaccacactgggagacaacgtggtaacacctattcatgctctgaccagttgattgttatgtagtgaccgtaccatatgattcaccctcttaacatataccactcattggcagttaatatgctggtgtgagaccataaccacggtttggggagaccgttttaatgaaccataacgaaatactgtacccgttatatgaaaaccgcactcagcattcatctccc

SEQ ID NO: 300241 - DNA, 184 bp, Homo Sapiens
  misc_feature (133)..(133): n is a, c, g, or t
tctagcactgagttatttctttaaaattaatccgaatccctaaactatcctgttggatatctttacattgaataagggaccatttctaacccttggttagctttactatcttgcaggataaaacttaaaccgngttaaatcttgtatcattatcctagttcctaggtgttttccgcaattcacc

SEQ ID NO: 300242 - DNA, 465 bp, Homo Sapiens
ttaggactatttaaaaaccgggaaaatcttaattatctaatactgatacacgaagaaaggattccacccaagaaatcctgccctgaaacaatcatgaatctcggcagaacgcagtgggtacagggtaacctacacacactgatgaacaggcaatgactcctactttgtcacgcgccgtgatacagacgaccccactatctatagggcacggggctatgtccaacgggtcaacgtgaggcttgaacccaaaatgctgcaaaatggcacacaacaaatgaaacagctctcttgcaggcacgccttatccaggacacactcattgtactgaggaaaatggcttgaaacactccctgttctagaactttccattgtcatatcaggaagagtgctagcttcaacggtgctggatcaggaaattcttgttgtcatacaaaacagcgtacagatggtgcactacgactgatc

SEQ ID NO: 300243 - DNA, 182 bp, Homo Sapiens
cttaatcaagtttttccagaagagagtagctttaggaagagaataaacacatacttttaaggtattatctcagactttaggcgcattatgatcatatcagtagcacccatgtactgaataagtgaactcaaagaaaagttatgttgggcaactacctcaaagttttgttatctctgcttgca

SEQ ID NO: 300244 - DNA, 488 bp, Homo Sapiens
taacttgccacacaagcgataacaccatgtccacagagacctgaaactggcaccgatgttgtaaccaccaactatagtgtgtgtgaccaacagcgcggaaaagtctggatcccaggctatgatgaggggagtcgacctaagccaaagtgaaccgtattctcggacactgaagcgttgatcagggctgagccttagaatcaaggtgctttgaagcctgcccccccatgcctggatgccaaacgtatgataggacgcagatatggtgatgctgcagaccagcctgatatgacacattctcccgacacaggggagaatgacgctgtgagctcccagggtccagtagaattcagggtcgagacctgcagctggtctccacatgaggtgttgaaaatggttctgacaacgatcatggaaatcgctcaagcctacgtttggaagactgctaccagtagtgtggtcaacacacctgcttactttggtgactatga

SEQ ID NO: 300245 - DNA, 298 bp, Homo Sapiens
  misc_feature (233)..(241): n is a, c, g, or t
ggggacaagggctttaaaaatgagacttctccacattttaggggctcaacaggcccccatggttagggtttcctttttccaaaagccccaccctccaagcctattgcaatattgaaaaaaaccactatttctctcctcttgagagtgggaacggcagggcccaaaattttccttatttttccaagaaggttttaaaacccgttggagaaaaaacctttattcattttgggggnnnnnnnnnccccttttaaaaaggacagcttaaaatccagaaatttggttaaacatcaataatggc

SEQ ID NO: 300246 - DNA, 249 bp, Homo Sapiens
  misc_feature (135)..(190): n is a, c, g, or t
aaaaaacaattccacggggtgtgggaataatttaattcaaccggggggcagggtttttttcttgggaaaggggcggtgaagggacccaaaataaattaggtgggttccccccttaaggaccccaaggattacacnnnnnnnnnnnnnnnnnnnnnnnnnnnnnnnnnnnnnnnnnnnnnnnnnnnnnnnncggaaggaacttttctaatgtgtattccgcaggcggaaattaatcccccctaaaagaac

SEQ ID NO: 300247 - DNA, 440 bp, Homo Sapiens
  misc_feature (101)..(113): n is a, c, g, or t
agggttaaggccattttcgggctcaacctccccagtggctgaccttaaagcctccccccacaagactgggtggaaggaatcctggccctttggaaggtaannnnnnnnnnnnntttcccccgttttggccaaataggtttgaattacctgcccagggtggcgagcgaccaagtccttcgaagggcttgggttactggttttggacacaaagaacaccccctttcaaagtagtttgtctccagagtgctaaaaaatttatgttagacacatttattttgcgaagcaaaataaaattcaattggaatgggagcttgttttccacatatccaaccgtgcgagggcatagaggcggattcagggggacacatccccttagatatcactacatccccaatttcccactcgggaggctcacgggcagatgatattgagcactctcc

SEQ ID NO: 300248 - DNA, 655 bp, Homo Sapiens
  misc_feature (170)..(210): n is a, c, g, or t
  misc_feature (313)..(313): n is a, c, g, or t
  misc_feature (464)..(573): n is a, c, g, or t
ttgtctgggtaaagccacttttttcaactttgccttttctctatttttccggcttatcaatctgggtgcccaggtggcatgcccgcagaacctaaggcagaaagatggaaagcacaaaggctaacgaggggatttttatgggtagttaaaagctttgagccaacccaacnnnnnnnnnnnnnnnnnnnnnnnnnnnnnnnnnnnnnnnnntatcaagaaagtatattcaagtgagggcttcctttgcggggaaaccaaaatgccacgtttaggccacatttgagggcgaagtttaaataaccaggacccattnttataatggggaaacccccaagggccagaggaagagaaattgcttgtcacaaattttgggaagctttaagtgcaaattggcagccctaaaagtaagagaaagtcaaacagtgactcccaaaaagcttggagaaaaacacacgtggcgattnnnnnnnnnnnnnnnnnnnnnnnnnnnnnnnnnnnnnnnnnnnnnnnnnnnnnnnnnnnnnnnnnnnnnnnnnnnnnnnnnnnnnnnnnnnnnnnnnnnnnnnnnnnnnncacacatattgttcaattgcaggccctatttaacaataaccaaaagacatgggaatcaaccccatatggccattcaggtgac

SEQ ID NO: 300249 - DNA, 525 bp, Homo Sapiens
ttctgaagcttcacctattttgtttacatttacaaaagccgggctcgggggcgggataatacaccaatagcctctctccttgtacacttgatatagggatccacaaatgaaaacccttcacgctggtttaacgaggaatttggggcttatgagagatattttcctaagagcgaaaactcttctaaggaccacaggatcagaactactctatgcgctcacccatgggccccttgagctgttttccagtcccctaagggtgagacccaatgtcctctatccccggcctatatcgaaaaagcgcactggtgtatctgccatatgcggacctggccctgggtcaaaacgggcgaaaaagccttcatgcgttaacccggcttttacccagacccgttctgctagccccataccctctaaaacctttgaattattggacctcgcttgtgcccgcgcaggtcatcttatcctgaacgagtcctataacctgaacttcctttcaccaaggttggaaggagggggccgggtaac

SEQ ID NO: 300250 - DNA, 339 bp, Homo Sapiens
aataatttttaatattaaatattacacgaataaacaagatatatagcattacaagggaatgagtgggaggtgttaaatgagttgtgctaacagagctaaaggagccaacgtggggaaaaactataaaagtccttgtagttgcagagggcacaggcagctttgtggaggaggtgaaacttgagctagatcttggagtgggatttttaaacaagtgagaaaggaggtgaaggcagagggccagatgtttgggaaaaatgaatggactgatttggctaaagtaagggatttggccagagactagagagaggtggctggagagggaattaagggctagttgta

SEQ ID NO: 300251 - DNA, 492 bp, Homo Sapiens
ttttactcttggcacctaagctgggccccaatcgcagaggtctaaggcttctggaaatttcgtgttccgtgtcaaggcgattttatgcactcacctcttagatgtatggggttataatcgcctgccaccaagcccggtttgttattgcttatggactgtggaacgtctcgaattgagaggttaaatcggaccggagctagacttgctttgacggggcctggccgttgctatgaataagaggtgtggttattgacagtccatatgtattagtgatggatggttgccaatatatgaataacaggattgaattgatcttgtgttggcatatggtggaatgatacaagctgacatgtgcatgagagtgcttgagaagatattgtttctaggaaatgcacattatttctgtgtggacgtgttttatttgggatgtaacacaccgggaacagtggcttgtacgtgccaccctggagagatgcaagagcccctgttgct

SEQ ID NO: 300252 - DNA, 470 bp, Homo Sapiens
taagtgcatctgccactgtaaatcatagtcatgactaggacaatatgttgagcccgcctagtgaatgatctaaccaggagggtcttgggaacctccaacaatttcaaaccatgtcttcctccctaatactttcttatttttgtcctcacttaaagccaccttatatctgctctccaaattttatttccacttcgtttttatcttcctttttctttcttctctccatagaaaacaggacctgttagctgtacacttccctgaaactagatccatttacatattcaatctttcactgaactatgaaaactcattgatttattcaataagcatgtaacaggcatttgttacattccaggctctggaaaacaagctcagtaagagagtcttattcagtcacttaaaccttacattcaaacgaggaaaacaaattagtaagaaagcaattattttgttgtggctatatactgcat

SEQ ID NO: 300253 - DNA, 584 bp, Homo Sapiens
tgaatggcccttaaaatatgtttcattcagatgaggaaaggaagagaaaagaaccggattaatccaataaagagaccttaatacaaactcaatcataagactgttggactgtttttattgagttctgacattttttgtgtagactgtgcagcgaaggcacagcattactcattggcaataaatccatttaggtgtgcaggtgatgcccagatgatgtttattctaaggaatcttaatgtcttggcctcttcaaaaactgcacaaataaacttggctcaatattaaccacagttagtgaaccttaggataaagaaatgggattagtcatcccgtgatgcattctgcattcacccgtggcatcatgccaagggtaccccatgctactgtgtattcactccattcttaataacttgaaaaaatggagatgttagctgcctttaagaattatgcattttctatgaggatttaaggttgctgagaaggcaactatgaacaatcaatagctacttaataaacgctgtataaatgtatagtaaggaaatattcatgtctttttataaaagtagacttcaacagagctctag

SEQ ID NO: 300254 - DNA, 506 bp, Homo Sapiens
  misc_feature (112)..(197): n is a, c, g, or t
tttggattaaagccatcctcctacctaagcctcctgagtagctggaaccataggcatgtgccgccatgccaggctaatttaaaactttttttgtaggtacaggggggggatnnnnnnnnnnnnnnnnnnnnnnnnnnnnnnnnnnnnnnnnnnnnnnnnnnnnnnnnnnnnnnnnnnnnnnnnnnnnnnnnnnnnnngtgtgagccattgctcttggcccattttaaccattttaaactatgcacttctttacaaggattaaatataatataaatttgtgttaattagcataataccttaagggcataagggacctaagtgcttcataaatgtacaagtatgcaaatgtgtgtgggtgggggtaaagttttgaggagataccaaaccacttaaaaaatagtgtcaaattgactcctttaaacagaagccaaggggggattagattgatccccggaaatttattggagaaaatgcctgtgaaagattaaattgttgggaacttaaaa

SEQ ID NO: 300255 - DNA, 565 bp, Homo Sapiens
tgagcatgaggccaataagcgccacactttgcgcgaccatatgaaaagctttattccatcccatggtcccagggatgcttgtaggacgaaagcctgataccacgcttgcatcacggccaaggcagcaaacgaagcggatgctgtgacactggatgcacgttagacgcatgacgcttacctggctaccaataacctgaagcctgtcgtggtagaaatctatgggccaaaagatgacacacagactcactattatgctgctgatgcaatgaacaaggatacgggcttgcacatgaaccatcttctaggcacgaagtacatgcacacgggtctaggcaccgtgcactgggtggaacatgcacatacgcttactttactgtgacttaccttaagcacgctaacctcctgagaaagtagagagcaaattgctactcgggcagctgagcccttgtgcggatgggacggacttccccaactgtgtcaactgtgtacagggtgtgggtggttcaaccctcaccaaaaattatggttactaagaagccgtcaggagctggaagatagtgcttga

SEQ ID NO: 300256 - DNA, 563 bp, Homo Sapiens
ttatgaatctcatttgtgaattggataacaacgtatacctttgaaaaaatgtgtacaacatttgaaaacaagccctttaagactgtacttaaccaatgacatcccatgaagcagaactcaggttccatagaatattaggaaaatatggcgacttggagaataagaactgtcttacttgctgggtactctgaagagtccaggatccaacggtctgctactaacgtagccttcttattgagcccagcattttgatggcgcgatcccagattcattctctacggtactaccacaattaaagagagaggttcagaatatgatcttctttattgtttacgacgataaacgatattgcttatgtataaaaaagactactaatgactaacaagcgctttaatgtgagagtaaatgctaccaagaggattgctgttaagggatactgataggatttctgtagatcacatataaagagcctattgataaaattcctacggagacgtgtgatggtgactgtaagctcatgaagcaaggaatgacaccagacagggataatcatggtattctgg

SEQ ID NO: 300257 - DNA, 554 bp, Homo Sapiens
tacaaggaacaccatcagttaactgtggttggagacatgacaataatctgcttgccaagaacacttgaaggaacccttttaccagtacgcttgaaggaacgagactcactggacccgaattacatcttgatgattatgccagatcacattatgtttgtgctacagatgttcatagatctgccctggtgaaagaactggagcctaataaatgttgaacctttgcttgtcacttttcagaaaactaatactctgctggtctgaatcgcctgtaccacaagggcacgctgccaactttcttattgtctagcgaataacacgataggacaaaggcagagatggtacagccaatgccgtagctccattatcgttgaggagagctcatgctctccaagcttgagtgtatgcggcaaatcaagagaatcgacccttgcattcacaaccatgtgcccctattcataaaattttggttcaaaaatctgtagggcaagtgtagctcaattgcaataaaacattttgcacgcagtggaggcttgggccagatcaagaagctcttt

SEQ ID NO: 300258 - DNA, 489 bp, Homo Sapiens
  misc_feature (92)..(101): n is a, c, g, or t
cccagggattcttaaaaccttagttggaaaaaaggaggtaaaaatcccatccacttttcaaatggatccaagggggaaattatatggggttnnnnnnnnnncaagggattgggttaaaaattaaaagcaacttgttaatttttccctttttttaaagggggaaactaaaaaaattaacaaatggggcttagcccatatttttgttctacagcattgttttagattatgggaccaatataaaatgccgggcaaaggcaaattcaaaaaagtttttgattttaaggactttatgactttacccaggctttttttcggagaggtttctattttcaaagggtgggtgcgcattatatctaaaaacctaaaagctgcctgataaacaaactgcatctggtcccttggaaaaaatttaccaaggcaacagcggctgctggggggttctaaaattagccacgcctgtttattcttcatttgggttcgagcaaatgg

SEQ ID NO: 300259 - DNA, 407 bp, Homo Sapiens
ttaccgcgggaaaacagccgggggacattttgcctttagcatccttaaaaacgctctgccatgggaggaccaatttcaaacggttttcaataaccttgaacacgccccagagctatcttccaaatttgacctgtctgggcctaccaacaccagctacgcagggcctatagccctcgactcaccaaatcgggccattataacaggcgggtaaagcccatacttcttccgaaaggttgctagctctccatcattaaagggtttctgtaaaactcgagataaaattgcccccaatcacaacagtggttcctacataacaaccaggggttcttttgcaccaaaaaagaagcgtcagccctctcgggtcggaaacaaacttccgcggtaattccaaatctaacaaagcaccc

SEQ ID NO: 300260 - DNA, 553 bp, Homo Sapiens
aaattttcatgcttagccgggaccattaccgaacagacgactggggataccgatgacgagcacattgacgtgtttagtgtcattttacagggaaacatgcatattcagggtcccatgagacatgacctctaaatgactgccctgcccctaatatttctcccgagaatgactccggggtagggaccccatgtgctttcagtaacaatgtataaccagaacatttttatgactaaggcttacctggagcaagccgtgtaaactagaatggacttttgcaaatagtattcggggactggatagagacgtgtggacttcttgcggttctttgagcgaccaccagggagtgcacagctacctaacatcggaacgggtgcagggcagtacatggcttaagctgctccaggggggctgattttatgcatagtactcagttgtctttacacgttggaatattaccccaggtaacagcatatgccccactcggggccgctgacacacgaggcctatatcttaaaagtggaactggcccttggggtcacttcaagttatggac

SEQ ID NO: 300261 - DNA, 547 bp, Homo Sapiens
attttaggttctgacttgggcaaacaacacaatactcgaatggagcgcctgtccagagcacatgaacatgtcgagtgtgattccacagtgcccatatgcataacagagtcctatccatgcttatattgtaattgacaaggtgacagtgactatgacgatcggaaacggattggaataagaaccacaatgcctattagagacaacatatattaaaaagatttggagaacttatgtataacaggagctaccctaactaaattgaactcacatttgcaaatcatattcgagcactggacattaaataatgaacttcttatgtctctgagaactactaactgatagagcacagttagagaaatgctgtcaggaacatggcctggatcgttagatctagtcatgacgatgagtggatcgaccatacttggtgttttctcgagtgctaacatattacatgggacagcagatccagcaactcagtatgggtgcatagtagcttacaccttggatgataaaataccttgattgaaataagagtgaatcattatgg

SEQ ID NO: 300262 - DNA, 591 bp, Homo Sapiens
cgaaacgtcaggaaactagggttcagcccacccggacgaatggggcgggaccagtcattcacttttatagctcttcacgcacagaaggaagccagagacttttggaacgatggttaaagcatacctgtgatatagaatgccaatgatggcaagggcagtgatatttcccacgccaaggttgagcaagtacactaatccggccaactgtagctataatttactcacacaagcctatgcacttagctctagaggccggcatggaaggactcctgctcacagcagacatgattggcctgaagcaacaggtcggagcacaccagagtcacctgatcaatgacctttgacaacaggtgtggacacccgcagatcatattctatatacttgcactcatgtcggacgttacaggcctgggcctgatccaataacgattggaacgccaaggagagcacagtggtgggcgactcgcggtcccatactcacatgaactaccgcgctaccttgtggagctatagacgtgttacgagcactcttaattcactggctcgtacactgtcaagcgctactgatggtcgtacattcgtgcactagaa

SEQ ID NO: 300263 - DNA, 434 bp, Homo Sapiens
  misc_feature (102)..(103): n is a, c, g, or t
  misc_feature (105)..(105): n is a, c, g, or t
  misc_feature (112)..(112): n is a, c, g, or t
  misc_feature (217)..(244): n is a, c, g, or t
cgctcccccgaagctttttctccggccccagccaggagccacggaggcgcgggttaatccacggggttacgtctcgcctggggggaaaaacctaattttttnncncccgccnccgcgaaccgcgccaacaccaaaggccggcccaaaggcgggcaccacacgaccgcgcccagccccacgcgcaaggcggccacccccgcggcccatcccaacaagnnnnnnnnnnnnnnnnnnnnnnnnnnnnaggcccacgcccccgggcacacacggacgcaacggagccacccgagcccgaaccaagccccggcccggctgcccaccccacaggccggccaaaggacgcccaaaacgccccggggatttcccccggctgtaggccttttggccggtctgcccattggccatttctacctggtattcgcttggccccctcc

SEQ ID NO: 300264 - DNA, 495 bp, Homo Sapiens
  misc_feature (426)..(426): n is a, c, g, or t
agggttttattatgttggccacagtgaaatggttcttttatcggcatttgagccgcccgcctttgactcccaatgtgctgtgacaacgggcctgagctactgtaactggatcaaaccccttcacatagatttctctactacggtgtgtaccatgaaaagattggtgttcctcacggacctaacataaaacgcggcggctaaaaatttaaactaccaccaccttttatttgcagctctagacatgaacatgagattgcgaaaacatatgtggctttatgaaggtaaaaatgtttaatacaagtgacctgtcaaggtaaaagtgaatactgatgaataacttataatagcactctgcatcacatggtgtatgggatccaacattatatactactgtgtggggtcagaatccatgactgaatctcttcnacaaaattggacgggaaggcaaagcgtgattgtgatacctccaatatagggttcaaatactgatggatt

SEQ ID NO: 300265 - DNA, 668 bp, Homo Sapiens
  misc_feature (458)..(466): n is a, c, g, or t
cgtgttttattgatctgtgctttaagggggggaagataggtacttacgaaacacagattaatggtgcggtatcctccgaggcaattgttatccaataatagctattgaattccagagaacagtgagcatactatgaggagcctctattcgcgatgagttcataaaatatcacgaaggcctagtttgtgacctaggtaacatacattattgacaataaatttctttgacctgatgacctagggctttgaggtcaaggacgggggttcattaccaagattatattctcgttactaatacagaaatttacacacatggattatccttcagctgtcaggaaatgcgcgctttctgttctggtggaggggaacgatactccctttcaggtggtcaaagggaagagcccttgcataaggagcggtgcacgattcctaggggtattaaaaaagggtcacccaaannnnnnnnnaaggcgttaacatgtgggcggggaagcaagctgaactgtgctcataaggcggtttaacaggcccgctggagcaataagccttttttgccttggggaaggaggcgtgggtcttggggggtgcgggggacttgcgggtaaaggccggcccttctcagaaacattggaaaccttttcttttgggggcgagttgtttaatttttgt

SEQ ID NO: 300266 - DNA, 672 bp, Homo Sapiens
  misc_feature (465)..(465): n is a, c, g, or t
gacaaagactgaattataaatgctacgtggcacatcaaggatgaagtacaggtatcttataagacttgggcaatagccatcatggacatgataaaagctcataatcgcccagagttgtgcgaagacaacctgcgttcgagggctacccagagccaagctaactaccagacgttaccagacttggcgctgggttttcccacgacaggcatcaaacgtgtttgcggagatgagggcctaataaatcccagacaacaacgattatgcggcgcctgcaagattcagtttgtacataatgccatcgcgtgctgttgggccatataatgactcacgaagaggggatctttacacgaagcagcttctatatgcgagtctggaagtccaacatgcacttgcagttggaggcagcggtgcctggacagcttgatcaagaatatgacacaggtctttctacgcactaagttctgnagaggcgggagtggtgtgttactaccttccaggacatttgaggagttgttgaaaactgagtcctggtagtgaacggcgaagataatcagagattcttattcttgcacgcccggggcagagtaattgctatggccatggcgaaacacaagcgtgccgaagactgccagaaactaaaagggatcatgcgcgtcttcctggccatttacg

SEQ ID NO: 300267 - DNA, 667 bp, Homo Sapiens
  misc_feature (534)..(534): n is a, c, g, or t
actgaagaatatgtattgaataaaaataatattataatctatcctgaactgaataaaaagtacagcacagtatttttagttatttacaaaactgcgtacagtgtaacttgcgcattgagatcaccattctataaatatggccacataccaagatgtgaacatattcctgacttatataacaaaaggctcacgttggctgccacaaactttgaatgaaaattcacgggaacattgctttgggaacatgaacaaaatgcaccacattccatgaaaaaacgatttaataaaatacctcaaacagcacttttctacttgtttaggagtacactcttgccaaagtagcacaaacaattcatagcatgctttgaaatgcggacacaatgtgaaatgaaggccgctactttgatgatatcacttacctttaccttacttagctagagagcatttctttccatgatagaaaggatgggtgatagaaaatgacctatcctaatacatccaattgttttaagattctgctaaaacacaaaagcntgtgaatttgtaacctgacacactttattaacactgggcagaagaggcattgtacaaaggtattccctgggtaaagggactatctagaatgtcttaagattaagcacaaaatcagcttcaaatagatttaagg

SEQ ID NO: 300268 - DNA, 588 bp, Homo Sapiens
  misc_feature (522)..(522): n is a, c, g, or t
gtacagagcccctgactggagctaaaagtttaacagcgttgctacgagctatcaactgcgccttggcaaggagcgcttttgttcggaagcctgtccatccaggagttatcggatagccagatgcatgaactaatctctacaggattacacttctttatattaacgcatcccccattactacaagcatgacaatgccttcttagacacccatgattggtatgcttctagaatccaaaggcggataatgccaagcaagaacaacagaggcactgccggatcacttcaccagacaattcttcagataaacatggtacaactctggatactgcaaggagctgccacagggaggagcgcctgcctttgtgttctcagacggactaggaagcactctgactacagaggccgataatgcctacgccactgacgtcagtctgaagacgatgcccaagcaccggaatgagtaacgctccatggacacgttagtggaccgttcgtattcttggtccggagacatactctgcncacccatgcacagatactttgaggctgaactcgatgtgtgccctcgcttgttttcaaaaagggcaa

SEQ ID NO: 300269 - DNA, 591 bp, Homo Sapiens
attacagatcaatattatagtactgaatatgaaaaaacttcccagcttgagggtacaacaaataataaggcattgcaaactctagaatcatgattttcatgtgagcttaatgcagaattacggccattaaacataaacacttgcattacatttcttcgtgattagaacaataaaatattcgactgttaccagttctcctttaacaatatattgttaagtgctcatattggaaccatattgctgatgctgccgtatataccctcaaaaccaaaacacaacacatactgtataaaatttataagcaaacaatgagttgtgacattgatattcaactgaaggtgttaacggatttttacctttgcagacacccaaaagaaaaagaaaatacatatttgtgtgactgttcctgacttaaatgacggatacagggataaacacggaaggaagccttgccaagttaatcactgccaattgccaatgatgactgctaacaacaaacagatgtgtttttcttttaaaggaaaccatagagcagatcttgagacacatatattgctagttctgcacaggataattacaagcagaagacaa

SEQ ID NO: 300270 - DNA, 475 bp, Homo Sapiens
gttacatatacgcggtgaacggatttcatgtaaaaactaccgctgggatgtcactcttcgcacaagcccgtaaatcgttcaagccctatggcgagccgccttgcccagctgacttaactggttattttcccggactcccaccgtgcagggtgttagaaaaaaacgaggctgggtcttaaagaaagacaaacacagggcccaaaacccgaaggcaggctctcatggcacagatgctttagattagctctactacttcgttgctgaaagctatgatggcatctacctaggaagtccctgaccgctcaatccaagcattccactggaatctctgccgcgatgtccaacatcccgggccggtcagtaacagtgttcccacagttgctagtgtgtcgtgctcatagatgaacgacacctactcatgccatggcgtgtgctgaaagagcctaacctgccatgcagcatatgcccagtgccg

SEQ ID NO: 300271 - DNA, 476 bp, Homo Sapiens
tttaagagcgtgggtcgttttgattacatggtcaacgcacctttcataagcttctcttgcaggaataacctccatcccgcaagctcataggaaattactataaaccacacaggattcttgaacgtactgggggtttccaagagggaatgagtccgaccccaaggtgtcccggtcgctaacaaaaacaaactaaagggcctaaaactggacgcgagcccatatgcccaacagggggcacagaaatgataaagaaccgttcctaacatccatggcaacttcaacacacgaggatactgacccttacatattagcgattttagggaaaacttccacccttttaagaaagaagaacaagcttaatagctggatttcacagtgatcgaaatatttgttactatcagtattatgagacaataccttgggctgttggatgcctaaagagactacctgcgtgtcatatatccgatcagaaccaa

SEQ ID NO: 300272 - DNA, 480 bp, Homo Sapiens
atttgaacgtagacggtgtatatttccttcacaacacaccgctgataagacgtggtggtgggaagtacttttgtacccatacctcatgaggtgatagaggaaaccggccgggatcttctaatgacctggggttggttaaagcggtcttagatttggcgccaaatgcacagcggacaaaagaagcaaaagctgttgggcgcgacatgaaacgggaaatctgttgtgcagcaagggacacaatgattaggagcgaagggcgcgatacatgttgggcaacacgcctttacgaggaaactccttaggcattcttcccacaggatagcaagacctcgccacctgtccgcacggagaagggattgtaacagctagactgaaaagtgggtaaaagatctgaagctttctttctcgagggaatgatcccattcggctcagaacctttgaaaagggcgcccagcccttcaactccccaaggagaacccc

SEQ ID NO: 300273 - DNA, 384 bp, Homo Sapiens
  misc_feature (146)..(176): n is a, c, g, or t
  misc_feature (199)..(254): n is a, c, g, or t
tccggggttatccctgtttttggggcaaacccctatacccccctttgagggtttggaaacctttgcccgcatctaaactcctgggggaaatgtttatttgtccaaggagggggaaggggccccaattcccaaagggtctttccccnnnnnnnnnnnnnnnnnnnnnnnnnnnnnnncccccaggttttccccttggaannnnnnnnnnnnnnnnnnnnnnnnnnnnnnnnnnnnnnnnnnnnnnnnnnnnnnnnggggtttcccctttatgcttcggggttgttttttggggggaattgtgagggggaaacatttttccccgggaaacagttttgcccatgttttccccaaggccgaaattacccccccctaaaggggacaaaa

SEQ ID NO: 300274 - DNA, 215 bp, Homo Sapiens
cttcattttcatttattcatacaaaattagtgatatgattacccccgctgttgttccacgaagggagatgttcaccaatgtgtaatgaaaatatgaagctcatttacttgttatacgtgtaatctaatccagattgaaaactgttctatggagattgacaaatattggttgtgataaattattacatagacatattcccactaatgcactaacag

SEQ ID NO: 300275 - DNA, 485 bp, Homo Sapiens
ggtatatttgaccaaacagggctttagtttaccccttttgacaccctgtgacttagactgacgtgacaccacgcgagtgctttccgttagcctcatgatgttcggactagtacagacgcatacctacaacggaggagaaccagtggatatccatcagttggctgccatcaaccgcaaagggccatttggactctaactaaggaccgcgtgaaaccgtgtgatacttctgggcaagtgcgtgactcaatgacagcgagccacggggcctattgctctcattgatcacggacgtactattgagaaggcctcgccttatggctagtagacatatgggtaaggacatgctacccttaaaatgtcagggtgcataaaagctggaattccatgggccatacgcagatgaagggaactcgaggacccgtcgattccttggataaattaggtatgggaaactgtgggaacttatccatcttccagaaagatgc

SEQ ID NO: 300276 - DNA, 465 bp, Homo Sapiens
aagaagtagctactgataagagagcctgcgcccttggcttataattacatacatacagattgagccaatattttgcggggagtactgaggagtacactacttcttggaacctagagtactaactgatgcagtgctatagatgtgaagcaaggtgagcagtatatgatagagtctagatttcagcccagagtgggtactacgatgccccatctcatcatgtggggcaccttgtgcgagaccttgaggatagacgatgtccacgactacacacataatcagtgagagtggcctgggctcaaacaaagcttctgttaggatgtacagatcagtgctatgatataagcctgcataattgctcatgatatcacacacggaggtaaacatttaggtgagtttgacaattgccgcatgctgcatggtattcgcttgctaccctcaagcggatgcaagtgctgacatcgatac

SEQ ID NO: 300277 - DNA, 466 bp, Homo Sapiens
tttccatcacttgtgaaggtcaagagttcatgagctttatgtgcaccattgattcgttaggaaacacgttccaaggagatctcctgtcaggcgatcttacaactgcaatgtcctgtgcatccgacgttagatattctacctcggggcctctctatgtcgcctacttgacctccaccggccggtacgtgcgttgagacccataatgagtcacacttttctcaggatacagcctcccttgacatagtctcatccacagtatgggtgcagaattgtataaggcaactccatggtttcattacccaatgtaaactgtttatagacatatgcccagtctagctcgattcattctctctttattccgggctgtcagctgcccagatctcattttagacatgttctagacatgatatgattctatcgatagacactagatattatcatgatgccacacagggaatcttcattt

SEQ ID NO: 300278 - DNA, 468 bp, Homo Sapiens
ttagaaatggtttctttttataagagacccaaaagaatgggcttataattacactcccacaaagtggtccatgcatttaggtgtggcatgcaaggattacagcattacttatacattatattgataacaggattaatgctactgttccagagctgggagaagtgcataatatattgtccagctgagcccttagagggtgtacgtcacggccgacatcttgtcttgtagacctctgaggtgggagacttgatgaatatacggttctatgccttacaccactgtgtgaaagactcacaaggcctcaaacaacaggtggtttcagacacacacctgtgcgctatcgctaatatgtccatagtctctcaggataccaacacagcttgtactggggacagggaggtgcaccatggtggactgctgcaggggtttcaagggtctccctctacagagacaagttgtgcaaagttc

SEQ ID NO: 300279 - DNA, 350 bp, Homo Sapiens
tgagccaccgctcctggccaaaatcacattttctttatctgttcactgcaggacatttaggttgtttccatatgttgactatcgtgtaaaatgctgcagtgaacatgggaatgcagagagctctttacaatcctgtaggactgcttgatcatatgttccattctgaattttgggggaaccttcctactttttccataatggttgtataaagttatattcctaacaacagtgaacaagggttttactttcttcacatctttgcccgacattgctatcttttatcttttttacaatagtcacccctaaaggtatgaagtgatatcttaatatgcttttgacctgcatttacc

SEQ ID NO: 300280 - DNA, 513 bp, Homo Sapiens
aaaaagaggccaaaggattgaggaaaattatgtttattagacgggccgttccctttgcaccacccaaaaggaagcccatttgaataagcttttgattttcatttcatatctattaatctcatggcaggctgttatgcctttcaatgtgacgatataagcctgcaggagtttgtattgcaacaacaaatttttttccctgcgccgcaaatgaggtctccttattgctaggcttgggtcacttttctacttcagctgtggatagcttcataacagctttcagttgcttttaatgtgcctatggcttcgggttttcgagcaaaacaagtgcaccttggtataatgaaaggaacttctttttacaaagggggggaatatttcctgggagggggacggtttcccaagaaaaccgaattgcaccgatattggattctttacaaagtggacagaatgttttgttgattccacaaggtttttgttaaaattggggcaaagaaaatacctggggttttaaac

SEQ ID NO: 300281 - DNA, 469 bp, Homo Sapiens
attggaataaaatttgttttatggctaaagatctatgacccctgccttgcgagggcgaatgtgataggggtgtgagggtaatctgacactggttgttgcagctcttaagaaaacaaaacaagggggcatggacacattgaccgtgcggactgcagcacgggtatcataattttcagctgctagggagctgctgacaggctggtcccctgtggccagaggtcacagactgttcggcccacaggcacgcagaggccctggatacctattgcacagtctgtgcagcatgctgcacacgggctactccactctcatgctgctcaaagaagggggtgaggaccagcacctacttgtgcgtcacgtcatcgaaccacgactgacaggcactcgattctcaagacggactatgtatgaggcagtcgaatagacaacactgatcactctgctcaggtacacggctatgcgacacagg

SEQ ID NO: 300282 - DNA, 182 bp, Homo Sapiens
atagacagggaaaaacatcttaagatgggagagatcaaatacctggcctattttaagaagagcttttttcttgagagtccaggacccgatgaaaaggaagctcctcggctaaaatccgcttataaaaacccgtacattattagagtatggcctattggagggatctaaagttcctatgattc

SEQ ID NO: 300283 - DNA, 461 bp, Homo Sapiens
ggctggagtgcaatgcccccagatcggacccctttattcgggggcagatttgtcaggcaatttttattgtctttttctaaggaaatgctcgctgaacagggaagcacctcggtgcctccctaagcgttgctgtttccaaggcagagcttgaaaaataccgggcttgacaggttgaccccttgcgggggaaactgccagccccatattttcgggggtatttccaatcttggcgcaacccaaattttagacaggcttggccagaaactttttaagaaaattgacagtcagttcaaagctaattttttttataccgaaaagtgctcactttttgagaaagggttttgcctcgcgtagccaagaactgactcataatttagctcagcgtcaggacacctttatagaagaacagcggggtttatgaatcaagcccagaattttgtataggtcggtcaacccaaagc

SEQ ID NO: 300284 - DNA, 281 bp, Homo Sapiens
gatcacttttcttttccattgttgcacaattttacatgtatgaatattctgtagtataaacaatcctccttttgatggacatgcatttatttttccagtgtttcatttaacaaacaaaatctgaatgattattcccgattgtactgctttgcacacatggtctaatatatttcaaggattaataagtaaacactattttattcacagtaaatggttcactcatgtttacactgtctcctatttatggcaaatgataatggtccatccgctatgggggtaat

SEQ ID NO: 300285 - DNA, 216 bp, Homo Sapiens
atgaaccactgtacccgaactgcacttgccttttatacatgcaagaaatgtgaaggggacagtccccaaaaacccactttgaggatatgttctgaaattagtatctactgaacttcagtctcctaagttgtatatattctgtccaacagtgcaactcgaactggactctgcagaccagccctagtcccagaataagcacagaaactgagagtagac

SEQ ID NO: 300286 - DNA, 256 bp, Homo Sapiens
acattcgttagctctaggtgaacgcccccgtatttgtttgaaacggtactaagagtgctactcgcctaggacaatgtagtcaaggtgacaggggctcacataaatagagagacgccgcttttttttactttgaacatgctggaagaatgacggcgtatacacagtatacgtcgtcagcgatcgttatgcaaagtttatcttacatagctctgagaacacgctgcgttgtgtaaagtgtatgagctgtgctgtactt

SEQ ID NO: 300287 - DNA, 437 bp, Homo Sapiens
ttgtgtgtatagaaataggggtctcgctgggttgcaaaggcctatctcaaactcccggcctcaagcaatcctgctgccttggccttccaaatatttgggactacagactacaggcgtgagccaccacacccggcgaattttttgtgttttgtagacacaagagtcacacagtatgttgcccaggcctatctcaaactcccggcctcaagcgatccttctgtcttgatctcccaaagtgctaggattataagatgagccaccgtgcccggccctagtaaacttcttactcaacaaataagtatgaagtcactcaggtgtatttccttgagtcctttttacccaatggggtcctggctgtgagggattctgggacaaacctggcttaaaccacacctaaacagatgtaatgtgaaatccctgacctggaaattccagaa

SEQ ID NO: 300288 - DNA, 577 bp, Homo Sapiens
agtaaaaatctttttattgtgggaaatcttttctttatttttatttaaaacattttatatggtaagaaaaagagggttttgggggtatatatatatgggcgccaagagatgtcctgatctaggcatgcgacgcgtaataatcacatcatgtaatatggggagaacatcccgtgaagcatttatttgcgttgcaatcaattcattatcctcttttacccatattggaacatacaaataaattgctgttgcaaatagactccctgaagtgctgtggactaccaggccttattcattcttttcaaaaaaccccaacgggtaataagttccattgttcatgagcaagatgagcaggtttgttacataggtaaacatgtaccatgttgctttgctggacagaacatctcatcaccctggtatgaagaccagcaaacaccagctatgtttactgatgctgtcactgggccgacccctgttctgaaagagcctagtgtgtgttgatacccaaaaagagacatgtgctctcacattaagaatccagacaactttcaacatagacacacgtggagtgtaaaagttt

SEQ ID NO: 300289 - DNA, 122 bp, Homo Sapiens
  misc_feature (51)..(59): n is a, c, g, or t
ccgctcataaaatatgggttccccccggctccaagaatttgggcccggagnnnnnnnnngaaaggaggaagttttccccgggtggttaaatggggaaagagaaccccggggtggcccctcct

SEQ ID NO: 300290 - DNA, 674 bp, Homo Sapiens
  misc_feature (467)..(476): n is a, c, g, or t
tgtgatttattcatttaatcccagctaaagggcagaggcgccatctccggtgactgaaagggctgcttgccgggttcatgccatgctcctgccgcaggcactatgagtagatgggactacaggtacccgccaccacaatagtctaattttttatatgcctaggagagatggggacttaccgggttcaccacaatgataaatgactcctgagctcatgttgcgtccgtctcagacaatgaaagagtagggattacgaggcgtaacccatgatgcccgggcactacagggataactttgaggctaccgcgtactatattgtgtgtggcaggtaatattcactcaccgactggagtgcggagggtatgtaaatgatcactgacatgttcaattgcgagactgaagccgtcctgcttcctaatattctggctatctgctaccattgggcgctgccctcatggccatgaaannnnnnnnnngttgtagacacaggggctacctatgtgggccggctttaataaaacctcccgggtcaaggattcttctgctaaagattaaaaaagtccgtggggggaacaaccggggcgggtaaccaagaaatcttttttgggcgggacccaaaaaagaaacccagcttaagttgcctttatgaggggtaacattaaaaagaggtatct

SEQ ID NO: 300291 - DNA, 679 bp, Homo Sapiens
caagttattactatttaatattacacattctgatcaatgcactctctaagcctgtacctcactggattttgagacattacattctggtttgctattcctggaaagccgattggtgcatgtcctataccttacatgaagtgggtacataatgcaaggggctgtgagcgttatatagtgaacttgggactttgttccgacagtgcatgctgtggggggacttactgattcatgattgtcagtggtggagccatatggcgcagacactgcatgaatgatctggtgaccctcgaataaaatatcatgatattaaaattttgcctgaggctcagatctgatccaaatgacctaatctggagaacggaagaaaacactagctgttgtagctttcaatgcgcaagccttagaatcctattcttcctaaatttcagaactctcgagatattgtcattgccatgaggtgcacaacacttaatactgggcagttggtggcattgaggattttagttagagctccaatgagaacgtctaaactgaagcttctacggaatgatcctaagaatgcactggaggcatcctcacgctgatttgagtcctaagcaatttgggggggctggttcttaaccgatatgggaaacgcaaatctggcccggaacgtaaattccgtactcactttggaatg

SEQ ID NO: 300292 - DNA, 151 bp, Homo Sapiens
ccagtgtttaaaataaatcaactgtggttaagacatgggggtcctagcacacagcaaaccaaccatgttctgtaatcacaggtgattgaggtagcctgcaatttgtaaggggtactcgggatttctaagttgaaccacttgtcaagaatgg

SEQ ID NO: 300293 - DNA, 481 bp, Homo Sapiens
cttagatttagatctcctgagcttttttccttaactttgctttttatccttactggcttcccagtgtttagaagatgaaagtaaagaattattaaacataggaaggagccacttcctaaggctattccaaagatagcaaaataaatctcacactcaaaaagcagagagagagataaaggtggcagggggtggtggtgggggaagaactgaagtaataaactgaagaacagtaaaacaatcagtgcaaactattcctgtgtcactcctcacaagatagtctttgcaatcttctcaatgcaaagatgacaacctacacgaaagacgccaggggagcagctttaatgtactgcatttgtaagacacctggctatgagtttgactcttgatctttccaacaatttagactcacaacacaaagagaagccatcaaagagtagagtgtaaaaaactacaggcactatggcaaacactttgggggaag

SEQ ID NO: 300294 - DNA, 492 bp, Homo Sapiens
gtttctatttttttgtaacaccctgaaaactttaattcggcacaccggaatgggggaaccacgtttgcaaactgcctgggtgaggcgcctcttacgaacccaaaggggagccttgatgaaaagggccataaagctctccagatgaagcagaaagcctggaaagatgacccaaaacgcgcgttaagccttttgaagccgggggctacaaaaaatggtgggcctgacatgccactggaaaaggtgaacgccgacttgcaccattagggcgcttgggggcgggtacaagcgatacccacaaaaactgtaataaggcggccaaaagattactcggttgcggttacatggccacacactatggcgagctcatgcgataccaatggcctgagctagaaaagcagatgtgtcaatgcgtgggacctccatgtgatagattagggcgaagcgggttcaccttcaggggcatgaacattaggggcaaagggccttgctctg

SEQ ID NO: 300295 - DNA, 677 bp, Homo Sapiens
atctacacagggctttgctatttaggtacagaaagcacaatttttattgaaagtaggttcctcaaaataacattctgtttcaaactctccggtcttccttaactcctataatggactccaaagcattctctattgaaaggaatcttccttgcttggagggagaaactgcctagtggaattctgcagctcattttcaagttgaacagccttatttcttaagagctaagaatcgccctggattgtgtccgactgaactacccccttgggtaatctaacaaaaacgtcttccagctgtgtttcaaaactctctacttgatggcgcatgcgagcaaaagaggttgctattcgtagaaccacttggtgaccgcagctttggctcatggagctaacaatcgggcctagcccttcagttgcacaaattacaaactgctaggctaaagctagaatctttgcaattgcccgtcccggctcagggtttgggaaagatccaaggttccttcatttggccccgaaacactgcgggggttcaggctcttggaaaccaaacactccccacaacaaaacgttggccacttaaggtgtgggaccccccgaacgccaatctgtgtcttatgtaaacatcgggtttttcccggaacccatatatagggtttttgggtggggaaagaactcatggc

SEQ ID NO: 300296 - DNA, 481 bp, Homo Sapiens
aataatgtcatttctctagacatacaacgcatataatcttccatgtgtggaacccttcagtatctccgggcatccaatagtttccatactttgtatttattatgctcaccatcattaaaccatgggctaatgcatgcgccccatatacatggatatatcttgctactccagagatacttgtgaaaatgctccgcacatatcattgtggcatcacctattattcatcagcttcgacacttttgatttcagatgtgtataccatctttgattcggctagttagcgcatgtataacatgttctttccctccatgccttgccgataccctataggaagttttacatatctgccctgatatgtagacgagtatgaacatcgttgctgtgcttgtgatactgaaatacctgtgacttttgctgatgatcctctgtgtttatactgataccctgtgccgtatttgtacactgccagacttctgagctg

SEQ ID NO: 300297 - DNA, 483 bp, Homo Sapiens
caatatttatcttttttaggggggcggttatttccagccgacccttccatggcgatgattgcacactgagagccacaaatctgcattagcatcaccaggcggggcaacccgccatttgtcgctgcatgctgtgcagatcaacaataaatgcctagaggttactttggaggcactgccgcaagcatggcgagctcaaagggtcgccaggtcactgctgtgagaactgagatcaaggccttggtgaccaagtttatggtacactcactcattcatggtattcccccacgtcttatgatcgaacaggaagcgtttctccagtagttcgattctcatcgtctgaaattcccagcatgagtgcgagagaaggtccatatcagtcctgatactcgaaccactgatatcttgaatggaacggtcttgttgccctacgcccgtatatgttgcaagacaaacagcgactgtcatgaagcgcccccctgaaga

SEQ ID NO: 300298 - DNA, 282 bp, Homo Sapiens
tgccttcgttcttcaagtcccctgttttcctacctaattcctatctagttgatatacccattgttgacagtgcagtattatctaactattatggaagaactatttctgtcttcaattcttgccacttttgctgcatatgttttgacaagctgttactgtatacaaaaatatggacacttggattaacttcttggccgatttaatctttaattaatataaaaaggcccttggctcaaataaactttatttaaaaactattttatctggtaataacatagctgg

SEQ ID NO: 300299 - DNA, 579 bp, Homo Sapiens
  misc_feature (540)..(540): n is a, c, g, or t
  misc_feature (545)..(545): n is a, c, g, or t
gatcctagtttttagtgtcaagttatagtaacctcataaaatgaattggagatgttaacatttattcaagtacataaaactggagttacctagttcttaaattttggggcgaactgtcctggtaaaatatccagacctggtgctttcttttttaaccagtggtttaaattctttaataatctattcagggtttatatttattcttagctcacattaacaatttatatttttctatgaatttttctatttcaccttagttttcaaatttattggcacgaagttgttcttaatagtcttttattttaatttccacctaatttaattatgtcttttttcattactaatacttctattcctgatctaattacgtctttttttcattactaatacttctattcctaatatttctcttcatctttttttccctctttatcacaaattactgcatacctatcattaacaagctgttaagccaaaataagcaagaaaccattagtctggggttgtttctgtactaggaaccctttacataaatagcanaccanaacttaacttagaggcattctttgtgactgataa

SEQ ID NO: 300300 - DNA, 546 bp, Homo Sapiens
gacaagggtcgcctgtttctgcttaatcacatgcaggtccacgaaatccagtcttgaattggaaaccttgagacggccgacaagtaatctgtgcccatagttgttcacgaaattccctggagcataaactcacatgttcccgcatttgaacgatagcggtgccttttcaataagggcccctctctcaaaaagctgcatgacataattcttcttgaccagtgaaggagtgatggcccgcacctgtatactgagctcagggaccttcaacatcggctgcatgccaaggaacggactgagacacaacgagatgagcttctgaatcacaactctgccaataagggacatgacacattcatacctttggtcgaatacatgtgttgcactcataccttcagtggaggcacactggggtggatacctcataattgaggggcccagcattaaaattggctgtagcccaaagactgaccttttatgtgactaggggaaaaaactttaaattgccaacttgctggcatcgaccacacagagatgcaatcattcaaa

SEQ ID NO: 300301 - DNA, 266 bp, Homo Sapiens
cagtatttttgatttagtaagacgggttaccattggcgctggtctaaactctgcctagggaccacccgctagctccaaaggtggatacagggagccaccggcccgccggtagactgctagtcactctaaggcctgcaatattcttgcttaagatttaaggcactttgaaaaatcttagcaaaactcgggttgttgacaattgtgcgcgagataagaattttttggacatcagctagttatggattatgctcagacgcgctgttacc

SEQ ID NO: 300302 - DNA, 618 bp, Homo Sapiens
cctcctgagcaggccccagactagttgacgggcccgaacataccaactgtgtaggtatgattgaagtgtattagggcgcgcttatagaacttgcagaggctgtaacaacatgacagcgagcacgtgttatgaggaagagaaaagagtattatactgttgacgtctgaacctggcacttaggatgattataacaacagagggagtccatattcgacagcatggcgaagagaaagggacgatttacacgtttgagatcaggcacaggctgcaggccatgcttatgccctcagggactggcagcctctggtatgcaacaggctgagctggctgcagactccgcagcgtacaccgagctggcccagtgtcccacgagttctcaccctgtgccctggcagcagacttgcacagaggccaccaagactgcccctgtccatttagaggttggcccatgaacatatggcctgaaatgtatgtccaataccttgacaacgacttttagaccctactgcaagcccttcccccatatatctgcaaagccggggaggctctaccagtaggagaaggaggactcccggaggctctccaagggacctcactctctatcgcgccaactaaaga

SEQ ID NO: 300303 - DNA, 512 bp, Homo Sapiens
ctcatcatttattaattgaagcaccgcgaaaagaggctttattatgaatgaagtttatgttgtttagacaagggggtggtttttctccaccgaaaaagaagaacagctgaataagctgctgatcatcattatctttctgttattatcatggtgggctgctatgctgctaaatgaggtgttgtaagcctaaggcagcttgacttgtagcaacaagttgtttaccatcctcgtcaaagcaggtatacttattatcagccgtgtagcagtactttactaaagctgctaagtcatccatcacagcattcagcagctgttttgttgccgtgggctggtggtgcacaagatgatcaagagcagcaggttgcttgatgagtctctccttctcagaaagagggcatctattttcatggtaggtgaatgatgcagcattaaactatttgggaacgtctgttgcatcgtcttctagaactgctgagcatggtcgcctgttgaccaccgatgatgctctgcat

SEQ ID NO: 300304 - DNA, 584 bp, Homo Sapiens
ggagggctcttcctctttttacttctggatatatgtgagcaccaagaaggttttcatagagccatttcgccgccaatgccaacagctccaggtgctaactcagatgtatgagtttcacattgcacaactttagctcaagcatcttttctgagctctaaaccacattttcacctgcctatttggggtctttttggggatgtacaaacctcacctaaaactccactccatacttccaaaactctacattttccttgtctcacagttcggctcctcagatcaccaagcaccatgatttttgctttaagcagctaaagcacttagagaaacacctccacaggtttccattgcacttaactgtcacactttcatcgaagagatggtcataaaaagaaaatgtctaagcatctgtaaattcatttttgaaggcactcatcatgttgtttcaagatcttgctaagcttaggtgcttgaacattattcctgaatccaggaataagaaaatttgaggttgagtttcaactctaaaatttagcaagctttgcaaggttaaagtattatttttttgcctttgaaattcagtttcc

SEQ ID NO: 300305 - DNA, 580 bp, Homo Sapiens
aacattgacacgggagagcccttgactattgctggcatccgaggtcacaatctgtcagttatcctaaagagcaacgaggctttcttgcctggaagacctgtataacacctatggcattgcttgagccaaatagaatcgaactttgatgtgacgggtatctgatgaaacacagaggggatgtaactgatggaacctacccgatgggactatatgcagatgagtgggcaagcccactgaacatgcgacgttgttgcactgagagagcgcggagcctatgtttacatctgcctcagctgaagacacacacttgatgcatagttgaactggagctaagaaagaggatgtctctccatgagccgtgtttgtaccaatttcgcagggccttccggagctccacctgtgatctgagagattatgttaataacaaaaaccagagcatctttcttcattacccttaaaacgaccgttggaaccactgctctggccatatgccatgtaaccagctttcggctgatgcactagttgtagaacatgcacactcgcaaggctctacagatatatttgcctaaatgtgaataat

SEQ ID NO: 300306 - DNA, 483 bp, Homo Sapiens
ccttaatatcacaccaccatgcttttgttactatctctaaacgtatgtctgcttcttctagagagtccacatctgacttatacccaataaaggtgacccttgcctatgattgcgctcctggctttcagctgtgatctcagctgcttcaatagcttcaattgttacctgtgcgaagatgaccttcaaaagggcatctgtgtgtctatctgtaccttgagcctaccactatcccctaactgggccaattgcaattttctgataactctgccacctggagatgttagctccatttcacattaaccaagtctcaggccacacccattcccactcctgtcccaaacttcacgtttgttacctgtagttctgctgaagatgccaccaagcatatgactgactaagatgtgcaatattagactactgtctctcccttatcccattgtccataccgcttttgcaaggactttagcatgcatctttttctat

SEQ ID NO: 300307 - DNA, 473 bp, Homo Sapiens
ctttattaattgacgcacactgaaatgaggtttaacgatctaagcaaatatgaaaatgcgacggggagttggcttgacaccagcggacaaggcaaacggacgaatgagggttcgagctccatccgtcccccttggacacatggaaggctgctatgctggggatgtgatgttataagcctaacgcagttagacattgctgcaacaagtttattaccctcctcggaaaagcaggtctccgtaacgggaggcttggggcacttgtctacaaaaactgcgaaatgatccataacagatttcagttgctctctgggtgcctagggcttgtgtttcaccagctcaacaagcgcagggtgtatattgatttgcacgtgcttatcataaagtgtgcatacatcatggtggaaagcgaatgttttagtattaaactctttgggaacgtatgtgagatggtcttccagagctgacaaggacgg

SEQ ID NO: 300308 - DNA, 471 bp, Homo Sapiens
atttagcgagccaaggtgtgtatcagaataatacacatttggttttgctttatccaaaaaggaagttggataaaaacttactaaaagccacttgacgtaacaattggcatccaagagatgttcacacatttatccgaagaatattgagcactacttcctgcgcagctgattctaattaagtggaatgcaactttgacaacgtattatgccccagtcagctaccggtcatttgaaacaaggcttaactgacacgtgatagtaatcataaaaagctgcgggatatttctcacatttagatgcttgcatatctttcaagccaaggagccatgaggggcaaacgggtggattcagagatttgaaaacactcatattgcagacctggggtcaatattacctgcaaggggatcttggcactcccaactattatgtggtgacaattatatgactcaaaaaacataatatacaggcgtg

SEQ ID NO: 300309 - DNA, 472 bp, Homo Sapiens
atttattgagccacgctctgaatccgcataatacacatgggggtttgtgttatctagaaagggagtttgataaaaacttactaaaagccacttgaagtaacaatgcacatgcaagagattttcacacatttatctctaaggagtattgagcactacttcctgatcagctgattctaattaactggaatccgactatcacaacgtattatgaaccactccgctctatgtcatttgaaacaagcgttaactgaccagtaatagttttcagtagatgctacgggatacttctcagatttcgatgcttccatatcatccaagccaaggagccatgaggggcaaacgggtggattcagagatttgaaatgaatctaattgtacacctgggttcaatattaactgcaatgggatcttgttactcccaacaataatgtgggaacaaaaaatgatcaaataacatatattcaggcgtgtt

SEQ ID NO: 300310 - DNA, 472 bp, Homo Sapiens
tttagatcgaaaaaagggaatcttgatcttcaaacacaagggcgcatttctgaaggtgcaactaccacttatacacacaaattcaaggccttcatttgcagggggagcctcagtccaggaggaaacggagctgtatgaaccccaaagtgtgatgtgccaggtccaaattgttcatcctgaggctgctcgcatatcaggtagctcttgttgtacatatggatctcggggttgaagtttcacactgagcatcacactgtgcctcccaaggggcagcagaccaagccttggaactgggttccacagggcgacttgttcacccattagttgaccgtactggaccagatcaacacacatataaccctcctaacgtgatctactatcagcgaggcacagtggcctcctgagagaaatccctctacttagggaggcaggctgataactagacgtcaggcgtacgtgaccaagctggacc

SEQ ID NO: 300311 - DNA, 473 bp, Homo Sapiens
ggggtcaactgtgttggccgcaaagtccttatcaactgacctctggatccacccaactgggcgtcccactgcgcgtgccttacatgatgaagtcaccgcacccggccacggtctttgcactcagagtcacattgtacgtcaactgctgtgagctcttctgatgcgtatatcctatctgggagcggggtatgttgactatggcacccatttaccgactgaggaaatggaggccctgacgcatcacgaggcctgcacaacccctcaagtggactggctatgaacctatactaaccacgcgatgctggtccaaccctctgcatgtaaaggagatgaaaggtaggctatcggctaaagagtacacagtttatagccataagggaaatgtagtctggataggacaggcaatatagactcgctacatctctactgaaggtgtgaagaagccctaacctggttgaggcactgattacccg

SEQ ID NO: 300312 - DNA, 476 bp, Homo Sapiens
actgatcccaggacaggatatggtcttgagcaaaatgtgcggactcctgcgaagggggggcccactctgtatacgtggactcctgactgttacgccctcttgtgtttcccaaacatgaggacgtcaggtgggcctccaggcccttgtgtgcaatgagaccggcactttcaggcgcctaagtgccaggaaatttgcgtacgggacctattctaaaaacgtccatgagagtaactaagacactatggcgcgtgctcacttgccaatgatcgagtgtggtgactggcgctcacaccatatactttgactattgcctctatcgagccgttttgaactgaagacttgctgacatgttctgcacacatgctgctatcgaggcccgagatccatagctgctttgaccctctggccaagcacatgctcagtgctgatctgtccggacatagatacctatgcagctactaggctaagctgtcaca

SEQ ID NO: 300313 - DNA, 698 bp, Homo Sapiens
tctatgcattcaatatcaatcgaagcacagagaaaagaggctaaatgctcaatgaaaatcctgttctcttgacagggtgggggttttactccaacgaagaacaagaacatgctaattatctgctggactgtaatgcctgtgtcttactttcatggagggcatggatgctgttaaaattgctgttaataacactatgcaatttgacttgcagcaacaagttttttaccctactacgcaaaacaggtattgttatatattgacccgcaacgcttatatacacaagctgcgtattcatacataacagctttccgttgcttttttgatgccttgcgcttgctggtcacaagctcaacaagtgcagattggtgcacgaattagctctccgtttaatcatagcgtgatatattctgtctggaatgagaagagtacactatttatactttctgcgaacgggttgaatatccaatttcatatgcttaactcaatgatcgcctgctcaccggagattgtgctgcataacttcgtgtctatgacacttagctgacgtattctcatggaaaacacattaagtggctttggtacccctggtggaaagaccttttggacccgcgcatttcattgcgcatgatgacttttcaccgacagattggagaacacttttttctttgttttggtgtaaacgttatacaaaaaaaggg

SEQ ID NO: 300314 - DNA, 109 bp, Homo Sapiens
aaatcccctgcagataattatttgaggcccagcctgaaaatttcctctatggggaaatcccccaaaaaagtccccccccggcccaaaatgcccttttatccctaaactg

SEQ ID NO: 300315 - DNA, 531 bp, Homo Sapiens
taggaaacaaaaggtttattgaaatgcatgaagataaattatcattaccataaaactgaaatggagatttcaacatggggacgtaaagctcttaaaatgaagcgaagcttatgcatgacacattgtccaataggaaaaataatatatatctctgtacagaaaaagtcctttaaaaacagacaatctttatagaaacggtctcttaaacgtatacagactgttaggctccccccaggtggtgaatgctagcccttctccaattgtgaacatgtatgaatgggaggtatcacacatacatggaattcttcatggaataccacgcgttgtctcaagtagcccaaataatgccatgctcataaccatcactagaccatgctactgagctagggccaacatgcggataaactccatacaaatgggcagggtgacaatcgtacatgcaccaaccagagccatgctgctcagtacagatgccttaaaacatatcattggcatcggaccaagtactgaactgaatgccattctggcctg

SEQ ID NO: 300316 - DNA, 680 bp, Homo Sapiens
ctcatgatctatcaagtgaagcacagacaaaagaggcaaaaagaacaaagaaagttaagtgtttataacgggctgttgactgtacaccaacggaaaaaaacaaccgctgactaagccgtaggacaacattttcttgctcttaataccaagcaaagctgatatgctgggaaatgcgatgttatcagcctaaggcgaggagacttgcatcaacaaggggatttaccctactaggcgaagcaggagctcttatcgtcagccttgcggcacttgtttacaaaagctgcaaaatcatccataacagcactcagttgatcttgtgttgccctgggcttgagattgacgagcttaacaagagcaacaggttacttgacaaggcgattcttatgagaaagtgcgcatatatctgcgttgaacgagaatgcatcatcgttaaactctctgtgaacagatggtgtatggacttccacagctgcaaagcatggtcccactgttcaccaacgatatacgggccggatttggtgactctgtcaattacaggcggttggtatgcaggacacaaacttggttatgaccaccgaaagaatagtctttgcacaggcaatctattgtgttgagggatgttacaacattaggtggccacgttttcaaaggttcttgagaccccttccagacatggagag

SEQ ID NO: 300317 - DNA, 459 bp, Homo Sapiens
ccttaaagtaagattaataaagctaaattaattcttttatatttcttttaacagcactaaatcaaagctagagttgttgatgcatgcaatgtgtgtggtttttaaattacttttgaatttaaataatccctgtgttttttaatccctcactagtacagatacttaacattgaatgtttgtattctagtgaatgtccattaatagttgcttaaaactttctttaaaatatcagtgaggtaaatagcaatctggaaaagaaaagatggaaagaaagtaaatttggtttgaattaatttcttgtgttatcaaccttaactgaaggcttatatagcccagtgggatctattcatgggcaacatcatgttgccatttggcaggacccacttagattctggcctttggcaagcccctccacaaccaaggctcttccatttgaataaaaactgctcatcatcatgg

SEQ ID NO: 300318 - DNA, 468 bp, Homo Sapiens
aagaattgaagctcagacaaaatttttattgtgattttaacaaacctcgggtcctcccgcgggcctctgggataattttaagccaggtaacgacctgggcagggcagggaggcggaaaaaacctctgttattcacaagatgcgctgggatgggcctccaggaaagcttataaggaaaaccaatgggcccaacccccaccgggtgggaactgcatctacacctaacacgaaggaccagcatcagagttgcacaacattccaacaaaggctgaaatccagtagaaagaaagggcaatctccccaggacaggacccggaggtcaggtcaccgacactctaagggggcaggcttatcctgatgacaagagccatggacctaaccaggcgtatgaaaaccggaatggtgaacttaaatgctaaaccttaatggtgcagtaacagatggctacagcgcaaattaggaggccaaa

SEQ ID NO: 300319 - DNA, 378 bp, Homo Sapiens
  misc_feature (55)..(65): n is a, c, g, or t
  misc_feature (259)..(268): n is a, c, g, or t
  misc_feature (292)..(334): n is a, c, g, or t
aggggtttttcccaaacccccggaaaggtgtcaagagacccctttaatttccggnnnnnnnnnnnttttcaaaagagggggttttggggccccccccaaggtctttgttcaggggactcttgggcttttgggggtgttaccgccccccctttcgggaaagttcccaggtttgttgcccaccgctccccttttaaacaagttggggtttttaaaatgcggggccccccgggggccccaaatagcccgggtcctatgggannnnnnnnnnccccaaagtttttttcctgggggnnnnnnnnnnnnnnnnnnnnnnnnnnnnnnnnnnnnnnnnnnngggtttggtccttgggctccggggggtttaaaattaaggggggg

SEQ ID NO: 300320 - DNA, 487 bp, Homo Sapiens
gcagattttctgacgcaccacagacaacccaatgagaatctccaggggtgaggcccagccagttgtggtccaatagccctcttgagatctatcggattctaaagtaaggcactttaaagggaagaaactgctgtaactttcaaatggtgacttttctactctcagtgcttcctggaatttaaatctctcgagattcagacttacccagggtcacactactacagtgtgactaagttacgtgtcttaattcaaaagcttgaaaattaaaaacaaaagagagaatataaaatttgatttggtttacacaagtattataattatttatatgacctgctcaccatttttaaataccaaaatgccatactgcttaaaattacaatacttatatattttaaaacatgtattcagatagccttgatcttcattttattttgttacatgagcatggttctttctctatgactttagaagaataggacattgtgac

SEQ ID NO: 300321 - DNA, 435 bp, Homo Sapiens
tttccatggaaaccttcgtgggtttcgcatgcaagcagggctccaccccgtgattcatatgcttaagatccccctctaagctggtagcatcactttgaatcacaaaggagccccataagcatcttgcccagagagtttgatccttcttgaccgggcccttctttcctgtccagtaggctatcccggaaatgggcttaaggtgttagggtccaggggtcctttgttttggagccacatggttccatggagagaagtcctcttcttcaatcattggtctccagaaatgtgcatgcagaccacctgttcccttcaagatccaaattaactttccagtcatgagtaaaaacgttagtattacaaagactgttaaacttctgtgctgctcctgtcaattgccaaaatttgtcccctgttgtaagttaaaatctagccatt

SEQ ID NO: 300322 - DNA, 456 bp, Homo Sapiens
tatgaacattaatctgtaagatttctttagttgttttcaacaaaataatggataaaaggaggaacagtttctttattctgtagtttatattcacatagtaaatataaattagggagattcaacatattttacattgcacataattattctattaatattctataaactgtttatttttcctttggtaagtacagatggggaagttgaacaaaatctgcatacaagaagactttctaaaaatagaaaagactttctaaaatctgcatagaagagactttctaaaattacattttttctaaaaaactaaaatgcacttttcttctttaggaaagaatgacttttattcagtattcatctacagtttgccaagaaagtacttccttatccatttttcctttaatttggaagaaacattaagagctatagattaatttgcaagattaatttgcaaaatta

SEQ ID NO: 300323 - DNA, 491 bp, Homo Sapiens
gtgcccagctgcatggctctgcattaggcctcaccatgtcatgagataagatactgcccagcattggggaaatgaggagacactgacctcagtgttggactcagaggctacaaactcacccaagaatgggtcacagcagagagagccaagtcactggaaagatggaaaagctgtggtgcttcagtcccagactaatggctttaatgtggctaaagagcatctgaaccagcctcaaggcttcaatccagaaaggaagaggccaagctggggacaggccacccaaaccctgcctggggcaggggccgctctactcctccacctacaccctagcccccttgggtatctgatcacatctgcaggtggccgtcggagctggggaagggtgtggcagctatcacagctcagggacgtcaacctgttaaggccatctgtccacttcctgtccctagtgctgagtcaccaaaaaagcaaaacccccagcaccgaaaact

SEQ ID NO: 300324 - DNA, 417 bp, Homo Sapiens
  misc_feature (293)..(293): n is a, c, g, or t
  misc_feature (312)..(312): n is a, c, g, or t
  misc_feature (379)..(379): n is a, c, g, or t
tcaaattgtcccaatttctgcttataaaagtgttgacaagctgattcctgagtccttctgatgagactctagtagtcttgacagcttccttgctacctgttaattacataatgttccaggctaattttgcattggtttacctccagacccaaaataaagaattttgccatggaatcctggttccttttaaatgggatatggtgttgagagaccatgacctgggcactagatcactgctattaagtttgccatttgctcattggtattatgccttttcagtgaaaggatctgcnaaatatgtcctgggttggntttgttaaagataaaagacctcagagtttttacagatacttacaattcaattctatgactatagagntttcacttaattcctttatcttttttccctgctccttt

SEQ ID NO: 300325 - DNA, 517 bp, Homo Sapiens
cccccaccgggcccaaaagggggaaaagggggtttaataggggaaaatccggccctattttaaagatttttaggggaattaattgtaggacgaattgcatgaaactgtggtttgctccaaagatttccaagaattgtccgtattatacccccagtcatgtaacggctaaagtggttttgtttaacccaccgggaaatgcatccatttttaagcctaatggggggacagcttatgatcgcaaaacgacttgggatgttaaattaatccaatgggggcttaatcgcgaggactacttgatgttaatgcaaagagtccaaggtccctctgtttagaactattggggaagaattttgcattcaagatacatccccttctccgagtaaccattgttcacaaaccatgtgccccattttattctttggaccggagggcaacagtcccgtgctttctctatatgccacctagggcgtcgttgccctcttcccattaatttcgccgcaccctttactttctctct

SEQ ID NO: 300326 - DNA, 479 bp, Homo Sapiens
ggtttttggtggaacaaaactaagttgtgacgccatcatttacgggcgaaggcgctatgagaagtggctcttatgctccatcgaccaagcgaacatggtggagttcgttgcccattgaaaccgagctgacttactcccgtttgaacaaaggtctcgaaagaaggtaatcggtgaccaaacggacctttaatcggggctggaccatctggatgccctgagggggcatcgaagtcctcttccctatgtgagatatggactctggaataggattgcgctggtatgcctagggaacacgagccgttgttcaaggtgttggatcaattgagtatagactgccgatatgactggtgaggacttgagatagtcccgctgggaggataagctctgatgtgacgcgccccgggcgcttgttcatatctaacctggtacgtacggatcagtgccaatgtcaggcactcgttgcgctagaaaattcaaga

SEQ ID NO: 300327 - DNA, 530 bp, Homo Sapiens
ttctgttactggcgagaagttgctaggtttaatggggcaacaagtactctttgtggcggtgccactacttcattaccccgactgcagatgcttctgtcacacagtattgaaacctgcttcatcaggtgctattagactgaccaaatgttacatgacttgtggaagtcggtgtacgggatatttgaatacaccaagggcactgtcactatgattaacaattcaaacatcttcatcaagtacaagaccacgactagggaacgctaattgatagcaactatatgcatgacctgcgaattcaaagtgccggggctctgacgtctatctatacatacactaaggggaagcagcgtactttagttccatataaagtcgcccgtcctttgcttaaaaccttaagattcattatctcgcagattatttcaaagattacagcctaccttccttggattgagggaaagtcgttcttatgcgaccagtggcgtaacgtctgtctatccatggaaaactccgaactagggaatgcgaccgct

SEQ ID NO: 300328 - DNA, 473 bp, Homo Sapiens
  misc_feature (344)..(352): n is a, c, g, or t
aggccctttttttattgacggggataccaaaccatccacttgaaaatcctgtggtctcccatcagctgaaattaaggagggactgtgtaacttggagatcatgtatacaactcaacacgggtggatacaaaaaagggaggcacgaacagctcacaaagaaggttataacaccggtcaaggtggactcaagggggaacctctgagtatgccaccgctgaacacttaaaagaggaaagaaggacagatgctcttcatttattccgaaaggaagttcatttgaaagtgcataaatgggcatcataagtcaaacgtataagttggaccttcaacctaagaaacaaaannnnnnnnngctatacaagaatacaccaaactgttaatgctcgcccatgaatcccaaagatttggctcatattgtacaatacgaatgggcgtgcctctttcctttcttcagacaaacaccaattcggctg

SEQ ID NO: 300329 - DNA, 468 bp, Homo Sapiens
  misc_feature (149)..(255): n is a, c, g, or t
attacactcttgtatccaaagctggagagtgttcacttgacctgggaccacagtatcctacggctaaaggccacaagcgagtttccttcctaagcctaacgtgttgttggggatacagccatgctccaccaagctggataactttgcannnnnnnnnnnnnnnnnnnnnnnnnnnnnnnnnnnnnnnnnnnnnnnnnnnnnnnnnnnnnnnnnnnnnnnnnnnnnnnnnnnnnnnnnnnnnnnnnnnnnnnnnnnagagcaaccgggccctggcggaatgaacattcacatgattttctactgtcacgtacatatcaaaggtgcttgatatggaccacttaatcgtatcatcttttgcaagatacacccaaaacagactcagtgagagtactatacgataaaattacaccaaacacagcggacccaatggtatgacatgagccgatgtaggacattgaagaccaccca

SEQ ID NO: 300330 - DNA, 600 bp, Homo Sapiens
cggtaggagctgttaaagacatctacctagttgttgggactgttgacgcatactacaaagcttcttatacgctgcatacacaaagtctaatattaaatgagaaaaaaatggctactacgctgcgatatcctcaaatggggaaactcataaagatttcttggcagagtgggttgatttccttttgacacatcataagactttaacatcctggagcaccacgttcttcatttattccagtttaatgcccccatactggttgaagtccatattggtcggtgatacgcacctatagctcttgcggtaagacgcaaaatctgaattggctcaatctcacggcagttgtttcatgagctaaagggtcccactgacgcaataagtctgcgtggactggtcaataagacacgacacttgcattcgcccaatgggctacgactcaatttctactgttgcccatgggctaatacaccttactgtggagaacattaagcgattctagcactctctctcaggtggatgggtgtaccatggaatgctctatgaccttcatccatgggcattcgtactgagatcactgtattgctcataacgcctggtccccct

SEQ ID NO: 300331 - DNA, 478 bp, Homo Sapiens
tgactgttttatttgctggactggtgccttttattagattcaggggttgtgcatgtctggttaccacaaaatattttgcattagacggtctggccggagggaggtggacaaactgagtttgaatgtcacctaacccctttggttgcagaggatccttgcacctcgcgcttacagtgagtgggagttactgggttgccttatagcccccttgtgaggaaagaattttttttcaaaaaccggctctctttttgttgcccaggcgggtctaaactgggtgggtgaaagcctttgtgcttgctgcacctccaaaagtggttgaatgtttgggggggacccccctgcgagcttggaaagtatattcttagggggaaaaaacctttggtgtcagctgaggagataacaccttatgcttttattccaacctgaaagagtttttggatacccaattttttttgcaaggggcaggggaagaaagtcc

SEQ ID NO: 300332 - DNA, 605 bp, Homo Sapiens
gcaagcctgtgttgactggacacaagatggtatataatgccattgaaggcacgattcgcttcattgtgcgctgacgtgtgacctcttaatgcagtgaccagacacaatcttgtatttaggacaacgggatcatgttcactattcaaacataagctcttctataccatgctggattggttaccctgggggtgaggagcactgtattatgaaagggataatgcagacagcgaatattgagattgagctagaagactttaagctccatggtctaggacgtgtatatgtaggacaagtgaaggctcccctccactgggttcaaccgactgaacatatgaagatatctattttgtctgacggcataagagacattggtactcaaaggcgaagatggcacacatgttgagtggttcaaaaagaatgtttatggcattcaattgtccccaggatgtgcaacactgtatgtatttctcaatggaattttcaacattttggttgacaaagaagggcgcatcaatttacattgttttggaaagctcccacgtgtaatggagttttaacatctgtggatagtgcaattgatgtatattgctagctgttgctgcaga

SEQ ID NO: 300333 - DNA, 585 bp, Homo Sapiens
ttttttttggaagaataatgaacattcaccaggcatttactcgcagccaaacctaacccaacctaccacggttaagaatgtgttataacatgcactcatctacggccgaccatcaaccgagattagatatctggaggatgatccactagaagctcacattcaattaaaggctaggattaatttgtggatcatgctgaccaaaaagtagcgcaaggagaccgatggacacaagtctgtcacacacgagcaaatcctaggtatgcacaaatacgggaaaaaacctgttgtagttgtacgcacgcagacacaagagttaacatgtgaggagctctcagcacatcgagtcgaattgtaaggaatgtacaacaggggacgtaatgttagtccttttaccacactctactaaaagtgcctgagctaggcaggaccccagtgggccatgaaatctatcgcatgcggctacgtggaaccggccacatccaatcccctaagaacccaccggaacataacggactatgagcgagcgctagcaagctctataacgaattatggaggtgccccaggggagcgcactagattgccacc

SEQ ID NO: 300334 - DNA, 570 bp, Homo Sapiens
  misc_feature (269)..(407): n is a, c, g, or t
gcagctgctaaaaaattttgaatttcacatatggcccacattatacattttttggatagcgctggttttgaatgtagacaccatcacagcagtgactgtctttcctgctctaactgagcacccaacacagggccttgagaatataatagatgctccataaataaccatcagatgaacagttggctctgatttctacataaggcaataaccaggccttggactacaagacaggaggccctcaccctgatcctagccctaatggaaaagcnnnnnnnnnnnnnnnnnnnnnnnnnnnnnnnnnnnnnnnnnnnnnnnnnnnnnnnnnnnnnnnnnnnnnnnnnnnnnnnnnnnnnnnnnnnnnnnnnnnnnnnnnnnnnnnnnnnnnnnnnnnnnnnnnnnnnnnnnnnagagggtaacacagatgtcaggtccctcctgaattctactattctcttctagtaatagggccaggagaagtgagatgcaaaaaatactgaaacaacagggtaagaaatttgaccgataaaatcctacatctgatgtttccaatctggcatacattagaaaatt

SEQ ID NO: 300335 - DNA, 168 bp, Homo Sapiens
ttatacaatcctctgacctcccagcctctctctctcccataggactgactatagaaaggacttatctctgtccaggcatcatgatgtgataagagaaacacacagtagcatctagaaaaatgctgaaataaattttcacatagctaatatcctgtgattttgtgcaag

SEQ ID NO: 300336 - DNA, 577 bp, Homo Sapiens
aaacggcaagatttgattattggcatgtcatgcattgagatcaatcctttgattgcaccacccatttaatggaactttcacaaaaatagcgtcggggaatcccacaacttatgtttccggcaatttgttaggggatttgacacccagaatcttctttattgggggggcagggaaacaaagatgctagtgaactggatgcgtttaaggacaaaaaacctgcctttacaatgaacaccgcaggtcccaggctagagagggtcggattaaaaacaaccggtctgcatacttcagacggaagataggagtatctttccgcattagttggccaatcagtgctatagagcaccgagggcaatgcacactacttagaatctacgatcttgtgaggagatagacttgttaccgaccgcagatgcgctacaagaagcttacatacacgaccctaaaaggttaccaggcctgatgaatgacctttagagctggcagttccaatgtgacgcacaaagaggccatagaggtcactactcgcactgtagaaggcaacatgagtgttcagccgaaactcttttgtaaaggg

SEQ ID NO: 300337 - DNA, 591 bp, Homo Sapiens
gcaccagcagcattgaagactcagatgatcaggcggtaagatacataaagtgcatggggatacactggtatgtaagcggaacaggtatgcggggtgagaacccaccacatgacggatgcgcacacagttgcactggttgccctacaagcagctactagctccagatgcacggacataccaagttctcactgaacttgatgactgtggaagccacggacacctgggtgcacagtgtgatacaccaaggtctgaagtgtagtcttcggctagagtaaagaagacaacctgacatgctgccaccagacctgaacagcaggcaatgttctccaccttcatcgggaacacatccgtcctaatgcccgaccgatggactacacacgcttctttataaatccagcaacattgggaagaaacagatctgttaaccgaggcagattgtttagagcgaggttatcctttttgccggcagttggtaccatgacaatctatcgccttagtgcggacatgttgaagaagtcgtttcgggtgacagacggtagaccttccgctggtcacttttgtccctgaggattaggtccatattcgtgccaa

SEQ ID NO: 300338 - DNA, 150 bp, Homo Sapiens
gcttgttataagtctagttagattttgtattcctctgttccctctccattcctgtgctgttattgtattaatattacatctttgtgcactgtgtgcccatcaacacagatttataatttttttctatgaagctgtcttttaaatcagcac

SEQ ID NO: 300339 - DNA, 587 bp, Homo Sapiens
  misc_feature (91)..(99): n is a, c, g, or t
  misc_feature (439)..(439): n is a, c, g, or t
gcagaatctactgccaaaactgcaacttactttcaagtttgattaacagagggattttgcatatgttgcatgccaatgcatgtattcatgnnnnnnnnngttcggagatgagtggctaagacgcttaaattcacacctgattaggaagactgatcaaagagaggcgtgtgacttgtcctactcacatatttcatgcctcatgaattaggagtgggtgtcaagagtgcatagggactgctgatattcactgagtaccaaccgttacctctacagcagttgttaaaatattcagtagataaaagctgccctagtgttctctccttctgcacctacttccccaggactcactggagctccacaagacccagcaactgaagtgttcacacttggcacagaagactatccaacagaccctgctggtcctctggctggccacagntccattgggagtggcctgcctccagtacattgtaagtatttctcctatcacccctgggtactgtgtaacaaacttggctttgaaaaaagcttaggacattgctatgacatagcctaattcccaactcttgctatggagatgaagcttc

SEQ ID NO: 300340 - DNA, 592 bp, Homo Sapiens
aatatacagctgaaatacgcctgctttatgggctgaccataatatataaactttgctgaacgagtttgcactaatgtggacccatattggacagggtagaaggaatcttggtttactgaaagctatgcctcacatgttcaatcaaaaacttaactgtcacaaagctcccacatgaacgctatcctgagcactatgcgttcaaactaatggataaatgtcctgattctgacacactatgtgagggcttcgtttaatgttgacaataaccctctgggaaacagttcttttttatacaaagctgcccgaagtaaataggctcgtgcggactatgccatagagcgaactctccagggatcatggagagcactccttccattcaacatttgacacatttgcgtggatcacagtatcttactgaggagagaattccccaatgtgtaatgtgagtggagtcactgatcacatgactgcttattctggacaacgtgttagccgggacaaaaggaagaaattcgcctaataaagtgcatacattgactgcacgcctaaggaaactgtccaatgatgaactatacagttaacacagagactg

SEQ ID NO: 300341 - DNA, 442 bp, Homo Sapiens
gacccaagtcatacagggagggggccatggaggaagttgcggcttttgcaaaataaatgcccacttgttatccgcccatcatacgttcccaataacattttttacttatttacactggccatacatttcccaaatcgtttttttcaaaaagtgaacattatcgcctgaatctttagcccatccttaaaagggaagcctacctgaccagttactttttttctatgttatacaaaaaggctcatattgggtttcattttctcacataagcaattacattccggtggaatgaaaaaagtctgccacaccattcctaaatttttaaaaaactcaaattgctctagcatttataagtttgactgccccctactggcgacgtataaaacgtatactggtcaagcaaatttagagactttggcaggtgtgtccaaaaaaacctagtagg

SEQ ID NO: 300342 - DNA, 513 bp, Homo Sapiens
  misc_feature (435)..(435): n is a, c, g, or t
ggttaagggctttcattatttggaatagaatggggattttggcacaatagcatttttggggaccggttccttctttaccaggaataaactttggatggcccatttaaagataaagctcaaaatgccaatccttcccctgggagggggaaagccttaaccaatgggagggggaaaagccttaaccaagcatttacccagggctttacctattcaaaaatttaaactaatggctgggttattgacttgattttaagacatgggagttaataaaaaaagtctaagattgaaacaattttgcaaaaatatacatttggatatggggatatatggatggggatatatatatctactaggaaaatttatcgcttaagggtgttgtgccatttcttagtaccaattttacattctgcatcacagcattttgcatcccatctntacactaaggccaccatattactttaaattactttatacacattttcagccattatctgaataatcatttatagcccc

SEQ ID NO: 300343 - DNA, 446 bp, Homo Sapiens
  misc_feature (192)..(192): n is a, c, g, or t
attgatacctttatcagaggtgcaggggaattaccaacatatgtttttcctttagcaaacattaaccagggcaaaaccacaaaccgggaacagggaaaaggacatttttgggaaagacttgcgccggaaaatttaaacaattgtttctttcaaatttaaggtattcgcacaaacaaatttgagcctggccangaaactttcttctagattcgctgaggtttttacataaaagaaactttaccatggaggtgtttaaaagccaacacaggtttttttgaccaaacccaactgacttatttaggcttacttttttctcaaacacaagggtttcctcctttgcaaccagtattcagattgccagaggccacctttatttgggggggaagccatccactgggaagggaggggtgacttacattgcctgggggctttacatttggattaag

SEQ ID NO: 300344 - DNA, 581 bp, Homo Sapiens
aattccaatttaatgatattcaaatctattaatatttgttgcatcctcagggttgtagatgtgtgctgaaaaaatgatatggtgcaatctcttcagttttagaagaacctgggtatacagaacagagctaaaaatattagaaccacctgtcctttagtgtgacagaataaactagcctttttggtttacttaattacaggcttaccatcaaaaatatattctctaacttaaaaaagtactttgttggtaatatctgatgacatttctggtgtgagcacacttaagtgacacattacttaaagatgtggatgtaagatgctcaaggaaccatcatttgaaacagacggttccctcattgtatctgtacatgtcaaaaagcaaggttgtttttttacacgtgtctgaagcttctggagttgcacttatccggcagctattggactgagggctgaggcactctgcttttggagtgctgcggcaacttcctcaaaagactttcttttgttccttgaactttagaaaatgtgaacagggtcaaggccatgtgcactccattaaagagtgaaagcacattaggtccc

SEQ ID NO: 300345 - DNA, 496 bp, Homo Sapiens
tgactgcttggtttgagccttgtggagcgagcatttaattgtttcaacgattttcaagtgctgaccggcgaagacaatctattagtcttaaaaaaggcttatggcctaatgggagctacacctcgggtaagcgaggacttgtgacggtgtaggtactcaggggctgcgcacggtgatgaacagcaagccttaaacttcagataccaaaacaccggctctaaatcttaataaccaggtcagagcatgccacattcccagaacattgatataaataatttgaacaactacgacactaagcggactaaatttcgtctatcggctggaccataggctataggtggcggcaactgcgaccaagagcgtatggatttccaaataaaaagtgtccaccccgtattcccggaaaactactcagctatatgggacgaactctgacacctacagggcaggactgtctgagccgcactgcttacttgctacatgcttcagaacgggt

SEQ ID NO: 300346 - DNA, 356 bp, Homo Sapiens
  misc_feature (125)..(125): n is a, c, g, or t
tttacagagaggggttaaatgcataaatctttttggaagttttgtttaggctcatcctacataaatatttatattttggctccgtactttaaaacataagtttctactttccttaatggtttttntaaggagggataaaagacccttcttccttatttgaaaattctggccatcaactcgaactgggattatgaacaccaactccatcaaagctatacttttgattctttttggggggcagggaaaatgcaggaaacaaaagaaactggggggctgttggaagggaattgataccatacttctttcaaagaggcacacttacctgtccttgacagaattaaaggaaactaatgtat

SEQ ID NO: 300347 - DNA, 496 bp, Homo Sapiens
aaacggctttttgtattgcatgtggataatactctcattacgcactcaacctcgtgttggagggtttaacatggggtcttttgctcttacaatgaaaagtagcttctcaggtgcatcgtccaataggacacttattatatcactatgatcagataaggtccttataaacagggaatgctttttgcaacggccttttaaacgtaacccgtcaggtaggctacccccaggaggaggggatgaccttatccaatagggaggctggagtaggggatgatgtctataagggctctgtttatggaatacctccgggccatgccagtgtcccaaagaatgccaccttcatagccattccgagcagaggctctagagttgtgccagcttgggcctaactctatgagtatggtcacgatgacactggtttatgcaccaagccggaccgtcctggacagttcaggtgactgcaaacttatgattgtcattgacccaggcactgaac

SEQ ID NO: 300348 - DNA, 218 bp, Homo Sapiens
tgagcccatgtgccccgcctattctgaattttctaagattgctctgatcatgtaacttgaaggaatatgatacatggttttgttcagggcctcaccatgggttgagtcccttgttggtgtttgaattgtcaattcgacatatgtgtgtatccatctgtatttttgttaacctgattctagatgtggttacaggcatctgactgcttcagaaaatcttc

SEQ ID NO: 300349 - DNA, 557 bp, Homo Sapiens
taaatgcactggctaaagtaataagagaagccccacagaatgacgcaatacaggttcatgcaatatatcggttgctagactaggtgtgctgctttactcgcacgcaaaccaaaaacaggtgaatagcctatggatcttcattcacatgctgtaattctgatcgaccgctctgaagctcggaagtgcgaggttatcaggcacacgcagcgagcctagtaatatccagagtgccacccggcgaaggcatgcaggattgcgtataaggagccatgctttactcatttacacaagctgagagatcatgcaccacaattttcacctgctgtgttgaagccaggagctgtgtgccacaggtctaaaccggcagtaagacccttgatgtggggacatcgcagacgcgtgcaatgtccgtggcgacgtggagtgttaggtctcaaatttacgcgacgatgtatcatggacttatgacagtaagagcaggatcctgtgcaccaagagtgtgggagaactggtggccctgggattactgcggaatctgagcaaaaaacataactggt

SEQ ID NO: 300350 - DNA, 480 bp, Homo Sapiens
tgttaggcacatgggactcgtgacacatcagtgcctgccagcgccttaatgaacagacaatgacccgtttactgacaacctattctgcctgcccaacacaaacaagctgggtacacaccggggtcacatctatgacctttggcgatagcaaatgaagggaccacacagcccggggaggtactatccctcctggattcttaaaaaacctacaaatcaatgcataacgatactacactgctaattgtattgcagaaaaggctgaagactcgatggtctgatctgagacttaattgcctgacttgcgaagtccatcaagttgaatatcacgctggaagatgcaccagagatgaccatttccaaggctttaaacggcagcggtaggacaaaaccggctgcactatgtcgacaagaaggccagttactgaatgcatccccagcagaatgacactcgcatcagcatcgctaattgtacacagactg

SEQ ID NO: 300351 - DNA, 369 bp, Homo Sapiens
  misc_feature (107)..(191): n is a, c, g, or t
  misc_feature (297)..(297): n is a, c, g, or t
atatatttgctatttattaagtgaaagtggatcatcaaaaagatcatcatcctctttgttttcatgtagagtgggctgaggaggaggcggaagaggaggggatgttnnnnnnnnnnnnnnnnnnnnnnnnnnnnnnnnnnnnnnnnnnnnnnnnnnnnnnnnnnnnnnnnnnnnnnnnnnnnnnnnnnnnnatgacaaacagactctttgtagtaataaataccaaattccaacctggctggaggatagcatcacatgacagatagcaggcttttgaaagacacaagtattttaacncccaactatatttatttggcatattttggaatagggcctgcgaaggtggcaatttgggggggaaaaatatat

SEQ ID NO: 300352 - DNA, 287 bp, Homo Sapiens
ttatgacaaagcagggcttgagtatcaccatcttgacccgctcctgctaacatttgctggaatctaccaaaatggtaccctaaccacttaacgagttggtgcgaagacccagaggatcacattcccgccggggaccaattggatctctatcagggggctgccaataaccgtaaaggggatgctgaaatgccacttacggcggcttgaatacattgtatacttactgcccaatctgcggaataatttgtaagacccgctggccgaaaccttttaatgatacccgaccc

SEQ ID NO: 300353 - DNA, 461 bp, Homo Sapiens
acataaggctcattagtttatcattgcctaaatattttcaaaggcagatattttatcttgaaatgtacctttaatagtgaggttcataattttgtattgttgacagtttgaatagcaaatgcccagttaccctgtagattaacagaaattgccagtcttttggtttggaattctcagttacgcttttcttgttcgttcagtattctgttgggtagtttagactttttaacttgttaccatggtcctgaaaaacaccaagttcagtcaggttacttcctgtctctctcaaatttgcttaccttccttcatccccattgcctttacctacttcaaaccatgcttgtatcagaaccccccaactggtattcctttttttggggcctctcaaacccatctttactttgcagtctattgttacctttccctgcttaaaaattttttagtggggccttcttactttg

SEQ ID NO: 300354 - DNA, 582 bp, Homo Sapiens
atttgaaaagattaatttacattatacttcttcaagaatagatttctcaggtttttataggttgcaaatattttgtaggataatgatttattgacctcatttttgttttcttaaacatcaataacttttgtcattttttataattattatccatttttcattgaatttcctgtttacacacaccatcaaatttcatattggactatatccctcatacttcacttaaagtttgtcagaaatttccagtatttttaccaaaacaaatcgttattaaaagctggtgattaagaatcactgacattcaggtgtttggtattgtagttggaatttctgtgaaatgggccagagactcccatttgtaatacagaattatacagtaaatggttacatagctgaatgatcatatttctcaggtcgaggtttaggtaggacacattttgccctgaaatcacacagctaaattgatgtgctatttgtaactgggtgtgaggaattctcatcatccctttactatgtctcacagggagtgcttgcaccttagtgggagaggcttccaggcctttctccagaggagttctggta

SEQ ID NO: 300355 - DNA, 189 bp, Homo Sapiens
cattacctaaaaaggctttttaagagagactactttctaaaagggtgaggtcttctttactgcctttacatgcaagagaggtgggaggaatgatacgaacgtacttaacagttgggcttgtgtcgattcatactacatatgaccgaaactgaactgctgccttattaagagctatacagcacatggagg

SEQ ID NO: 300356 - DNA, 591 bp, Homo Sapiens
  misc_feature (481)..(481): n is a, c, g, or t
ctgtttccattcaaaccggcgctcctgtgcatcatgaaaccctttctagaaagcccaaagcctcatctgggagtttcttcttgagccacggcagaccttgaatgatgttgatgagaacggctcgggcgtgagcttgtacctgcttttgacccttccggaatttgcctcatacactagttcccaactgattacacctgcttgaatgaaaccgacttatttgagacacgtccaggggccgtcagattaacgcttgaaagatttgtcgggggtatagggactgactactccacaccagaggtaacccggggcgaccagctgtgagaatgacccgacatagtcatgatctgaggcatagagagcatctctgtgacagctgcctttattgtccccagtgtttacgcagacctcctttcgagacagatgtctctcctactaccacacaaacagagctgtgcattactgcgcagggagcagacggtancctatgtcgttgggagcggcaccttgaggaaacctcgaagctctagtttgtttctccgggcaggggagacaaatcagtcctggaagtgtgggcatatttcagggtatctt

SEQ ID NO: 300357 - DNA, 616 bp, Homo Sapiens
tttcagaaattacctgcgagtaattttttcttagtgattgcagaccgctatgttgcctaggctggggtgaaactactggactcaagcaaacctctcacctccacctgtgtaagggctaggattacgggcctgagcgactgcactatgctttgcaggggcctatgggggcagatccttctatgttcatgggcgcttgggcgatatgtggggttaccgccccactactgtctggagtttaaagagttccaactctctcgctaactgctgactcgtccgtccccgcctctgaccccaccgcggatcccgggccgaacccctccgggtgccggtttatacaggtatcctccccttatcctgcgggacggcgtctccgggggaaatgcttgcgcaccggcgacccacatgtggtttccccgactaagcgcgattacttttctgtaacctcgtcctccggtggtgaatatttgctgccatactccttgggtgttgcatcacaggcgctgaatatcttgcctcgagctccctcgtgggcgtagctctctacccctcatcggcctggagggtcttcttgcttccctggcggggccgcggtctcttttaccaccctttacccccc

SEQ ID NO: 300358 - DNA, 519 bp, Homo Sapiens
tttttgcccatgtaatgcaaactgcctaaaaaaattttttttaaacctcctccttgttacattgatttcacatggcgacgtgcccacataaaaaacatcttctggaatactatgcgtctcacaggtgacacgtgaaaagctctggtttaaaacagcggagcttgacaatatcgagaaaggcctggtggaactaaattaaggcaaatgttacttccctattcagggcaattgatcaagcagatctgctcatttcaatgaaaatgtcttaaatatttgccaaaataattgccatcgggaaagattagaacacgtagctgataaaatgcgctactcagcactggcaccagaaatcttacggtcatcatgtgcggttgtaatctacaccgcccacaggttgtacaccctatttacaaagtcaggtggagggcaatgcccaaatgttttttgaaggccaccccctaaaattggcaccgattgatgaataacaacgcccggcccgctttacattttggccaaaag

SEQ ID NO: 300359 - DNA, 473 bp, Homo Sapiens
gcagccggtcatgactctcctgttgtaacctggctgcaaagtggccatttccctcagattctcatcttggttcttgtgggctccagcaaacagtcatgtaaaagggcctgccaccaaaacctgttcccctgaacttaggacagaatctcgttgggtcagatattggtttcattttcaatcctgcctgtcctgcagtgagaggcaccaaggtctcactcatttaattaggttacatagaaatatctttcaaggtttgagctgattttcactagaccctaccaaaggatgaaatttgaattaagtgccatcagggaaccagtgatgcaggtggtctgacacatcactgctctatccttgcagcctccagaggttcagggcttcagtgcacctcagcaccgttatgttgtaaaagtcagtctttgtcacttgagctctttggaggctgcatttgtttctcattcactattttaccc

SEQ ID NO: 300360 - DNA, 564 bp, Homo Sapiens
ttatatatttaacactagaagacgtttacatcagactgcaaaatgaaagttaaaacacagaatgtacgatgagatccctttctgcccacacactcatacaaacgtctatacaggcttaaaaaaaggcctgaaaacactaaaacgtaacagtggttagattatggaaacgttttttctccttgtactttctgaattaaaaatattcagaatatgcatatattacttccataataaaggagaaaagttatattaaaaaccaaataatcatacaaaattaaaaagtatacaaatacttttaatgactcccaattatctagaatacatggctcagcatggatctctcagggtccccaatctttagattcaacaatcatgtcacggttctccagtcttttcctcttctacctttagctgccaaattaatcctcctaaaacaccgtgagtttcttgtaatcactactttcaataattccccattttctatgtaaaaaagtagaaattcccaagcctggcactcaaggctcttccacaatgatggcattcaatcatcctttcactttataa

SEQ ID NO: 300361 - DNA, 503 bp, Homo Sapiens
acaaagtggccatacgcgggtatcaaaaacccttgttggacacatgtgggaattcaaagacaacagagcaggatgtacattcacagtgtaatggaaaagctttttctgacggcaggaattataactgttactcttttattcctagtctttcatgcgatcaacctcccggagggctcaaatataattgcgaaatcccaattatgcgcggtgcgcgtgatactgttgtgggaacttacacatcttgagagtagtggaaagtggagtagcccatgaccggcttcagctgtgacaggtttagtgtcttgtttttgacacaggtgacagcggcacaggcaatctttacgatatctgtgaaggcatcagtagtagcagttaagtgcggtatgaccttcttacagggtaggaaccaaggcgcgtagaacatgaccaacgggcgcgtcttgttcttcagggtctcccggcagttggacatcaacatgtgcaacacgcttgaccgctggtat

SEQ ID NO: 300362 - DNA, 492 bp, Homo Sapiens
acagtaaccggcgctcgagcgccaaggcgagtattgcttgaatgttcatccaaagcacacaaccagcgagccccaagaaacagctagggaaataacagatgggtcgccctgacgctgcgccgcaaaaactatatatatacctaatgccacaggggacgctattctgcgtgcagacacaaggacacaactgttggcgtagcaagacctattctgagagcataaaaggagcgcccggaccaggagtccatccctcatgaaaaccacaattcaattgggggccgatcttacgatatacgcagtatttccggtacagtggagaaagactggggggccacaaccatatcacgccacgagcaaaccgggagatcacacccgcctttaccaagcgtccaaaagctcctagagcctgccaagtcaggatttcaccgcctaaagcaacgcccactacgcagcaccggcagcccttcttgccggtcctcggaacaaaccaac

SEQ ID NO: 300363 - DNA, 490 bp, Homo Sapiens
  misc_feature (281)..(421): n is a, c, g, or t
ataccggccattgaaccccaagacagaatgtcgtagctttgcccgaagcaaaataacacactaccaacatcaccgttgaatcctctgactcctgttccctgagatcactccctcaaataagctatctatcgcatccatcccttttctctggctcttctttttggggagacccatgataaaataggcagagaatgggtagctctagagtagtaaaaagaaagtaaccaatccaggtgtccatccttctcccaagcaatgcaagagtaaataactccattccnnnnnnnnnnnnnnnnnnnnnnnnnnnnnnnnnnnnnnnnnnnnnnnnnnnnnnnnnnnnnnnnnnnnnnnnnnnnnnnnnnnnnnnnnnnnnnnnnnnnnnnnnnnnnnnnnnnnnnnnnnnnnnnnnnnnnnnnnnnnntttttaaatctagatacagattcttattaatctacagtaatggtttagtaatggttgtgtgaccagttt

SEQ ID NO: 300364 - DNA, 544 bp, Homo Sapiens
gttggaacaaatgctgttttttttaatagctcttttgggcagcaggattcgaccggtgcaacctccacaatgatgttttgaaaggtggacttcctctcataaaaaactccgatgcggaaaatgtgaaatacaacagggatagaagtcccctcttgctcacttgtaagattgttgaaaccagtctatctgagacaaatatcatcaccttctagaaaggaatacatcgctatagttatcgaagagcgtgccgattgcataatatatgcgagaatcgcgggcaacaaaaacgcgctctatctgataaccctttaagacaggagggactacgtgtgatcgagagttgataggatgatgagcggtgaaagatcgatccattctcttatcgttcacattggtctgtgcatcctagaagtcgaaaatctgccgactgagcactatggctctgtgaagcaggctctgaccttcgtacttatgtggcgcaaggagcatattgactccttgctgtatagagatagtttcaataagctgtgccctgctttgcatg

SEQ ID NO: 300365 - DNA, 366 bp, Homo Sapiens
  misc_feature (311)..(320): n is a, c, g, or t
actgattctatggccctgcaattaaatcactggctgggttcttgtcatctgtgaaacatgatgattatggtcatgacgccacttttggatggaccacgcaatgctttggccacaccaatcactgctggtttaggccacataataactggaacagctcacatcaatgtctgacatcgaatgtgcagagaaataaagtaagtatgatgaaacaaacaccattctctaaatgttaaaaaggttttgcatagagataggcttaagtaagttaggttgatgattgacctaattttggaaatcagagcaacttcacnnnnnnnnnnaattcaccaacaatcaaatatatcatgttaatgaaacatgagcgtg

SEQ ID NO: 300366 - DNA, 497 bp, Homo Sapiens
gattttttccgttttttattaatcgaagcactcagtaaagttggggaacgatcgaagatatgtatgcctcttgaccgggtggtggctttacaccaacgtataagaaacccaggtgaataatgcttggaacgtgattttcttttgttattctaatggtaggctgggatacttttaaacgatatgttctaggctcagggagtttggcttgcaccaacaaggtttataccctgctacgctgagcaagtgtgaatatagactggcttgcctcactggtttgcaaaaggtgtaaaatcatacctaacagatttgaactgagctttcgttgaattgggcttgagctgtacaagctcaacaggtgcaggagagttcatgatatgtatctccttgtcacgaagaagacatatatctgtatgggagggaaatgtttgggatttaaaattttggagaccgtttgtttataaacctcctcaacttgaagaggatgggtctctcggtca

SEQ ID NO: 300367 - DNA, 582 bp, Homo Sapiens
aggtttatttaacgaaagggtatggagtaaaattggcagaatcggaaggagaaatccccagaagcttatactaagaggctgctcttaaacagggccactggggaatatttatgacaaaagactcatatgtgatgactcttgatatacccttactgactaactaaatagcacctaatgaccaattgtatttgaaatagttggcttgtgaaaaattttctctaacactatacctcttataagggaaaaaacagattcgttttcacctagacggctctgttttcactgtgtggcacaaagcattaatgatttaacttgtgaaagttgtatcaggtggagactagacctcttgccgaattcctggagacccggttattcactagttatagagcgaacgacaccctggcagagctgcagctcttgttgcttataatgcgggataagtactagcttggagtaatcatggacatagctgctacctgccagaaatcgatattccctcactatacacacagcctaccacccagacgtattattagacagccagggtcctctatgagtgcgctgcctccacaattttgtcca

SEQ ID NO: 300368 - DNA, 528 bp, Homo Sapiens
ggctttcataggttctatcacacacgtgcggatgtaaattgttttgcatcatgcgactagcttattaattggctgaagccctatgaatgagataggctcctcttctctggtgacaatggggtaatttatcaacacaccccgattcaggggagtctggagtttaaggtttacggaaggtgcaactaggagagggtgctgatttatcctcccgacgacaagtgcgaaaagccgaacactgtttttacgtacaaattctcacaaaaataatagagaggtaatatagtcacctggctagtacgaaaactcattggaaaccaacttccatgccttcaccggtccaagcattaccaaaatacgtatccgcccctcttttggactaggttccctacataaagatttatactcttatttggaggcggaacaacgaagaggtgttcccccttgtccgcaaatggcggggaaaacagggccttttgatgcgggggcgaagggtatcttttttacaaaagaagggtaccctggtgcccc

SEQ ID NO: 300369 - DNA, 594 bp, Homo Sapiens
ttttcctgttcaaggggacaacataactcattaaagtaacctacatgaaatcccacagtgggtttcattgtgtatttgacatttatgaacgctacaaggcttacgggaatgacatcacttgataaaggagttgtttaccaatttatttccctaagacccagcccgacataagatgttccctcacagccgtaacagaactctgtccttcataagacacttaaatctcagttactagaaagtcacgaaaacatattcctggagttctttgcttcttagtgaaaacatggttggatagacaggcctccataaacgggcttggggtgtgaaatgtcaacaggaattaggggtatgggctgacttatgaacatgggcgggcggtctatcttcgggttagatctggatttcgactgtactgccgagagaccgagcccccttattcccctgacatgatgggagagtgcgcatgtagatccaatcatttgcttactgggacgatagggcatatgatcccaccttttcaacttacctgttgataaacaggggggtgggcatatggctcatctaagcgctgctcaggcacatatgtgctagtct

SEQ ID NO: 300370 - DNA, 481 bp, Homo Sapiens
agaaaagaaaattttagttaaagaaaatttgatagcaaaatttaactcaagctatgtaaatgagacttcccagggaatgaaaaaaatatcttctcattctctccagctggtctccagagtcgatgtttctacattagttgcatcagtttcctcatgattctgaaacatttgggtgcatcttattaaccaaaaatatctggtattactcaagacttctttctgtatgtaccaacgtaatattcctgatgttcacaaagatggtattgcaggatcctgaagtacctgagaattaactgaaaagccaggcctgttgctttggctatgtcacagtttgatcagcaggagagactgatttcaacatctgagcctagctgtagcttctggctggaactcttgaattttcaatgagctgcttaatttccaaggactagaagctgagttaggcatttatacagctgggaacatcttctggcatgaggtt

SEQ ID NO: 300371 - DNA, 348 bp, Homo Sapiens
tggcccggccagagctacgagttcttaaagcactttattctttgtatctcagtgagaaggcatcaccatgctctaacttagggatgatggcatcttgaattagttgtgcagcagagatggaaagaagtaggtagacatgagagagacagcttagaaatggcaatgatgggggttttaatgtactttcattattggtagatgaagaaaagccaagggttttaatattttatatacaggtgggctttgagtctactgcatggataagggcccaacttggctcctgggggccggagggcctcatgactctagtggaaactgtttttttgggcccccagggacatgtgaaag

SEQ ID NO: 300372 - DNA, 477 bp, Homo Sapiens
tctgtcatttggagaccagactgaataggcacaagcaagattctgggtgattttgctgcctcgtattagctaggtttttctccctcatgcaaaaataaaataggaatctaatggtacttattcctgtggctatgtctggatgatacgtaaagtatcagagtcccaggtgaggccaggactggctggtccagaggctggaggggaggatttcagaaacagcactgtcatcctttcatatgccctacctcctctgtctcaattttaggagtataataaatgttctcttaaaaagcatgctgggcagaggaaataaaaaatgtggtatggatggtggttaaatatctgccctctaatacatatagaatcgtttttacatttaaagtcaaatctgaagctgatttaaaaattcctacagtgggtaagagctaagaaacctttcccatgaaaatctgacctttggttaacttcccagatctg

SEQ ID NO: 300373 - DNA, 470 bp, Homo Sapiens
  misc_feature (427)..(427): n is a, c, g, or t
tcaaaataaagctctgtcatcaaaattggagtatggtagggagaggatgctggcatgtgccgcaacacatccattagcgcgctggggctgcaccattttacatgtaagtacaggaactgaccacattatggttaatttacattcggaagcaaaaagtacattatctatcatagtgacatttaacttactgaggacagaatcattgttataaaactaataatacacttattattagccagataataataatctacttattatagccagatcataattatagccagaatgagctcctttgacacttcataagatcatactgctaaaggattacctagcaatgaccatgctagtgcttttggataagagcacgagtatgccatatacgctagtgacatctaaggcgtggacgaatcagtgaaactcaccncatattctactgtacaggcaatggagatgagcgatccttgatc

SEQ ID NO: 300374 - DNA, 824 bp, Homo Sapiens
  misc_feature (766)..(766): n is a, c, g, or t
gaggaaaaacaataatttacagatttttattactacgactttacgaacaacactttaaaagggggaaaatataagagaggggggtatagcaccacctcatagggttttcccctttgtttccccacaatttttttaaaacacttttttagcgcacataagccaagattagaatacctttcctcgggaaaatgtgaacattccacaagtacattttgtttgttagcccacaaacaacgcccaagggcacacagagggttgctagaggccctattgtgccaccaaacaaatgacccaacattactctggggtgggtcatattggaatccctggtctttaaaaagggaacggggtgtcttttctgccaccttgggagatttatctctaacaaaacacatttgtgtggaaccctttcttgcattaccctttttctatagaggcgaacccacagtaatgaaataaaagcttcctctccccacccgatttttaagggagagggttagtctctccaatatggcctctataacggttcttttttaaataaacaaaataagtggtgggtgggacacgtcctttgatacgccctggctcattgtggttttttctcggccaggtgtaaccacactcttgggtgtatataccacaagtatcttctataacacacacgagtgtgtattagaaaattatccaagacatggctcctatatatttcttagcaacccacatgtggtatgtgtggccacattattattttaaaaaactctttcancttctctaatagcgagaggtggggtgaaaaaaccttggcgccttaaatctttctcaaa

SEQ ID NO: 300375 - DNA, 566 bp, Homo Sapiens
ctccctcatttatgaaagacagctttgctggataaagtattgttggttggcagttgttctcttgagcactttgaatttatcctactctctcctgacctgagggtttatgctgagaactctgctgatgattgtatggcactcctttttatgtgttatgtttcttgcctcttgatgctctcaaaattttttgcctttgatttttgatagtttattatgtgttgtggtgtactcctctttgggttgaatttgattggaaacctctgcagttcttgtacctggatgttggcatataccacagattaaggaagttttcagccattatttctttaaatatgctttttggcccctttaaatatgcttttcaggcacctctttctccttctccaaccactattatgtgaaggtttggtctcttgatggtgttccataatctgtaggctttaattttagaaattcttttggtttttttgctcctggctagataattttaaaacgtttgtctcccagcacacttgatcttttttcttcttggctgagtcagcttgtgaagctttttgttgaatttt

SEQ ID NO: 300376 - DNA, 464 bp, Homo Sapiens
aaggtgaatcattatatacactcatatatacacatatgtttatatagctaatcggtagtgcgatggggcattcacagtcaactgcaaggggtccgtattgtaggaattccggctattgcaacagaacagtaccctacacggtcttgtgagcacgggtcaagataatgatttaacaggtgttaaactgacactgacaaagaccaggttctcaatggtattaccagaagtggactcaggcattagcacttattctccggagtcaggatgtgatgacttatttgagtacaaactcatgtgtgcatacaacatactggcctatagctaggtgtgcgtagagtcctagatgacatggtgggtgatgccacctaataacgaaccatgatcgacaggatgtctgccctcgagcgcatggctcgatcggagatcatagtgaccacgagtgcggctgctatgatcaagctggt

SEQ ID NO: 300377 - DNA, 525 bp, Homo Sapiens
tatgagtaataaatatattttgctttattttcaatttgatatatggaaatttcatcagaagacttgactgcagtgttacttacaacttagaatgacaaaaaattcagctctctggtttttcaaaggtaataaagattatactaactcaatggcttaaataagagcttgttaaccaaacacaaatattttactgacaaactagaatttaggtattatgaaggagaaaacaattttcacagacacccactctcttagtctaagggatgaggaatttatttcaaagttatacaagtgcaaagaaatagatctagaagcagcaggggtttcaaatgagcaaaaatggaagaaatagaaagttaatgtttactgacatagggaaatcctcataagaggaatgaaaaaaatcgatttccaaagctaggaaaacatgtgggtcctacaagacttgcacgaaaaataattagatgtaaatgttcttaagaagaaaccgaagggagcggttaggatatttcaaatgtaagaaat

SEQ ID NO: 300378 - DNA, 187 bp, Homo Sapiens
ctagtccaagaattgaaacaaagcttatactttattagtaataaacacctaatgagtgttaaactacccctcacttcaaaactacccctcacttcaaaataacttactgcagaattactttttcaattccagaagcaagttaatcacatattttaaaggaagaagccccaaactgttgaggatgacc

SEQ ID NO: 300379 - DNA, 524 bp, Homo Sapiens
attggtatttagttgttttttatcccaatgtcaactttatttttttatcggcgcactgattaactgagccattttgttgacacaggatgcaagctggttctggcctatctgattgaacacaggatgagataaaataactcctggcctccacaccttggaatacgctggagctggtttgacaactttacccaggatgagtaagctctgtgtggtgacctcccaaaggagcatgatgaatggcctgttgcagtgggcatgtgcctttgaccaggcgttcatagacggaggctgggagaggagtcctaaagaagttacatcctaattgtcctcctagctgaagttcatctcaattatggtaggtcaactggggatgaactagacacgatgtccatagtctgctgcacaggccgaatgtttgcgcgcttcattctactgaccagtcagcaccacttttgatagcaccccatcagtggggctaatgaggaaccactactaaacgcatcttaggaacaactggtctggaa

SEQ ID NO: 300380 - DNA, 526 bp, Homo Sapiens
  misc_feature (455)..(455): n is a, c, g, or t
tgcttatatctctgtgtatatctcacttgttttaagtcaatatcaaccaaactgaacctacactttttataagtgtttgaaacacaacctcaacactctgaggttaaagatcagcgagggccacaggattacttttaaaagcccttagttgttattggtagactagcagagagagtctactgggttgaatgtagttggtcagcagagtattccttctgctgttataatctgaaacactgtgggaaaagatcagtattttaccaagcagtcttggtaaaattcttttgataattattgttaattacctggaagaggttttattacatccttcttacagtggtcactttgcagtcctaggatttatcatcctgtgtgtaagaagtgactaaaatgcatgtacattctctacacatcaattgaattcacctgggatcaggcctaagcatgtttagcanattctataatattctaggaataccatggatttcctttagcatcctccagaaacacataccaagttccatta

SEQ ID NO: 300381 - DNA, 217 bp, Homo Sapiens
atgcaggatcccgaggcgagcgatgccaacattgctactgtgcaatagcttctaacacggatgtctagtaatctgaatactttatggggttatatgaaaatgtgctttcaatgttactaattaatagatctttagaaagggttgtatctttatgaccctatattaatttcctcaaggcatcaactgtcattagtaaaaagattacggaagtaaatga

SEQ ID NO: 300382 - DNA, 531 bp, Homo Sapiens
tttttggagggttttcggttttaaaaaaaagggggaacaatattaataaggggggaagggggaaaattaaattcaccccattttctcttggctttttgagaagggggcattttgaagaagattgaaaccgaactggttaacccacccttgatttccggggaaaatccctttgggcgttgaataaaaaaccttttaaaagggggtggacaataggggggtaatattccaacaaaggaggctgaaaccttattggtgaaatgatctttacaataggatcgcgctgtattccctaggaaaattggtcggaggctcaagtaatagaaccaatggagtatatgcatccgtttaactgggaaaaattaacacaaacgtttagagagagggatctgcttgcagtatcacacaacgatattctaaaggcaaggttcataatctcggacactccgaaacattagaaaagatatttcatctaataaaggcacatacggttatatccgcccttctggcgaaaacaaagattatataaccacc

SEQ ID NO: 300383 - DNA, 456 bp, Homo Sapiens
  misc_feature (318)..(354): n is a, c, g, or t
aaattgcctcttttttatgatgctgttttagttatttttcttagactggcggggaattcttggaatatgggaggaagaggcccccccaaacaagggggggaaattaatcccccattgaccccggggtgggcatggcccccaggggggggaatggcaaaacttttcccctacgacggggggattattctccgcaggaataataacctacgagaaccccaaagcccggttttttggggaactaatccaaaaggaggcggccccccccaaaagcaggggaactcctcccccccctaagaaaaaggttggggtgcctggacnnnnnnnnnnnnnnnnnnnnnnnnnnnnnnnnnnnnngggcgctccttttatagggggacacggggtggtccaaagggtgtcaacaaaaaagaaaggggccccccaaaaaatttgggttggccaaagggtttttagaga

SEQ ID NO: 300384 - DNA, 678 bp, Homo Sapiens
ctcgggaaaaattgattaatgcttaaaaggggggaaagagggaacattcgaaactcagattaatgatgctttgtcctcagaggcaattggtttccactatatgctagtgaattgtgttcggacagtgggcatacaatgagacgcctatgttagcgatgatttaaaaagatccaaccaaagactctgtttgagcctaggaacataaatcatttgacggtaaacttctttgacctgattacccaggggttagaggccaatgacgggggtcgatgtcgagaaggaatattctggctactgagacagaaattttaaatacgtggctaagctcttggcgtctatgaaatggcggctcttttactgacttgaggtaaacgcatactcccaaacaaagtgctcaagggaggaagccgtgcaaaaacgagcggagacaggttcctaggggaattaaataggagtcacacaaagggtgggaggaggctttacaaattatggcagaggcaaacagaaagttggctattaagaggtttaaacagcccgggggtgcaaagagtcattttttgactagagaaaggagccggggccttttggggttccggagactttcccggtaaaagcagggctttctaaaaacaattttggacccttttccaaaaggggggacctttagaaagtttttgt

SEQ ID NO: 300385 - DNA, 603 bp, Homo Sapiens
atgccataatttattccatagtataaaaaagtcattcttatgtcacaaaatgccctcttagaagacgatctttttatcttaggtcataactaatcggcactcattcaaccgttggcacctaaaagacagccccacactggacttggccatcagtgctgaaaactatcctgctgacaagatattgacagcatggttcagtactcagaaacacaaattgaggcttttggttcttttaggagtacacaatgacatttgtgtaggcagacgcctccacaaaaatcgataaggtttattcttatatgaatatgcgaccatgggaagtgtactggaagtgttgtgaagcacgaggagattctactacagacaggggctagcaaaccagaaaccgtgtcacacactgtgtcctttcttttatgccccatcatgccagacgggcttggtgtacccactatatattggacccgaatgagctgtgttcagcaacagtcttgacgctaagtgatccccatacctgcttagcaccccagaggaactccgttgaagtttaataaataaggaccagccctctcgtgcccctacgagagctattggcttagtactctc

SEQ ID NO: 300386 - DNA, 478 bp, Homo Sapiens
  misc_feature (285)..(303): n is a, c, g, or t
agagttagtgcattttatgtgtggcccaagataatttttcttcttccaatgtgactcaggaaagccaaaagattggacactcttgcattattgtttagattttttggtcaagtggttgtgtatttatctctgctaaatattataaggtgtcaagattttgcatgatgcttataaagttataaatgcagctgaaaaggaaattatctttgtgcaattttttgataaataaggcatttaatattgttggattaatgaaaacagctaaatcctgagttgtttgcaaannnnnnnnnnnnnnnnnnntttatttaactttaaggttcttacttaggtataaacacctgaaattcacaggttataaaaatgtttaacagggaaataacttcaaatgatgactatcacaattttcataagtaatctacgtaaactactaaaaaattaattaggcaaatgtaatggaataaatgcttgtaaataa

SEQ ID NO: 300387 - DNA, 479 bp, Homo Sapiens
cttattggctggacgaacgactgcatcttgcacgatttacttataagactactcatggccgttgattcatatatttacacactgttttcacactgtgtaacgcagtttgttgaattaaacaagcaacgccagggctccggctcaacttttgaatactgattaccggccatcactatccacacaggaaaccctgcgagagatatgtcaggcattgctccctccgggactctgcgcacggctacagacgaaggactacactgatatgtactgacatccacagacaattcagtgtataaagacagcatgaaaccctgggagtagtgaaactatatctactgggccctaaataatgccactgacaccgccaaaaggtagatgtagcacaaccgctataaatcttgccagattgattataaacatgtgcatactaatgcgtgcttaggaatgtctgtctaatcagactggtaaagtaaaccttt

SEQ ID NO: 300388 - DNA, 273 bp, Homo Sapiens
  misc_feature (179)..(179): n is a, c, g, or t
ttttttaaattgcaacacgaagtctgaggtgaatatcataagagggcttctggatagaaagtttcttccaagagttgcccaagttttaaagattaaaccaatattgcagctttaaagatgaacctaacttttgggaattcttcttcaaagaaaggaaaagtattgctccatctggcttnttcttaagactaaaaagcatacctgggcagaaaactctttattttaaaaatcaaccactgcagggtacaagtaaccatagtaaaagtaccctgc

SEQ ID NO: 300389 - DNA, 595 bp, Homo Sapiens
agcggaacttaatactacgcttcaaagcataatgaatgggataccttactttcagcccaaatcggaagcgccttaacatgagagaactgagcccccacaccaaattttattccctaacgccaacacgcccacatctttcccgaaattatcccgcatactgatgcccaactttaacgcaaaccctatcctgaccactctttcacctgacccaaaccaccatacctgctccgaaacagacttaagtcagacaggctggaagctacatgacgctgaatggtagggaacgtggcaaagccaacaatatagggagacacgtaacagttcttacgtgacaagggaggactgcaggaactagtgctacatgactgtggaaaacataaaaaagagctgcattctggccagtacgtaatcacctacctagcgagatgcgatggaaatgggcacacatgctaactgttgtcaactgacactatgcctctagaggagctgcagattgaggtcctgaagcatagaaaagcaaccggacatattgatatgcactaccagcttaggctacactatgcatactctgatgactggagagatgaccaatgtg

SEQ ID NO: 300390 - DNA, 632 bp, Homo Sapiens
  misc_feature (13)..(13): n is a, c, g, or t
tggggatactgtngacaaagatacagttttattaatgctgaattattaatatgaaaagccttgcaatcaaattaggagagcgcttgataaaacaagccctcttcttgcgagtaatttgaaagaataactgcttttcattacaatctcagctcccagcaggtcctacataaaccaagccagctgcggttcaagaaaaggtccaaaggaggacccactcgaggtgaggataaatcacaattgtgatcacagaccaggtttctatcttttttattccctttaataaattgggcttgacctgaaactccaagaaagttaatttataacagccaaaataattttttttacgtaacagcccacctttctttttcttttaaacttaaaccattatgacaaatggagatttattacataccataaacacatgtggcttgagcactggtatttagtctggaaactcagatggggcagtaagctgctgctgcaatcaggaaatgccatgtgacattcttgataaagacgaaacacacacacatttcacagcacttattgtggccacagtggttttggccattgtgtgggcaccacagtctcagtgcagggctgggaagtgaaagacgattcaccagaccaag

SEQ ID NO: 300391 - DNA, 486 bp, Homo Sapiens
aagttattttaaatattgactttttagcataacaggtaattgctcacaatatatattgaataacttttgaatattatgaaactatatactacatagtggttacttgaaagacatacggatgactaaagaggggaggtaacgtagcatactataaaagaagggatgcaggtggggcaatttcacaaagggaatcacagcatgagaactggacatgtttgttctattcagaaattgtatcttcagctaaggatatatcagaaatgctgccaaagcactgtcagtagtctttatgccatgcataacctggaacatccttttatccgagctaattggaatacttacatatgtgaagctaggtccacatgaaaggtatagcctgagagagacattcctttctaacaaatgacatcgtgtatttacagtaacagcagtcttaaccgtgatcaatgtataatagtcgcagtagatatgagctacccatgtcat

SEQ ID NO: 300392 - DNA, 463 bp, Homo Sapiens
aggattcataacggagattgattggcttgcactaaaggaaccgtcagcaggaaactgaattggctctcattcagtggggaaaatcggtcttaccatgaaatgcttatgagtaccttcaccgcccaattagaacagtatgctatctatccgatcacttaatgagctttgacttacaaaataactcttgaaacagtcctttaaacgcattctgcccgagtggttcaccacatatggtgatgccgtgcttactcatgcgtaagaatgaaggcagggatattcattactgtgatggaaatatgggaaaaccatcattcatgccatatgcacggataatagccaagctaatggccaattcccgcttatgattttggagaatggctcccttgtaatcatcgacatgacagatgacgaaacccctgaagtttcccactcgacacaatacattctgacttcatcagaagca

SEQ ID NO: 300393 - DNA, 465 bp, Homo Sapiens
actttatttaagggccaacgatctatggccgcttgtctcaggagggaaacatgggataggagagccaagggtggtttgctcgccagagcatatcatcacccagggatgaagcccaggatccacatgctattcttcctgatgctatctatgtggagctgcctgtcatcaacaggccctagcgtgagtggatcccgaccatgagcccatgggttctcatcatacagctcccagaaggtctccatcatacacgaaatgggggagatatgtacaatggcactccatgtattcattaccccatctagtagaattataagcagatggccaatctggttcaattgattatctcttgattccccactttcagattaccagatctaattgtgaacgagtgcatatagatgacatgattctattcagaaacactagtgatcattatgagttcacatagggaatcttcatacatag

SEQ ID NO: 300394 - DNA, 605 bp, Homo Sapiens
  misc_feature (532)..(533): n is a, c, g, or t
  misc_feature (580)..(580): n is a, c, g, or t
ggttaatgtgcaggcttgttacatagttaaacacgtgccatggtaaacagctgcatagatcaccccatcacctaggtattaagcccagcatccattagctattctttgtgatgatctccctactctcgtccatattttgttaatgcatctattttacattgagagctccattaaagccatttcccccttagaggaaagtctgaaagatggcacagactgtaagcacataacactgagaacatcacggtgaactaagacaaaaaatgacaacctcccaccttcgtgagccagggtacagagtacaacatgcagaaagattgaaatataaactaaaaagtgacttcatggtcatttatacatatatgtgatagactggctgctttgaattgtccatatctcatctacccttcataagtgtgaactctcccaaggtaacagcaatatggtttcttatcatgctatataaatcaaaatgcttgcttgctccactgacaaatttactttcaacacaaaaaaagcacttatcttttgnntaaaagaaaaaagtttcattttggatgacttttaaccttggcttgtnttgataatttatctaagcgtccaat

SEQ ID NO: 300395 - DNA, 500 bp, Homo Sapiens
tgagccactgcccccggcattcaactatctttttatcagctagactccagtaaagaaatctgaaccactccagttattttaatagagaacatttaataaacaattctgtataaatagctattggtagagtgaaatgctaaattagacattgtatataaaaattattaagtagaattatttagtaattctactgtgaaattattataaaaatagaaagacacagagggtttaactacccaaaggagcccccattggtaacacttggagacccaccaggattgggtaagaaaattcaaattcttaaaattttggaaaggccgttcttgcagctgcagctccgactttcaaaaaacatgctgggccgggattttttgaggtggtttaatgaggctggttctaaaagttgggaacgcaaatgaaaaactgtggccaactgatattaggggaatccactctgtgtttcaggtggatggattttgcttgggggatgctaccaggaa

SEQ ID NO: 300396 - DNA, 564 bp, Homo Sapiens
  misc_feature (123)..(169): n is a, c, g, or t
  misc_feature (171)..(243): n is a, c, g, or t
  misc_feature (264)..(294): n is a, c, g, or t
  misc_feature (315)..(432): n is a, c, g, or t
  misc_feature (512)..(512): n is a, c, g, or t
tctatgagtctatagaggggtatcacagaagcttcctgaatgaccctgttccattgtttcaatctttttccagaatggcatggtttaagaataatattcattatagctacttaattgaaaccnnnnnnnnnnnnnnnnnnnnnnnnnnnnnnnnnnnnnnnnnnnnnnngnnnnnnnnnnnnnnnnnnnnnnnnnnnnnnnnnnnnnnnnnnnnnnnnnnnnnnnnnnnnnnnnnnnnnnnnntgggttcaagagactctcgtnnnnnnnnnnnnnnnnnnnnnnnnnnnnnnngtgcccgccaccacgcccatnnnnnnnnnnnnnnnnnnnnnnnnnnnnnnnnnnnnnnnnnnnnnnnnnnnnnnnnnnnnnnnnnnnnnnnnnnnnnnnnnnnnnnnnnnnnnnnnnnnnnnnnnnnnnnnnnnnnnntgagccaccacgccccggcgaaaccatttatttcttgattaacaatgtggtatgtcatccacgtgtagaaactgtgccangctttcacagtatgttgcttgtgcaatgtggtcattcactgacactttttaa

SEQ ID NO: 300397 - DNA, 495 bp, Homo Sapiens
cgtctacattgaatatacttggtcttattcgccctggatgcaacttattgttgcggaaagggaaagggagcttcaactgcacccaaggtttgttggggggcattaattggccatttcaagcataactggctggggaaaaacaaacccccccacctaaaaccctgggggcattgggactcccaaagaaggccaccaacccccattttttgtttttgttgaggagaaacagtttctacaaagaaacacaccgggatttgaatttatggcctaaagaaaaacacatgacttggcctaaaaatacaccgggggaaaccgccccaaaatagggcgcaaccagccccaaaatggtaaacgggacgaaacaagtttttaagatcatggggaaccagacccacaatttaaaaaatttttttattagaccccttgggccccaagggatggttgtgtgttcaccccacaaaaaccccccgttaaaaaacgctttccagggccatt

SEQ ID NO: 300398 - DNA, 319 bp, Homo Sapiens
cattaagatgtattctgaagtcacaattgtacagccctctttttttctgaacatcaaaaataaactgctaatatgtgggggctattttataatacaaagttaaaatgcaaaaacaaagaagttgacaagggattgagagtctagatctcttgccaaattcttcgctactctacattctagataacctattaaacctagattacctagttctgataccatctttctgatctgtatgactataagaatttaattttcctagttattattatcagtactaatttccctccttactccctttcccctgcctgccatctctctg

SEQ ID NO: 300399 - DNA, 113 bp, Homo Sapiens
  misc_feature (56)..(56): n is a, c, g, or t
  misc_feature (64)..(72): n is a, c, g, or t
aaaaaagtaaaaccgggggcggaatctgggtaatggaattccttaaggatttaaantttttggnnnnnnnnngggaacctttaaaaaaatgaatcccaaccttgggggtaaaa

SEQ ID NO: 300400 - DNA, 419 bp, Homo Sapiens
atgagccactgccacgagccgttgctcccatattgataacgcatgtcaagacaagataatgtctaggtggggccgtataaaccatgatgtggccccctagcgggcagcactgtagctcaaaacatcatatttttgggttacgcaagccccgtgttgcttttgcataccaagatggtgagagggttctggcccacggcttgcaggccaaaaaccctttcactaaccataaaagatgttaaaaagagtttttagggctagctggggacactttgacctctggcaaccccctcttgggttgacggtaaaaatagccccagaggcaagccggcaaggggctttttggccctattctgcggatggtgggctgaggataaacacccgtagggaacccgcttgcacctgacaacaggagggagggg

SEQ ID NO: 300401 - DNA, 555 bp, Homo Sapiens
  misc_feature (109)..(149): n is a, c, g, or t
  misc_feature (310)..(480): n is a, c, g, or t
ggccaaaaaaaatttgggtcccggaaaagcttgcaaaatgattcctggcactggggggggattgtttgaaaaaaggagaagaaaaattttacccctttttacataaagnnnnnnnnnnnnnnnnnnnnnnnnnnnnnnnnnnnnnnnnngaacttaaacctcccgcccgggggaacccctatttttagaggggcccccaccggggtggaactccagcttttggtccctttatggggggttaatttcgaacttgggggataatgggcatagccggttcccgggggaaaatggtttccggtcacaatatgcnnnnnnnnnnnnnnnnnnnnnnnnnnnnnnnnnnnnnnnnnnnnnnnnnnnnnnnnnnnnnnnnnnnnnnnnnnnnnnnnnnnnnnnnnnnnnnnnnnnnnnnnnnnnnnnnnnnnnnnnnnnnnnnnnnnnnnnnnnnnnnnnnnnnnnnnnnnnnnnnnnnnnnnnnnnggctttttcgctttcttggttaattaatcaatagctttggggttcgggtgggagaagcggttaaattcactcaag

SEQ ID NO: 300402 - DNA, 189 bp, Homo Sapiens
cttgtcaccaaaagaaggacaaaattttccccgggttaacccaaaatccatgggcagcataagggcaggtccttttttgcaaactcggttccaaagtcccaggaaaaaacccaaaagttcaccttcccaagggttagggctccccccccaattttttaggtcaagaattgtgtttaggctggaaaaacc

SEQ ID NO: 300403 - DNA, 464 bp, Homo Sapiens
ttctgtttccgatctacattatggcaaatttttaaatgtcagctcaaaaacatgctaacaaaatgtgtcttgtcggaataactgtacaagttttctccagcttattgtcactgaaaaggtctaactgatcacgagaatgtctatcggtgatctgtacgtgagccagtgactgccttctcttttatgggggatgcagaaagtgcaagagttgcactatccatcgcttccctgggttctttaaaaaacacccgttgccctattgcctgctcctctgaacagcttacccccatgggactgtactgagggcctgctcaagatgcatttttacaacacgggtgatattcaaaggcgggtactgcttgcagtcaaattcgttgaccacttaagattggtcccctaaattgattgttaccatgtggaagcgtctgcatgctagtcatgtcccatgatagctacctctttat

SEQ ID NO: 300404 - DNA, 378 bp, Homo Sapiens
gtgtgaaagctgtaggcattcatagaaaccatactttgaattttgaattttgatcttttctagagctagcaaggactcttttacaatgctgggcagcagcagtgagccacagtacccatcagccatgccatcaggagggtgagcaaatgctactctaccagtgagttgccagataatttttgcccatctgtaggctaatataactgttctgtgcacacttaaggtagggtaggctaagctttgatgtttggtaggtaagatgtattaaatgcattttttatttgaggtattttcagcttattatatatttgtagggacacaagcccattgtaaattgagatctgtagtgtgatggaacctcaatgcaagatttcccgc

SEQ ID NO: 300405 - DNA, 463 bp, Homo Sapiens
  misc_feature (86)..(404): n is a, c, g, or t
tttagtgaactaatatcgtttgccgcaacccattgcccaagcccaccgagtcatttatttagaaacgtgaaaagcgtccaattctnnnnnnnnnnnnnnnnnnnnnnnnnnnnnnnnnnnnnnnnnnnnnnnnnnnnnnnnnnnnnnnnnnnnnnnnnnnnnnnnnnnnnnnnnnnnnnnnnnnnnnnnnnnnnnnnnnnnnnnnnnnnnnnnnnnnnnnnnnnnnnnnnnnnnnnnnnnnnnnnnnnnnnnnnnnnnnnnnnnnnnnnnnnnnnnnnnnnnnnnnnnnnnnnnnnnnnnnnnnnnnnnnnnnnnnnnnnnnnnnnnnnnnnnnnnnnnnnnnnnnnnnnnnnnnnnnnnnnnnnnnnnnnnnnnnnnnnnnnnnnnnnnnnnnnnnnnnnnnngcccaagccccaattcctaacaggacaaagccttggcccctttaatccctgttaaatgg

SEQ ID NO: 300406 - DNA, 325 bp, Homo Sapiens
gcccgggaaaggggctagatggcgggccaagctttagggtacagaaattttgcatttggccaacagtgcgttccctgctacaggccaatctccagccccagaactggacagtgaggggcactaacataaagcccaacaatggagggaaaagaatggagctaccttttgtggcaacaaagtttcaagagtggcagctaaataatagtctaggtccaactcttggggggcttccaaacaaggtccctttaaaaacagaactgacggacttaagcgaacattcatattcaggatgaggcctccaaaagggtcggaaaggtttggtttt

SEQ ID NO: 300407 - DNA, 387 bp, Homo Sapiens
cggataaacatcccccaggtgaccattaaatactggaattttttaaggcttattcccaagcttcctttttttatgccactttcccccatgggtgactcatccatgcaaaaattgtaatccctccctatttcaagaggatttttccgttggtaaagggagcccaggtctcacaagaaaaatccagagccatgggcccattttccttcttgtgggctacactgggatataattgctatctgggtcgctgcctgggttagaggcatcctcattaatataataccaaaccaaacctcaggggttactcgggacatctttcactttctcacttagaaataggacccgccaggtttattccctaaatcaaataatccacctaaatcaaataat

SEQ ID NO: 300408 - DNA, 429 bp, Homo Sapiens
aactcaaccaatatccaaaagtaacatttggagccatcatttcaacagcaatttgtaactgacacttgaatacacttgaaggtcacaattaataattcttccaatatactttgtgtataacatctaaaattgcggcagatttgtaaaacaatcagaaaagaatgcaaacatcaacaagaatatagtatcatttctctttagaattctagtatttctaagttctgtattttgcttctctgtgttataaaaccaaataaaataggtctggggctgacaaatggctggcaaataaaactgaaaacatcctaaagaaaactcatctggttttacagtaccagagtaagcaaacaaaaatctgcccagattttcatactactagccatgcttcaaagttgacttgaaatcaaacattcctaagtttctttctca

SEQ ID NO: 300409 - DNA, 220 bp, Homo Sapiens
acaattttagttcacaaaatggggaaaaaaagtttgctaaagataatcgttttcattcttagtattgctggtgcggcatatggctctggaaatttcttgtttactgaaatgccaagaagctatgtccatacatacagagagagaacggactctgctctggttctgttggctccgcctcttgttttgcgttcttaggcttatctaaagatcctcacagctg

SEQ ID NO: 300410 - DNA, 579 bp, Homo Sapiens
ttaaagggagtattgacaggaagcgcttactagtttatctcatagaattagtggaagctttctctcagggatggaaacaacaggaccgccctgaagacttaaattgcaggaggtgccattaacatgtgccagtctcagcaagcccagggcctcgttcccctcccttggtcctacagagacaccatctgattggctcagcttggctccatgcctgtactttagccaatcagctgtggcaacacacacattgcttctaggtcctcattcctgcgggtagaactttctcagagaaagcagagtggcgacctggataggcccccactcgccagagtttcttcacccgtacctgcgggtaggtctttctcggagaaggcagagtggcgacctggataggcccccactcgccagagtttcttcactggtacctgcgggagtgcctactcaggacatgccccagaccacggcctcagctgccgccaccgaggctgtatccgtggtctggtgactagcgctgtctggtactgcccatgacctcttttctcctcccaaggatattttcccagaggcaggactgggagg

SEQ ID NO: 300411 - DNA, 479 bp, Homo Sapiens
gatcttgcgcgggagggggtgtaacactaaaatgcacatgatggtttttccggagcgaaggagcttcggtgaagtaagaacttactaatgttgacctgacgtaccggtgggcattcgaaagatgttcaaaccgtgatgcgaaactactggcggaatacatatcagccagcactttcattgataaacaaacgcaaccttgcaaagcggctgtgccacagttatgtcctgagccatcagtaacagagggcataaccctatcggtgatatggaccttaagaagggattgcattgatatccctattggaagcttgccatcgctggccaagcgattgggtcatgaggagcaaacaggcgcgctccgacaggtgaaatctaatcaagtgctgacctggggtcagttttcgctgcaaaggggtcctggcactacctagtaatgtgtggtggcgtagatatgaccctggggatatatatgcacggct

SEQ ID NO: 300412 - DNA, 593 bp, Homo Sapiens
cattttttattaatagaagcacggcgagacgaggcttattgtttaaccaaatcaatgatgcttagacaggcagttggctctctctatcgaagctgatagaccgttgatttactctgctgagcttcatttgctcatgcttattaaaatggaaggctgagacgctcaaaaatgtgacgttatcagcctaaggccgcttgactagccacaacagagctttttacccttctcgaacaagaacatctacttattgttagtcttggagcactaatctacaaacgctgcgaaatgctctataacacgctttcaagagctcttttgttgacatgagcttgcggtgtacgagctaaacaagtgcagactgtaaattgagtactacttgcttaacagaaagcgtgcatatatatggatcggacgtgaaaggttaagaagtaaactaattgccaacgacagtactagtcgaatacacagctgtgaaaggagggaagctcgttatctaagatgacgtgccacatttggagaacctgggacttaatggagccttatgaagacccacacatgactgatgaggaccccggatggagagggtagtgaca

SEQ ID NO: 300413 - DNA, 427 bp, Homo Sapiens
gagaaaagtcacagttattttgaggaaagcactcccaagagctttaattaaagctggaaggataaatctgtttacagtgtggtgaacactatcattaataaaacattgaaataattaacgaattaaattctgctttgcgtgtcaatggctacgttcaggatctttgagaacgtctccctagaagatgcagtacactgtgtacttagtttgcggaaatgaaaaggaaaaactgaaactgcatttctctgagattcatagatcacagattgagagagcctgaatggagtgaaggctacgttatttttattttataggaaaagaaactcagtttcaatgagcttaatggcctgggttctaatgatgtgcttgaagaggaagattttgatcgcaccactgatacacggagtctgtattttgcatcctagaa

SEQ ID NO: 300414 - DNA, 678 bp, Homo Sapiens
gagatatttattactgttgtgtgggctttacagtcttaacatcgcaacccatgatgacttaccccttggtccgaaagcacgtcattctacattatcacccactggatgctgatacctcattggctaagcaagcaggtccgcctgttaggaatcatctcaaacagcccaagctacaccgtactttgcttctaagagcctaatactatccttaatcccagacagtggcctacccaccctcagacattcaggatattagagggtgtggccatggggtatgtcatattaaaggtcctgattgatgctgacaacatgttactgtcaacctgggtcctttcgaccttaaagctacacaaaatgtagagtttatatgctactcgagtattctgtctcttctaagctagcaagaaacgaaatgaccatttgtgggcgagatctgatttcttcacaatgggtcaacttttaaggtgtatggtgtgaaatcccttttgacctggcacgactgggtggttcgatatgattcaagacccatcaacgtgtgagctcttgaatccattttgctctgtacagacacgaagacgttcacattatgagtaggttgaggcactaccgcggctatggatgttaaaagaaggcttggtttgcaatcctaaaatctcgaacaccttgcgtttgaaaaag

SEQ ID NO: 300415 - DNA, 675 bp, Homo Sapiens
  misc_feature (432)..(432): n is a, c, g, or t
acactagaaatattgataagtggcaggttgcgtgcaccgcacatgcctacacaaacctgtttagacacgcgtggttcggacaaaccattattgcccatgataccccagtgaattctgggaacatatggggcaaaatagtaagccttggggcaagccttcctctgaaatgttacaggctacggctagagttggttttcaggaccgaagactgtggtaactggcatacgttagcaggatcacttgaagactgtggcccgtaaaagatggcatatgtgtggctgacactgaattcggccctgcatactgtgaggtctctttacagaatggactaggtttacaaccggaacaatacaaatgttaaccgtgcacgcatgcacaatgctataaaattggtgctgctgttgacggcacatattgtagacgcatgcgtgncctatttttcattgagaacaacatgacattaagggcatggggaattgagtaggctctatacttataacaaaatttcctggtgctatgaagaactgaacacgagacctttttagataacatcataatccacacgtttagggttgaaatcggcattgatatttggaaaaagatgggggtttaaaaagcgatttttctttcccgacagacacctgaggggcctgtggtagccggaattcgtttttg

SEQ ID NO: 300416 - DNA, 680 bp, Homo Sapiens
ataatacttaggctttgccccagaacaagtgaatccaaacaactttgctggtggcggtgggggtcggggaaaggtgccctggcattagaacttttaagtttttagaatattctaatcataatagtttgagaatcactgcataagcaccaaaaaagcagggaatatatcttatgacccacatatagtgcttaatgcttaacaagcactcaataagttggtgctgaattgattaattactacatgtcctggacagtatagccagggatagtcctagaccaacttgaaaagctaataacatttaactagttccatattcccaagagggtcatctctagtcattgttaagtactccctcaactttctctccttcccttatcccagatttgtgctatttcccaactgtcccggaattatcactaaatccatcacaagatgttaaccaccaagaattgtcttcactttcaagtctcattaaatttccccaaataggaatagaaggtcaagaaggctcttagagacaattgacacaagcccttttcagtgaaggacccaaaatgtgactaggtaatcacacttcaatagaacatcaaaagagaatactggcgtttgacaagagagtcccctgaaacgccttaaacccaaacgagtttgaagcaagccgtccggcctgttggataact

SEQ ID NO: 300417 - DNA, 700 bp, Homo Sapiens
atggacaggaaagatttattaatggagtgtggtgtacacagacttaacatagctgaccaagatgaattgccgagcatgcaaagagcacatcaaacgacattataacccactggcttctgctaacccattggggagccctgttggtcagtatgttacgcatcatgtaaaaagttgcaagctccatctttctttggtcctaagtacctaatgctcttgttagctgcagatctagagctaatcacctgcatacatgaggcaaataaggtgggtgcctgtggggatatactctccccatgatgacagggaacttgtgctcgtggtcccagagcaccaagaggaagggctgctgcactctaaagaccagttaggtgcggtccacatagatagcggatgctgcagccgactagcccgcagtctctgtcacgtccaagacttgtctagtgctgcatcacagaaaacctggagaatgtggggctttattgaccccacacaagttatggcatgaagacaaaaccgatgaattccaatatcttcattgaactgacagcgtattccggcctgggcaatacttttaattgggggaagaggcccggagaggtgggattgaaaattggacaatttccggtttacccaaggattgcctctaaaaacaaaagggccttggagccctgtttcatgggtttcaaaaacaagagtttag

SEQ ID NO: 300418 - DNA, 272 bp, Homo Sapiens
  misc_feature (147)..(147): n is a, c, g, or t
gctactttaacgggcagcgtatcagaagccaggtgctaaagaaaaagtcctgaattgaaattaaagtatctttctggctgacaagcagtagggtctaacaatgactgactcaccagtctggctaggttcttactctttgctctaagntcttgctatacaccttgctagattcttaaccaaattaatattggccccaaataatgggaactgaggtgcaccttataaaagataaaagaaggtcacgcagagacagagagtctcaaatgacaggg

SEQ ID NO: 300419 - DNA, 695 bp, Homo Sapiens
agatttattaatggtcggttggacagacagggttaacatagcataccaagatgaattaccatattgggctgatagcacatcattctacattataacccagtggcttctgctagcacattggaaaggcaagtagttccggatgctaggcatcatctcaaaagaggcaagctacttctttctttggtcctaagaaccgactcctctacttactgcgagactttgagctagtcaccgcgagacttgaggacaatatggtgggtgggggcgggggtagccttccacacatgatcaacgagaactgtctctctactagagcagatgcctaggaaaaaagcaatgtgacgctctttcgacgaacaggttacttgtccaagcccacgaaaggtgctctgggcgccaactcccggttcaactaagaggctcttctcgtttgcgaaataaccccaaaatctcgtagatttgggggctcttctcatgaaaccctacattatttagcaaactccgacggttgcgctcaaaagttttcaatgggcagggttggaagaatacgccaaactttacctttggcggtaacaaccagaggtttaaattcgaaaagttattataagcgaacttcccagtgaactgccccttaaacttatagagccttggatccaaaaataaaaagatttcttgtatggggggtctcaagtatc

SEQ ID NO: 300420 - DNA, 293 bp, Homo Sapiens
  misc_feature (115)..(115): n is a, c, g, or t
ctaaagcaggttgacttggagtaacaaggtttttaccctcctcgggaaagcaaggcttcttaatcgcaggcctggagcacttctttacaaaagctgggaaatcatccataacagntttcaattggttttttggtgccttggctgggggtttacgaacctaaaaagggcaggttggttcttgatttggctctccttctcaaaaagggggcaaatatttgcatggaaggggaaaggttcagcataaaacttttgggaaccgaaggtttaacgaatttcagaactgaaaaggaggg

SEQ ID NO: 300421 - DNA, 465 bp, Homo Sapiens
cggattcttgaaaagcttgtagacaaattatcatccacatcaatctcatatggagatttcaacaaggggtctttcgctcttaaagtgaaccgaagctttgcaagtacattgtccaatatgaaaacaatcatacctcccagaacagataaagtccttaaaagagtgaaaaccaacataaacgtgtttttaaacgtaaacagccggtttggatccccccagatcgggaagctgatcccctacgatcgggaggatgtccaagggaaggctctgaataaagatggaatccatggagaacccccagcatatccaggtggcccacaagatgctcatatcctaaccggaccgacaggaaagccaaagagtatggccaccccagaagtcactgcattgagacgggcatcgtgacatttgcacatgcgccatccacatccatgcttactggcacagacgccttccaagttaaaa

SEQ ID NO: 300422 - DNA, 285 bp, Homo Sapiens
tgccaaagaagccaaaaagttcttaccgcaaagccctgtgtgagtggctgttatacagcagagtctacgatggggtctgaaaccttgtccctgcgttaggaggcctgcctgtcccggcacttttcccatttcttggctactcagagatgcaccagccactttacctgtggctcagctctataatcgacccctgcttccaatccccacgttctccaagaagaaatacgcctgcccaggatcacaggtgccctagctgctaaggcctacgtggtaatgagcccttat

SEQ ID NO: 300423 - DNA, 504 bp, Homo Sapiens
ggtttattgattttaaaccacttttttggaagcttttatgtttttaccaacctaccactgctatgactgtgtcataagatgcacttctttacactcagctgatgaggggttacaatcagcaattgacctttggatgcagagcctaaattgttttaacgcctattattatcttgggtgggcattctggtacatgacgtgctaaaagggttgcaaggaaactgctgcgtcaaccttgttcaggtgcatggaaaatattattatgcttcaaaaactgatttaatttgaccccttgcactaaaaagtatacatgaggtgcatttttccgaaatcacatgtaattgtgctcctacaaacaggaccagaggaaatgtagctaccttaaagacctatctctcaaagcactggaactacggtggcgggcattggaacgctctatgagaaacaccgctctttgacagcgactgggcgtgatccttaatagacgaactcgtagggacatactga

SEQ ID NO: 300424 - DNA, 412 bp, Homo Sapiens
  misc_feature (204)..(213): n is a, c, g, or t
  misc_feature (282)..(295): n is a, c, g, or t
tgggctcaagcaattctttcattttaaccttccgactagctgggaccatacctgggggccacgcctaactaaattttggatttttaatttttggagagatgaaggtttgccatggtgcccaagcttgtcttgaacttttggactcaagcaattcttctggcttagacttccaagggctgggaattcacggctgagctactgtgnnnnnnnnnntactttttaaaataacacaatgtgatgggtattttccagacacgagaagaggagccccttccacctttnnnnnnnnnnnnnncagcagctttttacaccagtgtttaggatgtgtacccggcgatttccccgacgactacctaacagctggtggagagcgtccagaaaaaataatttgttgagaaaaagactttttacc

SEQ ID NO: 300425 - DNA, 482 bp, Homo Sapiens
ggggtgggttttcatacaaatatggttgagagtatatacggagcaccgtgtctcagtgaacgaaggacttatatgtgttgtacagaattgcaggccagtagtctctgtttatgaaatcatgactgttccctatgccacagagaacgatattgtgcgtttatactagttgacacaactttccgttaagagcgacctctcattaaaacatgtcacgacacactggcgtgggatactctccctggtgagaatagactctagttgggggatgatcttaggtacctatgcgatacttacggcacaatgaagtaagactgtgcggcgagaactattttaccgcattgaacagacgaggagctaatatgcactgtagggaggcttggtatactatctaaattccttcataggcagattttcactgttgtgaagaatagcatgaacctgatgaagagcagacacattttgcagttcctgagtagagatca

SEQ ID NO: 300426 - DNA, 521 bp, Homo Sapiens
  misc_feature (89)..(97): n is a, c, g, or t
tagggggagaacctgaaaacttgtttttatttccccccaggggcgggtggtaaaagggcgtttttctttatttaaaatctatcccatcnnnnnnnnnggccttcctttaaagggtgctggcaaagggggttggggctatttgcctggggggaaaaatcttccccttgggcaagagacccccctttaaaaggctggttttgcccctgcctttggggggcgacccttggactcgcaggacctttggggaccagggggttctttttttatttcccctattcgggagaacggaaaggggaaaaacctgggggcctttttattaaggggaacattcccaagggttgccaatttacaagtggggaaatttttttcttccaggggaccacataaaacttaaaggtggaatctagggtttggccaaattttttgggctcacaaggtttgggcaacttttataacttttcttggaacatgtggttccctggccacgaaagcataaaaaattcttgccagcccccaccttt

SEQ ID NO: 300427 - DNA, 534 bp, Homo Sapiens
ggagcttcaaatttttttatccgggaaatggccatggcccaaaaccccccaagggcccagttggggggtttgaccgggggacctgaacatgggaagattagggcaaggggaaaaattttcctgggggtggggaaaaaacccaattaatgctaacggcttccaagtcaaagacctttaatttaaatttctcccccaacttcttccaaactttaaaatcccagttttttgaattatccctaagggcgggcgttgacatttcttagagtccaaggtccttttatgttaagacttgggcaaaacctttttgcggtaaaggagggtttcattccacctgcataggttaagcgaaggcccaccgcccgccagatacaaagcccaaacggggaacccgttaaagaaggtgcccccgtggtcggccgcaacggttacaaaaaagggcggttgagtccaaacggcccgagacgtttgtccggggattaacccccccgggccgtaacaaagacgtcccgggcagacccattggagaacagcttg

SEQ ID NO: 300428 - DNA, 588 bp, Homo Sapiens
  misc_feature (510)..(510): n is a, c, g, or t
tgtcagagagaaaaattaaatgtatacaatttgagacttaacatattagtggtcaaatttattggtgatgaagaaacaaaatggaattgcatctccttgcttgctgagtgataatatgaatttcattcatgactatttacaatgcagaataggagaggtaactagtgaaagtaaagagagtaattattgtttggttcaagtgattcctacaatgcctttaactatggtaggcagaaaacatgaactgaattgaagttaaaactaatctaatcataaagtctgactcttaggaacagactcaagacattcatatgacaacagcagcctggacatttaaagaactcttgtttctatactcctcatccatgacctcattataacatctctctgacctggaatgtgtctgggctggtattttcatctctttatgttgggagacagaaaactagcaatgcttagaggatcagtaccttatagaatcacaatcttctgtgtgtaggacccaagttnatgaagaagatggtgtcacttgatacatctgtgaccacagattatacgctaggatttacttaacgtattcaatccatt

SEQ ID NO: 300429 - DNA, 361 bp, Homo Sapiens
  misc_feature (106)..(114): n is a, c, g, or t
  misc_feature (144)..(152): n is a, c, g, or t
atcctctgggcggcccttatggatggggtattgcaatagttcccatttggccgatgagggacctccccctttaggggaggatgccgtactcaaggtcacccaactnnnnnnnnncaagctttttgtttaacccaaggaatctcnnnnnnnnnccaggactctcacccttcagtgggggccgcctttttttggcacacattcaggcggggataggcaggtttccggtccccggtctcggctggggccggtcaggctccccccgggaaaatggaggcctggcaatttttttgtggtgctgttagttcccctttaggaagtgaggctttttgggctctcgtagttaaaggtgtgttcgcctggc

SEQ ID NO: 300430 - DNA, 306 bp, Homo Sapiens
  misc_feature (47)..(123): n is a, c, g, or t
  misc_feature (130)..(131): n is a, c, g, or t
  misc_feature (171)..(249): n is a, c, g, or t
taatagccccaaattggaacagcccacgtgtccaatgggagacgacnnnnnnnnnnnnnnnnnnnnnnnnnnnnnnnnnnnnnnnnnnnnnnnnnnnnnnnnnnnnnnnnnnnnnnnnnnnnntttcagnngttttcattaaacaaaataaatcagacccaagaatactcnnnnnnnnnnnnnnnnnnnnnnnnnnnnnnnnnnnnnnnnnnnnnnnnnnnnnnnnnnnnnnnnnnnnnnnnnnnnnnnaagtgttacttgaaagggcagagagaactctgggcaggaggcttgtggaatttggat

SEQ ID NO: 300431 - DNA, 686 bp, Homo Sapiens
  misc_feature (577)..(577): n is a, c, g, or t
ggaagactaattttaaactcaggctataggtcaaatctcaacttaatatgaagaaagctctcaaaaggaaaccttttcagtgtgcagactaagaactgtccgctctaagtgaagcaaatgcaccagtagcatttacttaccctaaatattctataggatttgagacacagtttctggatacaggatctaaaaatagttaaaggggcaatacctgctaatttctctatcattgatggctttaacaacttctttcatccactattccctctatataccaggaccctagcccaagggagacacagtagaaaaccatttaaaaccaaatactacattggaagatgaacttctttgttgaactgagagtatacatacactttcaaacagccccagcaaaaatgtttgctaatcagcaagcaaagcactgtcttaagagctttcagagatgataaggaggatgttgatgatagtggttaacatttaaaaagctcttctcacacaacaggtactgtgctagctaccttgtagtagtcactggatctatgaagtagacactactggtatatccatattacagatnaaccaccctgagacagtgaagattaagtaatcttggcaagatcacatatctgtacacaacagaagccaagatagggaggtatctcttactttaaggacacataattaac

SEQ ID NO: 300432 - DNA, 596 bp, Homo Sapiens
ttattttggcgcacggcactagaaaggaactgttgtaaatcaactgattaggttggtaaagggcacggccacctaaggaatcctatggcaaagcgagggcaaattaattctacagactcaaggttatgatggccacgcatgaccacattcctcaggcgtctttaaaagagcttcttggagacacaactttcctaggaactgctccagaaatcggcagcacctgagaatgcttaacagggtagcccatcatggacacgtgaactgggatccgctatgatgatgttgcactctcgcaaaatcacctctgcttgtctaacatcgctcacaataacctgacgctttactagatggctctctgttatacccaggatcgccgtatgaccaatggtgccttaacgtgaaatcaactcagcgagaggactgtcttgacgtgaaagacatcgtcatctgtgcaccaggtatgctcttgtcgtaagcagcttggcgagctatcatgttggttaactgacagtgcttgagaaaagactcagtgcgccgagtcgtttactggggtttagtggcacgctgagtcccaacgataggccatcacgtcctca

SEQ ID NO: 300433 - DNA, 609 bp, Homo Sapiens
caaatagaaatgggttgaacataaaggacacatgttatgtgtgggtgaagcaatgtagggccttctatatagaagcgttcacactatcacaaaacaatcgcccatgaacatgattggatgatgaaaataaaacaaatgtcttgagacattctacatggatgcgcaattcattactttccctttcgcaagaccagcacttgacgccatacacatagtgcccttcacgaaaaataaatactagcctcatcgtcagtgtaccattctattacactttttaaaacatggcaaagagcacatgtgcatgattacaaaaacaagggaaaggtttagtgttaacctagaacttccgcactgatttgtgacatgaaacaaaaaaattgcatcctgtgaattgggaccaaatggtatctcgcttactaaaaaagcgtcacttgaatatatggaggctctcgattggcaatacaagacaggactgtattcacgtattcggtaacacatcactgctcatactaactgcagacaggatgaatgatgacattatcttaccagccacagtgaggcaaactaaatgtgctatggatatggagcaaccatatgtgaggtattaca

SEQ ID NO: 300434 - DNA, 369 bp, Homo Sapiens
ttctggttttattaatatcaattacaaacataattggtttatttgaatcaagtaatctgaagatagtagagagacagtactgtaaatttcaaaggctattacaacaaagtagtcttacataggctgagaaaatgcaactagaaagcatatctaagtaaacaacttctactattgttatttatattgaatgaagtaatatttgatagcccaaaatatataatttatgaatacagccaagaacacacacataaaataaaatgatggctgttgtttctaaaatacctgagaataaacacaggtttctattttactagcgtaacaacacatcctactaagtgaaaaggtaacactcacttgattagtgccaag

SEQ ID NO: 300435 - DNA, 462 bp, Homo Sapiens
tttatttgtccccctttctctttttcatcgttccaaggtaaacgccttgattgccgtaaaactttaaagcactggtattgcaaggctcccggcctccaccattgggtttttaaaacccgaaaaattgccttggctattcaaaagatttctaatccatggggggtttccttgggctgcccggctggaaaaacttcttaagtgggggcagggtgcggactcttgtttctagggccctgactggacggaagctggaagtaaaaatgggattacactctttgccttatggaggaaggtccaccataataattgtgccccggctgaccttgttgccaccagggtaggcctgcgcacggctcttaaagactttttcaaaggcagggaaaggcagatttttcattttcttttcgatcaaggcaagcttggcatttttttcctaaagtggacatacccgcctaggtaggc

SEQ ID NO: 300436 - DNA, 346 bp, Homo Sapiens
  misc_feature (268)..(268): n is a, c, g, or t
  misc_feature (283)..(283): n is a, c, g, or t
taaaagaataataatgaaagaaattacacagctaaatcaaaggatgcacgtgtcagagtaactggaaagacagcacatgaatgccacacaagagtcctgttacgtacaaccccactcacaatcacctcttttttcattctgtacacaccaggctcactgcccagctaatagccccattaagcaaacccaggttctcctatatttcaacctcttgttagatacattgcctcacactattaataagtatcatcagccctcctagctttgncaatgcctcaattcnctttctgcctttgtgcacatcactcccacaatcactggtcgatttattgaaccctgctcatgg

SEQ ID NO: 300437 - DNA, 595 bp, Homo Sapiens
  misc_feature (416)..(416): n is a, c, g, or t
caactttatttggccaagggggtcaatacggttgtgaaacagaaatgcctgaagaactagaaccgactgattcaactgcagcatgcttgggcacctggccacccggaaaggaagggtagtggttatggcttgaacagaccacaggccgtgctagagagaggccagtggctacaatgcgcccacgactggaggtggagccctggcttggagaaaggggaaggcccagccctgtgccgagccccatggatgtataacaccatctcctcttcacaacatggtgaacaccctggcaggatccagaagtctccatttacccaaaaacgcaagagccatgatcagacatggccacactgcaagctgtacatgagtgaccatgtccagtccggattcgtcctgtgcacacagcagactagttnttcctatgtggactgagcgaggtgggacagagaccctgcctgctctaaaggcctaaaaaggccacagacggaagttgtcagatgaggagaaaccttccgcgggagggaggtatcatgacttcatacacggttgctagcgacttggacagactcatgtattaaaaactacatgatggctt

SEQ ID NO: 300438 - DNA, 616 bp, Homo Sapiens
tttctctctttcctctcttctaactctctataatttttctaaacagagggtcaactgcaacacacgcgttcagggggaggggaaaaaaaatctcgccactcaaccaagtttttttaacactgcaaaggatattttagctcccccgttggcgagccactttcctttaaagggtgcctaaaggtccccatggcttcggcgagggtcttactcctttgaaaggaaagaagggccttcccaccctctgggtggggagcttccggggccaattttgaaactggaagggccctgctccaattcccaaacaaccgaatggtggtacggacgcccacacaagagtccctgcctccaaagttaaaactaaggggggaccttaaggggaaattatttttcttcaaaaaagcccagaactgcgttccccggggggccacagccccctggaggggacggggttaggaaccctcatttttaggggcccaggaccgctaataaacagcccccctaaatgcggccttgttatcgccgcccctggaaggtttaaaatcaacacctgcggccagcctctggaaattcttacagaaaccaccgtgggggttatggaacaccctgttctttttct

SEQ ID NO: 300439 - DNA, 593 bp, Homo Sapiens
tatagtacaaagattaggctttatcactatttttaaaagacaaatggtacttatgttacatgctcgggaggcatgattggtggatgatgcacacctattagctctgtgttcctttcacgcaaagccagtcagaaagcaggttatatattcttcaaaaccatcctacctgattagcatccttgccacctgtggctctgaagaccatgtactacagtgtgaggtcactgttgacgccaaaactggcaatactaaagcattctttagttactgcattgacaaactctgctgttataagagagagcttaccattctgacgaagaggagagaacccccatagtctaagtggctcaaggacatgggagttgtctacgcagaagaacgaaatagctgctcttgggttagaaacttgcgttagtgaagagactttccatatcgcatgctacgttatcagcacctgggaaatgcagttcaatccccaatggcttcaatacattcattgtgcacatttgacatgttccattgttacataaccgagggtccaggcatgaatggtgaaaacattgacgcggttagaaatcagaagatagattttt

SEQ ID NO: 300440 - DNA, 438 bp, Homo Sapiens
  misc_feature (79)..(88): n is a, c, g, or t
gtgggcgggcgcgcgcgggtacgtttgcaccgtgtgggtgtcttcactgggggagtctggatgcatatgcacttacttnnnnnnnnnntattaaatatggagcagcttttcaggactctgtgactgccttctcctcagggtcacattgagtttgaatttgacccaaggtgcaggaatcctgcaatggggaaataaaagaatatccagaacggggtcaggtcagctgctcaaaggccaaaacccccacagcggctttgattttattttttggggtatattttaggccccccctgccgttggacaaattgggcctccccctttcaggtgtttggtctgtggtttaaaggccccaaagcctatgcctgcataaacataggctcccagcaacaccagaaaacccccaattccgaatccaaaacaaaacccgggaggaggggg

SEQ ID NO: 300441 - DNA, 590 bp, Homo Sapiens
  misc_feature (564)..(564): n is a, c, g, or t
tgggagaaggaaatgaccacccataccttataatgggatttaaacggcactaggagttcgaacatggcttttcgtggtgaccatacggacctgacacatggacgaccatagtacaaaaccagaacgataggtctcatgtggtaggatgatgggccagaaactagccagaacgactgtcaaacgtccagtcaagaatctccagagctgcatgcttcactgcggagggacagggtgtgctctgcacttcaggaaagatgcctaacatgtgcctagaaatgtgggtgtcatgataggagatgatcgggtggtacatgaggggctgagcttgccaggcatatgaccatttacagagccctcttaggcacatgcgcaaacgggtgtatgaagatgatcgcaaaagtaccagatgcagttactcttacactacactgacacagtactgtgatcccacttatgcaacataccatcatggtcgttgttccacatccatgactgatgcgagctgggcaggagacaaactggccagtagcatcatgcacaaggaccacagtcacaagagggtgntatactcttcctacacaaacaagtta

SEQ ID NO: 300442 - DNA, 497 bp, Homo Sapiens
tacaaaggctttattcatgtgtgatagtgaggaatatgctgagtctataggtccaaaacctaaatggctgtggaaaatgaggatatatgcgttttttagcaaaatattcacgcgttaagtttttggcgcggcttaaaatccaaatgcacttattttattagcgaaagggggaagagggaaaagacaaactattattgttcagggagataggtaatgactgaaattgaaagcctgcctttggagccatgcctccatctaaactgatatttattcaacggtaaccactcacgaattgttggcgtgcctattctcactaacgctttttcaacactggggaaggaagaaagccggacatatcctccaaaagctgcaataaccttctagctgctctatcataaaagaggtggcttgagtcaatctgtctatgacataaaacttaaaatgtgccagccaattcaggagacttctgcatgtttgcacaaatctactctctatga

SEQ ID NO: 300443 - DNA, 431 bp, Homo Sapiens
  misc_feature (103)..(103): n is a, c, g, or t
agaaaattcaaactgctttttaatgtcaaagaaaataatactggctttatcttaaatgttattacatggaaatttttagagcaaaacccaaattaattctgtngtaagcaaaaagaactcatcagattcttaataatttagcttaattttctactctgtaatttcctccaaaatgtgggcaccaacatacacaacacatcttgcttgttattttttcttatatccagtaatagggagtttcagagaagtggatttttctcaataaaacatgacaatctaaaggtgttaacccccccttgatttttaaaggaaatatagtgggaatatattaggttttacaaagcatctgctaaccaaataccaactgactacttaattccaggaaagccttacggcaccatttttggcaactgcgaaaaagctgaaaacaa

SEQ ID NO: 300444 - DNA, 469 bp, Homo Sapiens
tctgtaaatccatgcctaagagggcgggaaataggtattttccaagccaagattgattaggaagtgtcatgagaggcccctggtttccaataagacctttcggaattcgctaacacaggagtgcattcaaacgaagagccaatatagtgatgagctccaaagagggccgggacgggcgggttggcttgtaggtaactgaaagtgtcgaaaggaaaattctatggcctggttgcgtggggacttgaactccataaaaggggtttgagaccggaagaaatttcccctcatgtttaggaaattcacatgagggggggtttcccggctctgagggcagtgccacgtgttttctgtgtagagggagacgatactcccgttcacaccccaaaggtaaagaacccccggaaaaaatagcgggagacgggcgcctttccgatttcaaaagaggctcccagaggggtggggggatggg

SEQ ID NO: 300445 - DNA, 662 bp, Homo Sapiens
  misc_feature (373)..(382): n is a, c, g, or t
  misc_feature (491)..(501): n is a, c, g, or t
  misc_feature (567)..(575): n is a, c, g, or t
tgtgggggacatttgattcaggccaaaaggggctggcagttcgggaccccccgaaccacatttggagtggtgggtattcccataagggccctttgtaaacccaaaaaacctttatggcttttggggaaaatatgggggattaaaaaaaacccccctataagggatagattctcaaaaattcccacaccggggctgttttgaccttgtgggaaacaaaaatatttttggggaaaatttttgtgagactagttccgcgggtgtctctaggaccaaaaaaagggggttttttatttccagaattaatatccccggattttgagaaaaattttccacgcgaggggaggatcctctagggtttatattttagcggtgnnnnnnnnnngtgtaggagagaaatctttctccgcattcacgttcttgtggaaaaagaacccgaagaaaaagtctttgataagggcctccttgttttttgtaaaaaggggcaacacgcnnnnnnnnnnnaagcgcttaacaggaaccccgggggggaaatgtaacagtgtggccgaaggggtttttaaaagggannnnnnnnnccccccctcttttggggtattgattaaaggagctgggtgctattgttttttccaaaggagctttgttgtttaagaacccgactccac

SEQ ID NO: 300446 - DNA, 673 bp, Homo Sapiens
ctagagtactattttactgtgcttttagggccaggagaggggtactctccgacctaacagtaaagagactgtctcataagatgctcttgcttcacaacaattcctgactaattctaataacgacgatgtgcattatatcaggagcctatattaggaaagagtttattagattcacatcaggcatcatctggactgtatggaactaaaagtatggtgccgaaattgttaagcgaagattacgcagggcttggacatcaagactgaggttttaatacctggataattttctcgcacatgtccaagagatgccacatacggggggattccttgggctgacaggatattgcgacttcttttctgtgttgaaggatacgatgctcgctttcacggcttctactagagggacccgtgatatgctcgcggcgtaagctcctacccagtttagaaaagagccaccagatgataggcgtacggatcaacttagaagcccctgaggcaaccctgccgtgggcccctcagaactttacaccgccccgttaatgaactcgtcaagctttgccttgttgaggcagccttgcaactcttttcttcctagacatgcccggtaaagcgcgtcattacaaaacaaattttctagcttttatattcagggcaacggtggtaatttttatgt

SEQ ID NO: 300447 - DNA, 686 bp, Homo Sapiens
attcagagcattattgatttgcactaacagagcaacaagatggctattcaataaactaacattcggttttgagactcggtgagagctgtacacctacaaaaattccttaccgacgagattgcaacagatcgcattatctccaatgtcttaataagggaagagtgacatgatttcacatgtgaggtaatttggattgcgtggatcgcatggcattcaccagatatttacatatcatggttacgcaggcttacgaattaaaggacgtgtatttattactctgatgggcttctgggacatccataacagatgcaacatgcagggatgatgcctcggcctagggataaatgcgcctttttattgtcggtagtgtatccatatgttatcttttacgcgacagaggaggaaactcctgatggtacggcttgttaaagcacatactctcttggaacgagcgcctgatgtcttgccggaacttgatagcattagtctgctgttaaggaaagcataatcgagccccactaggtgctattgacaagtacttgcgatggactatgaccaggcacctaatttgtggcaggatcccagggatatgggtgcttctttaggaattgctgtttagacctgggaatttcacaaagtaactgtccacctttaattaggccggaaagccctgtacaaatttttgg

SEQ ID NO: 300448 - DNA, 466 bp, Homo Sapiens
caccacgctgtcaccaactgacgcggtcgatgccatctgaagccaaggactcgtggcctcaggtgctcctatagcattgagtgctccaaagcgctgaaatgacgggctggtcacaccgtccctggactgagccgctgaagctaacacagtgaccattctaagggacagctacccaatgtgggcactaaaagcaactccctcaaagttagaatattacccgaacggctccaaaaccaccgagcttttccaccttacatactcaaatggctctcgcattgaaacgcactgcaaacgaaccttacatgccctggtgtagagccattctcgctgcacttagaggcagatataggcgccttcctggcaacgaactcctactgcgtaggttgccaagaggagaagcaaagtcgtcacttgatggagtgagcattgatgctatacccaacggtctcgagcttgatcgactttt

SEQ ID NO: 300449 - DNA, 288 bp, Homo Sapiens
tccgatcacaaaatattgttttagttcccaatttggggtaggaaaaaagagttggggtaacaacctttttttatacctttttgttcaaaatttgtccccgaaggagggggcgccaaaaacccctccaaggcaagttttgcccccgatgttccatcgaaaaaagaccccaagtgaggggggctgtgggggtaaaaaagatgctcttagctatctttccaattccggtttgcgcttgtcccccctcttcagccattgctaatgcggggtgccccgtaagagcctgacccc

SEQ ID NO: 300450 - DNA, 503 bp, Homo Sapiens
acgcttttaatcaagcacatgcacgaaactaatggctctaaattatcattcattactcactttgcggtgggttacagtgccttcatatcaaaatgtcagaattcgaaacgaatgagcatatgcatgaattagtacaagagttacaccgtatgaataatggcagacatatttgagccgaggcctgaccaactttacttaccggagctggtatgcttatgggatattgggtgtatggcaagatttgttgataggtcagagaagacctagtccacggtatgtgcatgatcaaaattgaggcgtacgatatagtggttccgctgaccaaggggatatggttattcaaacacgtttgatccagctttgcgaggacggcgccagaaaaacaatcccttccgtagctgcctgaatatggttgttctttaaagcatcaacagattccagggtagagctcttgcagatttgtgcctggaataacactagctacctgcgggcaagctctactt

SEQ ID NO: 300451 - DNA, 492 bp, Homo Sapiens
  misc_feature (399)..(399): n is a, c, g, or t
tcactgcctggtatgcgccaggtgggcagcaccttttttgctttaaagggtttttcagtgctggtcttacaagaacctttattagtcattgtatcggcttctggccttgggggtgtcaacccttgggacagtgtggacttaattctggcggagataccaagggctggctgcggacatcgataagattgttattattcttaaactaacaaaaaaccgtctaaacctctttataagccaaaacgtgcagcccgcattccgggaacatcacaaaatttaatatgggcaactactccattgagcgaaattatatgcgcctatgggatggccaaatccccattgatggcggccgctgctactaagagccttgggatttccaataaacaagtgtcccgcggagtntaagggaagtgactcaaccttctgggaagctcttacacacctacatggtagtttgtcagatctgactgaaactggctacatttgtaaacagaa

SEQ ID NO: 300452 - DNA, 498 bp, Homo Sapiens
cactgcatggtaagagccatgttaaatgaacctacattgctctaaagggatttcatatgctgatctttgaagacgatatataagacatagtccctgcttctggcgttttgggagttaacaatcgggattggaaggagttgggacgcctggagttattaaggactgactacggacatcattagtttgtttttatacttaggttaccaaaaaaccgtttctccatctttataacgcagttagtgcagcccacattccaagaacattgcaaaaaataatttgaacagctactacattcagcgagattgaagacttctatgggctggtccatactccatagataacggcttctgtggcaaaatgcgtttgaatttccaataaacaagtttacagcggcattcctggaaaataactccgaaatatgggaagcacttacacacctgcatggaagtactgactgagacttactgcttacttgctgcattttttagatgagttcaa

SEQ ID NO: 300453 - DNA, 337 bp, Homo Sapiens
agtagtgagtgtcaacattgcttgaaaactcctgagtccgagaatgaactcccatgcacccattttaattgtctaatccatgatgcaagggtacttcagagggaaaggctcgacacttttttgaagtctgaaactgaacgaaggacgtcatacatacgatgtgttggcccataggtccgacgatttaaggtagtttcattggatgggaggacggttggtgtgcatgaatcaagcggcggagcacactgctgactaatgtgtaatattggttacagtgttagaaacatttctgagtgggagacaggctattccatacaaagagggattggtagggtcc

SEQ ID NO: 300454 - DNA, 711 bp, Homo Sapiens
  misc_feature (516)..(516): n is a, c, g, or t
  misc_feature (571)..(571): n is a, c, g, or t
gtattattgtattgcactataggagcgggaagatgggtattctaccgaccctatcacttcgaattctagaagacatctgtgaggatcgctgttacatctactaatgacatatcctttacgcagtctggattacgaacaggatgtgcatttatgatccaggtatgccttatattagggtatagagttacattatttacacatttgagatatctttgaatgcgtggagctcaaggaattgagcggatatttctatatcatgtttacttaggctttagaattaaagcaagtgtatttattaccttgatggaaatatgggaaatgtctaatacatgcaatatacagggatgatacttgagctgagggaaaattgccgctttttatctgtgtggaggggtgcatatataatctttcacctgacagactaagaaacccatgaaggtctgcactggttagagatactttttcgcttcgtcagatgcgcctggtgtctagcgcgaattgatcactagatactgnttcaaggacaccagaacgaggcctcccaggtcctatacacaagagctgtcaatgnaatacgacacgcagtgatttattgcatgatgcacaggaatatggctgttccttaagacatgcacgttcagactgtccataccagacgcaaagattctatgtttatttatacggctaccattgaaaacctttatgtgaggt

SEQ ID NO: 300455 - DNA, 672 bp, Homo Sapiens
ttcacgagaaatatttatttatgctttgtggggttgacggttttaacatagcaaaccaagatggattaccacttgtgctgaaagcacattattctccattataacctactggattctgctaacacagatgtgcattcaagtaggaccgtatgttagggatgagctcaaaagatccacgctacagctttctttgcgtcttaaggacctaatcctcttcttactaacagtctatggcctgatcaccaagagacaggaggacaataatgggggtgtagtgccggaaaagtttcctcgctcctctgaagaaattcacatccggtgcgattccttcagctgcaaggatatagaaactctttgactgtgttgagggatctgatactgcctttcagggcttctagtaaaagagcccgtgatatactagcggggactggctccttgttgtgtttgacaagttcccccaagagtgtgggagaattggttacctaataatccgtgaaggacaaaccgacggggctctataagacgtttaaaaggcccgggtgcagaaaaccgccagggtttcattagtgaaggcaacctggaatctcttttcttccgaggcctggccgggtaagccggtttttccaaaacaattggttccgtttttttacaggcaaccagggtaattttatg

SEQ ID NO: 300456 - DNA, 512 bp, Homo Sapiens
tcttttgttgggcctgtagggattttcagaaaacaggggtgtttttttgtaagacagggagcccagcttctggggccagccttgttgtaccgtctgggtcggaactatgcttttgttgtgcaccgaatgggctgagggatgcttaattcatgctaaataatgacagaagtaccccgtttgcccgagaaaatagccttcctcctgagggccataaccgaatatgtccacttgtttttaagacggacggaagctgaaggcatccctcctgctcactggtccttccactttagatgaacaggtggaactcacataacacaacctttttcgacaagatttcctttagagagagaacattctagggatgtgatcagtgggcatccgggctccaagcgaaaaaggcaacctgttacatagggcagttcccatttagccatgcaggcaagagacccattaaaaccttatgtgagggaagaggtcccagagaaaaggttcctctctgcgtccctgagaaa

SEQ ID NO: 300457 - DNA, 473 bp, Homo Sapiens
agtcatcttagcatgatggggaaaggcaccccaaactctgttaagattcttataaaggaacggttgatttttttgccaaactatgctttggccaaggggaaataaccacctggccacccttttctgcccccctacaggacactaagggttgttacagataaaggcacgatgcgtttatgctgggagaactaacaacacctgatttctctggtataaaaaatattgccaaatttgattcactttatgaaaagaaaatgtttttttgctgtaaacccattgagaacatagctgccatccgtgcaagatgagggtaaggccacctctgatactaagaatggcgccccactattgcaaggatgtcacacctgctgcgcgtgggcacacgctgcgtgatacatctttgagaccacggatgggtaccggccattaaagtccagtcttttaatgaggatttgatctacctcggttggcta

SEQ ID NO: 300458 - DNA, 285 bp, Homo Sapiens
aagacaaagcagggctggagtgccaccatctcgacccgctgatgcgaacatttgtcgggatcaagcacattggtaccctaaccactaaacgggttgggcaaagaccgaaggatcacatccacgacggggaccaattggatcgctatcaggaggccgccaacaaccgtaaagggcgatgctgaaataccacttacggcagcctgaatacatgtgatacttactgccaaatctgcggaaataatatgtaagacccagtggccgaaagctattaatgatacccgaccc

SEQ ID NO: 300459 - DNA, 243 bp, Homo Sapiens
tgagccaccccacctggacgatttctaaggatttttaagacattaaagtcaatgtctctttagtaacactggaaatagaatcccacccttttcatttgcctttacgttttctttatggtgtttttgatgtgtagaaaaatttgattccttaatgtatacacatctatcagacattttcttcatgctttctcgctctagtgatatgcttagaaatatcctccctatgttgaaatttaaatactc

SEQ ID NO: 300460 - DNA, 520 bp, Homo Sapiens
gatgaagtctcactttgctgtccagggcggtcttgatatcctgggctcaagtgttcctcctgccttgatttcccaagtgccaggattataggcatgtgccaccacagctggcctaaagtttactttctaaataagtatttagatattttaaaaattataattcaaccccacactgacttgatttatatggtaggatctagttatctgggaatcactggaattcgtaagaggccacttataatgaatacacttaacgaatggaaaaatgtttgattagaactttatcttggaaaaggaaaccctgccaaaaagtttattttatatcatatttagggaaattcaggttatatttgcaactatgctctagttgtgagaatgaacactgaattttcatacgtacacaaaaacatgtaagcacacatttcgttctatcagcttcatcgatagcaaaacacatgctgtttttagagatgtcaaaagaggagcattttatgcatcttagaatcaatgaaacacacag

SEQ ID NO: 300461 - DNA, 548 bp, Homo Sapiens
  misc_feature (494)..(494): n is a, c, g, or t
gacaaggagggtattaatgaccacgattggttgaatgacgatggacgacactgtacacttgccacatgagggagctaatccgtcccgaagccaatactgccgctaaaggtatgatggcacatatacgaacagctaattcttaaagccggcgaatgattgatccaaaaggaagggacgcgtttatttataaggataagacttttgccaggatagaaaatataacctgttcactttcaaaaaagtgagaatgctcacatgtcgactatgacaccaaaagggaatacgctgagtacatactaattggctaaacatcaatgtgctggaacaagtctgtcgaacgattactctatgcttgagaaaatgaggagctttgtgactatgccataaactatgagagtaatatctgatggacccacatctactaacgtggtcgaaaggagtgaatacgctagctattacccttccgagcatgtccgaaacaagacagaggtatngcaactgctggtgccaagattctcgaatcggtgggatccacttagcttagagtg

SEQ ID NO: 300462 - DNA, 542 bp, Homo Sapiens
cgaaggctgccatttttaataaatcgaagcacatacaatataggcaaaatgctacatgaaaaatatggtttttaaacagggagttggctttacaccaacgacatagacaaacagatgaataatgctacagggcttcatttcctttctctgattattaggagaggctggcgatgctcttaatgtgaagttatgagcctaacgcctgttgacttgcagcaacaggtcttttaccctactcggcaaagctggtattcttatcgtaagccttgcgccacttttatacaaaagctgcgatactattcataacaacttacacttactcttgtgttggcgtgggctaggatttcacaggctgaacaagagctccttgctccttgagttcacatatgttgtcagaaacgtgtgcataaaaatgcacggaggtgaacgatcactcttagacgatgtgcagacctatgtacatatattctcagagctgacaatgatgggcccctgttcaccaatgatactgcgcagcatgtggcgacttttgcactgactgg

SEQ ID NO: 300463 - DNA, 1387 bp, Homo Sapiens
  misc_feature (90)..(90): n is a, c, g, or t
  misc_feature (247)..(247): n is a, c, g, or t
  misc_feature (464)..(464): n is a, c, g, or t
  misc_feature (509)..(509): n is a, c, g, or t
  misc_feature (638)..(638): n is a, c, g, or t
  misc_feature (674)..(674): n is a, c, g, or t
  misc_feature (696)..(696): n is a, c, g, or t
  misc_feature (758)..(758): n is a, c, g, or t
  misc_feature (765)..(765): n is a, c, g, or t
  misc_feature (855)..(855): n is a, c, g, or t
  misc_feature (898)..(898): n is a, c, g, or t
  misc_feature (903)..(903): n is a, c, g, or t
  misc_feature (928)..(928): n is a, c, g, or t
  misc_feature (937)..(937): n is a, c, g, or t
  misc_feature (957)..(957): n is a, c, g, or t
  misc_feature (1017)..(1017): n is a, c, g, or t
  misc_feature (1038)..(1038): n is a, c, g, or t
  misc_feature (1047)..(1047): n is a, c, g, or t
  misc_feature (1085)..(1085): n is a, c, g, or t
  misc_feature (1092)..(1092): n is a, c, g, or t
  misc_feature (1094)..(1094): n is a, c, g, or t
  misc_feature (1171)..(1171): n is a, c, g, or t
  misc_feature (1205)..(1205): n is a, c, g, or t
  misc_feature (1235)..(1235): n is a, c, g, or t
  misc_feature (1245)..(1245): n is a, c, g, or t
  misc_feature (1269)..(1269): n is a, c, g, or t
  misc_feature (1296)..(1296): n is a, c, g, or t
  misc_feature (1298)..(1298): n is a, c, g, or t
  misc_feature (1340)..(1340): n is a, c, g, or t
  misc_feature (1350)..(1350): n is a, c, g, or t
cctcctcttgctcccaccctcctcactaaattcggctgatttcggtggacactgcgatgtggccagcatttgtttatttcttggtcactntcacccggtatggggcatattttgaacctacccgtatcatgcgggactcgacaatatttgataaaaatcgctcgtccccgttacctttctctacttctatccatcatctcctctgcttctctacgctcaactctctgatgactccgtcgcacttctngtcgcactttacgacgtactcgtccaccaccagcctcacaccattataacacatgtaataatttatcttcttacatcaccgataactatactctatccatctctttctcttgctatgcaatactggtgccgctacaagcgactcgcacgcgcaatatcattatatctcatacatacatggacgtcataatgttcgtcatcatcacccgactactgtntgtctcgcgttcgcgtgccatcctcgcaggacacgcgtgcgttanactaatcatgctcaacatttgaccgatacgggacatacactctctaactcatcacgaaccacaatgcttagcctactaactatcgctatctcatgctggtactggtctgacgactctccgcaacacccngaatgctatgcttgctcaacctcgctctacatctancgtgattcacgtccggcatgantacatcacgtctacacgcgtgtcctctacttctcgacgcatggtaaattcatagtgtacatntgacgtnttctatcgctgacatatatctgtgttgtatcccgtgcgtttcgtacgtacataaccgacgatgatgtcttatcatgtctcgcaggacacngtgtcgtcaagacgtgcgcgtacatgcttgtgatcactgtacngatgnacatgtaccgtgtgctctactctangacatctgnctatactatatctggactgntctcattacagctagtcgtgcgtacacattagctcgcacgtctcgctatcgttcagtcgnatctcgttactcacgtacacnttccgtctnacgagtatgtgacgatgcgatcggctgtgacaggctangtcgtancntactgtgcgtatactctgctaagtctaactgtcatcacgaactacggctgtattctctgctgtcactactgcgtganctactcgatcggatacttcactagacacgcctantgcgcgcacatctgcgctctgggactcgangctgagcagngcgtcggacaacaactgtcatgtnattgcgtatgtcgcatctacactcgcngncactcttagcacgtacgacgtcgagactatactgtcgtctgngtagcgcacnggtacaatccgcactgggcactcgcgtggtcatacga

SEQ ID NO: 300464 - DNA, 591 bp, Homo Sapiens
  misc_feature (424)..(432): n is a, c, g, or t
  misc_feature (477)..(505): n is a, c, g, or t
aagaaaagtaaaaaatagtacaaaggtagacaaaagccattcattagtccagtttctcccctcaactttaccctcaacagccacttataacagggaaccaaaaaagagtagatcatgctcttaatgcctgaaaacacgtgaccttccttcatcttgagaatgtgctagcaccatgtcaaagagcttcattgtactgcatgcacaaaagggggcagaattataatgacctaagtatttgaccttcatgtagtaaatgcatcaaagcttggctccctaacaattttttgtcatttataatagaaactgtttttcatgcaggaaatgccacttttctttcaaggacaaaacccagaattttactcagtagtttttttaagttgcatatatcttaagtgctacattcttgataataaacataaaatcnnnnnnnnnaaatcagcagataagacaaatccttctcttctatttgccaatgcnnnnnnnnnnnnnnnnnnnnnnnnnnnnntttcatacccacattccctctctctctagtgcacgagtgaaagttcttatccaaagcaggctaaggatttttcactgtgatcacat

SEQ ID NO: 300465 - DNA, 546 bp, Homo Sapiens
ttggaacaaatgctgttttttttaatagctgttttggaatacaattttagagcagcgctacctattcaatgatggttataaaggtgcacgaccaaacatctgattcaccgatgcggggtatgtttcttacaacagggatgtatatcccggcttgatcttttgaaagagagtgcataccactttatctgagattatgatcaccaacgctgacctaagaatccatcctatacttcggggagaccctgcgaattgcataatacagatgataaacacgagcgactaatacgtgcttaatctgatcatccttaaggaccatacgcactacgtgtgctccagagttgcataggaaggtgagcgctgaaagatacatctcttctcatatccttcaaataggtctatgcatactactgatgcaaaagcggcgtacgaggcactatagctctgagaagaaggctctgaccatcgtacatatattgctcattgagtactatgactgccctacgtttaggcatactcctacactggtctgtgccatgcatttgcatg

SEQ ID NO: 300466 - DNA, 540 bp, Homo Sapiens
  misc_feature (366)..(366): n is a, c, g, or t
aaggctggtttttgtaatagctgtttgggattgcaagtttggaccagcgctccctactcaatgatggtttgaaagctggactacctaacttcaaatacactgatgcggggtaggtgccttacaacagggatgtaaatcccgcgcttgatcttttgtaggcgtgcgcataccactttatctgaaaggaagatcacaaacctcgatctaagaatccaggctagacgtctcagaatccctacttattgaataatatagggtcaaatcgcgagcaactacaaacgtgtttaatccgatacagcttaaggaccagacgcactacgtgtgctcagaggttgctaggaagatgagggctgaaatataaatccnttctcatagcctacacatagggctatgcatcctacagatcaaaacacggctcacggagcactatggctctgtgaggcaggccctgggcttcgtacttttattgatcattggccacatgactccctactgtttatgcataccatacaccggctgtgccatgcattgcatagccag

SEQ ID NO: 300467 - DNA, 503 bp, Homo Sapiens
  misc_feature (129)..(188): n is a, c, g, or t
ttttatgattataagcaacgcaaggaaacataaaatcttaataagagaaacagttcctttaaaggagtccgcataatcaccatcatgtgaatttaatacgacttcattcttagaaaacttaggtgaatnnnnnnnnnnnnnnnnnnnnnnnnnnnnnnnnnnnnnnnnnnnnnnnnnnnnnnnnnnnnattaatagtttacctgttcactgaaaataggcattttgaaaatacagtgggagaaaatctatccccaaaacaaagatcaactagaaataacaattatttaaaaatctaagacccttgtgaacaaaaaaactataaaattttgctgatggacaagaaaaaaagtatacataagtcttttttacatatactaaaataagcatattttagtatatgtaaaaaagtacaaaaattaaagaataccacagcctatttgcagaaattgaataaggtaaaaggtgtaaattctttagaaaataattaatagtctaatacacc

SEQ ID NO: 300468 - DNA, 344 bp, Homo Sapiens
  misc_feature (168)..(229): n is a, c, g, or t
  misc_feature (236)..(293): n is a, c, g, or t
ggggaaaggggtgtccatcccctcacccggggagggggatacccccctccgggccaaaccccactttaaatttttcaaaaaacccgttgggggaaattggaaaagcccgggggccccttttaaaaaaggggggtcacccaaaaccaaaaggccctctgtttcccaaannnnnnnnnnnnnnnnnnnnnnnnnnnnnnnnnnnnnnnnnnnnnnnnnnnnnnnnnnnnnntacaaannnnnnnnnnnnnnnnnnnnnnnnnnnnnnnnnnnnnnnnnnnnnnnnnnnnnnnnnncaaatgggccaacaaattggggaaagggaatttttccccaaaatatttaag

SEQ ID NO: 300469 - DNA, 674 bp, Homo Sapiens
cttattaagaaaggttaatgattcattgaagctcagcatgaggacagtggatgcttacgcagatgagtgaatggtcatatgagagtagttctgatactaactagaaagtagaatttcagtacaatacaatagttggtctcctaacactaaatactaacctgaaatgagtaggagcacttgttatagagcgggtcaaagacttttaacagagttgatgtgctaattgtgcgtcctgttcagagaagtgaatagtatataattgagggctacttttgaatcagctggcttttcatgtatactttggcgataagtggtattatttgtgtggtgccacttagattcaacgtctaaagaatttggataagatggtggtgataacagacttggtctagtgagaggatgacgactgcatccttaataatagtcaggcaatttcctacaattgaggtttcccttaatggcatgaaatttgttagttggtggaaaggaaggaggggtaactatgcgggccgctttttaattcaacttccctggatgggaggtatatactggtacacgattaaaatgctcccgaagaaaaccactaaagttttaaaaaaggaaaattcttttgggatggataaacaaatctatttaagttgatttggtttttttggtcggtttctttagaaaat

SEQ ID NO: 300470 - DNA, 670 bp, Homo Sapiens
  misc_feature (72)..(125): n is a, c, g, or t
  misc_feature (492)..(492): n is a, c, g, or t
aaaggttaatgattcattgaatctcagcatgagaacagtggatgcatacacagaatgatgaatggtcaagtnnnnnnnnnnnnnnnnnnnnnnnnnnnnnnnnnnnnnnnnnnnnnnnnnnnnnntttcgcctattcataaaatactaagcctttattgagttaggagagctcgttatgtaccgggttacaagacttttatcaaatatgatgtacaaatgtttcatcctattcagagggtgaccttgcaactatttgagagcaacttttaaagcatctggcctctcatgaaaactttgaggaaagctgcgtatcttttgtttggtgccacttagatgcagcgtctatattcattctgacaagaggaaggtgataacagacaaggacaaatgagagaatgacgacttcacggttcatattagtaaggcaattatctaccatatgaggtttcactatctggcttacattctgttagtgggctagaagccacgtnggcgacacatgcacgtcgtcacctatttcatctaccctgatggagcggaaactacagcacatgactaaaatcctcccagaagaaaccaactaaggttttaaccatggaaaatgttttgggatgcttagcacactaatcaagctgattggctacgttaattggttcattacaaaacaca

SEQ ID NO: 300471 - DNA, 704 bp, Homo Sapiens
ttattaagagaggttgattattcattgcagctcagctaaagtacacagcttgcttacacagagagatgatatggtctatggacagttgtgttactaccaactaaaagcagtcattgcagacgaaaacaatagatggcctgctacagacaatatactaaccggataatgatataggagaagtagggataaagggggggcacatggctttatacagagctgatgagctaatgtttcgtccgtcttagagaaggctacggtaacaaaatgacagctgctctgaaatcagccggctgctcatgtattcctagagcgatacgtggtgacatttgatgtcttccagcttatatgcaagaattaaataaatgccgtacagatgttgatgataactaacttctataatgagagtttgacgccggcctgattgctaaagttcgggggatccgctaatcttggagcgttccctcctcggctggcacttccttattgtgtggacagcaaggtggctaagtttggagcccggctttttaattggacctaccctggtgcgaggggataattcggcaaaacgattaaaaattgcctcccggaacaaacgcaacttaagctttttaaacgaagagacttgttgtttgccgaatggatgcaccaaaacaaaatttaacttgagtttgggctatagttggcctgggtttcatttaaaaaag

SEQ ID NO: 300472 - DNA, 575 bp, Homo Sapiens
gttcaatggctgcagaacagttaattgcgactccgttttttactactagacgaagatcaggacagcggctgtggattaatccccggttaaccattaaaacctgatgcattacactgagctgcatacgtgaaagtttaccttttgcctgctagaacatattcctaatacatacacactttctctgaacatacacatctgtgtaaggcacagggtttgggacagaaaagcaaagacttggggaagaacaatgagagcgcatattaaaacatctctacaaaaaagggccgcaggaatcactgacgttctctatgtgcatgctttcgcaaacggggaaagtcaggagacgcattgtcgggatctagctatttaccctacctaatcaggatttgtaccgggcaaagatgaaacgttaggtgtatggcatgaatacagttctaccagctttatttatccaggcatgactctattatagatgtgatgtacatacaatggtcctgaagaatgttgactgtgacggtgaatgcatgattgtgtatagagaaactgcttagctgcggatgaaacaccgtccctcg

SEQ ID NO: 300473 - DNA, 683 bp, Homo Sapiens
gaggcgggttatctgactcttaggagcaaaaaggtctcacagactaagcctggtctgggctccagaacacacattgcctgctgtcataatacagtatgaacgcgtccaatgagtacaccgaagaataccgtacggtcttgactgaagaatcatgtgggctgcaaatatgggatgttgccactgccagggatcaagccatataggaggaccggcaaggtgccggacggcatattgagaataaaacgcgacaaaagatctgcgcagctcattacaaacatggcgggagtgtacacttgctgtcactgtcgcccaggttcaagaggacacttgccacatacttgccagaaccggggactgtaggatgtcccctctgacaaactatgctcccattacgtcctataatgaccactacattgacacagcagctatagcattgtctgacgtacaggtgactgactcaacactagaggcttacgcatcccgaaaaacaagaccctatactggggggaccttgagaattaacacgactactggaacaagatctgtaactttgtcacgcctgattaatcactggggagaaaattctcagaggtgccaaaattaagattttgcgggatgctttatacaaagtaccgaagttccctcgacaaaattaaagcaccctgttggggcaaaaattttcg

SEQ ID NO: 300474 - DNA, 548 bp, Homo Sapiens
tttagtaatatattttatttagcctcatccatccaaagtattatttaacaatggaatcaacataaaaattattcttatttgtggaggtattttctctttttctgggatactatgtcttcaaaatccattgtgtattttatacttatagctcatctgaataaggactagccttatttcaagtaagcaggagtcacatgtgattggtggctgctgtattcacagcgcagcttgatagcaatttagcttcaggacttttgtttttgtttttgaaatgaactaaattgccaaacctacatgtaatataccagatacactcatgtccttaatgttatttgatttggttctttaggacgaacaacctattttattcactttgtttatataaaaagtattattcttaaatatgtactatgcacatattgataaacatttcacaacattaaaatggtaggaaatataaaaaggagtgtcctttattgcgtctccaacccaagtcccctgaggtaccactatcacataaaatgcagattttttccccatatatatag

SEQ ID NO: 300475 - DNA, 495 bp, Homo Sapiens
  misc_feature (218)..(227): n is a, c, g, or t
attagaagctgaagttttattataggataacagtacataaagcacatctaaaattgatgtgttcaatgcacttttaataaaggtaatgtaatattaaaggtacagtttctaagtacaatataacaacattcatattaaatgaaaatgggagtatttaaaagacaacattaaatctctcttttttgtacagcttgtatttacaaaatgaatcaaaatannnnnnnnnnaaattcaggactcaataaaataaacagctggaaataagcagactagtgtaagagtgaattgaaaagaaaacccaaggtaagtgaaaagttggacgatcctctaataaagatcattagcaaagttttagttcaatactagttttaggattcccataaatggcttgcatttttagtgtggcagaaaaggagtttttacatactgtacacaaaacagacagcatatatttataggtacagtattactgtttccaaacttgcatgtatattt

SEQ ID NO: 300476 - DNA, 227 bp, Homo Sapiens
  misc_feature (90)..(183): n is a, c, g, or t
accatgcccagcctaaactagtcttaaatatattcaaagaggtaaaggaaaacatggacaaagaactaaaggaaatcaggaaaataatgnnnnnnnnnnnnnnnnnnnnnnnnnnnnnnnnnnnnnnnnnnnnnnnnnnnnnnnnnnnnnnnnnnnnnnnnnnnnnnnnnnnnnnnnnnnnnnaatatgaagataaaacaattgaaattactctgaggagaaaataa

SEQ ID NO: 300477 - DNA, 474 bp, Homo Sapiens
agaacacaaattactttctcggtcgataaaatcgcctgccaaccctaccactggtaagaccggtccatatgaagcacatttctacactcaactaatgccgtgtataaagccatacccactttctagattgatgaggccatgatcgtgtgaatgcctattatagtccctccaccagattatgtatcatatgaagctgaatgcagggaaaggaaactgatacctgaaataagagcagggacgtggtatagatttgcatgccataataactgacctatgaagccccacctttctcttaagattgaacatgtgtggcctttgcagcccttatatgtacttgtgtcgaagtgccaggattaaaggaaactccgctaccatgcactcctcctactaaaaccactgcagcttggctcccactcattgaaccctactatgcatagcattcttggaagagctgactgacatgagcagccccat

SEQ ID NO: 300478 - DNA, 481 bp, Homo Sapiens
cgaagcattttttacaaattgttgttcactgaaatgatgccaagcgataattgtggcttgtgccggttgcactgttggtagaaaaacagaagccgccgagaacagggcgcgattttacctgtgacttagagttcacttctcttcttctgttggcacgtggggataatttaagcagcgcaggtgtaaaactgagggattgccctgtcggattgacagaattttaaacgctccttggaaaaaaaggacgccgtattatcaggcgggccggacggatgcacttaaactgcaaaaatatcccttacaacacttagtaggtttgaaaacgcctggggctggtgcaagaggagctaaacctgtgcggtgcgattggggatatgtgtttcacttaaacaaagcgtaaaggtacatgcatggaacgcgaagcgattaaatggcatctctaagatatcatatgcgcaatcgactttcctaggtgttgaag

SEQ ID NO: 300479 - DNA, 322 bp, Homo Sapiens
ggttcctcagagatccctattctgaacatatattcttacattacaaagaaactgggccatatgagagtacaaccaagagaaaaacattgtttgttattatattatgttatggaaatggaggttcaattagcatagagattataaactcctattcaaggctgacattatcttacattgaagtcagagcctctcccaatcttagtttatcaactcagttcttgataacctatttttagcttcagtatttacagatattgtcttaagcaacattctttgttcttaagctcctgctttaattagccaataccaaaaaaactctcac

SEQ ID NO: 300480 - DNA, 573 bp, Homo Sapiens
cctgccgggccgggcacatggatcccctgttacagcaaacgcacaagcaggtccacgaagatcagtcttgaattgtacaactggagacagcacacaagaagtgtgtgcacatattacctaacgggaatacatgttaccatataccaggattttcagtcgtctataacgtccggggattctgacaacagggggccccctttcaaaaagtaaaatgccaaactttctgttgaccagtctaagtttgatgttcacgctcctgttaaacagggtcaggaactcccaccactggcgccaaacaatgttacagtaggccgacacagagaagtgagcgtcctgctccaaccttcaccattaatgactttgacaccaccataccaatggacgagatactgcatttaacctccgcattcagagaggcacaacgccccggatgacctaattttagatgggctcaaaacaaaagaggggactgacgacccaaagactgaccattgatggggcctcataagacgatactctgaaattggcgacattctgtgcatgagcaacaacagtgttgcggcttaattttta

SEQ ID NO: 300481 - DNA, 570 bp, Homo Sapiens
ttgaaaagatttattctgagacaaatataagtgactatggcctgtgacacagccctcaggatatcctgagaacatgtgcccaaggcggttggggtgcagcttgattttacacattttagaagacatgagacatcatttaaatacatttaagatacacattgattcggtccagaaaggcaggacaactggaagggggggcgctttcaatttataggtagatttaaaaattttctgattggcaactggttattatcaataaaatgcgatgtctgggttatagtaagaggttgtagacaccaaagtttcatcatcctgatggtgcctccaggtagatggcttcagagagaatacattagaatgtttcttatcatatttaagggctgtgtttatgttaatggtggagggtataatgaggtaggtccgatccccacactttctgccatatgctgaaccagtctttaggttaaaatttagagtgccctggcagaggaggatgtccattcaaatggttggcggggccttagaaatttattttgggtttacagaagttaagtcttttatgagaatgaa

SEQ ID NO: 300482 - DNA, 197 bp, Homo Sapiens
gtgtgtgccactacacatggccaaagaaagtttaaatttaagataatgtagttactatggccagttaaagacataccacacaaccacaacatgcaagacacttccacaattagagaaacagaaataagatgtttaatattaagtagaggagattaagaacaaaacatttatagctgtattcaaagggtaagtatatg

SEQ ID NO: 300483 - DNA, 722 bp, Homo Sapiens
  misc_feature (21)..(21): n is a, c, g, or t
  misc_feature (461)..(461): n is a, c, g, or t
tctacatttatttgtggaatnattgcatactctgactgtactcgaaagcacagttaagtgacaaaggcatgttgagaagaatgaaagagcactactcacagacagttatcatcgagtggcgcactggatactgttcacgaatcgagtgttaatccaaattcactttacaacataagctgcaattgctataaagcgataagcctcaagcagcatgcagattaatattacgatgtggcgaataataactcactttgggacctagatttctcataatccaccaggattctcagagaagtaccagccacgcctatgctcattgtgtacctcagacgaaatcccatgtgtcgtgtttctagcccgtgtagtgaggccgcatgtatgtataccaccatttcaaggttttgcagtagctgacactcttgttaacaccacacagcgcagacgtgatctctctgtgtgcngcagattgacctctcattagactgttgatggatcgtgatcgaccacgacgttgctcgcaattgtcaattcttttgtgtggactatgccgcagccacttgcagcctgaaggatagataaattctccccgcaaggtggaatctaacacgcttgttgccagaatatgtcgcccaattattcagacttcgtaataaatattttattcgatctgcacacttgtggagagatggtacatttgtgcatacaccggtctattgagtttt

SEQ ID NO: 300484 - DNA, 475 bp, Homo Sapiens
  misc_feature (90)..(161): n is a, c, g, or t
  misc_feature (163)..(172): n is a, c, g, or t
cggattcattcaacatttcttggggcaaaagggggggtgggattaaagtttatggttaggatactgcagggatacaagttaaagggattnnnnnnnnnnnnnnnnnnnnnnnnnnnnnnnnnnnnnnnnnnnnnnnnnnnnnnnnnnnnnnnnnnnnnnnncnnnnnnnnnnaatttatgaaataggaatttcacttcttacctccaagggttgttgaaagaattaaaggggccttggaacaaaactggggatcaataaatatttactgaacggatgttgtttgtttaaataaagcatgaaaaagagttcttaaaaagggtcctgtgtgtagcgatgtgttggaaaatattaacaactatttttacctttctttttcctcaccatccttaaagccctaaaataaagcccctggcacatttcggggcattgaacagctttaatgggaggcggaatacctagcaaaaaaatacgccg

SEQ ID NO: 300485 - DNA, 192 bp, Homo Sapiens
tgaatcatccctttgtccagtgtatctatgctgtagatgctacccaccctctggggcaatagtagtacttcataatgcctgcaccacctacctcattcatcacaaggagtactcaagtatagcataataaataaaatattttgagatggacagtccacactcacataacttttcttacagtatattgttgta

SEQ ID NO: 300486 - DNA, 410 bp, Homo Sapiens
acaatataaaaaacccctgcttttgtggggggagggcggttaatatctgggagggctgcaatactcttaccggggggggcccttttggaaaatgcgcttttttccttatggctttccgccaccgggggattgcctagaaattaaaacccccctttttttccccaaatggaacacttatccccttgtcagtccttttgtgagggctccaaaccttatgtccggggtcccccatggggtggcccgggtccaacatgggggtggcgaacccttttgggggcttagccctttaaataggggtgcggctttttccatagggtaaagaatttgtggggaaaagtttttggaacaccgaagtttttggtttcttttgtcggggaaaaaatttacatgaccttgcgggcgtatggctc

SEQ ID NO: 300487 - DNA, 128 bp, Homo Sapiens
ccgcttttttgcaacaaaggaatcccctcccgattattttttggggccaaaccttagaattttaattatggggttatcccccaaaaaaggccccccccggacactattgcccctttttccataaagtg

SEQ ID NO: 300488 - DNA, 645 bp, Homo Sapiens
gaaacacccgcgctgtttgtgctccatgcgaaaaagaatataagttcaagtgactcgattctaggagacaacggagagggtgggcactctccatgtctaaacatgaccccttatcacctaataactggccggagccagctgggttatatgcaaggacatcacctgttcaataaaagttaacaaaattgatattccaacatcaccacctatgatacaaatactggggccctactcagtttactcataattgctcgacctcaggggattatagactccttcttcactccgccagttgctgaaatacacactaagggctttttagagctacacgaatctcttaatatatctaatcctccagttttccattgtgaaacctgaatgtgcacccccattcaagcgcctaatagtaaatgtaaaaaaaggcacacatacacgcaattgtgcgtttgtgagatcaaatgttaactaaagattgtgacattgccctcttatgttgggtgaacagtgttgaaacccaggacacaggaagggcctaacaacagcgtttcccgttgagcaacttacccctgtggaacgctgctcccaaagagacacttctccgcaagaaatcacctgaagttaatgtttttaaaaaccacccaaacg

SEQ ID NO: 300489 - DNA, 519 bp, Homo Sapiens
cagtccttatgctggatttctttatcctgaaatagcagtcaactgcagacctcaatctatggtatatactaagcaattcaactctttcttgtaatgtcatgactcttctctgcttcttgggagcacttacagtatcaccagtggcacttcatataggtcccatggtgttactcaaggtttatggtattgcactaaacatgatgaataatatgccgtaactgtgagagatcactttttactgtgaatgcaacttactggaatgataaactgctcagtcagagatgattagcatcacacagcgttttaagcagatactcccaacacttgagctcagcacaacagcaacaggaggtggctatgaaattattacagtagcaaagtatgttttggagttaattttagcagttatgagttaatagtgcatcttacattgtttacatttttcttaactgtgaaagacgtcatgtatgggctttaagtgtgtgcataagttttgataaattttaaccttttataaca

SEQ ID NO: 300490 - DNA, 552 bp, Homo Sapiens
  misc_feature (475)..(475): n is a, c, g, or t
ttagattttttccattttttattaattgaagcacagcgtatagacgtataaagattaaagaaatttttgttttgtagacagggtgttgggtttacatccaccggaaaagaaaagcagttgtaaaaaacttgcgtaaggcggttcttactaaaattttaatggtggggtgagatgatcttaagggtgaagaaataagcctaaggcaggttgacttgcagcagcaggttttttaccgtgcttggctgagcaagactcattatcgtcaggcttgcattagttctctacaaaagctgggaaaccatccataacagttaacagttgctttatggttgccttgggcttgaatttcacgagctcttcaacagcggaaagtggcttgattcggcgctccttctaaaaaagagttcttataagtgcatggaaagcgaattgtccagtagttgacgtctacgggaacgaatggttcatccacttncagacctggaaaacatgggcgccagtttccatagattttgagctggtttagagactctggcacttagtggtgcttgc

SEQ ID NO: 300491 - DNA, 493 bp, Homo Sapiens
  misc_feature (354)..(354): n is a, c, g, or t
gggaaacacgaccgggccgcaaacttttctaatttttttcagggcggaaaaatgcgcatttttgggcaaaacatcggaagccacacatttagaaagccccgtcctgacggaccaactataatgacggagctgataaaacaagggctagggccgggctggtcccaaactgggccgggaggacactccccctgctgaacataagagacgactccaggggagccgccatcacccggcttaaaaaggagaagaaaaccgcctagacatcaatgatgccgacatctcaagtagtcgactctagaaaaaagtcccctgggaagcaaagcgcgagtaaggcactcagcggacaacatattntgatacccataaattcacaacacactaaaaagcggccgataatagcagcgccatgagggccccagaacgggccgccatatttcggtggtggcccagccgggaccaaccaaaaaaacaaggccaatggacgaatttttag

SEQ ID NO: 300492 - DNA, 498 bp, Homo Sapiens
tgttaatttttaatggccggatgattatataacttgattccagagcaaccaattgctcatttttggacttacaaatggcaggagttcaaagattaacagaagacactggaaacaggcttaatatttgcacttttagtgtaataaaggaaagaacgcccccgcagccaagtaatactggtataataccgctcctgatcttgtgagcaacaacctaaggcatcgggcgtttgaccggttacagaggggaagaaggccatgctgatttaatactattgggactcacatgtcttgattggaggttgaaacaaacttattggctaagcgcctgagttttccatgttttacaggacacattatttatgatttctatcatatacactatcaaattgaactgttcggctgatgaagcacaaagattgggtccctgatggaatgctcatattggagtggaggttggcacatttgccaaaacacgattacatcgccagttgaatacag

SEQ ID NO: 300493 - DNA, 506 bp, Homo Sapiens
gtgttggatccatgggtgaactgaaatcaatttctatcatataggtaaggtggattttatataactttttcattgttctgtgattaaatgagtattgattgttgggattttcttactacgtgtatatagcaagttttggttatccctcatccattatatatgctccacattttttattagaaaaactattcttcttcgtcacaaagaattttattctatattctttcctaatagaattagtatcaaattataaatatgtaaagtttagtgtatagtctcagatgaattattatcatttcttgtactttatcctttgtgactatttctgcctgttatttggatagttcactttgaattaaaaagagaactgtgaaatgtgtgtgtgtgttcaatcttaggggatgttagaggaaatatgttacattcatattgaacactgaaaattctaaattctatgctgattttcagttttatgttagtgaagaattttgacatggaaaaagttt

SEQ ID NO: 300494 - DNA, 593 bp, Homo Sapiens
tatttttgaagaaaattatcatgtgactggcaaatccaagaaaaaaacattagagctgaaaaaaagttattttaatccatcaacctgttccaagaaaagctgctacacatcatcctggctaaatctgaggtaaccctgttttagagacttcttgaaggctactagggggcaaagaggcatggagattcagtctcatggcttttattatgcattccaaataaatagctgctttctgaatgcaggtgcccaaatgcctaaaattttctgactggactgattctcactcctgatggatttctaaataccttatagaagtgtcttcaggaaaagacgccaggccaccctttgaaattcctcaaagctgcacactcatcacctgggaattattcacaacctctcctgcgattgccctgcgggccacaacctatgcctgctgtacctgtcctcgcgaccagctatcccttagggtccccctaaagttactgccccaaagtccagactactccttgggcctgcagataatcctacttgctgcggctagagagctctgtctaaaacaggagtgtcttcacagcactttaccgcacgaattc

SEQ ID NO: 300495 - DNA, 632 bp, Homo Sapiens
  misc_feature (25)..(25): n is a, c, g, or t
ccgacaagtttcaagaagccagaanaaaagtagatatcccaggcaagcaaacgaacggccaacaggggaacatttgaggggcactagatgccctacaaacagcccctgaggccgctcaagagaggatttctggggttccattatgtcatgttcctcttagagatacatgttctttccaaagccccaccactggactcagcgtcactctgagactaccagtttgcatttccagttacctgcctgacatcgcccttgatgtcttgctgacccttaacgctccacatgtctaaaatgtgagccagcctttccctggcaactctttctcctcatgccccatacctgtccatgacatcatctagggctgtcgacatgattttgtggggcacaatacaaaatgtattgtaggtctccctgatcaaaaattattaaagacacaggctccagaatgaggcatcaatgctgtttctggttcttcatcactgtccaacccattctttgccagaaattctgcagtctatcctttgaaatgtctcacatctggcccttcaattccatttccatggctgaccctaaaattcacttcgcttttcgtcggggctttggaaatggtgtcctcccatttcttgcctagg

SEQ ID NO: 300496 - DNA, 469 bp, Homo Sapiens
  misc_feature (97)..(156): n is a, c, g, or t
tttccattttttagccatgggagctcggatgttaaatgcagccgtattcacaacatatatgatggtatcacagggtgcatcgctttgctgcctgctnnnnnnnnnnnnnnnnnnnnnnnnnnnnnnnnnnnnnnnnnnnnnnnnnnnnnnnnnnnnagttgtgacctttgcaactggaggcgttatatgcctatagcatctagacttgcatcaacctggatttcaccctatttggctatgcatggatccttaaagcttgtccttcaggacttttttactttggctgtgggttgatacataacacctttgagttgaactttagttgacttgatctcgcggttcacttgctcaacgcgagcatattctatattgtaaagaatctccttttttgcaagtgtgcatatatttgcctggaaagttaatgtgtcaactttaaactttttgaaccacgtatgtatactcgctatcc

SEQ ID NO: 300497 - DNA, 466 bp, Homo Sapiens
ttccatttgttaataattgaagcgcagaaagaaaaggccctttgacaagagagctttaattgtctttgacggggtgttgaacctaccccaacgggcaaaaacaacggttgaataaacttgggatcctcattgtctcactaatatcctaaagcctggccttacaggccgctaaacgagaagttacaagcctcttggagttggggttgaccccacaagtgttttaccattctgggcaaagcagggctccttatcgttagccttgcaggccttcattacagaagttgaaaacccatccataacagctatgaaatggtcagatgccaccctgctctcgggtttgacaagctgaacacgggcacttgggtattcgatgtgcctatacttctgaaaaagtgagcctatacacgtatggaaagtgaatggttttacattaaacattatgctaccaggtgttgtaatcagcctc

SEQ ID NO: 300498 - DNA, 361 bp, Homo Sapiens
  misc_feature (80)..(88): n is a, c, g, or t
cccagctaatattccttgtttttttataaaaggccgggatacaccattgttggccaggcgggtttttgtcttcttgaccnnnnnnnnnctggccacctttgccttcgggggtgatttgttgacagggaccacccccggggctggccaaacattatagggggaaaaaaacttttgcttttccttttgggggggaacccccccaaaaaattgtctccaaagggatgccctatactttaacaaaccccggactgcagaggaccttcttttgtctaccatatgaactctttatgggcggcagggaaatcttttcaaaatattaattctaaacacacatacacaaggcggcgtcaagaaaaatttt

SEQ ID NO: 300499 - DNA, 248 bp, Homo Sapiens
  misc_feature (93)..(103): n is a, c, g, or t
agataataaaaacgcttccccacccgaaacccccagtccggggttcctgtatcgggaaagggaaaaagggcccaaaagcaaaaccctcttccnnnnnnnnnnnagtatttttaataaaaaggggggccaaggtttccgcttgaaaaaagggcaatagaccccccgccaataatttggtttggctccccccttaagagccccccggtttacaaatttttcttccggcccaaaattttttggggaaattg

SEQ ID NO: 300500 - DNA, 510 bp, Homo Sapiens
cctgaatgaatgtgtctctttcaaaaaatcgatttttgttgatacaggggcattctcgatactgcaatcaaactggtgagagagacatgaaacgttagacaattctaggtgcatcgtgattaaaagatacagtgggaatttggataaactgttgtatctctctctgggcgatatgggcaacatcagcgcctatttgaccaatataacaaagacctggaaacttttggggggtcaagacttctgcctttttgagaggcggagagggattggtacgaatagctaaccgttgtacttggctcgagctgttgagtggaaagtgccataaatcactattgggcaaagtgagaggtgccttctccgaccctattggccatatgtgccaattcgtgccgaatgtctggggcccggcggatccacgaacgctagagcgggcgccaccgcgaggggaccaccagcgtttgtctccttaagagagggttaatgcagagcttggcgtatttcatgctatag

SEQ ID NO: 300501 - DNA, 572 bp, Homo Sapiens
aactgaaacctacaatcatggttgaaggcacctcttctcagggtgccaggagagagaatgagttttgagtgaaggaggaagccccttataaaaccatcagatctcgtgagaactcactcactatcataagaacagcatggcagaaatcatccccatgatccaattatctccacctggtcctaccctcgacacatggggattattacaattcaaggtgagatttgggtggggacacagaaccaaaccatatctctgggagagaccacaatgagcaaaaattgcactgtagcatcagttccacacatgtgagtacatactatatacaaggtcctttactgaggcccttctgtgtgtcaagcatcatgctaaacatagtacatttaagccttgaaaaaacctgtaataagatgtacatactcttatatagagtatatagatgagggaacttcaggccagagaactaaataactttctgaagatcgtacaaccaggaattgccaaactaggattcaagttcagatcttaaagtctcaaagtctcccacaaatctaggtactggggggacactgagc

SEQ ID NO: 300502 - DNA, 434 bp, Homo Sapiens
  misc_feature (134)..(143): n is a, c, g, or t
  misc_feature (309)..(322): n is a, c, g, or t
ctagaaattaaaggccagaaaaatccccacttttatccccactggagggtggggtgggaaaaacgcccctggccccggggacaccattgtttccttttaaaacccaggggaaacagggaacaagggcaagtccnnnnnnnnnnaccactgtcccccaaagggggaattgttataaaaacgcttgggggggaacacttaagccaccaccttggggccagaaaaccaggggccatggggggcctggagggccttatgggtttaaggggctttggaaaactccaaaaagattttgaaaaggattttggcatnnnnnnnnnnnnnnttgtttttttgggaaaagaaaacggggttaacggccccaaacttgccacactttttggaaacctcccctttacaggaataatggaggtcctgtggggcccaccatgttgggc

SEQ ID NO: 300503 - DNA, 291 bp, Homo Sapiens
  misc_feature (41)..(49): n is a, c, g, or t
ttttaagtttttttgacccggggggggaaaaatttgttttnnnnnnnnngtgccccaccaaagaggggtgagtgcttgtataaatgcaaaaaaagcgcctctacgtcttgggcctgctgacctggggacacctcccctttggaaaccttcaggccaaaacctcccacaaagatataaagtcgttactttgggaagaaaatcctttctttaagaaacggccgtgtaaacctccaaagcttcctccttggtggggggggccacctgagctacacaggggaattccctggcccc

SEQ ID NO: 300504 - DNA, 429 bp, Homo Sapiens
  misc_feature (137)..(367): n is a, c, g, or t
ccaagcccacccagccatttacccaggaagggaaaaagcccccaatacccaaaccccctctccccggggtttgcccgattctttaaacaaaggggcccaccagttttcccctttggaaagcggcaagtaagcccccnnnnnnnnnnnnnnnnnnnnnnnnnnnnnnnnnnnnnnnnnnnnnnnnnnnnnnnnnnnnnnnnnnnnnnnnnnnnnnnnnnnnnnnnnnnnnnnnnnnnnnnnnnnnnnnnnnnnnnnnnnnnnnnnnnnnnnnnnnnnnnnnnnnnnnnnnnnnnnnnnnnnnnnnnnnnnnnnnnnnnnnnnnnnnnnnnnnnnnnnnnnnnnnnnnnnnnnnnnnnnnnnnnnnnnntggcccgaggcccaatgcctaacaggacaaagccctgactccataaatccatgtttcatggg

SEQ ID NO: 300505 - DNA, 478 bp, Homo Sapiens
ctggcctcaagctatcatcctccaggcctgggtctccagtagtgtggggattttctgaggaataaatcaagattctaattctgcacagtcaactccatatttttaacatttaagggttctactcatgtatagtagaaccataccccctggtagaaacatacctccctttttaaggcaaacacaaagaaaatggatcaatactcactgtatcggtttaatttccacaactgttatttcagttaacatagatctaacattccaataataaccaactctgaatttgcactactcccattatctttgaggtgtatcacagaattctcaagcccaaatttatttaaatccattttaattcagtatgcccctcatgcttcacagcattttctgggaagataagtgaagtgagaaaaatgatggcaatgacagattgtcaccagttcagaagaataatgaacaagcatgattggcagaaaggctg

SEQ ID NO: 300506 - DNA, 299 bp, Homo Sapiens
ttaaataaccaaaccatggggaaagaaaacaaagccctcccatccaaaaaaataaatttagcaaaaaacagtgttaaactcaatggtgccggcaggccacaataaaataaaagatatttagaaaatcacaattttgaattcggatgattttaaattttaacaaatgacggaattggttaaataaaaatagtttaaatgctttccgcaataaactaaccatcaatctttgagggttctttaattaactcaaaaacttttatcagtccaaaggattcccaatttggaaatattcatcccct

SEQ ID NO: 300507 - DNA, 534 bp, Homo Sapiens
ccctgggccttatcttatgggaaacctacccttgtaggacaaactcaagtggcctttgttgggggaggggacagacagcccggagttgggcaggaacgcttctctacacagtaaatggagaggacgagctcttcattcctggggaggctccattaaatacccattctctggagccagttcggcgtagacgccctcagacttcatgtacatgtctcgggtgtcgttggccagaccatgcagcccgttgtgctggacagcgcccccacgtcaggtttaatggctgccccgctgactgcttcgataggcccggtagcgctccagacatggtcacagtgatgatccccggccggagcccttcgagctcggtccgttggatatggcggggtcccgagcacgaggccagtgcgtttcctctgtaccatatgggctgtcaaggcctatttacgttggccccattccaaatcaggcctatgagcaccgaaagcctcgaggaaaaaagtttgaccaattttgttttttgggtgtggtaggggg

SEQ ID NO: 300508 - DNA, 474 bp, Homo Sapiens
ctatcaagtaactttttttaatgtataatttgtttttcctattaacctaatcgcgttattcctaaaattgcaacatgtaattccatgcaggtattttttagccagaaacactcatgccttgatgtattcagcaaacccctgaatagttactcttcagggtaaaaacaggaattcggcttctcttggttgagtttacctccccatagtggctatataatattggcctctgatgggagctgtttgtgtttgcacagaaagttttcacatatcacctaaaatagggagtgtgcccccatctctgtgctggttagtggggtcctacataaattagtaagttatctgttgactcaaggttctttccatcttcaaggtgctctgcatcgggaaatgaagcaaacaagaaaccccccagcttcagttcttaatccagaatggcactccccccaaaacccaattcacaaaactttttaaaca

SEQ ID NO: 300509 - DNA, 665 bp, Homo Sapiens
  misc_feature (600)..(600): n is a, c, g, or t
tgaatttaagacaaagaaaacctgaatgttaaatatttaaaggattataaaagagcagccacattcttggtctatttttgtaggcaatagatatgaagatcaagttctgactggaatcctgagtgacacggagacagcccccacatgtgacccacctgtaggtttccaacaggcatttttccaagagtgagttttggaacattaaattaagagcaaattaaattttctcaggctttgaggggcctgggctgaatttttttaatgtatagaggttagaagcaacgatttaaagctcagtgtcccctatatgggtctaattatgaacatgccactatgtccacattagaatagaactgattgtgtaacaagttattttctatgaaaccctgtaaggtggtgaatgagggaaagtgcccaaaacatgtaaacaagaaaaaaggaactattgacgaggggaatgcttttaactgtgaaagctggaacatcagctctgacagtttatgttcacgtaatgcgaaacggatgtggggtgagctgggccacaagtgagtttcctctttctttggacacaacaagcaacaatgatgtgatgcactacanaactaaaacacccaagtaaatgctatgccaaagaaattggagaccttaaaagaatgacatttcaa

SEQ ID NO: 300510 - DNA, 650 bp, Homo Sapiens
ggtatgagcttgagattatacaccactttattttatcattagcggtacttttttaaccatggaggagaatctagctctttaatctaagagggccccatgggagccaccaatagagaccgcatcttgtggccattttcaaggtcaagcatctttcgtcctacagatgtaacaccacacatgtccctgagatagtggactggtatggcaatccattgcatgtgaggattatttttgcaggctcaaaggaaagaatcatacgaggatactgccaaacaattggtatgacggaccatttaccatcccagccatgaatctaatactatgagagcgccacagagtcggccagatcgataattgtaacagactgctagatacgagcaaactatacctgattatcaccatgaaggataggcatgacgtaagttacatccttaggaactgaacattaccgtccaccacgtggaagacgaagcctatagataaagtaatattgttaggctttgcagccaatttgtacagctatattaggtacggcagacacggagagccctgcttgaggcgaatgcactgctgcccgaaggaaccattagacacagtagcgcccaacccacggggggcatttccaggtttgtgtcccctttcattgagga

SEQ ID NO: 300511 - DNA, 566 bp, Homo Sapiens
  misc_feature (221)..(328): n is a, c, g, or t
aggttgtcagatcctttagggtcaccaccaggaagattatttacagtgaaggacactttttgaaaaggtatagggggcctgaggtagaagagggaatacccagttgcaagtgaatcccaggctcagaagggtcatacagtctcatgattaaggccctgatgcgtatgcagtatggggtcaaactgttggagttatagtctgtgctcctccgctttctcagnnnnnnnnnnnnnnnnnnnnnnnnnnnnnnnnnnnnnnnnnnnnnnnnnnnnnnnnnnnnnnnnnnnnnnnnnnnnnnnnnnnnnnnnnnnnnnnnnnnnnnnnnnnncatggaagtactttgtacattgtcaaaaccaatgtagatgattgttgttgtgaagatagtataattgtatctgattaattttgtaatacaggcccaagtcattcaaaacagccaggaattaaacttttatttgtataattcagattttatgagaacagcatagagacgcctagacacagagatgttttattaataaaatatgtgtatgtaaataaaccaggcggctcttcttcctgcg

SEQ ID NO: 300512 - DNA, 453 bp, Homo Sapiens
tctatgcttacatgattgtagagtgattttgctcctcttccttctgttgtaatgatacctgacctacattttaagattttagtttagtaccaattatgataataaataaagggctcaatcttacatgtgcagacaaagcataactttgttaggaagctaactagatttttagacactcaagattatgaacaatttttctactcagccaaagttaccttgtattatgagccccaccctcatcccaacccaacaaacatgaatacgtttagtatcttgcaaatttttgtcttgttaaagacaaggtagagctatttattatatatctttaacccagcacgtagtacccaattcttattagtttactctattgcagtttctacttttctttatttcatagtttcaaaccaggatcccaggtctttcctggtgatactagttcatggactaacgagg

SEQ ID NO: 300513 - DNA, 551 bp, Homo Sapiens
  misc_feature (109)..(119): n is a, c, g, or t
  misc_feature (496)..(504): n is a, c, g, or t
cttaccgtttcccccacttttagggaggtgtccacccagcccgttacctaaaaggcgtaaaaagggcgaaacccccaacggcatcctccggggggttgggcgtgtttannnnnnnnnnnggcggtcaggtttttcggtttattaagtgggccgtgagtgctcccccaataaagtgagttagatttctcctttgccctccccggggcttgtgtttaactttcggcgtcgcatttttttggaaatggggctgaaccccatttcctccgggaaccgtatttgactattattttccccagctcaacatttatcccccctttaaggaaaagaagcgagaactcccccccggggggggcccctcaagaaaaagtggatccgcgcgggccccaggttaaaggtcctgcatttccctgggtttttgcccttcttttccccttcctcctttttctataaatggggggcagcttcccccctcttttttgtaaaagtccccccccannnnnnnnnatccattttttagccaagccccgacaaaaatcatactttacccaaat

SEQ ID NO: 300514 - DNA, 590 bp, Homo Sapiens
tatgtgaaagttaatataaactggaggaatcgagcccagccattgagagtccaattaggagctactacaatgatgacggtcgctacaaaataaaaagaactcaaaagagggagcaacaaattcagctgaagtatggggaaacaaaaaagcctcagagaagtcatgttgcagctcaatactgaaagataagaagcagtctagacaagtaaagcaaggaaatttgtacagaagaccatatgaatagcatgtttggagaacttcaagtagttcttcatgatgagtcttgaatgaggtgaattatagctagaaaggcagattgagaaaaaaacagtaaagaatattttacaagaagagaaagtaaacacctcctggacactaaggaatacttttaagcaaggtgcttacatgaccagggttacattttagaaagattcttacaaaatcagttagcctaaaaacaaatataagaagtctagccacctaaacaagcatcatgcttcccagtaaatacactgtctcaaaagtctgatctagtaacttacctcgacaaccaaatacagtacaaccaaggtctcttaagtttcagagag

SEQ ID NO: 300515 - DNA, 587 bp, Homo Sapiens
aggctgcaaaaagacatcagggggaggacatgctttgcctaaagttgtggttattgcatgctgcggtgatttacttcaggggacagactccgtagaatcctttgatcttgatatcccgaaaagcggttcctcgcctcacagataggaagcctctcctttggcgcttaagtgcttacatatttccagcaggctgcattcattgccagaatttgcactctctttattaacgcagacttcaggactctctgctttgcaggacttattcactacatcagccatattcgtatacttagactgccgcattggatatgtgcggtcatgcttgagttaccctacattggcgcgaaacctgtctcgggttactcagaggccctcagtctgagaccgacacacgtatgcgtgacattgctatcgaatttgagagagctgtggaggcccatatggtttatcaccgttggaacaccaaaaccaagaccgttctgagtgccagcttgctctacagtacttgcccacagcccagtggagtagatcgatgtcattgtactccacatactgtgctaagacctaatatgtcttattatcaacca

SEQ ID NO: 300516 - DNA, 1073 bp, Homo Sapiens
  misc_feature (35)..(35): n is a, c, g, or t
  misc_feature (52)..(52): n is a, c, g, or t
  misc_feature (77)..(77): n is a, c, g, or t
  misc_feature (147)..(147): n is a, c, g, or t
  misc_feature (175)..(175): n is a, c, g, or t
  misc_feature (181)..(181): n is a, c, g, or t
  misc_feature (257)..(257): n is a, c, g, or t
  misc_feature (259)..(259): n is a, c, g, or t
  misc_feature (292)..(292): n is a, c, g, or t
  misc_feature (308)..(308): n is a, c, g, or t
  misc_feature (318)..(318): n is a, c, g, or t
  misc_feature (323)..(323): n is a, c, g, or t
  misc_feature (367)..(367): n is a, c, g, or t
tgatgattgtcatccacgataagacctcgtgcgtngccgtccgtagtcgctntcgacacagacgacacgtattattngtatgtcgacgtagctctagccgacgacacagtcgcatgaacgacacgacgtcgacgatgccgatgaggntgcgtggtcggtgtgcattcgacgacanctaaancacgagaatgtgacgcgcacgacgacgacgagaacacatcgacatgatctcgtgccgtgtacggtaagcatacgtnancgctgagacgtcacgacgtggtcgcgacgacgncatatcatcactaganatgacgattncgcgncacgatacgcgacattagcacgacacgacgagtcacgacatcgncgcgggacgtgttgtgtgtcgacgcgacatgacactgcctactctagacacatacgagagagagacgtgcgttcactagcgtgacctacagactgagagatgcgcgggcgcgtgtggtagatagctgacagagacactatactttctgaacaactccaacggagagggggcgcgtgcgtgacactattacttattgtcatacatactagaaagaggcagggactgcgcgccacgcttatacacgtatcgtgtgctaacacgggaggctggtgcagaaacagcggcgagaataaattcttgtcatacacaccagagggggtcaaacacacttgactttctgaagaaaacgactgattgtctccccgcgatcggtgcacagggtcaatttgaggaggcagtctcctccgggggcgagtacgctacggcgggataacatacattttattccacaaccaaagacgagaagatgtcggtgcgcccccccctcctggcgggagagagagaacacaaacgtgtttctccaacacactcgcgcgcgcggaggcgatatcgcgctcatagttagggactacgtcagacgaacaccgacgaggtgccctcatgtgtggggatgaataagagagagagactctactcgcggtgctactgtgggagagacgaagaaacgtgcgcttcttcgtgcatacgctacgaggaggcggggccg

SEQ ID NO: 300517 - DNA, 546 bp, Homo Sapiens
aagcgaaactagagaatgatgttggaggggtctaatagaatgggagaaaaccctgacactgaaaaaaagaagaggtctctgtaggagcaagacaagaagctgaatggacagacctgccttcgagaggcaaaggaccctttgaactcaacaagaggaggtaggaagatggcactgggggcgaggggtggctccgtactgtgagggttgggggactaaaggcttctgtttttttcaatgaaataggagaaggtttcagcttaaagtctgggaagttgggaggcagactcagggaaagagaaatcaagaagcaatcacttttggaggggggaaaggccaccacagagcactgtccatgcccgactccctctgggctaaggatcgcctcaccatggctctgggcccaggggctgcaccgggcggcctactgagccagggctggctcaagcacatctgctaggacctatgaaatgtggacttgcctaaaggagaagctgggccaacttgcctctacttcaagaatctaagagacatgaatggacactgcaa

SEQ ID NO: 300518 - DNA, 278 bp, Homo Sapiens
  misc_feature (233)..(233): n is a, c, g, or t
actcattttgagtgaatgaattaatacattctattccaggtccctgctggaacaacttgagaaaattttcatgaagacatatttgcattttgaacaaactggtagtggagactgtaataattgactcaaatgattgaatccctatgaaacttcaagacattagaaccccatgcagataactattctataagtctgtaagggtggcccttgcttgataatatgtaaaatgatangttatagtaatttttagaatgaatatttttgctttttcttcacta

SEQ ID NO: 300519 - DNA, 464 bp, Homo Sapiens
tttttaacaaaaggggcacttatttttttatggataagttttttgaccagtttgtaaatttaacgtggtggagtttatacacggtcgaatttgcacatctggggttttacactaagagggtaattgtagagtttatactaatagggaaaacagtcatgtgaaagaacgagtctttataaggataactctatgttgatgagaatgactagctttttacttttgccgttaactatgagattcatatcggatgtcttcacatttacttacgtgggagatggtagttaatacgcttgagattacagtcgctagcttgtcgcatagaggtcgaggttcttgagcctaacgcgggcactgcgcgagttagttcgtctgtcgttttccgaagggatgggtatatttgcatgatatgtgaatctgtcagcaagcatgttttctagaacgaatatgggatggagtgcccaaac

SEQ ID NO: 300520 - DNA, 519 bp, Homo Sapiens
aatccaaagagagtcacactgggaggctatgagagcacttatcgcactagacgtaatacttaccgtcattccaagacaggtaggacgccttttcaccaagtgaaagataatcaagctgaacaacctaaagatcactattctcattcggaacctaaaaacgctggctttgatgcgtctgaaggctacaagaatacccgaatgaagtctgacatcattgagcacaccatatcacgtacctgaggcacgtgggaaaggtcagataagtcggagggatgctgtatacaaaggccgctgaccacagcacggcgatggttaaaaggccttgagatgccttgaccatcatttcccaacccatcaacacgccatgggctgtattcaccaggacgcactgtctgacaaagccaccctgtatctgtacttgcagtgctgggcacggtatccatatcattgagaacggctgagctatcacacatacagaggaatgagccctaccactgttcgcacatgaatggtaaagga

SEQ ID NO: 300521 - DNA, 499 bp, Homo Sapiens
atagagaggattaccccatttcgttcacagcggactgttttttcagtccttaaaaggtccacaagtctgggattagcagctagcacttaattattggcacgacacaatgcttattaacaatgtgatacaatcacaaaaaattacaaggtgttcctggattgttgagtgatgatatgcacgcatatggtttctaataagcaacttagatgtgaggtgtcatactcctagctacagatgtgtcaacatcacactatcactagagacaaccagcatcggtacaggtcaactgagtgctgaagcgagagcaataaagggccttgtcgacattgttgaaaaaacatgccgaagatggtacttgcccacgaacaaaatgagcagattatgttgcacgattgtgaccgggaccggtgactcggattctgaggcgtcattcttatgtattggaagcaagaacgtataacgtgtatcagctgaccaaagattacaggatgcatggcta

SEQ ID NO: 300522 - DNA, 583 bp, Homo Sapiens
actcagtccgagactattttagtaagcccaagtatttggctggcaggtacacactctacattaacagagttaggtgcttttaagaacgatattctgagtggcatttattggattcacgggtaatgaaggagactgaccaaattacctactaatatgttaaagccgacaccattgctctcctttgcatcatgaggagtattagtccagccatctctgttacgattcacgttttgctgcgcattcagcctcgaacgacgcagcaaggacccggcatgatcacaacatctgcccattttatagttgttcctaatacaacgctgtatacatactgctctgccaaggaatggcactctagtccgggaatgtatgggttgaataacatgcattcttactgaaacccccttttgcccttggctgctcatgattcactgactgcgaggcccaagcgccgcatgtctgactgcttgatgatgcatgtggtgcggccttgggtatatcgctaaagatggcttaagcagcggagagacctacactttctttagagcgaggctcgctggcacccacagctattcgtttagcacag

SEQ ID NO: 300523 - DNA, 531 bp, Homo Sapiens
  misc_feature (320)..(320): n is a, c, g, or t
  misc_feature (385)..(385): n is a, c, g, or t
  misc_feature (429)..(429): n is a, c, g, or t
  misc_feature (439)..(439): n is a, c, g, or t
  misc_feature (452)..(452): n is a, c, g, or t
  misc_feature (477)..(477): n is a, c, g, or t
  misc_feature (479)..(479): n is a, c, g, or t
  misc_feature (481)..(481): n is a, c, g, or t
aaactttttatttggtcaactgaaaaatatcacggttttttttccccttggcactcataacaggacgacgctaggactccaaacacacacggcatcaataacgtatcttgactaacgaggaacaaaagcagacacagttctagcattccagagagcggatgcttatgctcacattctaccagggcatgtggagagggcacacatagcttgagaaagtcaacctcgtttggcatcttctcatattctcacattgagtctcactaacatgctagaatagatacgtctctaccaagagcgtagaagagtgcagctcttagacncttgttgaactagcatgtcctacgtatgtagaaacacaatagcaagtgactgtcattatctgaanatatatatagtgtgagtgtgtgagggccatgagctgcaccattntgcgtgtggnggcaatcactttngtgtatgaatcgcgacaaatgatanantntccgtatgtacgtagcatcgaatatgacttgacaagtaagtaccacacgc

SEQ ID NO: 300524 - DNA, 566 bp, Homo Sapiens
cacacaaaaaaacattgaatgcatgtccctgttttgtagtagcttccaggactaacacccataagggatgttacctaaagtacagaagggctgtccgggggagaacaacccctccagcgttcgtttcctatatattaggaacaattgtctgccggtaagatgtgctgagctagctaaaaaatcggatgctttacgagctatggggaattcatggaaaaaggaggtttgaagtagcattctaagacaataatcttaaaagttaaaagcttgcagatgataaaataatcctgcgaactcgccccattatgttaacgcaattggacttctcgaagattccaagtggaaaaaagacaaccaaacactgcaccagctggccttgattaatttggcatatgaaagaactggtgcaaaaaggtggagatacacattgcaaacatagccataggtgagcagacctttgaaaaatacaaaactgggcttggggtatctcggggaaaagcccaggcaatactaactcacaattggactgcgctattcaacttttcggcatacctgctcggaggacc

SEQ ID NO: 300525 - DNA, 447 bp, Homo Sapiens
  misc_feature (125)..(134): n is a, c, g, or t
aaaaataaagcacaaaaattggggttttttttccctcagggcccggggaaaaaaggggatccttccttattaaaaatttaacccagctttcctattggccttccccccaaaggtgcaggcacaannnnnnnnnnctatttgcctggagggaagattttgcccattgggcaaaaaaactccctttaaaaaggggggtttgccccttgctttggggggtcgcccttgggctcccaggaccctagggggccagggggttctttttttatttcccctattcgcgaagaccggagggggaaaaacacgggggccttttattagggggaacattcccagggggtgacaggtgacaggaggggaaaattttttttcccgggggccccaccaaacttcatgatttgaaacggggcctttggcccggtttttcgtgggtaaccgggttaggacaaa

SEQ ID NO: 300526 - DNA, 493 bp, Homo Sapiens
  misc_feature (40)..(40): n is a, c, g, or t
taattagaacaacattttttctatcttttttcaacactgnatttttgggagatcgaatttaggactgacctttattgcacccctgagcgcggggaaagaatgggctttaaattttttgaacatttgtccccaaattcttgttgaccaaacatgcagggtatctatcaaggtgtgagggcaaatcttacggaagggaacatttcgcccaaatgcaaaacactcaacattcctgaactggttggcccggggcataggggaaaaccatttacttggaggagcttagaggcatatgaaaaggttctttgaatcccccatcacagtgtgagaggagagtataaaacacgggcgcggttacttcactgagatgtttcccatagcctaggcccttgacaagacagacaaatttttttactcacgcacctgcttatcttgaacagagcaattaccctgttgcacagagtatctgtgtacgaactatgggtaagtcttctat

SEQ ID NO: 300527 - DNA, 452 bp, Homo Sapiens
atttaactttgcctccagcagctcaccataaaatttgggtccaaaaaggccaaggaatgtattatcagaaatgttagctatctctaggaaaatctgtcattcatttaagtgataatctttaaaattagcataactatattctggatcattttattacgagactatcatgtgatttcaatgtctgagtttattaccattgtacgagcaacatgctaagttacaactgtaactcccagggttggtttagcaggaaagtgatggaggcagacttaacagtgatgcgtgtagttcagcaaaggccaaatgacagcactgggagccataatggtggtttcctagtaattcaaacagaggaaagtagcaagaatacactgatctcagaataccaggcttgtcagactaaaaaatcctgtgctttaacagtcagtggttgacagcaacttatcctaagc

SEQ ID NO: 300528 - DNA, 514 bp, Homo Sapiens
  misc_feature (41)..(49): n is a, c, g, or t
attttccatttaaaagcttgttattgtggaaaagcttctcnnnnnnnnnatttaaagcctggatacaacaaataaacggcggaaattcggaaaaaggtatgaatggcgcacttcgaatgttgcaccaggagcttgttcttagccttcataataatttggaaaacagggtgaccatacaacgcggcctttaattgattactataggcacgatgatacgatagagcaaatattcaagccttcaactaaaagactcatgtcgtaactttacccgttgacttagggggctcaaggcctggattatgcctttgaaaaccgaacggcgtttatacaaaacacgtggacgcattagcaactggtgagataactgacaaggtaacgatttccgctggctctttggggcaccaggccactaacaacctatgtatgagtcagagcagccatatgctgttcttcttttttcgcatgaaccaacgagagaacgctcataaaagcacccagagtgaagcgacaaccg

SEQ ID NO: 300529 - DNA, 490 bp, Homo Sapiens
  misc_feature (229)..(358): n is a, c, g, or t
gaagttcttggagaaaactggttttaagttagcatgatctttcctcaaaaaacttatagtcctgataagaacttcccccagaattccagataaggcagcccaggccttgctgtttgcccatgcccatgcggtcagcttttttgggtaccgtggcatgcaaatgcaaacgctcacccaagaccccctgtagtgctgattactggctgaagaccctgaaaatttgaaaaannnnnnnnnnnnnnnnnnnnnnnnnnnnnnnnnnnnnnnnnnnnnnnnnnnnnnnnnnnnnnnnnnnnnnnnnnnnnnnnnnnnnnnnnnnnnnnnnnnnnnnnnnnnnnnnnnnnnnnnnnnnnnnnnnaatgagcaagttctttatttactagttcctgagcgatttggttgctaaaaaaagtttagaagcatcatccgctccctttcctccttttttaccatgtgatatgcacccccggggtacccttcccctattgtt

SEQ ID NO: 300530 - DNA, 235 bp, Homo Sapiens
cctttgaagaagaaaaacccttttttagggaaaagtcccccttgcccttaaagtttcctctgcatggggtttaaagaagttaagaaaagtccttttcccgggaaggaaggaggaaaatttgttcctttcaaaaacccggcctttgaagggaggtttttttgttgttgttttctataaaaattgagggaaagggttttgcaaaaaaattttttgctttgggccaaattttttaagc

SEQ ID NO: 300531 - DNA, 582 bp, Homo Sapiens
ctggaatttataaaggaaagagatttaattgacttacatttttgcagggctgggaaggcctcaggaaatttacaatcttgacggccggggaagcaaacatgtcctttttcacaaggcagcagcaaaaagtgcaaagtgaaggaggaaaaatcccctataaaaccatcaaatctcatgactactccctcactatcatgagaacagcttgggggaactacccccatgatctaatcacctcccatgaggtctctccccaacatgtagggattataatttgtattacaattcaagatgagatttgggtgaggacacagagccagactatatcattctacccctggtccctcccaaatctcctgtttttcacatttcaaaacacaattatgcctttccaacagttccccaaaagcttaactcattttagcattcattcaaaggtcaaaattcctaatcttggtttgacaaaaggaaagtccttttgtccaccaaccttgtaaaataaaagaaagtgtggttctttccagaaatataagggaagaccggcgccggttataatggccccctttccaatgggagaaaaat

SEQ ID NO: 300532 - DNA, 462 bp, Homo Sapiens
caattttactgtttttaatgaccaggtaattttgccgcaagggtacttaacggggggagatgaccacttgttgtcctcgggctgggaagataaatgtggctttttccacgggcgggaagggggtttgcaggtgggacacccccctagcagacctcggggcaccccgaatttaagggtcggtttacattagggagacaagtctttaaaaacggaacctgaccgggaaatacaacttttgggggttcttaccaaacaaggataccctggggaattggagatacttgggttccaaagacttccacaaaaattgggtgttttatggggtaaaggaccaaaaggccctaaaatttgtccttaacatccagtttgaagtgagccaaaaatttccgtttcctgccatggaggccaaatttgtaatcgggggatttacaaaccctttttcggcaggttgtttgttcaaag

SEQ ID NO: 300533 - DNA, 418 bp, Homo Sapiens
atgagccaccatgcctggtcaacaccaccctttaggtacttgctgaatacacaggattgatggggttgagaaaggatcaaggttgacttccaggttgctagatcggtggtcccagatgttgagagagagaatgcaggacgaagagccgttgtagggggagcagggggagtgtcttcgcatgatgggtagggggtacccgtgagtcacatacaggtggatgtgccctgaggggagagggacgcgagtctgcagattaggcaagaggctacagttgcatctattgtgtcaataacctacaggcggactagggcagtcatgtgcctaaagctcgggcaacatttttgccgagagagggggatcttctattgtccagcatgctatgaagctctatctagacgccatcttatacctggaggtt

SEQ ID NO: 300534 - DNA, 433 bp, Homo Sapiens
gtccttatgcggcgtatgactgtatttagaattaacatttcgtttacttcaatcatggagtgtctatcccagttacttttgagggaaagttatccaccactaatgttataagctactccagaaacatatatgtgccatataatttgcgattcctggagagaatgttctaagcagtagaaactagtaatttctaagaaacataaacacattcataacccccttaccttatgtaaaatagagtttataatttttagaggtatcattttaagattctgcaccaatagatggctttgttttcttttcaaaatgaagcacttgcttacaattcaaccaaactatcaccaggcgatgtcacttcgagtcagagtaatatttgtgcacaagctctcctgttttggttatatggctagcaaggcggccattcctgatggta

SEQ ID NO: 300535 - DNA, 508 bp, Homo Sapiens
taaatagcaagttttcggaagacatcttttttttatcctagatggacatatttaagttttcacggctgctggaagagatgacattaatggtctggtcatgaacgcgttcaaacacagcattatggagaggactacctcttcactccggtgcaggctccatcatatacctattattcggaaccagatatccgtcaacgccctcatactgcatgtacatgtctcggatgacgatgcccaaaccctccagaccgttgtcttgtccaccgacgccacctaggctctaattcttgcaccgctcactgcccacgtttgctcgttagtgctcgaggactaggtcgatgtgacgatacttgtactgcatacggtagcgctaagttaggaggttccgacgatcataaaggtaacgattgcgggctttttcttctggacgaagggcctggacatgatcctaattttttttgtggaatcccatgacccgtttattgaatccgtgctaccccattttctt

SEQ ID NO: 300536 - DNA, 544 bp, Homo Sapiens
  misc_feature (196)..(365): n is a, c, g, or t
  misc_feature (483)..(483): n is a, c, g, or t
agagtctggctctgtcacccagaccgaagtgtggtggcatgaccttggctcacctcaacctctgcctccctggctcaagcaatctgcccacctcaacctcctggggagctgggactataggcatgcaccaccatgcctggctaatattttcattttttgtagagacagggtcttgctatgttgccctgttcctacnnnnnnnnnnnnnnnnnnnnnnnnnnnnnnnnnnnnnnnnnnnnnnnnnnnnnnnnnnnnnnnnnnnnnnnnnnnnnnnnnnnnnnnnnnnnnnnnnnnnnnnnnnnnnnnnnnnnnnnnnnnnnnnnnnnnnnnnnnnnnnnnnnnnnnnnnnnnnnnnnnnnnnnnnntgaaaagctttattgttgcttctgagagtcaccttgcctggggacgaagaacgttctattaagccggcgagagggctgaccttactgccttcagccaggatggctgggaaactgcctnctcttcctcagagaggaccaggtgaccttcccatgggcttgtagggcccgtggccaaggag

SEQ ID NO: 300537 - DNA, 480 bp, Homo Sapiens
  misc_feature (341)..(397): n is a, c, g, or t
agaaaaggtacatttatttttcaagcagaaaattttcctgaaaaattttttgtaacggtattaaaagaatcataatggaaagtactatatttgattagttgacatggaggaaatggtactcccactttataccaatattttcttaaaaggttgacttctgtattattttaatgagttcttacactcgagctagaacactttcaatgaaatcaaatgtgaaaagagctgaatgcatgacctgcactgcctataaaacgtgatgacattaacgctgcctttaatgcgaaacaattcacatcattgttaagattccagctggaggttgcttaagaatatttaannnnnnnnnnnnnnnnnnnnnnnnnnnnnnnnnnnnnnnnnnnnnnnnnnnnnnnnntcgtgccgaattcctgcagccctggggatccactaattaatgagcagacgtcacctgggtggcgctacaggtaatgttaactt

SEQ ID NO: 300538 - DNA, 169 bp, Homo Sapiens
caagggtgctccttgcgtgggtcccttaacaaaatgccagtgtgggcggtttggagaaagggtccccatgggatttgagggggctgctgaactaccagtttttaaatttgggccgtgctgttccagtaaagtctctttagcctaacacctttgttaaaaaatggtaaag

SEQ ID NO: 300539 - DNA, 518 bp, Homo Sapiens
  misc_feature (53)..(176): n is a, c, g, or t
aacccttttttattgtcattttttgtggtgcccagggttgtatgatttttgannnnnnnnnnnnnnnnnnnnnnnnnnnnnnnnnnnnnnnnnnnnnnnnnnnnnnnnnnnnnnnnnnnnnnnnnnnnnnnnnnnnnnnnnnnnnnnnnnnnnnnnnnnnnnnnnnnnnnnnnnnntcagcttattgcaaatgcttacaagagcaaacttggtgcagcccacaggccagggggggcagcaccctggaaacgactgtgaaagtgaaccccccaaatgtttaccagggttgagtgggggaggcaccgactgttttttacccacatggtgtgaaggtttatggaaggccttccatgtggaaacatgcagcacactcccatatctgctaaaccgttgcattaggcccctttttccactaaagttttccctttcttaacccggcagaggaacatttcgggccatgggaatctgtaaagaactcagttttaatttccaagggcccctgggaggaatatttagag

SEQ ID NO: 300540 - DNA, 513 bp, Homo Sapiens
gaagctcgttggtttaattccagatggttaggaggctcagagacaccatcggagccgtgaatattcatgagccggcagccttgcccaggtagccgaggcctggctggtggctgcgttggctccgctcatttttgaaacgacacagcacttctggattggagacgtgatgagctatttgtagacatgtcccacccaccaaggacccaggccggctcacagggacctgtccagctgggtcccaatcgttacactcctccacctcctcccaaaggcaccttcacccaggcctggctctgggctccctgtagggggctaagtgtccagcgtccccttcctgctgcaagacctcagccagttcaggccccagcaagaccctctccacttgcaggagccaggcggccatcttggtcccttggctcattctcagcagctgggagacacctgctgacacagttcactttggctgagggggagggagaccccacgttgctgccttttccagctggtgtttgt

SEQ ID NO: 300541 - DNA, 455 bp, Homo Sapiens
  misc_feature (71)..(79): n is a, c, g, or t
  misc_feature (184)..(192): n is a, c, g, or t
tttcccccttgagagggcagtccactctacatttcaaatatgtacacataccccgtacctaatctaaacgnnnnnnnnnacattttaattgcacctttttcccaaggggcaaaatcctttgagaggcgcttctttagctgctaattgacaatgcacttggaaaagctccctaatgtgggccccnnnnnnnnncgatttatatcccaaatttggaaatttctttcggcttaaacaaaaagccccccccaagggcttgattttggtgaaacttgacttcacggcaacaaaaggtttgagatttctatttaagcttaaatgacgacacctcttgggggtcaaaaaatggagatacaccggggggttcatttcctgaataaaatatttgaccttttacaagaaaggcgcccaggaaggggggaggcccttttgagacgggccaaatgtaaaaatacccc

SEQ ID NO: 300542 - DNA, 247 bp, Homo Sapiens
atacatttattaagtatgcaagaaaaaaactatttaagaataaatgcaatgtgtttagaacaaatctgatgctctgtattttaacttttaaaaagtaaccatttcacaattaaatttggatccttcattttaccccaacaaaaactaaccttttatagagaagaactttaacaagtaatgtcaacaaagcattctaaagtactcataatttaaacaacttgcaaggagacaactgttttttttgaga

SEQ ID NO: 300543 - DNA, 386 bp, Homo Sapiens
  misc_feature (210)..(210): n is a, c, g, or t
  misc_feature (283)..(283): n is a, c, g, or t
  misc_feature (323)..(323): n is a, c, g, or t
  misc_feature (326)..(326): n is a, c, g, or t
  misc_feature (332)..(332): n is a, c, g, or t
aacttgcatttgaatctgtccctaagacatctctctttggatatctaatagtaccaacaagtgaaacatgttcataatggtatttttgacctgtattgtgcaaatctcccttccgtgttaccattttagtaaatggcatcacaatgtgtaaaaccgtccaaaacaaaaaccagtactcacccttgagatttctttttccattatcccggntatcccaaacattaggaaagctatcaggccatttacaaaacaccaggccaatccacccatttttcttcttctncctttgcaggccttgttcaagccatgcaaataacgggggnagnacgctnctaattcttttcttggacaactcttgttttaaagtgcttaaaccattgaatagt

SEQ ID NO: 300544 - DNA, 598 bp, Homo Sapiens
atccagttgttgtcacacctcttgtacaaatggcgaggttcaccctgcggcttccaaggcgctgtgatgataggacgtgagccgcactgtctgctggcgggtgaattttctatgaggtacgacagcccaaaggtgccgctatggacgcggaagcctgtggctacaatacaagctgagccaccgttgcctatggaaatttgtaatgtcgcctctagatactaatagcattgggagcgggcactgcatgaacgcagtaatgccgcactgaggagtgcacggatgagtcgaaaacggtggctgcctaaaacactaaggcgagcgaatgacgatggtgctcctgatgcagagtcctacgggagtacagagtttagacacgtctacaggatggacacaagcactctctgtgggactgcagagcaccaataggttgggaacacggaaatccgtcggtataggaggactgcgtagaaaaagggtagcaagggagaaacttcccaggttagtaggcgggcactctcggttttcaaacctttggggtcaacctgtgttgtctagacttgttaaacgcgtttgccacctaccaacctacctttgaata

SEQ ID NO: 300545 - DNA, 255 bp, Homo Sapiens
cattgtacgtgcatgggggataggcctgtgaacaagaccaacccaaatgaattccctcttgaccccgccggctccgataattactcgaaccgggcacaacaaccaaggttttctaacacccttaaaaaaagccacaaacttttggtatcgaaaagaggggggaaaaaacccccctttatttgaacaggtaaatgtttgccagcgctttccttccactagggggagagtcaccaaaagcccacccttcctgttggg

SEQ ID NO: 300546 - DNA, 534 bp, Homo Sapiens
tttaagcaaatcatttaaccataagccacccagtaacaatgtagctaaggggccctctcaattaaaattaaatactaaccctgattttataagttcctaaatccaaggtcttatgagttttaaaataacagttggggaaatgttttgattatctgattcgaaatataaattaagtgtatgcaaattttggcagaatatggggggaactatttgaatctttggggggtaacagactgtaaaactgaagtgtttctggggaattcttaagttaaggtgtgaaaaagagagccagcctcgggagttggagctgacccgggtgtctcattggataacagaacagggcctgtgtccaaagtgggggcagggcacattttggtcccacaatgagttgatcaacctggggactgggggtaacacacaagtgcgcccctggataggccctctcacaccccctaggcaactctgggggaagtttaaagccagctggagagggaatcccgtttcagggtcaacaagccatacgttttccaggag

SEQ ID NO: 300547 - DNA, 290 bp, Homo Sapiens
ctctactcccactatcttacctaaatcttaaaagacagacaaaggttcttatagttagccctttctcaaaaaccttgaccctgaaatttgaacttcccacaattattcctggtttctttctagttccacaaactttctcctagttcttggatcatggtttgttcctctttcccttcatagataacactggagataacattcatctcagaagttagattcctttaaaaacaaatgctctagttcctggggcactagagagaaaagatttgccaacaaaagggtccagcttg

SEQ ID NO: 300548 - DNA, 150 bp, Homo Sapiens
catgcctattttaataaagaagcacttattctagtcattttcaatatcaacctcatgcaaataaatggttggtttagttttagaggttgatgaggaatgtaatgtttctgtgacaaaagaaagggaagaaacatattcactgagagttag

SEQ ID NO: 300549 - DNA, 461 bp, Homo Sapiens
  misc_feature (70)..(71): n is a, c, g, or t
  misc_feature (93)..(93): n is a, c, g, or t
  misc_feature (97)..(98): n is a, c, g, or t
  misc_feature (103)..(104): n is a, c, g, or t
  misc_feature (349)..(349): n is a, c, g, or t
tttatttaagacattttatttaaagcctcatgaaaacgccggacgcagggggggacgttggggaattttnnaggggagacgcccaagccccancagnngaacnnaagaaaaagagaccaacggcgagcaaaacggacacaaggacaaaaaaacggggagaaaaaagaaccaaacggaagcgaggagccaaaaaagacgaacggaagccccaaaacacccacaaaccaaagaacacccgcgaaaccacaaacgccacacaaagaggcacacacgggaaacacaaaaccacgaacacaaccaacaaggcccccgccaccgcccaacggaacaaaccaaaccaaacaacccnaacacaccaccagacaaggccggacgcgcgaacgaaaagacaaggaccaagcccaaaaaccgcaaaagacgggcgcagaaaaccaaaaacacaggaacaaaaagcgaccccc

SEQ ID NO: 300550 - DNA, 550 bp, Homo Sapiens
  misc_feature (457)..(457): n is a, c, g, or t
tttattaaaattggggttcaccaggttggtcaatcttgtgtcacaactcccgaactcaagcgattatcatttgggccatacaacatgttgtggttatacgcaaaagccattagccccggtcgggggaaaaacagattatccgcttctactgtttagagtatctaatccaggcgtgagaccgtttttgttaacaactaccccattatctcattgaagatggattacttgttgcataacatcttatatttaaagcatgatacggaatgaagctctcattaatgcttgagtgctaggctggatcgaccactgatgaatctgcaagtatggcatactgaaatatttgttgaatgggtacatttgcttacttaacaagagtcgcaaaagacgtgatggctattataccagctaacttttggctggcaagcgctcttcctgcaacagtatgaagatgctttgngtggcacgcttaatgcttcccattggaacatgaccattcaagaggattctcaggcgttgacgctctagtaatacggcatgcttcctctcgtat

SEQ ID NO: 300551 - DNA, 617 bp, Homo Sapiens
tttcggaaaagttcatcttttatatacttttttacactttctgtaataaaaaagaagcctcccagtactattgggccctcttttaaacgaccttcgaaacaactcccctctgtcttctccctgttcccgttctttctcccacgtctccgtttcctccgtctcgttccgccttactatggctctctcggccccccgtgcgcgcccctctggccctagcccctaccccttcctgtcctcgtcccaggtctccatgtgggtttctgggtggccacctgtctgccggctatctccctgtgccgtcccccgggccccttgcacgtttgtttttatggcccctctcccgccatcccctcttccatcgtgcctggtcgcccggtgtctcttccttttcctcacttcacgccttccgttttcttgggattttttcactgcttgctccgctccctttcgctcctatgaccgtccctctcctcttgcgttttggtcggtcacttctgcttcccgccacctctgcgtactacccgtccctatttgttttgccccgaggccctcgggtgggctctgcttccctctattgcctctgctcttttcgttttccttccgtgaccccgtcgccc

SEQ ID NO: 300552 - DNA, 417 bp, Homo Sapiens
gtatgttgtctagcaaagatttctggttctcaaggactctctagtccctggataacactgggcataaccatgcttgatgttcaaatgaaattcatagcagtttaatcagttgatcccattgcttttttatattctgttattaatactgatttataaaacccagttattttcctcattattgcttctcagttctgtgctttctatgaattccaatttaacaaaagaatgagtttaccattttgatgtcactatctgcttgatccagggattatgtattggatttaaggtcccatggctgcaggttattacaagtatgtttgaatactgtgctttgcaaacatactgatttgcttgaaatgccaccttccttttctttcttatttctatgtttcatgagagacagcagaggacagtgct

SEQ ID NO: 300553 - DNA, 458 bp, Homo Sapiens
atatttatttacactgtaccaactcgctgggagcttaaacaacacactgggaacatcctccgtgaggcactggatgcacagatttatttgaaactacatgaactccacgacaggctcactaactctttttcaagtgcaacaacaaatgtcggctctgagaaataaccaagtcaatagattattggtgacacacacacgagtacgtgagcccagagagcctacccacctatgtatttcctgcagaggcagaggtctcagggagcttttgagtgaacgccccgctgtattcactgcacttgaaatggccattagcatttcatcacgatccaacatttgagcatttctttattcagacacaccatgtttactgctctattctaattcttcaggatcagatgatcagccggtattcggatgcacgagactctactatgtatccaacatacgaggacactatc

SEQ ID NO: 300554 - DNA, 546 bp, Homo Sapiens
gcgtgaaactaggagaatctttattaaactcgggaccacccaaggaggaccgatggagcggagacagggactcccgctgcaggctgcgcggaggcacgaggcactgaaagacgtagagtcacaaggatgcaggcttcggcgatcagtgattgtcgatgctcacatgggctacgctgatgcccacggatgcctgcacctatttcaccaggaaggactactggcgctgcatgacatccaccatgggctggaaccaaatcttgatgcggaacaggaaggacttgcactgcaggcggatctaatgggactgctcctacagctaggcgcgcacattcgacacctgctacttcacctactgcaagcggacgcgggtgcgtgagaacatcatcttcatgcgcacgcgcagccgctcgacgcaggcctggaaccggttctgcagctattggccagacagtgagtccacagctgagaaccagacgcggaccaattccagcaggggctacaggcactagcggatggacttgaagccgcaatgggtgccctcactgg

SEQ ID NO: 300555 - DNA, 382 bp, Homo Sapiens
aatttttcttaatgttttggtttccagtgtacagactgaacacatctgtgattagatttatcaccaagtattcagcttgttttgtgttattgtaaaaaacaattgtctgtaaatgaattaaaagaagtttgaaaactgttgctatagaataaaaaatgtacaaaactagagtttgtaacaattacgtgtgtatacctatatatctccccttatggtcaaactacatttacttttataaaaagtaaattcacaagaagggtcatctatggagtgtgtgtgagtagagtagatctgaattagaaaggatacccagggactttaagtgtggattgtttgttctttaaaacaagacagaaaattcagatttagaagcagatatgat

SEQ ID NO: 300556 - DNA, 135 bp, Homo Sapiens
caaaaagggaaaagaaaatatcctcccgggccagaaaggcaagcctttttcggttgggcaattggtcaaccgccagtggaaggtgcccccttaaaacctgattttaattggaaaagaactaaaccctgggtgtgg

SEQ ID NO: 300557 - DNA, 432 bp, Homo Sapiens
gaaagggttatctttgatctttacctcctccaactcctctagtcactatcagtgtccccaaatcctccctcaaatgcacacgcacagtctaagtagaaataacacatttgcctgtaagtggggaccttctctgggtcacggctgcctcaaaagattttcctttagagaaaccccaggcccctggtgtgcaccgtagccacactgtttcatagcccattttttaaagctgtatgttttgaatattttcgcatgtcaagaaatagtcaatacaatacaatgtattaatgatgcagtagtatttagccatcaaagtataccataatttactgatatcatggtcccccgtaattagacatttgcctgtttccaatttttcaaataatccttggatgcacactttgtggtaaaatttctaacatgtctaacacattc

SEQ ID NO: 300558 - DNA, 498 bp, Homo Sapiens
aaaagaatgaatcaactttaagcaggcatggagtttacagatacaaaggctacctaggacatgtatgaagatgagacagtcttcataactctgactatgattacagcttcttcaaggaacaggtgaaatcagaggtaggtatcattaaagcacaaagagtgtacagttattggcagaggcatcctatgatgtaacatcaacattacataaaaaagaaggtggattccatgcactaattccatagtgaggtatcaaaggtgcaggttactatataaagacatatactatctaaaacttgaagactcaaagaacatctactaaaaacatacgccactgtaccttgacacagagctgcataacaccataatagacattcagacatctataaatctgtgctctattacactcagacatagttcctctgccaaatgaatgactaaccagaagctaataaagaacaattgccacaactgacgcttatgacgaaagcctacaccg

SEQ ID NO: 300559 - DNA, 683 bp, Homo Sapiens
tacaatagatctgtgctaaaagggggggaagaagggtacttacgaaacccatattaatggggcagcatcctctgaggcaattggttaccaataagacgctattgcattccaggagcacggtgagcataaaatgaggagcgtcagtacgcgatgagtttaataaatacatccaagagctagtttgggccgtggggagctacatgactggccaggaaactcctttgaccagatgaacaggggcttggacgtccataacgggggtctatataccagatgaaagttctcgctactgttccagacatttacatcattggatgagctcttgaggtctcaggaaaaggaggctttctttttgtgttaatggagccgatactccctatcacgggttaagtagagagaccgtgcataaagaacaggagcaggactcctagtttttgtaaacaggtgtcacccacaggggggaggaaggctttaacagacagccgcggagggaaagctgaactggggctattaagccgttttaacaagcccagttggggcactaagcccatttttgccttgagaaaggaaagcgtggctcttggggcgacagggggcacttgcgcggtaaaggccgggcctcttgagaaacaaatggtaaccgtctgctttaggggggcaccttgtgtagattttggggtgtg

SEQ ID NO: 300560 - DNA, 512 bp, Homo Sapiens
aatattatttaatttaatattttcacctatgagaggtaatgaatgcagaaatatagtctccattatagcagacaggaaaaaatacattatcctactattttctagaaaaatgattgtggcattagcaaatcaaatggaaaaagtgaataagcagactgagattacctgaaaatagttagttgctagtaagattcagtacaatgtatgtttattaaataatcgctactagaacaaacatctgcgacaactatgaagttaggaaatgctgtattagcttgaacagtttatctgttggtcacattaataagtgactcagaaatattacaagtatggaaaggcatgatagtgaacaatgccacatgagtccattaagcaaaaatagataatggcccctatatcttagaacagactcacttattcattggtatgaataatttagctctaaaagaaaaatcccaaagaagcgaagacttactgtggaaaggactttgaactttttcttttagaaagtt

SEQ ID NO: 300561 - DNA, 503 bp, Homo Sapiens
ttttttatgttacgaaaggatgggtgtgtgattcttccccacactacgccctcaagatctggcggggccgatgccatttgaagccaagggcgtgtggccgcaggtgctcctataacattaggggctctaaagcccagaaatgggggggtggtcctcccgccccaagaaagagacgctgacgataaggctgggaacattctaagggacaacttctcaataagggggcggaaaggcactcccccaaagttagaatattaccccaagggccctaatccatcgaagtttttctccttacatactgaaaagggtgcgcattgaaacgcactgcaaaggatccttacaagcactggtgtagagacattctcgcagcacttagatgctgctataggcgccttgtttggaactctactcatcttgcgaggttgcccagaggggaatcaaagccgtcacatggaaaagtgaacattggttctccaacccacggtcacgagctgaatcaatct

SEQ ID NO: 300562 - DNA, 484 bp, Homo Sapiens
acattagtccaactttattataaaattacttgtttgaagttttaagctagtcaaagcactaaaattacatgagttgcataccaaagcaaacaacaaaatatacatatcactatttaatctctatacaatccaacaagtatgaagagcacaacatacatttattcacataaccaagaaaaacatgtttcatctactattaaaatgtgccagtaacaagttgaagtccaacattatttaccaggtggtaaaatctttgacacccagattaagaagtaataaaatgtatattcccagcatttatattctgacccaaaacagttatttaatttggaacaatgatggtatacaggtgaagctagcaatagttttaacaaaaagtacactctatatttaacaagtcctcttatttgggttctaaactcagagtaggcacaaaacaaaagcagatttctcaagtccaaaagtgtgcaaacaagaaacattt

SEQ ID NO: 300563 - DNA, 591 bp, Homo Sapiens
tttttttaaaaaggcaaatgctaaggtttattgattacattttgacgctaagtgaacttaactagtataagaactaaagcataccgtcatgtttaaaaaatgaagctatttttccattggagagattttggaaaaatataggtctgaactctggggcatgcatggctgacttttcaaagcttcacaagtgagtttccacacagtcgtttgcatcacaatgatatagattgataccttcaatcttatgcatcaacagaaacacggctggaaggacatcaattgtttatgaaagataatcaaagaagcctattgtggcgaatgttttttaagggatcctagggagatgaataacgcctgcttcttcatgggttgacaatgtatggctgattagggaaggtgaaaccacacttatctgatgatcttaccgaagggacacactcgagttgagggacacggtcctggtcactgctgtggtatgttaatgcggcactctggatgtgagcgtagcgacttcttccttaatagatgcacgctacacaggggtaagtgtgcatgacatgaacgagcacatcacatgtctcatgtagcgga

SEQ ID NO: 300564 - DNA, 512 bp, Homo Sapiens
ttaaagtttagagatggatcataatgaattgtgccaatatttttctttgagagaaatgtatactatgttataaaccacaggtttcgggggagaaaggctggaggtttaaacaccctatttttgattctgaaaatgatattaatagaaagtgtcggtcacagtctgattatatagagacatctgccctaatggttgtgatacatcgtcatgaaatgcaaaacccctacagttgtgggcatgcacaagaaaatttccaaatacctaaagtgtgggcaggtgaacgtcctgggtggaatacgaagatgtattagacgtctttgtctctgcctacttgcggccatatgcttgtgaacggaaagtaaaagaaattccccttcttatacatttgtgctggcctgtacaggctcaggcactgcctcatctgttaaccgaggaccccatggtctgtcccatctttctgaagccaacctgctgatggtgacagttgcttcttcatgaaagcaagcaactgt

SEQ ID NO: 300565 - DNA, 476 bp, Homo Sapiens
aagctacatatacacggggagcgggcttgtgttaaaaactactgctggaatgtctgtcttcgaacgagcccgtaaaccgttaaagccctatggcgagccgccttgcccagcctgcttagctgggtattgtcccggatccccactatgcggggtttttgacaacaacgcggctgtggctaaaggaacagactaccactggtcccaagactccatagcgggctgtcatggccggaaacctttaggtagctctactactacgttgcggaaagcgatcatggcacctccctaggaagacccttttagctcaatccaaccatcccactggaactcggccgtgatgcacaacaacccgggccggtcagtaaaatgtttcccgcagtagataggttgtcgggcacatagatgaacactatctactcagcctttggggagtgcggaaggagcctaactttccatggagcaaatgcctagtgccg

SEQ ID NO: 300566 - DNA, 680 bp, Homo Sapiens
  misc_feature (267)..(267): n is a, c, g, or t
tttcagagttttattgtattgcacttttggagcagggggatgggtatacaataatctgtcatgtgagttgtgagaatcattagaggctgcagattcacaataattcctttagcacccgattagaacagtgtgcataataaccaatgccttaattaggaatgagttccaaagatacacattcagaatagctttgaatgcagtcaacacaagtgatgcagaatatatttttatatgatgtttacgtatgcttcagaattaaagcatgtntgtttataactctgagggaaatatgggaaatgtctcatacatgccacatacggggagattactcgagcggacggaaaagttgagctttttattctgggagaggatgcagattctagttttcacgtgacacactaagaagcccatggagatacccactgggcagagatacattttcactttaagagaagcccactgtatatagagcgtatttatcattagagactcgcccagtgaaaccaagacgtgggcttccaggtcctataaacaagagctgccaaagaactaggacagtcggtcatttatgcatggatgccaggaatatgggtggtccgtaagacatgcaagttaaaactgttcattacacaagcaaatggtttttcttaattttacggcaaccgcgggaagctttattt

SEQ ID NO: 300567 - DNA, 631 bp, Homo Sapiens
tactgttttactgaacttttagggccaggaaatgggtaggctccgagctaacatggcaatctgattgtcctcagaagctactcaatccaaatacatcctacagaattccgctaatacgatgtgcattctataaggtgcctatgtttggaaagagtgcaatagatacacagcccgtccattcttgacctgaggtgaagtaatggattgttgccaaaatttctatctgtggcttcgctagggtctggacttaaagacaggggttgtagacctgaaaagaattcttgctccttttatagaatttcacacacaggaggatttcttgagctggcaggctgtagaaacttcttctctgtggggagggagctgattctagctttcagggccctcactcgagggaagctcgagataacaccgtggctgagctcctttccgttttgataagtgcccccagctgatagggagaccgggtcaacttgtagtcgaccagggaatcctggccatggccctcttagacattttaacaagcccgggagcagcgaaaggttcagttttccctttatgcagggaagcctgggctcttttttcttccgtggacaaaccggccggaggccgatcttttcgcccaaaacgg

SEQ ID NO: 300568 - DNA, 565 bp, Homo Sapiens
  misc_feature (202)..(293): n is a, c, g, or t
tcttttacttggacatcttaaaattattcacaattaagtttttctcatataagtctttggagggtaacatcgttttcatttaaaaatgggaaatggaagcagaagaaaactagatgataaagttctcagttcttcactgtgattaacagctaagcaggggctaaaagcttgcatttttggtgttagattccaaatctaccannnnnnnnnnnnnnnnnnnnnnnnnnnnnnnnnnnnnnnnnnnnnnnnnnnnnnnnnnnnnnnnnnnnnnnnnnnnnnnnnnnnnnnnnnnngacacttaagaagtattcaacaagcagtagccattattattaccacaactttaagatcactattgataagtttagaggaagaaactttttatgaagtgaattaccttttgggatctgggcactatggagaaaatatcaactaacaatctgcttggggactctatctttgaggaagaacagactacacttggggcagtaagtcagagttcttaatggttttggaccatcttcatacaaattctttagggatggagggtgatcttaactaaatt

SEQ ID NO: 300569 - DNA, 506 bp, Homo Sapiens
tttatttggttgtagaaagtatgcagacatatattacaaagagacagcgaacaccaactaaaggggggcactatcaaaaaaagcgtgcccgccgcccctatgatcaattctatttttctgcgccgctccgagtgcaccggaagcaacagtaactgcatgaacaaaaatgatagcacgactagcatcaacagcttgaagctcacctgaaagatgaaggccctgcctcgtgcggagaatggcaaaaaggccaagaggcgacctacactcgctgtagaggggaactaagcggaaggcctcgtcgacccaactatctggccaaacagacgtatagcaaagcctcccttatattactcgatgagccaggataagcttttggggaagaaatcgcacatctgggagaacaacagccagggtgaacaatcgggagaagaggcgcactggggatgcaacccaggccttccttccggaaaatgaccaggaagggcaccgcgcccagtccgcccacg

SEQ ID NO: 300570 - DNA, 515 bp, Homo Sapiens
aaataatttttatttggttgtagaatgttgtagtacataaagcaaaatgtgtctgcaggatactccaaatttaccaacttcaaacaaaataatgcacagtgaagaattagaaaattatcaaccttactcaatacatggaagtattccttaatcttcatcattttcattaaacaaaataatattttggatgagttcaacatttctatcctatgctttatgtttagtgccttccctgaattggaaaaaatgaggtgttttatttaaatttaacactggtctaagggagatatagaattaaactaaacaagaatcggttatcacaacctcacaacatatatcaaagtattgagattgttggtttactgactgtcacttttcactggatattaaatatcctgagggctacaactgtattttttaacctgtcccagtacctcaacaaaattttcactgaatgtatgaataaattatgttaacaaaaagttaacaataaaagtataatgaagatcccttta

SEQ ID NO: 300571 - DNA, 348 bp, Homo Sapiens
  misc_feature (180)..(189): n is a, c, g, or t
aatagtataaatgtattttgtaatttaaacaaaagcttctgttaacattattgctaacatggctagacactgtcactaaatttggtggctctgctcaggatggtctgaacacatgcaacattctttttggagccacctgaaaaacaaggattcatcatccagctgaaaccgaagacagannnnnnnnnnaccaaactggagggaattttgaaatggctgaccaaatctgtgggatacagaatgtacaaaattctcttttagggttgctggggtgacagggcagctcaaagaggtaaccatctataacatctgaaactgaggtatgagacctgtattacaactgataac

SEQ ID NO: 300572 - DNA, 465 bp, Homo Sapiens
  misc_feature (86)..(86): n is a, c, g, or t
  misc_feature (127)..(128): n is a, c, g, or t
  misc_feature (199)..(316): n is a, c, g, or t
ctcccctcaactcaccgcctcaccctacccaggacctgctgaaacacacacctgtggaccaccccaactacccgatgctgtagacnccctccatatctcccataactttctgtccaacatgaacgannagcctgaaactatccttcaaccatgatgataagaagtagggggattacaggtgtgcaccaacacgcgcagnnnnnnnnnnnnnnnnnnnnnnnnnnnnnnnnnnnnnnnnnnnnnnnnnnnnnnnnnnnnnnnnnnnnnnnnnnnnnnnnnnnnnnnnnnnnnnnnnnnnnnnnnnnnnnnnnnnnnntgagccgccgtggttggccccatatcactgctttaaacgaattagactacaaaatattacaaataaatttgtaactacaatacaggatagcaccataatagggacactaaattagggaataccaaggttccttgaaggtcttctacttt

SEQ ID NO: 300573 - DNA, 479 bp, Homo Sapiens
tgagccaaaaaacggcacgaggacagaccctgtgatgccctcatgggaccattttggggtatcaagcactgtgcgtactgtaacccctatacggatggggccgagactccattgatcacatctgcttactgtaccaattgtactgctatcagagggcggccaacaactgcatggtggatcttgaaataaaatttacgtcggcctgaatacatgagatacttcccgccaaacctgggaatacatttgaaggacccgcttccttaaaactctttatcatccccgacgccaaaaaaagattgcctgctctaatggaaactacgaatgagggctggatttgtagacctttcactgtagcgtgactataaggcgattccccactcgtctaggcatctgaaggaatcacatagctacttgtgttttaaactacatgtgattctaaggaattggaggaacctgtctagctttaacaatgagaccaa

SEQ ID NO: 300574 - DNA, 368 bp, Homo Sapiens
ctaaaagggtcctgggtcaattgggcaccataaaggttttcaacaaagggggtgccctctccggggtcacaaagaaggaaccccttaaactttccaaggccggggataagggtttgttgcccagtttaaaaaaaggactcaaaccgctggggccatgtttttaaaggccaaccccatttttttccccccaggggaggcattaaccaaaccctttgtttttttaatgtttggccaaaaaacccagtttcccctttttatgggaaaaatggtgaatccccccccaaaaaaattgcctttgtggggctgaaacccttcccctcattcctgggcccctccctggttgaccttaaaaaaggggttggctgggg

SEQ ID NO: 300575 - DNA, 478 bp, Homo Sapiens
taaaagactttatacaccatcactcttttttttaaaaagcatgggggaactggggttaaatacccaaagcaccccaagaccttcgggtagtatatagtcagttgtacaaagacagaatgggttttcgtggaccagagaggcttaatttttcaaaatttttcagaaagcatgcagacgcgagggatcaggcttgccttccttcaacggccaaaaacgacatgggctatgtccataccggaggggatgtcaggccacatccaagcggcactatcctaagtctttttacaggggggactgtttcaaggggatgactccgatacctttatgaatgcccattttgggagcatccccttggcctcaatatgactgaaagtcttgacagaaaccggagatgtcccagttgttgaacttaaggcacttcttgggaccacctcggagctcatgccacaactggtggagagaattgctcgtaacgatt

SEQ ID NO: 300576 - DNA, 584 bp, Homo Sapiens
  misc_feature (75)..(195): n is a, c, g, or t
  misc_feature (214)..(272): n is a, c, g, or t
tgggctcaaattatccttccatctcagcctcctgagtagatggactatgggttcatgccatcatgcctggctaannnnnnnnnnnnnnnnnnnnnnnnnnnnnnnnnnnnnnnnnnnnnnnnnnnnnnnnnnnnnnnnnnnnnnnnnnnnnnnnnnnnnnnnnnnnnnnnnnnnnnnnnnnnnnnnnnnnnnnnntgagccaccgtgcccggcnnnnnnnnnnnnnnnnnnnnnnnnnnnnnnnnnnnnnnnnnnnnnnnnnnnnnnnnnnntaactaaaggagtttaaactttttttggaataagagataattctaccttaaactgattttgaaatgttggctttgtttccagaaagatcatccacccaacaaaggttaagtcacttcaggcactactaagaactagtgactgtaatactgttacttagctccattgctcctttgagtgaaacagatataggaagcctggaatcagttctgccacttattaagttatgtaacccttggtcaagctttttaacccctcccccttaggttccttaccctctaaattgagacctaacatatacctaaaaaaggtgt

SEQ ID NO: 300577 - DNA, 603 bp, Homo Sapiens
  misc_feature (492)..(492): n is a, c, g, or t
taacaacacagtattaatgtaataggggcatgcaagaacaacaaagtccttgacaataaccgtggaacacagacatagagtgctggatccacatgggggggagtgtggaccaagtactgggcctgaaggctggcacttgcttactttaacacatggagaagtgcctctgggtggctgttgattaatagaaaaggagctggtctggtatgacccaaaaaaagcaatctccacattcacatgtgaatcctccaagcgctagaacatgcaatagctgctcacgacatccacctcgaggtctctaagtttcagagtgatcactggaagcttgacagggacgcgtaacgtgatgggaacaacagcttagagatcaacgactttctaaaagacatcggaacgcacgctggcgctacaagtgtgggttgccacccatttgaccgaagaactatgcgaggccttgaaatgctggcatttagaaaacaagacaatcgtttnatcatgggggccagacttctgcagcaggtgaaggcactgtgcgctctacccaatggacggaaattaagcaggcgcctgtaagtccagctaagcgtttgaggatctaggaga

SEQ ID NO: 300578 - DNA, 397 bp, Homo Sapiens
  misc_feature (128)..(137): n is a, c, g, or t
atctccttccctgggcggccatggggggggcccccctcttttgtggaccgggggttttcttacacccggcccgggtgccctccggcgccggggcttgtttttttgaggcccttgtgtggggaggggtnnnnnnnnnnttgagtggcacgcccttttttgttttctttgggcgggcccccgaagcgccaaatcccttttttccggggcctttcgacaagagagagtgtttccttgctcccccagcagggtctcgccagaacaaaaggggttttaattttttttcaactctttcacaagggtccgggaggggatgagtcttccccccccggggttccttctttcacatgccgggttttttgccggcccccccggcccgtctatccaacttttgcgtctt

SEQ ID NO: 300579 - DNA, 540 bp, Homo Sapiens
aacagtttattttaattgatcgcaagccatgagtggcaaggagactaaggacctttccacttgtgagagatgtggctggtgtttccccgactacaactatatgcatgggggctaacgtaggagcgcttatttttaatgctcacaaactgttaaggggagaggctgtacacgtttctttttaaggataaggcttttgccaagtgcgaaattatgagctttacccttctaggcaagggaggagttccaaatgtcggacttgacaccaagaggtacataggctggtaaatgctaaatggcaactcttttttgtgctttagcaggcttgtagaagggaaacactatcctaacgagggcgatgagcttcttgattatgccattctctctgagacgggtgcatgacgttgccacgtacgcttaggtgggtgcagggaaccaattgggttcggatgacccttccgagtacgtacgtgacaagccaaggttgttgctaatgctggagccggagtactgcttgccgggagatgcactaactctagagcg

SEQ ID NO: 300580 - DNA, 547 bp, Homo Sapiens
tgaatgctattttttgtagaagcactttcgcagtacaagttgaaagcagcgatccattatcagtgaagagtataaagcggctataacccttttaggaatcacagatgcacggaacatgctatgcaacatgcatgtataccccggctagatctcaggtaataatggccataccagtttaccaggaaggaacatcccaaaggataaaatccgaaccgaacctaattctaccctaaaacttactgcattcaaaaatatagaatgaaaagacaccagcgacacatacgtgtttgatctgtacatgctcatagaccatatgcactaggcaggacgaggagctgctagcgaaaagtacaacagaaacaatgatctcttaccatatgccttcaaataggactatgatccataccagtccaaagacgggctgacgtgctacctgggactcttggctctgctatgaccattgagcatattgtcaacatgcgcctactgtgtcacgacggttagaactcaacattcactcggggtggcctttccttgggctagagcg

SEQ ID NO: 300581 - DNA, 538 bp, Homo Sapiens
ggtacgaatgctgttctttgcaatagctgtttagggatgcactctgagagcagcgctacctattcaatgatgtttagaaagctggactacctgttatctgatccaccgaggcacggaatgttccatgcaacaggcttggatctcccggcttgatcttttgtaagaaagggcagcctagttgatctgaaatgatgatcaccaagcctaatgtaggtatcctcgcgagagctcggggaatacctgcctattgcaaaatatagttgataaccgcgggcgagtaatacgtgtttacatctggtcatgctttcagacaatacgcattacgtgtgctcaggagtttgctaggactgagagggctgaaagatacatctcttaccatgtccttcagataggtctatgcttctcagaagatcgaaaatctgactactaggcactatagctctgagagcaagactctgaccgtacacatatattgcacatgcgcatatgacgacctacggttatgcataccatagactgggtgtgcctttctttgcct

SEQ ID NO: 300582 - DNA, 103 bp, Homo Sapiens
tagattcttgccatcatttattaattgaagcacagagattagaggcaaaatgatttaaggaatttatgtcccatagacagggagtggtctatcctccaactag

SEQ ID NO: 300583 - DNA, 547 bp, Homo Sapiens
ttgttgccacagatgctgtaattcataatcacgcccttggccagcaggataccccttatccaacacccataatcttatcttgaagggtgtccttcaacccatgcaatactcgtatgagggtgatgtgaaattctacagggtgagcaggcccctgttgttgacgtgtaaggtttttgcagacattcaatactacacagttgactacacctacttgaaagaaacgccttctctagtgaacgatgaacgggccgcctgaataacctatgcgagaatcgcgggcagcataaggactctctcttccataacacatgaaccgaggagggaccacctctgatagagagttgactgtgacatagacgtgtgacatattgagcatctctctcacagctcacattggtatgcgcattcttgatgatcacacacttccgagtgagctctatatgcttctgagacacggacagagctttagtacttatgtgcagggaggagcactatgctttgttgctggtaaagcgtacttcgaagaagcctggccacttcagttgct

SEQ ID NO: 300584 - DNA, 520 bp, Homo Sapiens
caaaaaccagtggtcccttattaaatccagggttagggggaaatatttttgaaaaccatacttcccgggaaatatggaaaccggccggtaattaacttatttggattttaaaaggtgaacccacccttaaatcccgggaaaaattccccttggccaatgaataaaaaccctttttatgggtggcggaatcaagttggcaaaaattttggtaaaggattttggggttggaataaaaaggaaatatgggctaaaagtttcttggggaggccaagccaagatccagggaaatcctgcccaaaagaaagtgggaaagggtccttccttccctacctttaaaaaccaggggcgaaaaattaagggtaaatttaaaggttggcaaaaattaacaaagcgccccttttgggccgtggatttcttttgggaaattttaaaaatcactaatccagtattttcctttgaaatgccaatggatttttaacccaccttttaggtgggcccaagaaagaaggttttttctccg

SEQ ID NO: 300585 - DNA, 673 bp, Homo Sapiens
gaggctaattattcattgaagcccagctagaggacactgcgtctatacgcagagagctgaatggtcaactggccgaagtcttgcacaccacctagacgcagaaacttgagacaatgcggctacagcgtctcctctccacaatagactaagctgttattgacctaggagacatggtgaaggcccgggccacacgacttttaacagacttgctgagccaatgttgcgtcctactcagaggagtgtcagagtatctattagaggcctactctataatgcactggcagttcatggatacttatggcgtaagctggcactcttttgtgtgatgcagttagatgcaccatcgaaagacatgcggatcggaggtaagtgatcacagacttcgtcaactgagaggatgacgcctgcctgcttcataatatttaggcaaatatctaacatttgacgtttcactccttggcttacatattcttattgtgttgtaagcaaaggggcgaactttgtgggcgccctataattcaacttccacgatggaacgattctctggcaaaggcttaaaggctcccgaacgaaccaactagagttgttacacaggaaatcttttttgggatggaacaccaccacaattccagctgatttggcttagttgggtgggttcttgaagaagcacagt

SEQ ID NO: 300586 - DNA, 565 bp, Homo Sapiens
gattcgagacagaatttatgtattgaagcacagctaaaggacgctggatgcctacacaaatcaatgataggtatactgggcggtggcttcacaccaactagaaaggagaaacatgtgtagaagcgacttagatcgtaatcggacaacataatattctaatggttgagatgagatgctataaaaggtgatgtacctagcctaacgcgatttgacagagctccagaacttttgttccctcctagtcagagcaggaatgcgtatcgataacggggcagagctattatgcacaggctgttcaatgatccatataagctttccgctgatctttttgtgtgttgcgcttttgatgcacgagctaaacgagtgcgggggggttgttgaagttcactgccttctcaaaaagagagcctatatccgacctgcaaggtgatgtttggcatataactaccatggggacgttgcctcatcggcttacaattttttatattattgtagggacgggagcaaagtatttgggcccggtttgggtacaactgcacggtttgagcggatttttctggataag

SEQ ID NO: 300587 - DNA, 565 bp, Homo Sapiens
agctaggaagaaaggagtataactcctcaagaccaagctagagctgaactctgactcgccttaactgcagcattcagcttgatgtagcgagattaacatacaggcacgtggcaatgtaacgagtctgtattctttatgacccctaatgagcaaggaagctgacgaagtgcagggagtcaggagcaccttcagagcaaagacagtcagttgataacaatccactgaggagaataatgattccctacacttcccctaccccatgaaaaacagccctgccagaagatgcagatggcccgtaagatgactcactctgatgagctataacgccgctctcatttattaagctctgcactgaattaagggaaattgactacagacatggtagatactaactccagcatacagactatacacattgtcatggcacacccgacgaacccacagcaaagatggcatatgccggcgtgaagagagcaactgtcagagggagtctcggaaactgtcggatgggcgtgagtacataacaggcaaccacgatcgatgcgtattacagttgatgctcgcg

SEQ ID NO: 300588 - DNA, 301 bp, Homo Sapiens
taaaatagtttaataccagaaattcaatcaatataattagctaataatatatttgcatcagccaactaatgctacaatgttgtataacaggcaattataaaatctcagcagcatgcaccagaaagcatttgttgagtgtcagtgtgttggctggagtttcattgacctaggctggcctcatctggagaggctctgctccacatggctctctcatcttctttggagcagaagaatgtcgagcccagatttggagctagcaaagccatattcttctcatgatgatggcagaggtgtgagagac

SEQ ID NO: 300589 - DNA, 774 bp, Homo Sapiens
gtgtctctttggaaaagtatctccgcgtaggaaacaacgtttttaattacgggcctaacaggaaagcagtagggcgttgcgtgactcttgaagggtgctcaccaccccctcaagccagaagggatttagtgttacttctacagagcccgccagggcctcatctttgggcttaatgagggggagacgtgagcataattcaaacagtcgcaagctttgggcaggtaaagaagtcaacaacaccggggtcgaaacgtcgagcacttttgccattggaaccgctcacaagtacttgcacggttatgtataacaataattcaacgcgccccaacttttctctaaattgggagaattaagcgaacatgtggcccgacactgtacttggcatttgttgtgggggtaataaccaacaatacaactttgtcaacggggacatctgtggcatgcaaccaggaacttattcctcttacggtgaggaatgcgcggctgaacatgaattcctctcgtcaccacgataaaggagtcacggtgatctaccgctccgcttgttatgagggtcatgtctacttgttatgtatatatggcaacggaccggccctcaagtatcgaactggaagtagctcgacaatacaagcgaattaatcggactttcgcccgaccgcgtcggagaagggaaatacttcgtgatggtggcctaacctaaaaggagctgggcagacatttcggagccaactgacttatggcttagtcggccccacggcggtaagcaacattcct

SEQ ID NO: 300590 - DNA, 465 bp, Homo Sapiens
caaataactttattcttaaatttaacaagctattattccatgtgcttcgcgatcagtggaatcaaaagggcgtggttacgcgcactggactcgtgcgagtcactagggaggtcacacatcgggtgtacgcaactttctgtgaattgttcacgaattatgactactacttactcacatgggtcaatgtgggacactgagacgataatttctggaacttccctaaaaatgggcaatttatccataggagttctatgcccatgctcgctagatagttattcaacggatgtttatctaggtgcgacatctattagatcaccatgtttccgagcttacacgttctcacccttcaagctgttaaggatcggatcctcagccccatctccagttgtttgagcattatacggggagtggtgtacagcgcgaactaatcttccatcctgcactttctaagaaataggagttctg

SEQ ID NO: 300591 - DNA, 467 bp, Homo Sapiens
tttaggcatattttttttataacttgagtaaattgctttttttattgtgcactgtgtaaaccaaaggcactaaaaccatgaatttgactagtgtgatacaggtattccccctcaaaaggcgacaagtgagcatacagccgcctgttatggcactaactcatagatagactcgagaaggtgagagctgttacatagccacagtataactccacatgtgcattgaactggcaaactgaccgttaactcttcaaagaaaaagtgctcataaataacgtgttaccccaaaattgttgacaaataccttagaagattagctgaggcgattgaaagcaccacacattaaacagaatgcatgtggtaaaatggattcaactctacaggttcccattcaggaaatactttgttaagcatggcctgtctgtaaatcgtgctgaatcacggactctttagcaaaaaacttctcggta

SEQ ID NO: 300592 - DNA, 566 bp, Homo Sapiens
  misc_feature (42)..(52): n is a, c, g, or t
agactccaggatagaaaatagaaattattaagctctaagttnnnnnnnnnnnccaataagcacaacacaaagaaatatctgcaatttagcatatacaaacaagctgacttatacaacaaaaaaccttaaagctacaataataataaagtaatccatcctactccaggaatatgataaaatatcaaccttaaaaaaactttaaaaactaactttactagttaatggtaattagcaaaataatgaaacagtgaatcttcaaaatctgaattatttcaaggtaaaaaacatttttaatctttatcgggaaaaactggtgacagtgaccaataaaatgagcataaagtataagcaacgctttcacaccaacaaaaaaattcaagaaagaatttcctgaggcagatgatgatttaaaaagtaatctgaaggaaattatccttcaatgcctttcaacagattgaactactgtgtcttataggaagtaagtaatgcagtggtttggtgtttgactaaaatataagtgaaaactttcttttatatttatggcaacagaattttactttctaatt

SEQ ID NO: 300593 - DNA, 504 bp, Homo Sapiens
gactcggtccagagatgcatatatccttactgtgtggcaaatataaaaatgcttgatctcctcttaccaaaaacacagacttaaatctatacctgtgaataaaagcatagaacccatgtaatagctacagtgtcatgttttgtattcagaaaaggtttataacagtgtttctcgggacccaggaaagaagagaaagctatgttattagaagtcactatgtacactattatctccagctgaatgtaaactgtgctcttgatgggaatagctaaagaaacatcaaatttaaagaaggagtcattagataatttttccatttcaaacagtgctttctgtgcttgctggttttgaccttcttctattccttcagaggccatctccctctctctctggaagagactgtaaataactaattattttagaacaagaaagaggcttgattcccttagctaatgtaatatgcatacctagtctgtatgaacgctagaaatcatttctttcaaa

SEQ ID NO: 300594 - DNA, 515 bp, Homo Sapiens
tagagatggtgcatttaaccaagatctgactgtgcacatttaactaccatcaatgaagaggagcaagaatgcagcgtggttgctgaccacataatagtttccttcttgacactgtataacacgtaggaatactgttcacattccaaactacctatgacaatgtgatgtcacacaataaaaaggtgagaggaatctcatgagagactatcctgcatgtagggatactagtgaactcatagccagacggcattttatagggcttgggacaagagatctatactctaaactaacgcattggtgttcaggcttgccatcagaagcttatgctgaccatggcaaaacgacctatccactgtttatcatagggtctattgatatctgtgctggctctgtgcacaacgccaaacattgctacaatggttattgtccgcaagagtcctaggtatatcaagtttatcatcaccagactgtaccttactgatgagtgcctggctaacagctaccttgaaatggtc

SEQ ID NO: 300595 - DNA, 514 bp, Homo Sapiens
tcaaatttttaaaagtatcttaagggggagctgttttttaaaatatccaatttatgcctgcataaacaacatagacatggaacctcccaaagagagaatatatgacgcttcttggaattttacaccagaggctactgcttagcctacataatagtttggaaaacaaggttatgaaataccgaaaccttttcaggatcttgaaaggctccatacacttttagagaggatcaccatagctattgctgagggaaacgtgccggaacacgacgcctgtactatggaggcttagggcacaggagaatcaccgtgaaaaccaacggaggctcttacaaaacacgggcgggaatcatgaacttgtgcgtcattgaacgtgtgacgtatccgctagcttttcagacggagaggctattagattctgatgtaaacctcagagcaggactgtctctgtgtccttttatgacaataaccagagacaaaacgctcaaaatggccaccacgaatcaactgctaaacg

SEQ ID NO: 300596 - DNA, 552 bp, Homo Sapiens
atattctttgcattttttcttacttgaaggacagagaaatgtggcttaacgattaaagaaagttatggtagttagacaggattgctggctctacaccaacggataagaaaaacctatccctttccgtttgaggctgtataatcttattcttattcccctggtacgatgagatgcttccaaacgggatggtataagcctaatgcagattgacttgcattaccatggttaataccctactaggcatagatgcgcctctttatcagtgagcacgtgcatacttctcatcaaaagctgcgaaatcattcataagcatctttcaggagctactttagttgccttgggctagaagttcacgagctcaactagcgcagaatgccacgagatttgtctctccttctcaaaaagcgtgtgtatatctgcatggtatgtgcccgtacagaattcatcactttagaaacttatgtgtcatcgacagacatagcttattagcatggacgcctgctcaccaaggacgcagtgcaatatattgcggctattgcacttactgggtga

SEQ ID NO: 300597 - DNA, 463 bp, Homo Sapiens
agaggggtaaccccaaggagaccatgcagactgggacgtgctcatgtgaactactgatgggaagggcctccagatgacctagtgcttcttaagatgcctggttcctagcagggccctcagcaaggttgtgaaagatgttccaggggtgacctggacagctgcacttcatacacgggagtcatgacctggacagttcaatttcctgtcagtccagcagagtaggggctccgcgtttaaattgaattgccatgttctaaagatcctaaggagccatccggtgcaagatcacctttagtttgtttaattgagtctctttattatttattaaaactaagcctaagcaaagcttgcacactccaggaaatctgctttctcagggttgaattcaccatgggtttactttgccggccatccttgtcatatttttcccacaccagccctttctgggttccatgttttccca

SEQ ID NO: 300598 - DNA, 594 bp, Homo Sapiens
  misc_feature (548)..(548): n is a, c, g, or t
  misc_feature (584)..(584): n is a, c, g, or t
cactcgtatggcacaatgagtgaggtgaaaagcttcttgttatgttaacataagcaacatactcgttttcgagctgttaacatgacggccatggctctttaactgatctgaatcttagctggaaccatggccaaacggaaataacttacatcagactgtgcagacaaagccccattaaataggtgatgaattttggatcgcacttttcagcgtatctagcctacgcgtgtcaacgaactaggtgtcgctggacccctcctattgagtgtccgttgtatgccattctcctaataactcattacgtgctgcgaaacacccgggtgaagcaaggggcccgaacaatgtcattatcataaccattacgatgtcgatgctcctagagtaaaagacacactggttgctgagtccaatgacatgcacgagcatacactaagatattcaccaaccacatctttgcttgtacacgcaattatcctcaaactctgtaatcgagattgattccattacatgaactgctatgccatttatggatggagaagaacttgtgngctcaggatacatactaataacatcagcgccactcnattgctatct

SEQ ID NO: 300599 - DNA, 129 bp, Homo Sapiens
tatggccccctatggcgcacattttgtacgaacacaacaattttaagcctctgtaatttttggccctgctctaacaaccggcgtaaatttaataaggttcggttttgccagtccccaaaagagtttttt

SEQ ID NO: 300600 - DNA, 565 bp, Homo Sapiens
tatacttgaagatatgttttttgtggttaaagttttaaattgttacaggaacatttgttttccaaagagatcaaagttgggctttatgcacacatcttaccgcagttgcagtttataattatttatcaaatgtctgacaaggctaatgagctttgtttacattttccagccctcttgctagaattacagtttattttttccacttttgaaggctacaaatatgcataaaatcacaactggcagaattttctcaaatagggggagtttgtcatacagcaaatagcttcacaaaacacctgaagcttaagtttgaagtattaaaattcaaaaatctcctgtaattatagtttgaattttcaaagaagcataagtttttagatctgggaggttgttatagagattatctcatccaatccctatttattttgtcaaaagacaatattgcagaaaaaattccactggggatttactcctaatagagcattgacttacaaaccggaggtactaatgaaggggggcctctcactatatagtcatatagatggtatataccccaatgtctgcc

SEQ ID NO: 300601 - DNA, 512 bp, Homo Sapiens
agatatataagggaaactgattatctattaaaaactgactacttttcagtttagactgcatagttcattaaaacacagaggatgcctctgagtaactggtattgactcttgaagtctactacgagaagaagtctggactcggctgataaactgagaaaccaggtctggagtttcccagcactatgctccaattttcgaggaccgcgcttctatttgccagaactgtgaactcctcttttccaggactgagtgctgccatttcccagtactgtgtgctcgcataggtcacgtctgtatgcccattttccagtactgggctcctatcactcacggcgggctatcatttcttagtgctgtactgccacttctgagtactgtgctagcactttcgaggactgggctgccatgaaccaatactgagctcccattatgcagagctgtgagccctcatttgccagtactgagctcccatatgctagtactgtgctcccaattgcatcgtgcagcatttc

SEQ ID NO: 300602 - DNA, 586 bp, Homo Sapiens
  misc_feature (472)..(472): n is a, c, g, or t
  misc_feature (545)..(545): n is a, c, g, or t
gtctttgcattttttattaagcgaaggacaaagaaatgtggcgatgcgcgtaaagaagtcgaggcggaatagactgggtgatggccttacacggacgaaaacgagaaccagatgaatatgctggtgattttcattggccttatataattctcatggtaggctgggaagcttttaattgtgaagttataagcctcatgccttttgacttgccgtaacaagttttttaccctactaggcatagctggcatgtttatagggagccgtgcagaacttatctacattagttgggagaactgaggtaacagctctcaggagctattgtgttgccttgggcctgagagtcacgagctcaacacgtgcagggggaggcatgaattcgctcttcttctcagagagggggcatgtatacgcatggtatgtgaatgttttagcattcaacactctgtgaacgtatgtatcatggcatttcatntctgtttagcatgccggctgtagaccatcgaatactgtggcatatttagcgaagtggttcacttactgccgtntgtgtcatgcggacattcataagctgagatggggaacaggt

SEQ ID NO: 300603 - DNA, 441 bp, Homo Sapiens
ggactatgacagcaaggcaaaggaaacatctaactgcttaggggagttacctacggttttaaaaaggaggtaataaggagaagagaggagagcatgcacaaaatatgagcaaatagaacccatcaaacttgagaaactgaaagtagttccattgaatccacaagaatggtgggaaacaaaattcgacatgtaggataggatcaaatcataaaaaatcttaacacagcagaactatcccaacatttcagtggctctcaaaggaaggccctgaaaagctggtggctgagcaaagcttaaggagacaactaatagaggagaaagatatggttctgctaacagcacttcagaatatttgaagctttattccaagtagctaattaaccactgccaaaataaagtaactgggacaatctttccttacttttataactagcccttatt

SEQ ID NO: 300604 - DNA, 110 bp, Homo Sapiens
  misc_feature (94)..(94): n is a, c, g, or t
gtacccttagtgagagacaagtagactgacttgtaaagagcacaagatactttctttggagaatagaatactttgatcttttttggaacatggntaattcaaaagacttt

SEQ ID NO: 300605 - DNA, 213 bp, Homo Sapiens
ctgaacatatttcaaaagcttttattgggggagtttggggaggtggactttggggccaaattcttgaaccccgttgaacccattgtttttagaggggcccccaccgggggggaactccagtttttgttcctttaagggggggtaaatttgaggttgggggaaaaaaggggaaaagtggtttcctgggaaaaattgttatcggttaaaaattcc

SEQ ID NO: 300606 - DNA, 487 bp, Homo Sapiens
  misc_feature (91)..(92): n is a, c, g, or t
tggagcgattttttttcaggttctcatcacatatggggaaagggtcattcccagagcaatgcctaatttagtaatttgcccatgttggggnnctgcaccgccagcccactagctaagcacagtccctcgacaaatctgctctgaaatctcaagtcctactgacgtcagaggcagctgatgtcactcagagaacagcagtcttgtcttggaagcctggatgtcagtgctggttctgcctttgtggcctgtgtgatttctgaccaactaaattccagttagctaatgttcagctttctatgaacaggtgtctgaaaatgaaacttgccctgctgtatcctataaactgtctgcactctgaggaagggtctgggctctagattctgattttatacccagtcccactggacaggagggactggggctgtttctgttttataccaggcctggtgacagaaagactgggaggggttggggggcgaaatggatt

SEQ ID NO: 300607 - DNA, 330 bp, Homo Sapiens
gtaaatgttttattaaaacagaatgtggtacactttctttcatctgacaataatagctaagtaaagaatgtggtttcctatgttgcctaggctgctggggaactccaagtactccacagctcaatcacagcacttattcaatcgtgggtgttggcattttatgatgacttataagttattataattaagagtggaatgattacattatgtgcgtacttgcttccatgttatatttctgctttattaatgctcatcacactttaatccctatgaggtgaggatctttgtagatctgcctgttaatgtggttattatttctccctccccatt

SEQ ID NO: 300608 - DNA, 232 bp, Homo Sapiens
  misc_feature (43)..(43): n is a, c, g, or t
  misc_feature (45)..(45): n is a, c, g, or t
  misc_feature (52)..(52): n is a, c, g, or t
tgagacggagtctcgctctgtcgcccatgctgaagtgcaaagncncgaactnagctcactgcaagctctcaatgcacggggaacgccaatatcctgctcaagcctggaaagaaattggaagtagcagtgtaagcctggagagcccaaaacatatagaggccaatgtgggaggatcaaacgaggaccatgggtgctaaaaccaaccagggcaacatgggcgcacctaatgcct

SEQ ID NO: 300609 - DNA, 445 bp, Homo Sapiens
cgggcaaatattaaactttaagttaaaagggacatgtgcccaatgcgcgggttaattccatattggtacaagaaaaaaactggggcgttgggcccactaacttcaaatctagccgtggggaattttcccactggtatttctgcccggtcccccacccccaaaaaagccccagagggggaagatgccccttccgggggcatgggttccaaaggtgcacaccccccctataattgaaaaaatgcggcggatgcgttcttgtgtcttgggaatgttaaatgtgaaaggagaaggccaggtggaaaatgggccctccaagggcttgaaattttgatttttttaagggggacaaaaatatcaagggggttaagtgcgcccatttttttaattaggcttttatttttggaaattgggggggttccaagggtttgtaatggaaaattttctg

SEQ ID NO: 300610 - DNA, 590 bp, Homo Sapiens
  misc_feature (486)..(486): n is a, c, g, or t
catttaagaaatgccatttccttgaaagaaaaaccttttcggctaaaatttctaaaaattactttggctacctggctaattttatgctgtgccattaattaatgaagacccttcccttggggagcattccaccttttttttgccagacttgttggaatcctaggtgttacccatttagtttaggacgctcttcttcattggccgcaattaattaaattgatggcttttcccttgcttgactggcgaaagggcattttatcccccctggagatgagcctattttcggcctgtgaacccccacgcctcaccatgggtacctagaacccagtcaccctgattaggaatttttaagaacgagttcttaacacgcgaaggacagatgattaacactgatgctaggcattcattggttagccacacgttttctgagaattccctcgcccggaacaactgcgcgggcactgatttatttttgtcccgcagtcngacggaaatatcctggcctcggacaggctttttagggtgaaaacctatggtgcacggaagtggtcatacgttgcctttcttgaaggcaaactggggggccaaat

SEQ ID NO: 300611 - DNA, 616 bp, Homo Sapiens
  misc_feature (193)..(201): n is a, c, g, or t
tttttgttccaccggagaatattttaggcattccaagccggacccttgtggaggggaatttggccccccgaattgttctcaacaagttggcccgggggtggaaaaccacggccccatgaagaatccctctagggggacccaaaaatttaggggactttggggcccaccccaaacaaattctttaaaatttttnnnnnnnnncccaaactatagggggtaaaaaagggctccccaggaaaaactaacacacgtccccgtttaaaacccgccggaccttgggcccgcattctggagaaatcaaaaaaggtgtaaaaagagtttcacgcaaccccctattggggggggcccactggtctccctcaggggtgaaaggggtcctctttggccgccaatttaaaagctctgcgggccaaatctgtgggccaagcaccagcccaaacgtgtacgtctggtcaataatagaaacaaaaatcctcccgacccgcccaaaaatctccccgggaaaagaaaacccttgggagggtggaatatgttctctcgcttggatcccaaaccccgagggcccgtgttctcctattcacaatccccatgccaccacactttggcaccgtactcc

SEQ ID NO: 300612 - DNA, 256 bp, Homo Sapiens
catttgcatatatttggggttaaacaaacactttttaatataatttatgtattttgttcaaactataatttattaagccatattttagatatttaatactctgaatccatgttgtcagttttccaaaagagtccctatttgtaccacgtatccatccttttcctatgattcgtaatgctgttcttgctgtgctcacaccggcaataaatactaatcaagctaaattcaactgcattttatataggttttctttctt

SEQ ID NO: 300613 - DNA, 489 bp, Homo Sapiens
  misc_feature (89)..(89): n is a, c, g, or t
  misc_feature (238)..(246): n is a, c, g, or t
ccactagttacttatagaaaaaaattccttttttttcaccgaaaatttagtttttctacacccccaagggagcccaacccgagggcggncttggggggccagacatttaaaacccaccccgtgggtgaaccaagccgcccggcctttttgccacctcttctggattcctaaaacttataactttaccggcttttaaaaaaccgacgaatgccttatgttttttacaaacccaaacagnnnnnnnnnaatagggcttctaccccaaagaaaataaacgtgaggctctcggtcttaacagcgaaactttgaaattatttcttgtataaaccacagcgagatatcaccaacccttgggaagcaattaaaactaatatttcaataacgcaatgaagtgccagctccatttacagatggggctcgtgttttagccattttcagaaccaggggttatggcctttttctttgaattctttcaggagaacactcttt

SEQ ID NO: 300614 - DNA, 471 bp, Homo Sapiens
  misc_feature (440)..(440): n is a, c, g, or t
agagatatgatcattcctgcgccgaggctacagtgcggaggatcatgactagctgactgcaggctcatattgctacgtatcaagcgatactccagcgtaagaatccggcgcaactataaccataggagaacgccaccatgacagtcataactaacaacagttccgcaaagaggggatcgagtgatacagcccagcctgaggtggaactttagatctccgacaacctttccatcatggcttgccaaagcattgcgactacagacatggactatcttcatatgtcgacgagaggccataaacagaaccaatcatactcaaggcccttggctgctgggacacaatcagctattaataacatccacgaaaaagctcacacttctgagtcaggaaaacctgtgctggagtcctggctacactggtcaccatctgtagaagcctgngctagatgctgcacatccctgtgacccctgt

SEQ ID NO: 300615 - DNA, 508 bp, Homo Sapiens
  misc_feature (82)..(162): n is a, c, g, or t
  misc_feature (364)..(364): n is a, c, g, or t
tggcgtattgttttgttaacgaatctggaatgcagaggcaccatgtaggtttagtggaacctgtgcctacggggactgagcnnnnnnnnnnnnnnnnnnnnnnnnnnnnnnnnnnnnnnnnnnnnnnnnnnnnnnnnnnnnnnnnnnnnnnnnnnnnnnnnnagcgacagcaaatgagagtgttaaccacgatagccttgcattacagacctcatgacacatctgacttgttctacctaggctatgataatacaggtgtgagtcagaccacccagccaatccttatgtttagaatgttaaccttatatgtaaaacgtacatttggcaatgtgtatctaagacagtggctacattaaactgctgngtaggaggattatggaagagtgtgacccattactgagatgccgagcatacaaacggctgtctccgacttttctgtccgaatgtaacactcaatgccaccatcgctattttggagagagaaaacacacattctgcctttatgcta

SEQ ID NO: 300616 - DNA, 619 bp, Homo Sapiens
caactattatatatatgagtagtttatgtcttcataaagtcagcagaaactcgtattgaaaaaaatatatatccccaagtgaattactttataaatgccacatgacaagggagctaacctatgacctacattgtccagcataccggacaaatgatacatggagaggctcttatctatttatatacctataccaacatattgcacttggtccatcaagtgcttgcataatcattaacggtacaagttaatatggtaaaccccatgggaaaataggacagtccaaccgatctcctctggattggaaacgaatctactgaaggttggaaagggtcctcgcactgtgggacaaatagaggcccattccgagggggaagcatacacacactacttctgtggcagaagttgacttcgtggggcccgctccccccgggagggaacctttcccagactaggaccttccaagtatagacaaagcggttgcacatacccagttcgcgaccaccacttttttccagtcactctggaatttcctttctagcatactggaccacccaatggtgacccgccgaatgttcccgttttcgtatgcctaatgcctgaatcccgcaggacccacgat

SEQ ID NO: 300617 - DNA, 691 bp, Homo Sapiens
  misc_feature (430)..(430): n is a, c, g, or t
  misc_feature (668)..(668): n is a, c, g, or t
gcagaaaagtcatccacgcccgtggcgataatcgccagcatactgacaataaacaccaatgcataggcggagaaaaatccccaaacggcttcgaggatacgttccggcagtgcgcgattccccagcttaatgctatagacggcgttcggatgcaccagtcgtttcagctcacggttcccctgcttaaacagcagcaggatgcggatcaccttcaggccaccgcccgttgacccggcgcaaccgccgataaaggctgaacataaaagcagtaccggcaaaaagagcggccagcgggcaatgctgtcagttgtaaacccggcggttgtcgccatcgacaccacctggaaaaacgcctggttaattgtcatcagcgccgaactgtagacattatgaaaccacagtacgagggtacaaataaccaccagcgtanactgtacgccgataaacatgcgaaattccggatcgcgccaataaaccttcagactacgcccacttaacagtgaaaagtgcagaccgtagttacagccggagatcagcaggaagatagcaatgatagtggtaataagtcggctatcgaaataaccgatacttgcatcatgtgtcgagaagcccgcaataacgatagtcgcaaagctttggccgttgggcatcaaagcattcatttcggnaaaaacacaacggcagggcacaa

SEQ ID NO: 300618 - DNA, 459 bp, Homo Sapiens
gcaacatgactgactaacactagacacagattcaccccatggaatagtgcatatggggataccaggtaccttgcgacatgttattctcttaggaatgatgcatggggactgctaacatattactggtgaacacttatcacttagtccgctgaagtttgcgacggtgcttaggtatggttttataccatgagcttatatatacatcggtgcgggcatgtggatccattagtgctatacccagtcttcgatcgcatctgagcgcgagccaagattacgaaagaacacccatttatcataaaggggcggatgttctaagacgtggcataactggaccttgtgatctgtaaaagagatgacacttgctggacggttactaaactctatgtcaataaggcacgaagaatgtttttccagactgtggctcaagaaagcacttctttgtgcgctctgccatgtacg

SEQ ID NO: 300619 - DNA, 108 bp, Homo Sapiens
aatggtttattttacaagttaacttttcccctgcatcaatttaaacttggccggggcttaaacactttagggcaacccacccggaacaatagcaagatggttttctag

SEQ ID NO: 300620 - DNA, 579 bp, Homo Sapiens
gttattggatgcacatagacaaacggctgctcgctaaccgaaattacggatttgtgcacagggtgtgggcattacacctaccacaagggttgactgctgatgcccatgcctgttatacagttcatgggtatcattcttatgacaacctgaaatggtctgaaacgctatgatgtaaccctgtggcagtttgacgagcggccaccagttactacacctgttcgtgaaagcatttcactgtattgttcacctagcttaacttatgtcctaaggcttgcaactgagacatagcggtcatctacggcttttgtagcgattcgtgcgagtgtgtaacaagctgggctggagaaattggcaaggtgaatggtttgtagatgttacaacgcgcggatatctttttatatgaggtaactgtgcaatgttgacaccactagggaactgttgtattaatgcatgccatagcgtagacgcttgggcggctgttcatcatggatcttgagcagcatcttgtgagtctgaacatgatggcgtcatggtaaggacacacctatgggggcaagacacggcttgaggccttcagcc

SEQ ID NO: 300621 - DNA, 545 bp, Homo Sapiens
  misc_feature (66)..(76): n is a, c, g, or t
  misc_feature (210)..(218): n is a, c, g, or t
acccttttttaatgttattcagggagggggcctggttttgttgggagggtttgaggagcgagaggnnnnnnnnnnngttggggggcacaaaaaagccctttattaggttggacctagaatgcggggcgggcccccataagactaaagccccgttgtacttgaccccgtcggggacagacccgggcattttgcccttttacagggggaaannnnnnnnnaaggcctgggtctttcgggcacccctcaatttatttcacagatttggtttttaaaccccggcgcctagtgtgtgaccctttaaaggacacccctattgctgcacaccttagtttttttcaaatgttctaagcccctcttcataccatgggttcccccccaggacagtaacgggaaagggcctccccccaacctctttgaagggtttttcttgggctttggagatgccaccccggaagggttgttttttcaagtggggggggcccccctcaggggttttgaagaatattttttgggctttggccaaatatttcatccgcggggttcac

SEQ ID NO: 300622 - DNA, 546 bp, Homo Sapiens
gcccttcttgaaattggtgtgaaacttggtgtctgagatccttaagggaacattggccacccttactgctgtcggaagggcgttgttccaggttgatgaagatccacccaccttgtgggtaatggctagtcatcccggagaaagagcttgcgatccaactgcatactggaatggcactttaaacagaactcacttgacacatgcaacaacgtctatggggaaaaaagtactgaacgcggagctagtttatggttcactacaaccagtatagacgcagcagaagctgggatttagtctaaatttattggagttggatatacgtagaactctagtcctatgtgtcagtttagggggtcatcctgcgaacttggcagcctacagacctatagtgccagatacagagcaatgtctttcatagagttgaagaggtggatacgttctgtacaagagttcgtgtgctgctcgacacaaaagccactgccctagatctgaaaatatggaccaaacaaaggcgctaaaccctaacccaagagccctcagaccagt

SEQ ID NO: 300623 - DNA, 424 bp, Homo Sapiens
  misc_feature (97)..(187): n is a, c, g, or t
  misc_feature (194)..(268): n is a, c, g, or t
  misc_feature (337)..(345): n is a, c, g, or t
gtcagcccccttttttctccaccggtgcctaaaggggaagagggcaccctaccgtcgggggtttttccttcccctccccccaagcttttctctctcnnnnnnnnnnnnnnnnnnnnnnnnnnnnnnnnnnnnnnnnnnnnnnnnnnnnnnnnnnnnnnnnnnnnnnnnnnnnnnnnnnnnnnnnnnnttagatnnnnnnnnnnnnnnnnnnnnnnnnnnnnnnnnnnnnnnnnnnnnnnnnnnnnnnnnnnnnnnnnnnnnnnnnnnnaggtttaagacccattatcccccagggttttttggggccggttggtttattggcacctttaaacatttnnnnnnnnnattggaaggggggggttcgcccaccgggtacagttttttccccggttttgtgtccggcaagggaaaaaacaacacaaag

SEQ ID NO: 300624 - DNA, 483 bp, Homo Sapiens
ctgtgtccaggcttgattgcagtgacagaacctacgttcactgaggcgcttaagactaccaagcataagcgatagcacatggctcagcctactgagaagatgaagatacaagcgcatgccagacacacccatttaaaaatcgtgataagggctgaggcacgtgtaaaccatgctggccaggatgagcgagagctcctgaccatgagatccgtccacgtaggtcgttcaatgacttgtaatacacgtgagaaccagcactaccgaacgcaccctatacatacatgtgcacatggcatggtgaatctcatgctgggagtggcgagctctgcaatgactagcaccacaacagggccaatctttaagcggagaataactctaaatttatgcgcgacggaactccaaatccaatcaattgagaccaccagcagtgatgtattcgaattatccagccactgcggcatcactccatgtagacagagtctt

SEQ ID NO: 300625 - DNA, 425 bp, Homo Sapiens
cctgaagaatcgaggtttgatggaatgttacgccacaaaagggggagctccacagcaagatacttggggaagaacatgcttggggcgggggctggccaaacagaattatacgtgacacgatagagactatggaggacaggcgaaaagaaagatagggaggacaaaaggtagtgcccgaccgaagggcctctactggacctcacggtgaaggacaggcctggcggcccgggcttggtgagagtccgaaacggggttgagaacagccaaccagtatccaagggagagatgatggggggaatagcatcgttagtttagtaaggatcccaatacccataaaataacgcgcatataaaacgaggagcggggtcatctctactgcttgtcctaaggcttcggccccgttgcatttaccaccatgggccggt

SEQ ID NO: 300626 - DNA, 621 bp, Homo Sapiens
  misc_feature (583)..(583): n is a, c, g, or t
ggagaaaaaaaccgcgatgcacaatataagaatttcaaagcttttgatttacatacattcttctagacacatattggggaagattctcgaacacctggacaatcccttgcgggggagcttcatactcacgtgcccaggggggctaatcaccaactgaaggaatttatggcttgggacacagatcatgacaactattgatggaactgcgcagaataagaacactcttggtgcggggttaacaagagacactctgcagacctgaatggtgcatactacagtggcccctacacggataaaacagacaactggcatgtctggtacacctggcatgggtggagcgaatgcctgaacatctgggttattaaaacgagggccgaaagacatcatccagactgaaattcaatagatgctgttaggcattccgcctcttgatatcagcgcttgaataaagtgaattggggaatgactctttctgaacatatccatgcgcacgcgtgtttactgttgtgagtagtggctttgaattctaataattgccctgttacttaagcgctttcagacagggatgtgcatatttaccaantcttgtttcttgtgtataaacataaaagggagactcat

SEQ ID NO: 300627 - DNA, 273 bp, Homo Sapiens
gtctacgacaacagcaaatactaagcctggatacaaagaaagcgtgaacaacacgttgcgccgaggtacctgggctacggtatcaaccaggaaaacagacctcattaactttggagcgcagtagggggccagagcgacaaagcaagggttagatgcggtaccttgtggaaccggtcagatgctgccaccttcgggaataggcgacgtgctcaatgcttatggatgaagaggttatgaaaaaggaatgaaaaaattaaagggatgtttcttaaa

SEQ ID NO: 300628 - DNA, 619 bp, Homo Sapiens
ttccgccccagggaatatcttcccccgattctccttttttgaatttcaaagacagggacataaaccatttttaccacttggcccctgagtggagttcccgaacagtctctgattgccttgtgggttaaatccatcctcacgatctttgttaccctcttgacccacagattgaattcacggccgtgggcacagaacatgccaactatgctaggaaccgcccaaaaaaagattaccctggctgccgggctaacatggggcacataggaaaccccaaccgtgggttctacaagggccccttcaaggcttaaacaaaccccgtgaacgtgttgcccacattggcttgctgggtggattctttgtaatctatagctattagagaccgccccactgatttgggtcccacgtacacccactgcctgtgtggccgttcagtctctgaaatcctccctgattaacagagttgagaatgctgaattcccacgattccatcccacccatataaccgtgttcgaagtgggtcccatccaagactgccttttcaactaaaggctttaaacccccgccttcccttttacccaagggcgtacttgcgctaaaaaacatgcataacccgcccccc

SEQ ID NO: 300629 - DNA, 217 bp, Homo Sapiens
ggcccggggagaaaataagcgttttgcacaatttaagaatttcagagtgtgtgttgtaaagaatttctcccaggtggaaaattggggaaattctgggacagctggagaatcccttggggggaattttcatcctgaggggccgggggggctttttccccaagaaagggatttaagaccgggggcccagatctttgccacttttgaagggaccgcgccc

SEQ ID NO: 300630 - DNA, 271 bp, Homo Sapiens
ccttggcctattactgtccatcatcatactagcgacaatgcccatgctccatatatccaaacagcaaagcataataattcgcccactaagccaatcactgtattgactgctagtcgaatacactcctcattctaatcctgaagcggaggacaaccagtaagctaccctgttagcatgattggacacgtagcatccgtactatgctctacaacaatgctaatactaataccaactatcttactaagtggaaacaaaatactcaaatgggcct

SEQ ID NO: 300631 - DNA, 575 bp, Homo Sapiens
  misc_feature (70)..(412): n is a, c, g, or t
tgattttgctagcgacacctcaaaaagaaaggaggagtatgacagatgagactgtattgttttaaagaannnnnnnnnnnnnnnnnnnnnnnnnnnnnnnnnnnnnnnnnnnnnnnnnnnnnnnnnnnnnnnnnnnnnnnnnnnnnnnnnnnnnnnnnnnnnnnnnnnnnnnnnnnnnnnnnnnnnnnnnnnnnnnnnnnnnnnnnnnnnnnnnnnnnnnnnnnnnnnnnnnnnnnnnnnnnnnnnnnnnnnnnnnnnnnnnnnnnnnnnnnnnnnnnnnnnnnnnnnnnnnnnnnnnnnnnnnnnnnnnnnnnnnnnnnnnnnnnnnnnnnnnnnnnnnnnnnnnnnnnnnnnnnnnnnnnnnnnnnnnnnnnnnnnnnnnnnnnnnnnnnnnnnnnnnnnnnnnnnnnnntctatattataaagacattaaaagtaggatattcctgtcagaaaagtatgcttgaaaggggaatccaagagtgtgggtggacatcttttgctagcaattcgagtatcacatggaggcggaaaccacgcatagagatgggatattctgggaaagattttggaga

SEQ ID NO: 300632 - DNA, 648 bp, Homo Sapiens
  misc_feature (340)..(360): n is a, c, g, or t
tcggcccggggcgagggttattgggccccattgtgagaatttcaaagttcgagggggttataatccctacgattatgagcccgcgtaagcttcttaaaccgttggtgtatctactgctgagctatttcaactttatgacgctgcttggcattttaacaaccgtaaggaaacatgacggttgaacatctaatgccaccccttttcggccctgcccttgaagcggtaccacgggtcggctgcctaacaggcgtttgtttctaagcctcgtaggggaatactacagagggacttgcaactatttatcttatagtggggaagtctggttcaagctgtttggttnnnnnnnnnnnnnnnnnnnnnccggtacccaaattaggctcataggagtcgtattacacgtgactggaccgctgttgacgacgttgtggcttgtgaaatcctgggtgttcccagtggaatcgccttgcgtatattccacatttggcagcgggttaatattgaagaggccgcaccgattgccatcctacagttgcgcttgtgattggggagtggtaaatgagggcgttatatttgttaaaaatgcggtaaattttgttaaaacactagtttttacccaaatggccgaatgggaaaaccttgggaaaaaaa

SEQ ID NO: 300633 - DNA, 657 bp, Homo Sapiens
  misc_feature (147)..(147): n is a, c, g, or t
ttcggccgagcgagaacacccctggacccacatatgagagtctgaaagctcgagatttttataacgtgtacgactatggtcatgaggcagatggtgaaactctaagtgaatcacctgcgggccgacttcaccctgacggcagaggcncatatgcaccatcgaacgatgacacgacggttgcacatgccatgacaactctgttgggtactgcgcggaacgagataccacggtggccggcctaacaggggtcactccctagtcctccaaggcgagctctacagtggaactcgcacggctcaatcttatagcgccagtgtctgagccacctttgttgctcggggtgctcttttgaactccccggtaccgaaatcacgccaaaaagagtcatatcacacgtcactggcctgctgttgataccctttcgactctgtaaatcctggctgtacccaagcggaatggacaattcgtatatccaacatttgcccgctcgcctaatatccctctggccgtaccggttttcattcttcacacttgccctttcttaattgaggggctgtcaaatgccggcgcgttgccttttttaacaaaaccgtggtaactgtggttaaaaaaactattttttaacccaattggcgcgcttttggtttattccttgtg

SEQ ID NO: 300634 - DNA, 534 bp, Homo Sapiens
ttgtgtgagcgcgtgaagattcccttgcgtggaattttcttcctattacccttgtggtgtgctttctccaagtgatgaaattcatctccgtgctcacatttccctgctactatgaggggcactgcccacaaatagatcaggctggctggttgtttaacaggtgtcactctgcatacctgaatggcgcatactacagcggcctctacacggctaatacagacaatggtgttgtctgctacacctggcatgagtgtggtattctctcgcatctgtggctatgacaattggccacatgattttattcccaatgtaatttaatcctgctggtggcccttttgctctgcatttcacttttgttcaagtgatttgaaaaattcttcttctaaccatatcatgccccaatattgatacctttgttcagtggggcttttcatttctttcacttgcctttgtactttagtggctttcagacccaggatttccaaacttcctcccattaatggccccgctcaacaaacctttttttaattccct

SEQ ID NO: 300635 - DNA, 636 bp, Homo Sapiens
  misc_feature (273)..(273): n is a, c, g, or t
  misc_feature (406)..(406): n is a, c, g, or t
  misc_feature (448)..(448): n is a, c, g, or t
  misc_feature (524)..(524): n is a, c, g, or t
gtttatttgtacaccataaccccctagacccaaggattgtgtttggggaaaaaggatatgtgctctggaaggaatgtgtaggtagctaaagtatcacagcctatgatttctgcaacaacatcaagggttgtttgggagaaaacttacggtgaataggtgttcctgcataaagagtaatttatcaacaacattttggaggcattcccagacttggggttagttagaagtgacacggcagattaacatttaagattaagtcattcttgtcccggnatcttccattctgatatttcaactcttcaactgggaaggttatttttgtttcaaaacccgtcagaaattaatttttgcataacccctttactccttccaagcttctttgaaactttcatcatttctctgaaantataacaacagtatttttgttttctttgaaaaagaaaatccntcatttcacttttgagcgtatttttaaaagtgtgtacactcacttgggtaaaatatgataatttaaaattagacanatgtctataaactcgtatcattgaggaattgtttagtacattttgttcacacacttccaggatttcaatacttaaaatctactcatacctactgcatggaaatatgtttata

SEQ ID NO: 300636 - DNA, 633 bp, Homo Sapiens
  misc_feature (466)..(466): n is a, c, g, or t
  misc_feature (610)..(610): n is a, c, g, or t
cagggtgtaagttgacatggggcgctgcactgaccgaggggaggtttttcttgagagtgacctgccacaacctgcaactgcctgatatttgggaccgagagaaagaacgattgttattcgggcggatgctgacatgagaatggccttggcccacctacggaggatctaataatcaagacagaacgtttcatcacggtgggaaggggaactgcactccctagggactggctggttgggcgtatcccatgtcactcttatcaagaaccgagagctggtagcggagccggccgcccaatgctccctataaagatgggaattacaagtcactgagcgacgtgttgaacatattgacagcgaataacgtgtggagacccagcctaaacaccttgccgcacagagcgcggacgcgaggtggcgtgacacccgagaggtcagttccgattggcctaacgagcagtcgcagagncgtgaatgggacaggcccaccgcaggcgtgatgtcttgttgtaaaaaaggctaagattgtgtgaagcagctcattactaacaacaggggggaaccgtggatattcgtgtttatcaaataactgcctcctttgggagaaagaccnccaatcggacacgagtctcttta

SEQ ID NO: 300637 - DNA, 600 bp, Homo Sapiens
  misc_feature (377)..(377): n is a, c, g, or t
agaatcgatgcattctttattaagggcagcaccaagacaagaggcaacaagattaaagaaatttatgatgattagacagggtgttggctttacaccaaccagaaagaaaaacaggtgaacaagcctgtgaactgcatattctttctcttactctcaaggaaggctgagacgctctcaaatgtgagggtataagcctaaagcaggttgacttgcagaatcaagttttataccctcctctgcaaagcagggctacgtatagtcagacttgcagaacttgtatacaaaagctgcgacaagctaaacaagtgcagcgtgcaccttgatttggatatccttcccagaaagagtgcatatatacgcatggaaagtgaacgttngagcattaactctttgcgaccgtatgattattgactttcacagctaataacatgggaggctgttgaccatggattccgtgcaaacattggtgacccttgcacttactgccgttttctactgcatacgacacaattggttaagaccaccgcttgagagtctttggacaaggcaataattatggtttaggatggtaacaacaatttgtgtgccccatttctaggg

SEQ ID NO: 300638 - DNA, 501 bp, Homo Sapiens
  misc_feature (251)..(251): n is a, c, g, or t
gctacccgggacatagaccttcatcgtggcacaaaggatgccagccaatttgtttgtggctcaaaggcaaaggtctgcaaaattggtttttgtattccagaaaaggactgacatgtggttggcaggcatcacagcagagggcgtgtgaccctgccggcacttagactatttgaacaccatctcataaacaaggtggagacgccgccagcccgatggcctggtttgggcagagtgccccttgagtctatagnaacatgcgaaaatgcacatgtatccaccgcgtacagggtcaccttgagagagtggttgcagaacccccgtgatccaattggtgagtatatttagggacgtatgtagcacggagaacgctcttggacaacaacctccgtggagcgtgcacactcattgggagaagattgtacactggacaccccacccgccaaagatgatgaacaccccgggtcaacaaacaggccgaacccagaaattttgcttgggaat

SEQ ID NO: 300639 - DNA, 169 bp, Homo Sapiens
ccagagccgaacttaaactcaagactaatcagaccgctagagctcaggccaggccaggaacacaaaacgccctaaagcgagtcgtaataaaatccactgcgcgacgctatacaacgtcgagactgcgaaaaccctggcgacaccccacctaatacacttgccgcaaata

SEQ ID NO: 300640 - DNA, 226 bp, Homo Sapiens
cccccttcccctgggagccatttgggcaccaggttgagctttaaaaggacttttctttttatagcaccatttattggggggtccccctccctagccccacaaaaaatttccccccccgtaattttaggccaggcttaaattgttttcccggggggaaatcccaaaaaaatgttttaagtaattgggccttttttttaaaaggtttgaaaaacccaggcccttttcc

SEQ ID NO: 300641 - DNA, 499 bp, Homo Sapiens
atagggcgggcgagctgatagctagcccgataccgagttagatagcaagagagtggacatggaaataaaagggcgggagtggaaaaaccctacaaggacgaaaagcaaacgaattggaatgcagagcgcgatggccagatggcgcaatagcgaggaggcgcggacagaacgaacttcccaacagttgcacagcctgacaggcgagagggcaagtgtaagaatgaataattctggaaaaaaagagatgtataaaagtagagtgagataaatgttgaacgaataggtcgaaatgcccataagcgctgaaaaattaaaacaataaaccgggataggggtggatggtgatcgagatgggagcaagaggacactaaaaaagaacgtggatctcaaagaaagaaggcgagaatccgagtgggagggggatggaccaatacgggaaccgaaaaacaagtgaaccttaacgggaatgaggggcaaaaaggaaaaaagcggaacaata

SEQ ID NO: 300642 - DNA, 311 bp, Homo Sapiens
  misc_feature (115)..(123): n is a, c, g, or t
cactctgacacctttcccatataaatctatcaaacctgaccattttttttatattcaagtaactcatgtgtatgtacgtttatgtcatgcgatatcaccctgtccattcccctcnnnnnnnnncacttacggatccaaaaacctgatgttgctttttgggataaatcttgtggcttagggccggttgttcatatgtgtattggaaacccccacccctttatatttgtaatagattggcctggcttaacattgttgccgtttcatacttttacccccctagcttttacaccataaagctctactgtctttgg

SEQ ID NO: 300643 - DNA, 298 bp, Homo Sapiens
  misc_feature (17)..(17): n is a, c, g, or t
tttactctatcagcagnggctcagctccctttcccttctccagtctgcctttctatgtccattgattttatccttcctagaacagattcttacctggcagcaacatagccccagagttccatgactcatatccacactccaacaccaagtaccacgtctttgctgggtgctgcagtgtatatctttgggtgtccatggagatcatgggagagttgcgggtgtagggggggtcatacaccttctccctccttcttgtagttgatgggtcgtgcagcattgggctcaggctccagtgtgt

SEQ ID NO: 300644 - DNA, 970 bp, Homo Sapiens
atttcagggtgacaagaaagtctggaaacataggcaaatattttccattttgacagttttaagtgaccaacttgaatgccagcacttgatgagtggagggaaagtaaccgggagtaattccaacaagatggcacaccacccccttacaccacattggtgaagaaagctggatgaagatttccaaagaaagcggccctgtggagtgggcttcaggcttgccagatctggactcccttgatagcttcttctggagtgcacttaaaacacagatttattccgtgaaaatcaagcagcatcacagatgcacatgcagggactgacagaaatgctgcattcatgtaccacattcacggaaatttttgcactatttattgctcatgagggccgacatcaatcatgtgatagcaagaaatcatttgttcatgtagattcacctagtttgcagaagtttgtggttatcttatcatttgacacagtgaagccaccatatattctgagagcyggtcacattaaagtacttccaccaacctgaggttggcactgcaaacactgaatgagcacagcattcctccttgaacccaacgggctctgctgtatctgtggtttaccaaaaggcaaaaagctgggtcccacctgaggttggcactgcaaacactgaatgagcacagcgttccctcttgaacccaagaggctctgctgtctgtgtggtttaccaaaaggcaaaaagctgggtctcagtcaactgctgaatgcattagagtacagaggctgtagtcctcaggcctccccctcactgcaagggtaacacaggaaagataacctcccatctttgacacgcagckgggaggagggggaagacctacacaagttgakgagcctttttcagtwagcagttagttgcttacgcacawccaaaacacacammacacaacaaacacctkctgaagtatcacacttwaccaaactggta

SEQ ID NO: 300645 - DNA, 816 bp, Homo Sapiens
  misc_feature (22)..(22): n is a, c, g, or t
  misc_feature (25)..(25): n is a, c, g, or t
  misc_feature (61)..(61): n is a, c, g, or t
  misc_feature (428)..(429): n is a, c, g, or t
  misc_feature (433)..(433): n is a, c, g, or t
  misc_feature (444)..(444): n is a, c, g, or t
  misc_feature (446)..(446): n is a, c, g, or t
  misc_feature (605)..(605): n is a, c, g, or t
  misc_feature (612)..(612): n is a, c, g, or t
tatttcgttaaatatttttaantanaaattattatcttacaaaaaaactccttacactttnaccatctaaaatgttatwttctatmaaattatataaatatttccatgtccatatatcaacacaacktttataatcctammayttttaaaaatcaacaaaattatattctttaaawaatkatcaacctaatcaaaaaacaacattccccaaacaaacmtaaacaaaggacacaattactgacccacascrgaaatrtrctgcgggcyvgagtccggggggctgaaaacaargaaaacacaatcaacagcgcgcttcgattwwataaaawaaaaccctccaaaaacyatatgtaaaaagtaaaactaaccmcccaaarwaaaggtcagataacctcctgaatcaagtgcatgckgagtggaaacaatgnntagntcacctggtananttgttcttccaaaaggcaaagaccttttcctcgtttattcttatcaggaaaacttctacttcaaggtagaaggacaataagagtgaagccttcacagctggcagacactgcttgtccattggctatgtcatcctgggcaaagctcctcagcctcttggngcctgtntccttgcatgtdaaatgtggamagtgatagctaaamtgctggttggttgggaggattagamgtaatmwataaaaagtgmtgmkaaaaatgmaaatggvaagtwatggaaaatgaaaaaaatmactaaaactattttgtgtgggaraaaagggtttmammaraatttaatmaaatmtaakagtktgataaaaagggttatgtaat

SEQ ID NO: 300646 - DNA, 807 bp, Homo Sapiens
  misc_feature (30)..(30): n is a, c, g, or t
  misc_feature (34)..(34): n is a, c, g, or t
  misc_feature (87)..(87): n is a, c, g, or t
  misc_feature (112)..(112): n is a, c, g, or t
  misc_feature (121)..(121): n is a, c, g, or t
  misc_feature (137)..(137): n is a, c, g, or t
  misc_feature (233)..(234): n is a, c, g, or t
  misc_feature (236)..(236): n is a, c, g, or t
  misc_feature (241)..(245): n is a, c, g, or t
  misc_feature (252)..(254): n is a, c, g, or t
  misc_feature (258)..(258): n is a, c, g, or t
  misc_feature (325)..(325): n is a, c, g, or t
  misc_feature (329)..(329): n is a, c, g, or t
  misc_feature (340)..(340): n is a, c, g, or t
  misc_feature (342)..(342): n is a, c, g, or t
  misc_feature (571)..(571): n is a, c, g, or t
cccyccctcccggcggatgcgccgtcccancctntggctcctagtgtagggctcctacccttgkctccagcaattgctgatgatgangtsttgggttyccctaggatattangcctcctgnatggaatcggcttctntccacccystccacssmctstcgctytcccctctccacctstatcmcctccaaayacacsccttgttacacctatctaccccctcawasacsgtcnntnccgcnnnnnaaacacnnncacncaccaaaaccgcsgctcmcaagtcccmcaccsycgcaaaaastaaatcaccmsagctccccaccsgntgcngggcgtgtgtncnggaaaagcctcccaccgsscssstccacaacacccctccctcctcactccascayccacmccmccctctccmccttyacctgcmcctctctctccacccccccacatccctcactcttttcgccyccatactstctcaacccccttcctgatctgcssggcaccccscccctcactacatcttccstggcgcacccaaccccccmcctcccactacagaggccagagcngggggagctccctctcctgccctccstgcgccacatgacagggcccatcacccgaggcttggccactccactgcctggtgacccagggacactgggactcagggatggcasagcasattgscatccagcycaggctgggtgtggcgtgtgggcycgtccagccacagcagggatatagggcagcascamctggcytgagtccagctttccasactckstgacycggcctgccsttc

SEQ ID NO: 300647 - DNA, 112 bp, Homo Sapiens
tttcgggcacagcaagtgccccaccctgcccatgcggcgtgcagctgtctgggcttggccctccatactccacaccctgaccatgccacctggcttcccgtgtgctgtgcct

SEQ ID NO: 300648 - DNA, 951 bp, Homo Sapiens
  misc_feature (319)..(344): n is a, c, g, or t
tgttttaataaatacatatwttaawgcaaaaaaacggccctgggacmtcaaaagamcamaaaagggcwtcmtgggccwaamatacmttggttgtagccatcmtgcttcwamwcaaccctgcmawgmwawggggtgcaacamaaaammaaaammcaagcmwaammaatgcmcamaactgawggwmaatgtwttagcwggctccaaaatrgamaagwamacwcwgtcmaaaamaamwgcwcaagmamaawawammgtmaagtgcmcgcwtcttammaawatttgtmaacwgggawtggcmgaaaacatagtggtaamttmnnnnnnnnnnnnnnnnnnnnnnnnnnggmaatggcatwawwtcwacwgtrgttggaamtggmaaggaaaaggtcamctccactctagttggatacagacwaggtmmctcwggctgcmawamwatattggggctctcwaamcwmmctacwtgcattgggtcttggaaaaaaagwagaatatwtggtaagaacattgacagaagagagccctggtgtgcttgtggtgcaaagatcttcatgcccagttcyaaaktkakgtccctcccaaagttgttttcgtgtgaggcagagaaagccacactctgaatacattttatgtctcaggaattcacattccaggttcaggaattttattccaaartcctttggtgcactcaccgtcyatygttccccaaggcagggakagggagtggcccgtccctgggaggctggcaaagtgctctccagggaggggtcaaacgtccttktgatctgcccagggtgtcackgaargagattttctagctccacatctgtctgcacataggaaggaaaarataagactctaaacctadtcatcttggaataaaaadaaaaamtrgtttktttgaaamaaggyssscgcgtgtttkagsgaaacgsttttggctgtttc

SEQ ID NO: 300649 - DNA, 894 bp, Homo Sapiens
  misc_feature (651)..(660): n is a, c, g, or t
  misc_feature (676)..(745): n is a, c, g, or t
  misc_feature (828)..(837): n is a, c, g, or t
ttaaaaattacttggaataggtgaatattaatcaagcattttcctatcacttttaaaattttatactatgtactttgtattaaatagtacagtagtttcagtaagacatgtaaaatttgccattttaaccaccttaaagtgtacaattcagtgacatttattatatttacaatgttgtgcaaccatcaccactaattcatcaaattttaataatcttttaatttttgagccagatttagcagtgagggtctatataccaactctaatgacactaatgctaataagttttgataacccactaccatcagaccagctgtaattcatccaattttcattattctaaaaggaattcctatacgcattacgcagtcactttctttgtacccacttcctaggtcctgataactactaattggctttgacaccatggattcgcctatttctgcatattttatataaacgcaatcatgtcgttttcttctttccactcaacatgctttcttagggattacttacatctattcattattcctccacccccccatttctttatcatgattgaatatttcattatgttgttgtgttttactttaccatttattacgctgccacacatttggttttttgtaactttcccccctcttaaggagnnnnnnnnnnaactcctctgctccannnnnnnnnnnnnnnnnnnnnnnnnnnnnnnnnnnnnnnnnnnnnnnnnnnnnnnnnnnnnnnnnnnnnncaactcgctccctctcgttatttcttataactcttttggttctctatatctcctcttcagtagctattttattttccaactcnnnnnnnnnncccgatatttctctctataccaccatcttgtagaatcctttctaaagataatacatt

SEQ ID NO: 300650 - DNA, 849 bp, Homo Sapiens
  misc_feature (33)..(33): n is a, c, g, or t
  misc_feature (56)..(57): n is a, c, g, or t
  misc_feature (65)..(65): n is a, c, g, or t
  misc_feature (112)..(112): n is a, c, g, or t
  misc_feature (140)..(140): n is a, c, g, or t
  misc_feature (290)..(290): n is a, c, g, or t
  misc_feature (302)..(302): n is a, c, g, or t
  misc_feature (305)..(305): n is a, c, g, or t
tcctgcttcacaggctccgcggcctccggctcnctcgkkkcycgkgccccgggctnntcggggcncgggvscmgcsatccgcsgcccggatcctcacsgchctccctaggcngcyccgcygccatgggcctgcgcycgcngcgccgccgggsbgagggcagctgaggcgcggtgcgaagatgggcgaggacagagcagggcccgagcgcyagchccagcagchcgggcgccycgcgcgcgcwcgtwcgcrccgccgaggggatgctcgcdcycgtwgctgtgttctgagngcttttgtttgnwgnwagckctctccgcaccactagcttyttgggaraatggagtaggawccgcwggawtrggwaccgggataggaggwgatggggawagawtaggagaagggagggaaggacgggccgggggcggcgcaactggctccgggccctgcggastacgcctcggagcgcdcgtcggcggccccgacccacagtccccgggcctggatgagcctgcgcbcggggccgctgcagatggcggggcgcgttggagcgctgggccggccccggggctggagggaggcccgcgagahcccgggccgtccggyccgcygccgsgcttcggykcgcgggggsagcttkcgagctccgacgccccggggycaggggcgcgctccgaagcgccgctttcagaamtcgamccgttgttyttttggawtgaggarsyhgargagtgtggccccgcgagctgcccggagassgcgscttttcgtttgcrggggtcavgmgcascmccgagsgkgggggaggtgsacgtvttctytyctttcycgggcccacsggggcgmrctgg

SEQ ID NO: 300651 - DNA, 390 bp, Homo Sapiens
  misc_feature (19)..(19): n is a, c, g, or t
tttgaaaagacctacctanatatatttgaccaaacaccatattacaattgttctttaaaattataccaattatgactcatacaatagcaacacctagaaaacattttgtctgacgtcataaaatgagtgcagatataaaagaatcaacagcagataatgcacctaattcatggattaaagacaaagattaaaaaggaaagaagagtttgacattttacatatgagaggaaatataataagttaagtggtacaataatgtgggttgaatgcatcacacttacacattggaaatgtatgagactgactttgtgggagtatgcaccatgcacaggttacgtttggttccgttattaaggacatttacatttaaagttttgttttgtatgaatg

SEQ ID NO: 300652 - DNA, 108 bp, Homo Sapiens
tgggggtgtggttgtgtgaggtgaagttgcccgtgaccctgcatgcggcgcgggggcatgctgctgactggtgtgggccgtggtggctgcccggaagatgccaaaaaa

SEQ ID NO: 300653 - DNA, 991 bp, Homo Sapiens
attcccgggatcagctcttgtgagctggtacctgttggctcccgtacaccgctagccagcagtcagaacagacacaacgagaacacacttggagkatagkaggagttkkaactcagatgagtgtaggttaggggtctacagtcctacagagctgtaatacagcctacggaaacgagtttgaaaatggaaaactatgctgaataaactgcttatgacccaacatcattccaaagcagagttgagactatggtatagccgtgcacagtgtaaggcatgaaggttggacgaggatccaggtgagttaggtaatggaagagggatgtgacaaagcgtgcagaaccgaaagcctcaggatgagatgaagaaggagtgaaggaagcctgggaattatattaaagaaaactagaggaaaaccacctttcaggtagagggtcaagaaggcccaggactaagaagagcctgaaagtctccagggaatgtgacactggtgcaaaagggaaatggagtaataataagtggctgataaatcagattaaactttgctggtatttgctatctgtagatagcttatgttcctgaagttcctttcctgagtagcagagtttaatggtgtctcttaactgtcagtattctgtgtgagcattgagagttgaaagatagaattamagtgacamaaggtggggaatttattattcaaagaaaaaccagattgaagtgggatgttgtggttgtagatgccctgtctatgaaggacaaatctcccttttcattctggagtgcagtagccaaaatctgtgccattacatgagtgagcctttactacacaaccttatgagatawgtytctattcttccattttaawtacagagagggaagttwccctgctaaraatggcagattaggattgaackcakakaccktkagaacktgamcgakakakkagggcaaccatatawawtttmttgggtttttatatttatatttgrtktcg

SEQ ID NO: 300654 - DNA, 989 bp, Homo Sapiens
  misc_feature (769)..(769): n is a, c, g, or t
  misc_feature (775)..(776): n is a, c, g, or t
ccgggattgaaagtttgctgcgtagggatagggagaccgggccggattgcggggagtgagcaggttcagcagtgacggcattcttaagagtcctgcccaagtgagggacttggggtgtgggacagagtggcccccagggcagtgggcgttggaaactgagaggccctgcgaaggaggcttggggaggggctacggtgaccaggggacgaggtataggaagaggagggcggaaagccttgagggtgggcttcttggatcccaattgccccagaggcacaggcctgggcatcactgtattatttcccgaggggagaaggggctatttcccatgggaagacaaagtgggatgaatagtggaccttgagaagagggggtggccaggaaaaggttcctgaaggaggcaggacccagactgcaggctggggagggtttgggcagccagagggaggtgagggtgctggagcgggggtcaatcggtcactccggccggagatctgagtggcctctgccccctctgcgctgtggagtgcatctgattgccagcctcgctggaccgttgagaggattcatcgagaccctggatatgaatatgcagtgtgaactgaagtttggggacatgagtaatcagtcacagtggcccaagatttgaggtgtaaatggagaagtcagaatgattcgctgcagctgtctggaacagctgccgctccagatgctgctgctgccgccgcsgcssscccaccctcggtcctcctctccggaggccatgmhncamcmnnsccmaagmtcccctttycccaaggsggraggccctyctycactccttctyggsggcggggcccgaccccgcggctgggcsgcacctctcatcgacgcaatggggtccctacacatacacgtgcastggaygaggagccccggggccgcccagcssagsgccccagagagccggcctcgcaaggtamastgcccgatksscgtgttttgcagcc

SEQ ID NO: 300655 - DNA, 742 bp, Homo Sapiens
  misc_feature (110)..(110): n is a, c, g, or t
  misc_feature (183)..(258): n is a, c, g, or t
  misc_feature (331)..(331): n is a, c, g, or t
  misc_feature (397)..(397): n is a, c, g, or t
  misc_feature (457)..(457): n is a, c, g, or t
  misc_feature (468)..(468): n is a, c, g, or t
  misc_feature (532)..(532): n is a, c, g, or t
  misc_feature (582)..(582): n is a, c, g, or t
ttmmgmaagtagctgggattamaggtgmctgccammatgctsgctcatttttgtatttttagtacagacagggtttmammatgttggcmagamtggtmttgaactcctgncctcaagggatccacmcacmtmggmmtaaaaaagttgmtgggattaaaggmgtgaammaamtmammcagmcannnnnnnnnnnnnnnnnnnnnnnnnnnnnnnnnnnnnnnnnnnnnnnnnnnnnnnnnnnnnnnnnnnnnnnnnnnnccagcctggcagtttatatatgsssastsaatsarataamstatacaacattcaggttgttttgtmtcatacnaaacagtctcagaacatttgtattmccttmcttmtcmtatcttggtgaatgactttatcctgtagngctactacccaaagaagacatggtaaacaggtcamcatmtaggattttcctatagagagngttcatagatncccgcagtatttcgttatacacaggattcaaggttttmttcaataagagtgttttcttattgcncmattttgccctttgtctgcgctagcaaatagcgccctttacatatctgnaarssmgcattgcamagcaaaagtyaaagcaaataaaagctatgyttwcaamtatagcttttttaaataaattgcaaaatgcaagcagcaataattatttwatgcaaatgcgmaaagcagygmataaaaatttttamtaahaataamtttawaattaaat

SEQ ID NO: 300656 - DNA, 735 bp, Homo Sapiens
  misc_feature (67)..(67): n is a, c, g, or t
  misc_feature (112)..(112): n is a, c, g, or t
  misc_feature (116)..(116): n is a, c, g, or t
  misc_feature (122)..(123): n is a, c, g, or t
  misc_feature (127)..(127): n is a, c, g, or t
  misc_feature (129)..(129): n is a, c, g, or t
  misc_feature (148)..(148): n is a, c, g, or t
  misc_feature (161)..(161): n is a, c, g, or t
  misc_feature (277)..(277): n is a, c, g, or t
  misc_feature (280)..(280): n is a, c, g, or t
  misc_feature (293)..(293): n is a, c, g, or t
  misc_feature (295)..(295): n is a, c, g, or t
  misc_feature (297)..(297): n is a, c, g, or t
  misc_feature (351)..(351): n is a, c, g, or t
  misc_feature (386)..(386): n is a, c, g, or t
  misc_feature (412)..(412): n is a, c, g, or t
  misc_feature (415)..(416): n is a, c, g, or t
  misc_feature (419)..(419): n is a, c, g, or t
  misc_feature (449)..(449): n is a, c, g, or t
  misc_feature (460)..(460): n is a, c, g, or t
  misc_feature (463)..(463): n is a, c, g, or t
  misc_feature (466)..(466): n is a, c, g, or t
  misc_feature (471)..(471): n is a, c, g, or t
  misc_feature (485)..(485): n is a, c, g, or t
  misc_feature (490)..(490): n is a, c, g, or t
  misc_feature (508)..(508): n is a, c, g, or t
  misc_feature (511)..(511): n is a, c, g, or t
  misc_feature (514)..(515): n is a, c, g, or t
  misc_feature (540)..(541): n is a, c, g, or t
  misc_feature (543)..(543): n is a, c, g, or t
  misc_feature (547)..(547): n is a, c, g, or t
  misc_feature (550)..(550): n is a, c, g, or t
  misc_feature (558)..(558): n is a, c, g, or t
  misc_feature (565)..(567): n is a, c, g, or t
  misc_feature (572)..(572): n is a, c, g, or t
  misc_feature (586)..(586): n is a, c, g, or t
  misc_feature (598)..(600): n is a, c, g, or t
  misc_feature (602)..(602): n is a, c, g, or t
  misc_feature (607)..(611): n is a, c, g, or t
  misc_feature (615)..(617): n is a, c, g, or t
  misc_feature (625)..(626): n is a, c, g, or t
ggatgccgatactcagccctctgcgaccatggctgtgctggcggcacttctgcgccggcgcccgcanccgcagcccccygctccggaggctggtgcaggaaatmagatatgnggancggagnnatgnancaaaacccmctttgaaggnagtggtcatagtnagtgctacaagaacacccattggctcttttttaggcagcctttccttgctgcccgccactaagcttggttccattgcmattcagggagccattgamaaggcagggattcccaaagnagnagtgaaagaagcntncntgggtaatgttcyacaaggaggtgaaggacaagctcctaccaggcagggccgtnttgggtgccggcttacctatttctactccgatgtnccaccmtaaaccaagtttgtgcytcnggnntgnmagccctcctgatggcctctcaaagtcttntgtggtggacntcnggntgtgntggtggcggtgggntgggnacagtccatgttcctagncanacnngtcacaccctatgggggtaaacttnnantttnttntmagcgcnggctacnnntgctncataaaattccttngccgcctgctcnnnanccgcnnnnngcynnntttgcgcnnmatgagcgagrcgcttatgctatkaatgcttatrvcagarataaagcagcatggraagctgggaaattkggaaagsarkttatgccggsrcrmttgcattaaagggcag

SEQ ID NO: 300657 - DNA, 893 bp, Homo Sapiens
  misc_feature (48)..(48): n is a, c, g, or t
  misc_feature (77)..(77): n is a, c, g, or t
  misc_feature (86)..(86): n is a, c, g, or t
  misc_feature (92)..(92): n is a, c, g, or t
  misc_feature (107)..(107): n is a, c, g, or t
  misc_feature (121)..(121): n is a, c, g, or t
  misc_feature (137)..(137): n is a, c, g, or t
  misc_feature (417)..(417): n is a, c, g, or t
  misc_feature (421)..(421): n is a, c, g, or t
  misc_feature (438)..(438): n is a, c, g, or t
  misc_feature (448)..(448): n is a, c, g, or t
  misc_feature (452)..(452): n is a, c, g, or t
  misc_feature (511)..(511): n is a, c, g, or t
  misc_feature (558)..(558): n is a, c, g, or t
  misc_feature (567)..(567): n is a, c, g, or t
  misc_feature (666)..(674): n is a, c, g, or t
gccgaacagccgcaacgagccgggagcagagccgcgcagcgcagcggngcgaagagccgggcggcggccagagcccnccccgcgcngccagngggacgcggaccagnggaaccccggccangccccggggcaggggngcaacaaacacaaaacaaggaccacgcrccccgccaaccgcccccgggcaggaaacgcccagaaccaccaccgcgccgcgcaccacaaaarccccgggagaaccaaaacgggagggaacgggcgcgccccagaggcaggaggaamccccacacccacargcacaarcmcaamacccccaacgggcaacmcccaaccccaagaggacccccaggccggggcgagagccggcacagcccggaccgaaaaaaagccgcagccaaaaagcgaaaaacargacgnggcngggccgccgggccccgngcgcacaggnccancagcacgccagcacmacgcaggggcaccagaacacaaacacccgggacgcgcccggccnccggcaacmacaarcacmgaggrmmcccgaaaagcccccgcagcccnagccgccanaacmmgcrccmgagccccgcsacgcacacagcccggacaggagcaaggagcaagkagaggggccgccggccgggaacaacmgcagcggtgagcccagcnnnnnnnnncccccccgccccskccagaaacaagcccgagcgakcgaccccaccaaggccctcgaccccgcagagccgagggccgccgcggccacaagagagcaggagkccasgccccyccgtcgaggagccagrccccagcbgaccagcsgcgcadagccccgccaacgccccgcgccargacccccacaggggkgcgraagacagcgccccargagyawctcggtg

SEQ ID NO: 300658 - DNA, 915 bp, Homo Sapiens
  misc_feature (85)..(85): n is a, c, g, or t
  misc_feature (312)..(312): n is a, c, g, or t
  misc_feature (451)..(451): n is a, c, g, or t
acaaatccgtccagtaaacggacatgtatgggtctcagccgccaaaraccccgtccggaaggaagtamtaacagaaaatcaaganaggatgtcgggtatacatcgggagactaaatcaagaggccagggagaaggacrtgaaaaaattcwwcaaggaatawggacagataagagataatgatctgaaaagaggctatgattaagtggaatatgaggatacaaggaatgaagataatgsgggggatgagctagatgagaaaagaaactcaatagtgaaagggaaactattaaacatagctagggaskacaggnacgagcgaggakagagagagaggtagaggacaatactctgaccgatataataataaaagacctacgaaatgatagacgaaatgcaccaccaaaragaacaaaaaatacgatcttatagttgaaaatttaacaacaaganatcaactaggacagagaaaagattgaaatacagaattgagtatattatagatawggaatttataaaagagtaaatggggtagawaataatgatattgtwttaktkrgrrgtrgttattaarttaatagawaaaatggaawwatdawtttraacaattaattaaawgtaaataggggraaatataaaactttaatattagatgatcaartwgwaaatgttttgaggatatttwwcttrttttttaagatcaattttaaaccaaatataaarcccattattwgacagamwgactatggtcaaaggccttatgamgagrrgtgactrtrgrgatatmcaaatcgatgacttggtcacacatggattgggcctgaatgacttwgccaatsagcaccctacagwratcarwaagacacmtctagrtaykgtgwttgcsagkcaagacgtaatcggagsaaatccttgak

SEQ ID NO: 300659 - DNA, 744 bp, Homo Sapiens
  misc_feature (84)..(84): n is a, c, g, or t
  misc_feature (403)..(403): n is a, c, g, or t
  misc_feature (455)..(455): n is a, c, g, or t
  misc_feature (567)..(567): n is a, c, g, or t
aagattttggagtatgaaaagtaggttacttgttaggtcagcatattcatgggaagggttgtgtcaaagactgaagcgggagtntggggttgagaagggcgctgaaacctaagccaaggaagttaagacttcattacttctgacgtttatttagggggtttacactctaggttaccgtgggggaaagactgattgtaaataactacaataccttaaagtaattactataacagaactatatccgaaatacaaggttaacacggaaaagggaacacccaactgtgcctatggggaccagggagggctctcccgggatggctttgagcgaggcgtgggaattatccccatcgcatgcccgggggaagcacagcgggacccagcagcttcggccaagcgcaagcgnccggagaacgcgcactttcccgaggcggggtgacgcagggccctcgcgagtngaaaacaggggccaagtcgcggcctggcggctcggttcggacttcctactttattcaaagggagttattgaaggcgttttcggaggagcagcgaacaaagagctcgtccgtnagccagatggtcaaaggaatcagtgggaggacccgggcggcgcgtctctccacgtcccgcgggacttacccggacaacccttcctcctttggctctggaagaagccccttcgtcatttaccagtgtggcctgaatcctaactactgtgcctccaaatttctgaattttctcaaaagg

SEQ ID NO: 300660 - DNA, 1040 bp, Homo Sapiens
  misc_feature (929)..(939): n is a, c, g, or t
cagttattcgccacagcccgggatagtctggggacgtgtccgcctgggaggggacggccgcctgggaggggacggcccggagcagacgccaggtttcccgcggctcaggagaccggtgccgcctcggagagcgcgcgaaggtgccgccggccgcccgacccgcccgaggaacggacatctcccgcccgggcccgcaaggacgaccatgaacaccgccgcagctcagctgaccctgcctctcccgggtggctgggggtcgccagcyaagggggcagcgggcggaggatgaaccccggagcaagggaaagckayagcgctgcgctttcacyctaccgcyaacaaktygaaktytcccaaaggaacctgatcggcggggctgcygtkgtacgaccggccgctaaggccaccctgcgggcktttcgacytcggytgatcgcygctkgcyccctgggaacygcgtgctggcygcaggagaaggtagattcycgggagctccggtgctcacygckktactaayygcgyytgcgcyccgcccttccttccttcgggytycgctkcttctttcgcagttgcggggtttcgcgccgccggagtctgagaggccggaagtgccccttagcgggtgggggaagctggtaggcacgggcggctccgcagtgaccggactcgggggaggtgagtkatttgcctaagtaaaagggaaagataattgagcgccccggcagctggtctacgcatgcgtccgctaggccggctgggagcggcaagggaaagccgagcgggcccattgggggaaaggggtcagtyacttcccggaagaggcgggccgcgcgggccsgccgctggattcgaaacgcttctggtgctctgggcctggcggttgagcccggggagctagtttttgcttgggtaaagaaagaggatttcynnnnnnnnnnncytttgaraaattcagaaattggaggcmagtrttagrttcaggcaaatkgkaaatgagaagggytyttcaaacaaggagaaggtttcsggtaatccccggg

SEQ ID NO: 300661 - DNA, 840 bp, Homo Sapiens
  misc_feature (68)..(68): n is a, c, g, or t
  misc_feature (75)..(75): n is a, c, g, or t
  misc_feature (83)..(83): n is a, c, g, or t
  misc_feature (128)..(128): n is a, c, g, or t
  misc_feature (155)..(155): n is a, c, g, or t
  misc_feature (159)..(159): n is a, c, g, or t
  misc_feature (176)..(176): n is a, c, g, or t
  misc_feature (189)..(189): n is a, c, g, or t
  misc_feature (194)..(194): n is a, c, g, or t
  misc_feature (196)..(196): n is a, c, g, or t
  misc_feature (206)..(206): n is a, c, g, or t
  misc_feature (218)..(218): n is a, c, g, or t
  misc_feature (292)..(292): n is a, c, g, or t
  misc_feature (316)..(317): n is a, c, g, or t
  misc_feature (332)..(332): n is a, c, g, or t
  misc_feature (334)..(334): n is a, c, g, or t
  misc_feature (340)..(340): n is a, c, g, or t
  misc_feature (351)..(351): n is a, c, g, or t
  misc_feature (353)..(353): n is a, c, g, or t
  misc_feature (389)..(389): n is a, c, g, or t
  misc_feature (416)..(416): n is a, c, g, or t
  misc_feature (421)..(422): n is a, c, g, or t
  misc_feature (424)..(424): n is a, c, g, or t
  misc_feature (427)..(427): n is a, c, g, or t
  misc_feature (439)..(439): n is a, c, g, or t
  misc_feature (443)..(443): n is a, c, g, or t
  misc_feature (449)..(449): n is a, c, g, or t
  misc_feature (453)..(453): n is a, c, g, or t
  misc_feature (471)..(471): n is a, c, g, or t
  misc_feature (473)..(473): n is a, c, g, or t
  misc_feature (482)..(482): n is a, c, g, or t
  misc_feature (500)..(500): n is a, c, g, or t
  misc_feature (535)..(536): n is a, c, g, or t
  misc_feature (542)..(542): n is a, c, g, or t
  misc_feature (544)..(544): n is a, c, g, or t
  misc_feature (550)..(550): n is a, c, g, or t
  misc_feature (558)..(558): n is a, c, g, or t
  misc_feature (575)..(575): n is a, c, g, or t
  misc_feature (577)..(577): n is a, c, g, or t
  misc_feature (579)..(579): n is a, c, g, or t
  misc_feature (584)..(584): n is a, c, g, or t
csgctatagtgtcttattcgggcgtattttttcatccagccgtaaccgaaccttggaaaccctgacantygaacnyyaggcancagcaagccagcaagccaaagccakcaaagcgcggcaaggcgctnatctatcatgcgcgtatgcctgaaganctgncagtcckacakcagatncacccgaaccacncaatnanaagkaggcyncttccgcacaancccttttagcytytytctcgcacgyytcytctacgcttcaggactcctccaaggttttyagagccgcgaagtantccaggtcctgcgcggagycyawnncggattttaggcgcncnttcacnccgacaagacncnggtttggctgyaggcgtgccgtccggttgygcagcncccgagcccgttctgaggtactcccangcgcnnangtnaaaccgatccanggcncgcaancagngcccccgcgacagtaatnanggtcaagtngtgagttgtatagtaaangawgccccaacttagttgtytctggggrgcaacannaaaacnancagcanaatacccnaaagtcgcagtatatgnancnataanaacgctcctctcatcttgcawcaagaaakctwgcgcymatcctgatwtgatagcggcacaktaakaacacagatcctcctgaatcgcgctagagcgaaattaatggcctcatcgcgcgaaagcagacccccarcattgtwayccycacaagtcaccgtctaaatatgctcagaaaagcaagtcaagtccaaacacagaaccaaatyytaagchcaaactaaaacccakgtatagaacakcgtaacagccgcccyta

SEQ ID NO: 300662 - DNA, 964 bp, Homo Sapiens
tctttttcagaactgatgtctaccattggtaccaattgtgacaatagataccttgctccaagttggggcacacccttgtctctctttcccttatgttaatttatttttctgttctctatagccttctccatcagtcatcttgggaaaactttataagtgaatgactaaaaatacaagtttcaaaggcagattctcagaattcttgatacatgacagagttttcattgatctaaatagaaataaagacaatttgctgaaaatttcaagttgtttcaaaaaattaaacttagttatatcttttactctttattcaagtgtcctttcatgaaattataatgatagtagttggaagttttgtttatgtttggttttaatactctcacatggcaaaacaaaatgttggcaaccattattactcaaaatttttagaaatttttattgaactttgaaattatttaagtgaaattcctttggaaaattttgcacatagtgacctactaaccactggagcaaaagtatgtaaatctacttgcttaatttgttctttaggaaagaccacacacataatttaaatgaracatgattgtcttttattatactccaaatgtgggtcatatgtaatgcagcaaagtagaacttgactaggtcatccttatgtggcatggtggctataattctcttattggtcacatgaagggatgtggcttgcaggaattttaaccttataaagrcaaccctagaaggagctaaatcattgggggtttagtttcatattccggttatgttgtaatcattttctttttcttgttttactaggctttcttcatttctttgtctgggtttttaatttcactgataggtttataagctttactactatatggggggtgggtaagagtttcctattaaaaagcaggcaggcaataatacaacttaaatggtttttccagccatttaataaaag

SEQ ID NO: 300663 - DNA, 972 bp, Homo Sapiens
  misc_feature (173)..(203): n is a, c, g, or t
  misc_feature (213)..(213): n is a, c, g, or t
  misc_feature (221)..(221): n is a, c, g, or t
  misc_feature (295)..(295): n is a, c, g, or t
  misc_feature (478)..(478): n is a, c, g, or t
  misc_feature (500)..(500): n is a, c, g, or t
  misc_feature (888)..(888): n is a, c, g, or t
agtatataatttyatttatattatyaayaatgataggcatraaatgcatttaaaatgtaatgtaawaagcmawaaggcaagcattacgttgcaagcaacaaagtttttacccatcataggcaaaagcaaggttatcataayagataagcagattgcaagcacattcatawtcnnnnnnnnnnnnnnnnnnnnnnnnnnnnnnngcatttaagnttgcatcnttttgattgccattgagagcattgatgtttaacaaagcatcaaacaaagatgacaagatttgatttcattgaantttgatcatcatccattcatcaagaaaagatgttgcaaaaaatcatgcaatggaaagggtgaaatgttttcaagcaattaactctttgggaacgwatgtatataatcgacttccaagaagctgaaaaagcaatggtcgcctgttacaaccaaaggagttctgtgcaagcaatattgggtgacntctgttacmttaacatggacgnttttctcaatgcaaacamaacaaaaacatgggttcaaggaccamcgtgaaaagaaaaggtyttcatgcacaggggcaattcatttattgccttmaggartgtttwacaaacaatttgcmtgcccaccttttcccwaggttttcwttgagacctcctacaaagaagttggagttgacacattgggggtacstttccttgggtgttacgaacataatagcgcaattcctggaaatttgtactcatccaagcgtgctcaaaaaagctcacaaatttttgttttgatttaaaattcttgagagctcttcccacaaagagtgtttaaaattcattcgaaacacttttgggcaatagcattttawtgagggattctgcagacggcacagcmacnttcttctagaagtgggtttcaatattgtttttggcaaagtatyaacaascassaccgamaaaaataatcaaggatrccttcttt

SEQ ID NO: 300664 - DNA, 387 bp, Homo Sapiens
  misc_feature (49)..(106): n is a, c, g, or t
atttacttctttagccctttacggaaagttctgctgatccttgctctannnnnnnnnnnnnnnnnnnnnnnnnnnnnnnnnnnnnnnnnnnnnnnnnnnnnnnnnncacgtattttttaacaatcaggaaccaaattaaatttaaaaatgagaaaatgtatggagaaactgagctagctataaaatctagtattaaatgtcacatgttgacccaggtttttaaaactctatgcccttaaataatcaaattctaaaggcacaataggctttgttttaaaactcaggcttgaatccttcattggagtgagtagagcgatcatgagcaccccgtgcagtcgaaaattgaggcatcctgtacagccccacccgcctcatgccctatattct

SEQ ID NO: 300665 - DNA, 749 bp, Homo Sapiens
  misc_feature (81)..(81): n is a, c, g, or t
  misc_feature (162)..(162): n is a, c, g, or t
  misc_feature (725)..(725): n is a, c, g, or t
ccgccatcttgttgttgatccgtacccagtgggcagcgccgggagctggaccaagcggccggtgagaggccgctgtagcgntgctcaagccaacctgtgctgcctgccaagggggcgggccgaaaactggaggcccggggggcccagctcccgtagcgcagntgggcgctcggtgcccgggccgggcargacaraataataagctgaataaaatctgaccattggctttcacctggccargaccttctatagtagctctccttttgtggcccatgtgctgcawcctctgccctcaatgtgcaactggcccccaaacgcaatgtgtgtttgtcaaaccatggaagtggggcagtatggcaaaaatgcaagtcgggctggaaaccggggagtcctcctggaagcccttmatcmacaaagwaggcgramaaarcagcatgatgcgtwaaaacgatmamactgtgtgmaagcccctmatctcccggraaaagcgctttaacgagtccctccctcccgaaatgaaggagtwcacccctraawaaaaaggcgtggwatctgtctgttttgagggggacagtratggttacctmascwwarwggccwawccwwatgtaaaaaawaaaactgtggaacaagataaaaaaacaraacgggagmaaccwcggcgcaaactctcccgccggagcmtrctccgracarraagtrrmaawaaccaccggggggaaagngmmagcctgtcccttgagacctct

SEQ ID NO: 300666 - DNA, 609 bp, Homo Sapiens
  misc_feature (313)..(313): n is a, c, g, or t
  misc_feature (363)..(363): n is a, c, g, or t
  misc_feature (365)..(365): n is a, c, g, or t
  misc_feature (536)..(568): n is a, c, g, or t
ggctttgtgtggcaaatgctcattttaaaatacaaataacaacctcagcctccactcctcttcttgttttagactttatgcacagcttcaaaggtcaaaacccaaattcaattcccaacactgtgtactaggtcctgcaagctgtgctctgccctgcccaggtctgccccagggccagctttcctggtactcatgaaccacctcccgctacccaggcggcccctacaggcacggttaattttcccattacaagttgtcagagtcccatggactctgataaggtggctgtggatgggactatagtaagatagtnaggaggtcaatgtcagttcacatgtgtttgtatcattagtgacatgtgtntntggtacatggtgaatatacagaacatttgctatgaatgaaacacccagctgccagcgtgaggctgaggctttaggcgcaggcgcttccaaagcttttaactgtkccagcggacaccccttggcaatcttgcagaaagattgaatggaccccctggttatgaaacattgccnnnnnnnnnnnnnnnnnnnnnnnnnnnnnnnnnsssssssssssmccattstttttsaatscattacssttacm

SEQ ID NO: 300667 - DNA, 419 bp, Homo Sapiens
acttvhgarggarcmtcaccccamcatttccacagtaacccagaggaaactaactcctaacaaccacaagmgctatggcccmsgctagtsgctttgataaacactccaactkgggctgacaatggtcacasgaraaaacaggtcttcatatttttatcttacagactgggaaagaaactcagagargtaaagcaactaattccaaattatatttaattccaaattatatgtaaatrgcaaatgaactatacaatacaggtttgtcttactacaaagcatgtgctctttccacgcagccacagcgcctctcacttggacagtggatacagctgtttcaactcttcctaaccacactcaggaatacccgggccaggggscaggggtccwtccctcccatcactcaaatgctmcttcctgtg

SEQ ID NO: 300668 - DNA, 510 bp, Homo Sapiens
  misc_feature (227)..(228): n is a, c, g, or t
  misc_feature (267)..(267): n is a, c, g, or t
  misc_feature (275)..(275): n is a, c, g, or t
  misc_feature (365)..(365): n is a, c, g, or t
  misc_feature (405)..(405): n is a, c, g, or t
  misc_feature (407)..(407): n is a, c, g, or t
  misc_feature (416)..(417): n is a, c, g, or t
  misc_feature (426)..(426): n is a, c, g, or t
  misc_feature (432)..(432): n is a, c, g, or t
  misc_feature (434)..(434): n is a, c, g, or t
  misc_feature (437)..(437): n is a, c, g, or t
accgcagtgttctaakaacggaagcatctgggctggatggaatttwgcatcaagcagagtcccctttctgttcmgagtkttgttaagtgcctaaagttgtagccggcccccgatatcctcggccgttcccmcsgcgaagactccgagctgcgaggtgaaccgcgagttttctttkttcctcmgccaagcccagctctccmgttgcctgcwggggggggtyttkccgnngttttacggccccgccgccctgcccttttttcccgccgnccagctgntagttctttcttcccgggtgttttatggggaacccggcgcacccgatgccaaactgcgttttttgttcccgggaatgttaggggttgggncccccccttaccctacccctatcaakkktggctctcccgntnttttgctgnntttyccccngkcctncntgngtggggggcctctctttgaatattaaatttgtggtgaaagtgatgatgatgtgtataagtaagaagaaaatgg

SEQ ID NO: 300669 - DNA, 839 bp, Homo Sapiens
tccggaattcccgggataaaataagtatacaacataaaccacattgtttgtataaacagtgtaggcagagtaagctgcccttatcatttgaggaaagtttcttatcaatgtagggaactgtttaccagctaaattcccaaatgccagccaagggccacccttgtaaggcggcctttctaccctctggtaactcttgtctgcacagctgatttttgcaggattaagttgaactatatgaatgccatttttataggtcagaattggtctggtatcagtaattctgtattgttcaacttaatagtaagagaagaaggagtgaattacaatttgttgagcgctgctgtgccaggtaaatgttttacatgtgttactgcattatttttatactgtgagtccaatgttaacttcttctcaaagatgtgaaaacaaagtttcagaagggttaactaacttccctgaagtcacggattgtaagttatcagaactagggtgatattcctggtctattttagatccatgtcttgctttttctcactaaaccagtgctgttagctattggctgaatttatgactacctgtgcttttcaaatacttctgcaaaaacaaaatatataaaacagataaaaggaaaacaactctggttgamatggaagtgaagggcttagaacacttttaacccttctcctaccataaacattcccaaggattctaagagctagcacaagacaataactgctcttaggaaaaagaaatggaaataccgtttgtttcagcagctatggtagacaattgtgtgaaatccttttttttggggggtggatagggactcaaaaaaggac

SEQ ID NO: 300670 - DNA, 666 bp, Homo Sapiens
  misc_feature (82)..(82): n is a, c, g, or t
  misc_feature (88)..(90): n is a, c, g, or t
  misc_feature (95)..(97): n is a, c, g, or t
  misc_feature (111)..(111): n is a, c, g, or t
  misc_feature (113)..(114): n is a, c, g, or t
  misc_feature (124)..(124): n is a, c, g, or t
  misc_feature (130)..(132): n is a, c, g, or t
  misc_feature (136)..(138): n is a, c, g, or t
  misc_feature (142)..(143): n is a, c, g, or t
  misc_feature (169)..(170): n is a, c, g, or t
  misc_feature (172)..(173): n is a, c, g, or t
  misc_feature (176)..(178): n is a, c, g, or t
  misc_feature (517)..(517): n is a, c, g, or t
gccacccccaaggtaagcattgagccaattgatgtccacgtggtagtcacgccaggaaactaatgccaactgaagccaagcnccacannntccannnaaytttcttttccncnnaagaaaaagncaatannntcannnacgnnccacagggcctacaaaggaaacccgnnanngtnnncccccccaacttccaatacacaaatggacattttctttcctctttgatactgacattaaataacatttccaggtttacttkttggtagatagtcccaacatwtgaaarctaattttkgggagggckggadtggacgtggtacatatgttdcagtwaagccwattttgtactttgcactaaacttgaataagtktttawtwccttgctacaaaagtktggcckcactaarataaraagacggrcktgtgttgtgkraacsrcarctctaadagkgaaaakaaacttgcacacaaaaacgctgacacckmctgagaaaggracgtgtgtckttacgccgantgtggraacgtacaagawgwgtgckacaccacacctgwgacatgtatmacgatraataaagartacbrcatgtarcgcgtggaaawgwgcaaaaaagwaacmaccakksacgctgtaccctgwaacacgamtgtgcgactgtggctraa

SEQ ID NO: 300671 - DNA, 854 bp, Homo Sapiens
  misc_feature (471)..(471): n is a, c, g, or t
  misc_feature (481)..(481): n is a, c, g, or t
  misc_feature (673)..(712): n is a, c, g, or t
tgtctcttgcgtgcgtgggccggagttagtgtgcggggcccgccgggcggttgawaagtccgagagaatcaggatggaggccgtggcgacggcgacggcggcgaaggaacccgataagggctgcatagagcctggacctgggcactggggttatctgagccggacaccagtcccatctaaaccccaggacaaagtggaagcagcttatgcaacaccagttgccctttacagttacacctccggggcttaaaattcagcagttatttctattctgcacgctgtagccgccagccgccttccttttttcwgccagcagcaggggttaaccctactttacatatcattatatatttgccatcctggcccagctttwccactataagcyaatkgtgttcctttagctctttcgcacaggcctccgttagaagcatcttgcctgctttttccactttctttcggaccaccgttcanacttctactnttcttaggtggcccggcagggacctgcccgggccccgcaccctgsgtacccscctgsgtaaccggsgctatgctgccctgcsaaacctgatccaagggggssartacttcagtkatgagcaratgcggttccgggcccccctgctatatkarcartacatsgggcaatatctcacccaggaggasctcagtnnnnnnnnnnnnnnnnnnnnnnnnnnnnnnnnnnnnnnnngggagacrtccttscccsctctccaamttsgtsctcrasycmtacgaggagggggacgtamamsamgcstctscyccaacamcaggaggaggargavscctcctttgargaaaaagaaaaagargargacartbacgargaa

SEQ ID NO: 300672 - DNA, 472 bp, Homo Sapiens
  misc_feature (266)..(317): n is a, c, g, or t
  misc_feature (322)..(322): n is a, c, g, or t
  misc_feature (355)..(401): n is a, c, g, or t
cacctagataggttgaacactccttggcctcaacactctgcttaatgtaagaagtactccttcccttagcacaatgtaacctagtggaatgcattcttcctcagggctgctagaggctggagcacacacatggctttctacaaaatttaggaaagtgagcaacgatggaaccctaattggagaaaatatgtaatcactcatcaagtcctcttggtactatctgagtagagagaaagcacatgggctttggcatctagcagacattnnnnnnnnnnnnnnnnnnnnnnnnnnnnnnnnnnnnnnnnnnnnnnnnnnnngcctnccagatgttcaatttcttaagggacacatcacnnnnnnnnnnnnnnnnnnnnnnnnnnnnnnnnnnnnnnnnnnnnnnnataggtgtataaagtacctatcttagagcctgggggcgcagatagaaattccactaatcatgttatcctct

SEQ ID NO: 300673 - DNA, 1201 bp, Homo Sapiens
  misc_feature (39)..(39): n is a, c, g, or t
  misc_feature (41)..(95): n is a, c, g, or t
  misc_feature (170)..(216): n is a, c, g, or t
  misc_feature (397)..(409): n is a, c, g, or t
  misc_feature (426)..(478): n is a, c, g, or t
mmtcaattatacaaaactttctacaaaaaaccaccttcncnnnnnnnnnnnnnnnnnnnnnnnnnnnnnnnnnnnnnnnnnnnnnnnnnnnnnnnaattaactttcttccccactaccctccccattccacctcctcaccacccattctccaaaccattccctacctcannnnnnnnnnnnnnnnnnnnnnnnnnnnnnnnnnnnnnnnnnnnnnnacaacaccatcctcaccaccaacatcccctctacaccctccaccccatctttcamatcctccccactcgatctcaaamamacacatctccccctcctttctttccgtctttcttcatctcattcatcaccaccaccctccactcgatcccaaatccacctcacttcttattcccactccannnnnnnnnnnnntctcatcaaactaactnnnnnnnnnnnnnnnnnnnnnnnnnnnnnnnnnnnnnnnnnnnnnnnnnnnnngtacctcacccgtcgaacaccacaccccctctctcccctcatcttctacacaactatctccaccacacatcaattccctatctcamccccacacccctcactcatccacaaccaacccctcsssacccstctaaaacactccctcscsactatcctctcctctcttccccsacttcccctcctsacatctctaccaacccccsacccgcacccacaccsacacttcccacccacccaaaacccgccaactcactcacacgacatcssaaccacaaccacacatctcacatcacactcccccttccccctcaatactccsaccatcacactcctctccaccccaatctcttctctaacaaccaccacccrcttcacccccactttcacccctttaaccaccccaacacsatcctcaactccccccacctcccctcgatcatctctcaaatcaacttctctcacctcacstaccctccatccattctcccctcactacatcaatccctctttattacaccamttaaacctctyttyatyamacactccgkcaacmamcttctccccatcaacccathaacctcctcctaatctamacamcaccatatcactycccccmmacaaatctcaccamttyatctcmamtktccctcactattyctkttttaatttcccatytycrtaccrctytcmcctaaatctttcccttttcttacstycaaaawa

SEQ ID NO: 300674 - DNA, 859 bp, Homo Sapiens
  misc_feature (41)..(42): n is a, c, g, or t
  misc_feature (52)..(52): n is a, c, g, or t
  misc_feature (54)..(54): n is a, c, g, or t
  misc_feature (61)..(61): n is a, c, g, or t
  misc_feature (86)..(86): n is a, c, g, or t
  misc_feature (96)..(97): n is a, c, g, or t
  misc_feature (106)..(107): n is a, c, g, or t
  misc_feature (115)..(115): n is a, c, g, or t
  misc_feature (145)..(145): n is a, c, g, or t
  misc_feature (155)..(155): n is a, c, g, or t
  misc_feature (222)..(222): n is a, c, g, or t
  misc_feature (232)..(232): n is a, c, g, or t
  misc_feature (244)..(244): n is a, c, g, or t
  misc_feature (265)..(265): n is a, c, g, or t
  misc_feature (269)..(269): n is a, c, g, or t
  misc_feature (274)..(274): n is a, c, g, or t
  misc_feature (283)..(283): n is a, c, g, or t
  misc_feature (291)..(291): n is a, c, g, or t
  misc_feature (304)..(304): n is a, c, g, or t
  misc_feature (346)..(346): n is a, c, g, or t
  misc_feature (367)..(367): n is a, c, g, or t
  misc_feature (385)..(385): n is a, c, g, or t
  misc_feature (406)..(406): n is a, c, g, or t
  misc_feature (655)..(655): n is a, c, g, or t
aggggcacagagaacacccccagcaggaacagggggaggannccaccagccncnccaccangaaggagacagaccgggaggccgangcgacacagnngcaaagggnngcagggangcaccagcgcccggaccagcaggacaaggnggagcagaancgcaggagagaagcgcggaagaaggccgccggggaggccagagggaaggccgccaaccagccacagncggacggggngcgcacaggccncagccagcaccacaacgcccngaangacgncaaagacanccagcagncgcgggcagacgncagcaaggaccggaggcagagcaccaacaccagggagagccncaaggacgtcaaagacgccgnggtgcagcacagccagcncgccgcagccgcggagaaccncaagaacaaccccgcagggccggagagggggagggagacccaggaccaaaaagaacaaggggcacacctgcaagcccaccggaagcygatggaccwggaatgcscccgggacgggchgaagkacgagcagtaccgcatggacagtgggaacacgcgtkacawgtcccycatccawggcsacrktggcagcacgcaggggcyccctgaagagccggccaagcagcygtggawggtgccgcagaggtcacngggcacagtccgccgtgaccccacctggctggtcwcagttgtcaggadcattgwaagggaagagwaaawwgacaggcgcatactckaccggkaaaagcaaacaggccttgtgccccctgggaggcchagaaatggaargagaaaaggtcacawctaggagagghcgggacamcagaatgwgggsmmmagcagaaacatatagtc

SEQ ID NO: 300675 - DNA, 560 bp, Homo Sapiens
ggaacgttgtgtgtggcagcaaggagcccgcagaggtatgaggggaggggctgctcggcctgctccttgggtaggagaggaggagggagctgcctccctggctgaggggtctgggatttattcaggaggcctgtcactccccagcctcttctgggacttgaaaaactggagcctgttcttggcaagaagattctaatgcccaggtcggagtcggggccctggccaagggctcttgtgtgggatgggggtggggccggggggaccaaaggatcctccagaagggttggccccaagatgggggtgggctggaggtagctgagacctgctctgacttatcctcctgagaccaacacctgcccttcccagagccagcctggagcagaggcctgtgatgctcctaagtgcagaggtggctctggccagagtcattcactgggctctgctgctgggtcaaaaggcagctctctggctgccttgccacccctggtgagacctcagggcctcacaggtatgtccagccttgtgggcaagacctgaccagcctgagaaagacgggttgg

SEQ ID NO: 300676 - DNA, 1123 bp, Homo Sapiens
  misc_feature (327)..(327): n is a, c, g, or t
  misc_feature (455)..(455): n is a, c, g, or t
  misc_feature (696)..(696): n is a, c, g, or t
  misc_feature (816)..(816): n is a, c, g, or t
  misc_feature (991)..(991): n is a, c, g, or t
ccctagacatacaggctgacctataacctcaccttmmtgcaaaaaggcgcmcctcaamgmacgmtaaamctagctgctgagcctcgggctggaccacgctgctaaggcctagggtgmccggcgcctccamcgcmamatctgccgcctctacgamtacacaaagccaaamactaactgtrgggtgtgcctgrgactgctrrcccatcgcacaaagcmtcccccagctgctgggmcrtgccctggccatcagcctttkccagtdgcgatgaycatgagcaagctgtkgccctcaatcaaacccaggacttcctgaacacaacctcaggnaggcctatgmaggttctaggcacaaccagctcaacctatctggctaamacagctagctaggtcgatctaacatgacgagggaggdagcragcgggccagcaccwccgggcctggccaggagcccaggntggcaagaacggatagctgtgtggcgccatgagagcgagctctgctwtcagtcgctagcthgctkgcacttgtgggtgtgcmgctaggrctacgggaactrgtctgrgarcmaaacctatwgtkctgcccctggamtgrrrgmagaaamtgctwgtgtsgtbctgcggtsggggccgtgcacgcgaccactggctdtggaammtgctggctcaaaaawgaacaaraggwtttktkccmatncccccaraarggcctdcccaatrgtgsgaaaaammcaaaarctcragaccmcctgtgctsctkcgggcccamcccccmartkcgcccsagvagtgtgcsgggsysccsctgctttggwwnsctgggccctgccaagrgragggrwrmtggrggartkctggtgctkccaaarccscaactgaaacmctggcawvctgccsgaagggcctttggsamcccccargggcggmaagccctkgsgcargccaraaatgbggccaaraactkgggcctkccctsgcccccaaaagctgcnaacmaamaargcccctggggggarccccccgcagcaaagggcmaargcmaagtttttkgggggrwaggggaagcttytkgggarmarggggccmmctdgggggsmcccctgggkttbgsaamcctccttttt

SEQ ID NO: 300677 - DNA, 846 bp, Homo Sapiens
  misc_feature (50)..(109): n is a, c, g, or t
aggcccgagcccggcccagcctcgtcccgcccggtgcccgcctggctgcnnnnnnnnnnnnnnnnnnnnnnnnnnnnnnnnnnnnnnnnnnnnnnnnnnnnnnnnnnnnccsctccccgcctcccgacggaccsgcgcycccgcgccsccaccscaggcccssccatgaccsacttcmaattgggtatcgtccsgctcggccgggtggccgggmaggtgagcggcgcgcmcccgcsacccggcccgtctcgcccgtccaggcctccscccsgggccgggggcsgttgtbcsgsccgcggccggggcgggggcscsgacccgggatgggccccacccggccggggacgctgcgcggscccggctgctggccccgcgcgggtgcmgcttcctctcgccggccggcgggcacgcacccctcggctctcgggtccacctcgccaccctccgccctgccctgccggacgtcgagcccacggccctctccccagccgggtgcggagatgcgtggctcgagcccgagccgcgttctcccggagccctcccagtggtgtcggcgatccggggcctagcgcggcgtccgggctgccagtgcggccacacggtttaaacacagcgccctttccgaggcagcgccacttccacacctctcgccgaggcgggtctggtgtgggctcttctgtgcctcccagttctcagcagggcttcaggctcgttttaacgctgccaggggttggccacgttaggctgagcctcagactcggagcagagaggaagaagcctgggccctgatgctgcagactcagggcytyctcgacttctcttcttacttggccccacgckccacgt

SEQ ID NO: 300678 - DNA, 645 bp, Homo Sapiens
  misc_feature (599)..(599): n is a, c, g, or t
gctcctccaacctcccaccctaaaacatgcaacctttccttacccctatctgtagttaaccccgctgttagggatatttccacaccctcagttgcaaaacaccacacccctgtccacattacccttaaagaccccacactattgaagccaatctgctcctcccaggcaccacctcccaaaaagctgaactcatcaccctcactcgagctctcactctagcagccggacaacagttctctaatttaggaggatttaaaaccctggtagggacagtaatcttcatcactttttctcccctgtgttatcccactaataataaaagccactaaaactcttattgaaactacagttagccaccagacaattcagactatgctcctgctacaacgacacgatggataccaacacatctctcaagaataccctaaaaattaagtttttctttttccaaggagcccacaccacccctaagtcacgcctgaagtagttattgagaaagtcaccccttttccctttttactataaccaaatagacaggaatgaaagattctccccggggtctgaaagcttgaagagatgagtaactcctcccttctcangcccagtcccaaggtgcaagggcagttgcgccagcagtgtgcatca

SEQ ID NO: 300679 - DNA, 328 bp, Homo Sapiens
gtgtagacccaagtttcacttacaaaactgttcttagtggtctttggcatggggcagacaaaagcacaggacaactaagtccttctggaaaccctaaccctcaattccaagacatgtgtatatgtagttccatggtaaaacctgcagttacgtaccagtgagtctccaatagacaatgcctagcatcaagtggcactaagaaagtggtaaaaatctggaaaatcatataaagggagaaactttggcccatttacagttttcccaaatgttaaattagatatatgcaaaagttgaaaacaaaattttcccctcaaatataaggttacag

SEQ ID NO: 300680 - DNA, 657 bp, Homo Sapiens
ggcaatgacacagaaacgaccaggacagatgaaaaaaatccagggaaaagctatttaggggataatattgagactattaagactttcataatgtttttctctgaacacagacatttttagcattattagcaatgcaaggccatcctgggaaaggctaccaccaatattctgtgaggcccatggttgcttatgttagagcattgcgcccagcctaaccaggcctccacgcctgccccatccagtgcctcatgctaatgaagcagcaatgccaaaaatccagtattattcaatttactccatatcatcacgcttttatggcctatacaagtaatctaaaaatctgtgatagaatctggttcttgatatctgagtccccttccaaagccactgtcataaatttagccaggaatgagtcaagctgttcattaggtacaagtgcaagttgacatccaaattatcagggaccctctcttaacaccattttggttggatacagctttaaattagctgtaactgtaacttggcaaagattttcaataataacaaagggtaaaaattgccatcatattttgccatttaatcagcacatgttccaaggagccaaggaataaaatcaaagacaaaagggcaaggtgtcgtcttgccttatctttttta

SEQ ID NO: 300681 - DNA, 299 bp, Homo Sapiens
gttacgggaagacacatcggtgcagtggttgcccacctggcttcaactagaatctccacaggggcttaaaagctgtttctgatgaaaatgtaaacaaaatttgagaaatgatgcagtgaactattttgacctatcattctaacataccaatccaaccacattgcaccctctttagaactctcagataatttttcatcaatgatagaagaaattccacactccaggtgtgctgtgaggggcttccccgacctaactcccatccctattcaggctgtttagcatcctgagtgtgtgcatgt

SEQ ID NO: 300682 - DNA, 381 bp, Homo Sapiens
cccattggtattgcccatccacagcagtcgtagcccatcacgagtggataaagtaggtggttagctggacttgcacatgactgtttcgtgaacagtagtgcttagagttgtgatctagggacccagcgaacagtgtgtgagggacttcaaccctgcctctctccggtatgtgctgtgcctgctgtgccccccactccagtgttctccttggggctcctgaggcagctcccagtaggaggcctatcgttgttggcaccccaagggtgtccctgatccctaagtagaaacttaagcaggtatttggacaaataaatgagtgaaacaccttgtgacgttgaggcctgtggcacttccccaatagtgtgttagtgtaaaaccacc

SEQ ID NO: 300683 - DNA, 459 bp, Homo Sapiens
aagacccacaagtgacttctgtctacactacagatgaactgaattgatcatctaaaatacgtttatagcgttcattgtgccagttgctcatggttctgctagttggcccaggactagttgtgatctgcagactgaagccagagtaagtaagagaattcaaggcactaagacaaccaggaacagttttaccaaggcaagtggaagctgctaggctcagtggttgcatgcctatagatggggtaaatcatcctggtgcaaatatggtattcacaccataaatgtgtagtgcaagtttcctctgtggccaatcacagggctgcaagctgaagccccagtttagcttattctccatacataacttcaaggggactttctggtgaacttttccaagaagctccaagcacagatggttcaaatttgcagtttggctagactttgtgactggatgtacattaaatt

SEQ ID NO: 300684 - DNA, 450 bp, Homo Sapiens
cttccatcacaaattcaattccactcaattatgtctacatatccccattccttctactgtgtttctatgctgtgaactataagggagcagatttccaggagttccctgcatacatctaattattctccttcctacttctctcctggtctctcatattctgtttacttcataagtttgatgtgaaaggagattcagaaaatgcctctgctatatttaatgccaaccaaatagtacaactgaaaagaaaatggctgtgattagactgtagacaaactgaatgaaacaaacatcaaacttagggatatgtataaaacagccactccttgtacatttcagtatttctgttttctacactccaaaaaaaggcattgaaatagcctttaatcctaatagaactaatataatttttacggttgacttttctttggcactttcacatatcctcaagtc

SEQ ID NO: 300685 - DNA, 524 bp, Homo Sapiens
  misc_feature (99)..(99): n is a, c, g, or t
  misc_feature (455)..(455): n is a, c, g, or t
caacaaggccagagggcagagaaaccagttaggagactccagtgataatctaggcagagaagatggtttgaatggaaaaaaatgaaaagaattaagtcnctttcatcactatcattcctagttcttattttgttcttatgcttgtctgtaagaaaaaatccgtttgaaaaacctgttagactatacttggtgtgaaaggctttcctgactttattctagacaagattactcatttttggtttcaacctttctaaacttccagaaatattaataagggaagaaaaaatattacatccctgactctgcttctcagaattttactctgtgagctctcttcctcctactcaatcacaaaattattgctttacttaataataaaacaaacaactgcctcttctcccaggattccttatttattttcccgtttattctctaagaaaagaaaaataaaagantgctattccctgtcccctcgtcatcattctgttacatgttattctggccagtctattagttcttccaca

SEQ ID NO: 300686 - DNA, 604 bp, Homo Sapiens
  misc_feature (134)..(134): n is a, c, g, or t
  misc_feature (268)..(268): n is a, c, g, or t
  misc_feature (272)..(272): n is a, c, g, or t
  misc_feature (382)..(382): n is a, c, g, or t
  misc_feature (399)..(399): n is a, c, g, or t
  misc_feature (530)..(530): n is a, c, g, or t
  misc_feature (537)..(537): n is a, c, g, or t
  misc_feature (542)..(542): n is a, c, g, or t
  misc_feature (557)..(557): n is a, c, g, or t
gaagatattttatttaaaggatttagaagtacggtccctctgaatgataaagtccaggatgtggcagtgggctgcagtggcagaagaattttagtggtgctgactacactggagctgaggaggttgcctgaccntcactgtgatctgtgatatcacccacagtaattgaagtacctgggatggagaagacatgaacccagttctaaagccttaactgaagaggggattgtcagaactgaagaatacaaactggtgtcattagatggcntganattcaaaggaatggggtttttgtttttattaagggtggagaagtgattggaaaagtcactgtgagcaagtagcaagtgcttacttctcatcctaactctgaggaaatganatatgggagaaggaacngcttccagggaacctgaaatgtggtttgagcgtatcattctgtggtctgaagaggctgtgacttttctatgtggttagcaactggcagacactaaacttcaaaccaagtctccaaacttggttcaaaccanctctatncctanggcactttaccctancagcagaattacagaaggtacagggattttttaaaaatcacaaattc

SEQ ID NO: 300687 - DNA, 409 bp, Homo Sapiens
atatgtattttttaagttacttaaactctttttgaaacaaaacgagagagggcagtcctaatgctgaggttgtccccactctcctgtcctccatattctgagaggaatgaatcacattggactttcacagttttcatttgtcaccacaggtgtataaggtgtctgtgtcctgggctaatgaattctgattgtgcaaattagcttcttaagcaatagtccctaaatacttggtgatttctaattgccttactaaataccatataattctctcaaaatgttcttttaggaacaccagggggcatatttttcaagacggaggtgctataaaatcaacaaatttgacaagctattcaaattctaaaatggcctggaatatttaactcaaaatattaaaagttcctgtaataac

SEQ ID NO: 300688 - DNA, 560 bp, Homo Sapiens
  misc_feature (104)..(170): n is a, c, g, or t
  misc_feature (212)..(277): n is a, c, g, or t
gtggcagtgacatgattcaagaccatctgcttccaaagatcatgctggactttaaagggagtggtaaagagcacagggtgtatgtacatcagatgtttaaatgnnnnnnnnnnnnnnnnnnnnnnnnnnnnnnnnnnnnnnnnnnnnnnnnnnnnnnnnnnnnnnnnnnngaaaaatacaatatctgctttactggatagctgtgagaatannnnnnnnnnnnnnnnnnnnnnnnnnnnnnnnnnnnnnnnnnnnnnnnnnnnnnnnnnnnnnnnnnattgtcattattataatagtcatgacatcattcaaacttttggctaaataaaaatcatactagatgtttcttgtacataatcaaacattccctatatacattccttttatctgttaagatttagtgacaaattttatgttcttggatatagtttattaactgctaaaacaaagcacaacagaagaatatattctgtgaatatattttcccagatacaacatttctggaaggacagacggagtggttttctctggcccagttgggcaatggcatgttctgattg

SEQ ID NO: 300689 - DNA, 153 bp, Homo Sapiens
ctggcaagcgcaggctgctacagtatgagatgtaatctgccaaataccacagaatgcaagattttacggattttgaaagaagcaagtgatgattctgtggccacatcaggagagcatgttttctgcatcaataaatctgtgccgaatatgaat

SEQ ID NO: 300690 - DNA, 214 bp, Homo Sapiens
  misc_feature (164)..(164): n is a, c, g, or t
ctgaagtggtcacaggctcaggaaacacaatactcagttggcttagaattcttggaaggtctctaaagaaggacaggcacaaacaaaggaagactgtgaagagtaaaataaatacttaatccctcaatgcacagacggcctgcaatttcacaagcatcaagaanattctgggtaatatgatctcaacaaatggacatgaggcaccagaagccaa

SEQ ID NO: 300691 - DNA, 612 bp, Homo Sapiens
gtaatgtgtcagttgaaagccatctttctaggttcagctcatgtaagcctctctgaatgtcacaagtgtatattgttctatatttatcttaaaactgctaagaagttaggggaaatggaaatgcctgcacagatagtcaaaatagaaatggacacggaccaaaaatgctggtggctttacaagggatgctttctcaaaaatttaaaacgtggggagggaagaacatggttaggaaaacagatgactgtctattccacatcactctgcggcctttaaaataggcttttaaaatttttccagccttgggaacttggataaaaaggggcagataaagcagaaacaactctcagcttgttgctgccattgctcaccactaggtggcgacagagtgcagctgcattacaaatctctgcttaagcgacttgccatttgagttacatcaccaaggggaaagggcgaaagacagtctccccagataatctatttacatcaccttataggacatttgcacctacctcagcgtcaaaattaagatgctgattttagccaaggtaggccaagtagtccatcatagtaatctttcatgcaatagcgtgcacatcgaaattacca

SEQ ID NO: 300692 - DNA, 308 bp, Homo Sapiens
  misc_feature (156)..(168): n is a, c, g, or t
  misc_feature (172)..(265): n is a, c, g, or t
gagacagggtcttgctcagtcactcaggctggagtggagtggtgcaatcacaatcacagctcactgtagcctccaactcctgggctcaagtgatcttcccacctcagcctccgaagtaactgggaccacaggcatgtaccaccacacaaagccaannnnnnnnnnnnngcannnnnnnnnnnnnnnnnnnnnnnnnnnnnnnnnnnnnnnnnnnnnnnnnnnnnnnnnnnnnnnnnnnnnnnnnnnnnnnnnnnnnnnnnnnnnngtgtgaaccaccatgactgaccctagatgtttatctttaatag

SEQ ID NO: 300693 - DNA, 510 bp, Homo Sapiens
tccttcatgaagacatttccatttcattttgaggctgcaaaactcttaaagataaggaccacacttcctatcttaatctttgcatacagaaagagagattggaaaaatggaatcaacatcttaaggttcataatttcagggacttggcagaattagaccacagtaggttaacctaagttgaactaggatgattgcaaaatacaatgtttttataaaccatgtttaatctctcatctttacctctaaaaatgcagatgattttgatttttctaaagcccctttgtgtctgttttcctattattatttcactgtttattatcctgcatcaaaaaccttataaaacaacaaattgagttttaatttgaaaagttttgttatttcatatttcctttccattttctctgatcaagtttcaaaatgaaagcaaccaaagtgagagaaaggaaaaggaaaagactgaaaacaaatggctgctaatgcagctacatggaggagacagaagaaggagaa

SEQ ID NO: 300694 - DNA, 618 bp, Homo Sapiens
gaattccacccagcctgtcgggggtccctgagccctgctgtgctgcgaccgggctaaagcttgggagcattatcaaaccacagcacaagcactggagactgctcttctacattgtgttaacatatatccatgtccaaaaggcagtgaccattgcaaggcaaaaaaaatcgggctgagcttttgcaatactgccgctatcaccactcattgctgtcactttgttgcagaaaaatatctgttctgttgataactggcctcctgagcatcattagaacagcattcctttctcactgttgatgcatttccaagagactgctgtattgacaggtggttctattttagctgctgagatcatggcttcaagttctcagaatctgaatcacagggtacatttgtttcatcacaggtggtactttttgttgactttctttggaaatccaaagccacatgggtcctggtgttcattcccttgtttgtggcttcatctgtctccatctcaccaatttttggcgggtcaggcctaaggcccacactgtgttccgtcttcctcatagctgggccgcaagattgggactccagctctccctctgggcctgactcaggcaggaagaatttcac

SEQ ID NO: 300695 - DNA, 694 bp, Homo Sapiens
  misc_feature (647)..(647): n is a, c, g, or t
ccatacagggtcattctcagaaaacttattgttcttgtttcaagttttcttattattcaagaagtagacactaaaatcaacagtgcactaagaacattaacatcatatttctactaataatgacaacttcccttcaatatatagtgataatagactctcttgactgtaaaaggaaaacattactgaagaaagtaagaatatttactaaagaacatatatattctttaaaaaattattttacattaaaattcctagtttttaatttttttagttgggcaattgagttggagtaatagttatgttctcttgggaactcaaatgttgaatgatactaggcataataatatagatggtcagatttaattatagtgcaatattgattttaagcacctgacttcttattaaatatcttttactaacttgttagatatgcaaatcatttatactagatagaaatgtttgactcaaagtttaacatacttttcaacaaatattaataatgatttaaaaatgtaagatacttaaatagccattttttcaaattattaggtaatttggtgaattaatttccataattacatctgaaataaattcacccttaaatattattttgtaaaaatccattctgggatttaatatattatgtnaaataatataaaatatgcatttggaaagatacaggaaatgttttccc

SEQ ID NO: 300696 - DNA, 381 bp, Homo Sapiens
attaggaaggtgaaagttaagaggaaatgagtatctggaaacatcagaaatgccttagttaagtacagttactcctagtaaccactaacccaggcctgtcataggcctgcttcattttagatatgatagaactctattcatgaacacactgcttgtctctgggactcctggattactctgatagtacctcgaagcaaggattttgccctcaaatttcctctctgtattggcaacgtacttcattagttggggctttatgtcccattatgacttcagttaaaaggatgcaccctgtattttgttttcttctgagtattagaaccatactgtctttagctaaaatagcaaccccttgggaaaaggcaacttctttttagtcta

SEQ ID NO: 300697 - DNA, 571 bp, Homo Sapiens
ggcaaattaaaggaatgagaaatatccaagataattagggaagtagaaagatgaacaataagaggatgcttagttttctgccttgtacaaataggcagatgacagagttattcactgtgaaagaaaaacaacaaaaaagggccaagtttgtgcatgagggaagggataataagaggagttttgggactactaagttttaggtggctaaaagacatccaaatgaagacagtgaacagaaaaatcaggtctggagcaaagcgtagaggtctggactcaaggatataaatttgagagcccacagcctaaatattaggggtctaaaacttggggcttgtgagccaaatccactcattacttttccctgatgagcgaaggatttcgaaaactgcacatgtgatagctttggccagtgatgacactggtgtatgagtaagtgggctcactgtccagttctgccacagaacgacaatatgcattttatcccattcacccatgtatgttattttcttggtcactttatctctttgctatctctgcaaggtgaagctttaaaaggagatgagatcaccgt

SEQ ID NO: 300698 - DNA, 608 bp, Homo Sapiens
  misc_feature (452)..(452): n is a, c, g, or t
cgaataagttaattgttttattgttaaaacaaaggcttttgggggtgagtatctgctctatgaaaaatcttctagagatcttggtattaaaaatgtaaaaattttatcattgccattaggaaaactggtagataggctgaataacaaaacagttgcaacttaggagaaaaacagtgagcccaaagactgaacataaggattttttaagttttatggtagcataaagagatataaagtgtatgagaaaaccagtagagatctagaagttctttctggtatctaagaagaatttcagaatttaattaagacagaatgaagggaggagtatttttaagaggtaactaacataatttttatgatcgtccatacagatttggcaatttctacttcctttaattgcagtacctggtgtgtcataagcaatttttacaagtacagtcattttttgtttncccatttcagtgttgtagcatgaaacgattttcagtgatgagcaacctaatttaagtgaacatccatttttaatgctaccacataaggaaatagagctatgattatgattaacaactatgttctatgcaagggtaaccccagacatatgcagctcc

SEQ ID NO: 300699 - DNA, 453 bp, Homo Sapiens
ctgtcagcacggggcctggcatgtaattggtctgcacccactggtgcactgaactgccataacctcaggttttctttcttgctgatacccctgggtcatgttctttggcaaataacatgattcattatgaagtagagttcagcaaaggacaaggatgaaagttgtcatttagagaactgccattcagactttcttgtctaggtaaagagcaaggtcttctctcttttcaactcattttctaaatttaaactgacgatgagaatatggatgatgtgtagcttccttctcccccactgatttttggttcaggctctgggtttttggcaagaacttacagatctcacttattattggccacccttctgctttaagacctgtcagggcttgtctgaaataaaactggaagcacttctgattccatcctcactgctttcctccttcaccgtcagacag

SEQ ID NO: 300700 - DNA, 219 bp, Homo Sapiens
aagaagaagaagaagaactaatcttgaacaatattccacctaagttctcctccatccctaggcacatataatgatacgattgtatgatcctttttagaacatgccctggtaatcactaattaggatcttgatttctacatatatgggaaaaataagccctcagataaatcctctcaataaacattagaaaatgaaggtgaagaatgaaggaaatgaatc

SEQ ID NO: 300701 - DNA, 656 bp, Homo Sapiens
cagggatacaacagagtggaggaagctggaatacagaatgcacttagaaggaggctggattggaggtgaaaactgagttgccagttcagagtttgagctggtagctgggcagaaagcaggctagttaattgaaggactttgtacagattctttacaggctaatatgatttcccaaatgattggatgcatcatatataaaggaaagcaactgagaagagaaagactgtgtagaacaggtttagggggaagaattatggactaagttttaggtacatgaagtttggaattttatctcttgagtgtattaaaaataaccaagattcaagatgagggtagccttgaaacaaaagagaggagctcaaatcattggaagagaggagtgtaactttgacataggtatgactgcagcagtgagggcagcaaagaaaagtactaggtaatttctaaccctatccatatgtgatgagtcactaatcagagttgtgtgcctaagcttctaatgcaggtcttggtgagaaatgatgactctagattgatgaagaggaagaacaaaatccagtccttattggtggaataacagaagcaaatataagaatgtctcctttgctactggctatacttccgtggttacagcttaggccaatgagatatttggc

SEQ ID NO: 300702 - DNA, 638 bp, Homo Sapiens
gtcacgcatcagggacgagggtaccgagtgagagcaaaggataggctcctgcaaactcatctcctctcctggaggcttaactgagtgactgtgggtcgctgggtgtattttaatctgtgacattccacactttgtgtactcaccagcacatacacggtattattgtttcctcagaagagtgtgtatttaaatacctgccaggaaactgtgcaggtatttcacattaagtagcatatggggctcagtgtagtcaagaagtcacagggattaggaaagagaaaatgaattgctgtcattctatatatgttatatgcttagtaaatgtcagaacagtagtcacagaacctcaggatgtttctagcatattttggcttataaatgttttgtctacataatggatatctatcagtagctttcagaattcaagtaattttaatgaaataacactaaatgttcaagtattaaaagtagtggtaacagttaacagctattgagtgtttactatgtcctcagaactatgccaagaactttatatatacttgatctcacataaaaaacaaataaggtagtaatttgtcttccttacctgtttgccttttcaactagaaacctattgttctacattcaagaaagtgaaa

SEQ ID NO: 300703 - DNA, 517 bp, Homo Sapiens
ccaagttcaattcttaagacattcctgtcttatttcttctaaaatttcacctttaaaatgatgttttcaaagtatggttgaatgtttaatgtgctcaaacactttttctgcaactagggatgaaataatataatttctttctttaaactctgaatgtgatgaatcatattaattcatgtgattagtattttagtataaaccatctcaggcatataaaatagtataaaagaataccttgtacccactacttagcttaagtgaacatccatgtaccctgtacttaagaaatagaacattacagacctgtctgaagacctcacccctgcatagtcttccctgaatgaattccccattaccattatcctaaattttgttttaacttttctcatttttttcttacaatatacattgatgcattctctagtgatagattactttgaattcccaaaataaacccaactagttcatgatagtacatgtcatattaataatcttcctatcataatgcaaaattcct

SEQ ID NO: 300704 - DNA, 659 bp, Homo Sapiens
  misc_feature (626)..(626): n is a, c, g, or t
  misc_feature (633)..(633): n is a, c, g, or t
ccagaaataactgctgtaacagtgttgtgttggtatgttctatatattgtgtcagtctccaaaatgtaagtttctatagggcagcaatcatctgataaattaatcttaaaatgttttcagctgtgactaatcaaatatttgcaccatttgggatgctgactttcaagaagcaacaaataatctaatactactttgcctttatttgtttccaaggaattggaattgtaaatgcacttagagttatcatatgatgattatctcttagtcataagtcaggatttttcgctctataacaatagcaattatactcatttaaggctgtaagcaagaatcttgggcaattcctatggcaacaaacttgagtgttagcatgagaagtgggcagtcaagttttaatttagaaagtgccaataagaacaccgcatttttccattattaatttaaatacaatcaatcttacttcacaaaatatatttatgttttagaactttctagcaggaaacttagcaatgccttcccctctgtactctacacgtatacctacatttctccttcaatcataaaaagctacctcattccaccatagctaccgtcttaattgttaatgaagttagagaaaacaccanaagccangcgcgggggttcaccctgtaatccca

SEQ ID NO: 300705 - DNA, 660 bp, Homo Sapiens
  misc_feature (644)..(644): n is a, c, g, or t
aaacaaagggagtaggctgtagagagagtggattgggtcaataaaaacattcaggcttaaaaaataaagtacaattttagtctagactaagccatcaaatgtgtctgggtatacaattaaaataattacgtttaaagaaaccctaatagttgtcttctaagatattattacaaatttaagcttatattagattctcttcttctggagatgggatggatgagaaaagtaaatttaaacacaattagagaggtgaagagcaacttcaaaaaatgctgaaattaatctttaaaagcaattgattcatcaatgcttaaagtgagataaaagttggaacccttttctttttataaatacctaaacagtttgatggcatgaggctcagccagagatttaatcttcatcttttattagatcctagaatgttctacagactgaacaggctgtaaaaagaaaggattcctccttattatctataactacctttcttcagtttacatgctgcctctaatgaaggtttctaatgagatagtcataatcgaaatccaatacagaactctcaaattactataaacaaataagaaaaaaataggaagtaagcctattaaattttttactactaaattacagatataatttgggcgaancttaaacaacctccaa

SEQ ID NO: 300706 - DNA, 359 bp, Homo Sapiens
taatgaggctcagccttattttctttcagtgaattttattttctctttggctcatattaatatactgtcaccatgagaattaacgagaccagaatgctgaaacagatttggcttcaggaggaaaagactccgaagtcaaagtcaaggtgggtttgctgtataaccttcaggcactgaagacctgagccatacagcttgtgaacgtcagacgggctttcaagccgcatagaagacatcttcacatttccaaaatgaatttctaaaatgcaaaccatacctcaacaccgaaaccttcagaattccagggtaaactctgctttaaatgttaattgcagaaaagaaatagagacccactccca

SEQ ID NO: 300707 - DNA, 566 bp, Homo Sapiens
cctgcccctcgttgatgagggcattcgaagtgacctcagcagggcatccaggtcagtttctggaagacttgtgtgtgtgatgaatgaatatctggttttgtctctgctgggcctgtgtgcctggaaaggaattgttttggcctaggatcatccaggtttgtttggtttagttcttgaccacatattttttgaatggtgactgcttaagaccctgttgtgtatggctataaatagatacacgccaaggtgaccacatactctgtggttcctgtgcccgccggccatgtgtctgagtgtgtagcctctcatcatctaaaggaactttggctgcagaggggaggcctggtcccatgggaagttttgggagcgcagcagcaggtgggttcaaacgacccagcaagtgcctccttagcacttagaggcggaggccaccacgttgtccacgtggggtttctgatcccagctccccaccagcctgctggacctcgggcaggtccctccctgtttgtacctccattacttcttcagtaagatggggacactgaagatgaccatgcctcccacca

SEQ ID NO: 300708 - DNA, 494 bp, Homo Sapiens
ggcctccagttccattcaagtagttgcaaaaggtattattttgttcttgtttatggctgagtagtattccatggtgtatatatatatttcttttatctactcatcacctggtgggcacttaggttagtgacacatctttgaaattgtgaattgtgctacagtaaacatatgcatgcaggtgtctttttgatataatgacttcttttcctttgggtagatatccagtagtgtaattgctggatcgaatggtaggtatacttttagttctctgagaaatctccatattccatacttgagaaatttttcatagagattatgctaatttacattcccacctgcagtgtataattgttcccttttcaccacattcacaccaacatatattgttttttgactttttaataatggccattctggctgggtaaggtggcagatatctcattgtggttttaatatgcatttacctgatgattagtgatgttgagcattttttc

SEQ ID NO: 300709 - DNA, 597 bp, Homo Sapiens
gcggaaaatatttattgagcttcttttgtgtgcaatgaacatattagagaaaagacttctctcatggagactattttctagttggagaggacagatgatagattaaagaagtgaagtaccaaatactacagacaacggagcggggaaggaaagcaggagtgctggggtcactgagaaagtgaacacctgaaggaagcgagggaatgaggcaggagggtatctgtgggaagtgcactgaggcaggggccatcaagtgcccaggctctcaggtcttacctggagatcacagatctccactgtgttggagatcactgtggctggagttataatggcagcgggcaggtagagacaaaggtttgagatggaaaaaagtccagatcatgtcctgtttgtagaccatcataaggacctggctttcctgagtgaggcaggaagtcatctgagggttgtgagcagacgagtcacatgacttgacttgggtttcaacaggactattttggctgctgttgaggagggacaagggcagacacaggacactatgccactacaacacatttcagagatgatgctggcttggactagaatggtgtatgttaa

SEQ ID NO: 300710 - DNA, 450 bp, Homo Sapiens
gtgaattgctcatattcacgtaatttcactttgatttttgttacgtaagattgatcgtattgttataaaaataataacactgtattgattccaggattcagtgaaactcttgaatttaataattaaaataataatgctaatagtagtaataacaatatcagagaaacattataatgataataaaacatttcaaaaaggatattacttcaagttgtccaatgacttacctgacatgttttgaagttatgcacacaaatacaaatggtggctttttgtaattcaatttaaaaaatttcttatcctattttactgagttattctgatttttacattctataaattatttctctttcagatatctatcctagaattctctaatttctaaattatataggagtcatttgcataaaattcaatatttgttagatataaaaatattcaagtctagac

SEQ ID NO: 300711 - DNA, 699 bp, Homo Sapiens
  misc_feature (601)..(601): n is a, c, g, or t
  misc_feature (611)..(611): n is a, c, g, or t
  misc_feature (646)..(646): n is a, c, g, or t
ggctttataaaactaccatgatgcccccctcagactcacctgacaatttttaactcatctggcagatgctctttgagtttaaccagattagggcagaaacatttgggtagactgggaagggacttcaggtaactctaaggactgaaaatgaatcttgctctaacactattttccataatgtagagtttggtataaggcagggttatcttgaattccatcccacatgatttggctactgatttgcacaattcttctaagaactaggttacagttaggggccggtgacttggacttggattttgtttactaccagagactgtacaagtgtgtcaggaaataaaaatctcttctgttagttgtagttgtctgatcacgtaacactgggctatttatgggacaagtcagttagccaacaatgaggtgtaggggagtgccagttatctattttagactagtgcaatgctatagaacacttgagaagtgtattatttagggcttttaggcattaaggctgggatcactgtagacccaatttgacccaagacatcaaatttcagtggttgtgagttcacaaaacacttagataaaagactctctccanaaacaatccnctttataatcaaacactggaaatcacttaactgcncaatgttttttttaatccaaataaatcctatccccaagaatttggaaaaaccc

SEQ ID NO: 300712 - DNA, 579 bp, Homo Sapiens
cttcaattccatttatttctactctgatctttgttatttatcttcctctgctgggtttaggtttggtttgttcttgtttctctagttccttgaggtatgatcttagatggtctatttgtacttcaggctttttgatgtaggcatttaatgttatgacctttcctcttaaaactgcttttgctgtatcccagaggttttggtaaattttgtcactattatcattcaattcaaagaaattttaatttccatcttgatttcattgttggcccaaagatcactcaagagcagattatttaatttctatgtatttgcatagtttttatagttccttttggagttaacttctagttttattccactgttgtgtgaaagaacacatgatataattttgattttctgaaatttattgagacttgttttcgtgacctattatatgatctatcttgaagaatgttccatgtgctgatgaaaataatgtatattctgcagttgttgggtggaaagttctgtaaatatatgttaaatccatttgttctaggatacagtgtaagcccattgtttctttgtggactttctgtc

SEQ ID NO: 300713 - DNA, 566 bp, Homo Sapiens
acataaaattgttttaattaaaatactgaagattcagtcacatttactatttgacttaaagtgaaagagtcaaatgactttgaaaactgaaatttgaccatttccatgtgaaactgtcaatgttaacaataaggtgacaagttagaagtggttgtttttaagaattttctgctctttggcatttaatatttttgaaattaagcttagaatgtctttggcgtataatgttaaacaaggattttctacaacaaactttaacagaggataagagtgtttcaagaaattgtatgcacttctgggcattcacttccttaatcaaagaatttcatacacttagaattcttattcacttaaaggtttaaaagttcaagatgtgctttacaaaaactcacaaaagaaatgttaatgagatattgctagaaattaagcagatgccaacaagaagatgtacagtacaattttcaaaatcacaacggtgctcccctcacatgggatacacctctccttccacattcaaaagaagccagtttcccatctgcacacacttggcaaggactatcatttca

SEQ ID NO: 300714 - DNA, 270 bp, Homo Sapiens
gaattccacgaaatttttcccattgcttgccagattcattctttttaggctacccttactccagtccttacctacaccctaaagaactgtatttagctagcaagagaggcattctcaggatacgtgagcttccaggcatggactaacatgtggtttcaaatcaatagtgtattctaacagaaaagcgttacttaatcttaattctccattatgtgataaaataatctatagaaataggtatcactttggccagttctgtgcatgtagctg

SEQ ID NO: 300715 - DNA, 637 bp, Homo Sapiens
gaaacactggagcagcggcgctctgttcttgtgttattttgtgctgggccccaattccccttccactcttcaaatcatctaggacagaactgatgtctgatttatgctttccccctgtagatcttggcatcattcatgtctattatttattaaatggatactgagaaaatatccatctcatttttaaaaagtaatgacatgaaagattcacatacactgtgagtcagtgaagagctcaggggagaagcagatttataaaggataaagttaatgcgtgctggagtgaggcgactgcccaataataatgtaacaaccttaggatatgtaacaggaaggaatttttatgaaattcatttccagaattcaaagaagacagtttgtagactgagtaaaaattataagcttcagtggttaacagtgtagctttctaaactggtttctgttacagtatatttacttgaagcaattgggggggtactttcttaaaacagtgttttgccttctcttaaaacactattccttctagactgtgtttttgctgctgaatttaaggtgactttcatttttctaaaaaagttacaccaaaagcacactgcaccttcttcattaaggtgaaatcatatgcctttagcttgaa

SEQ ID NO: 300716 - DNA, 667 bp, Homo Sapiens
  misc_feature (633)..(633): n is a, c, g, or t
  misc_feature (639)..(639): n is a, c, g, or t
caaaataagtgacacttgtttaattctacttaatgaatgtgaatttccaagagagtcagatgcctttcagttagagcttcacctggagccaagttttccttcaatgaaaaacattatttaaacaagaaaaactatatacagacacacatatttttctagttgagtcaaacaactatattcttctcctggaagaaaatctggcactgttagtgccacaataccctgaccaatggcaagttgctattactttccagagtagctttttttccaaataagaggagttcaatttcattctctgtaaaacaatattcaaatgtcgaccacctttgacgtctttcttggataaccatgatgtgccctaatcattattattttttaagaataaacaagaaatgtggagtctcacattttaaacaaaaattcagaattaattctcctaaggaaatttttgtgtcattgacttaaaagggttgagacagaaagctggagaaaaagatttaccccaaagagacataatcaatgatagttttaatcttcctttctcagctaagattcaatgaagatacattggctgtattgcctttacacaaaacctagaccctcgcttaaaatggagcaagctagggagtcccntaagangtcctctttaagacatgacaatttcagt

SEQ ID NO: 300717 - DNA, 213 bp, Homo Sapiens
  misc_feature (87)..(87): n is a, c, g, or t
  misc_feature (91)..(91): n is a, c, g, or t
  misc_feature (111)..(111): n is a, c, g, or t
  misc_feature (114)..(114): n is a, c, g, or t
  misc_feature (124)..(125): n is a, c, g, or t
  misc_feature (127)..(127): n is a, c, g, or t
  misc_feature (163)..(163): n is a, c, g, or t
  misc_feature (170)..(170): n is a, c, g, or t
gaaggtggtggtcttactctgtgaaaggcatcaaaatgtctggaaatttctacacaaacaacttgaaatatctgtcttgcctccacnagcngatgaacatcaaaccttcgngangcccctaccnntncctggccccccgccgcatcttctggcggaccatacnaggtatnctaccccacaaaaccaatctaggccaccccgctctggaccgtc

SEQ ID NO: 300718 - DNA, 196 bp, Homo Sapiens
ggtattctttctaaagtgcaacagtgtaataaagattatttctagatctcaaggaggatctgaatgatggctataatgaagggcctatttaggtaacttttaagtttgaggaataagagaatggggttagtccacttagggtttccgtatttcctcatgttggccactgaccaagtatgaatatagccatctttag

SEQ ID NO: 300719 - DNA, 688 bp, Homo Sapiens
  misc_feature (100)..(600): n is a, c, g, or t
  misc_feature (637)..(637): n is a, c, g, or t
ggtagtttggggtttgttatttgccctcaaattttaagtttctctagagagtctactatgtcttcaattatgttcaacttgttgcatggggaagcaatcnnnnnnnnnnnnnnnnnnnnnnnnnnnnnnnnnnnnnnnnnnnnnnnnnnnnnnnnnnnnnnnnnnnnnnnnnnnnnnnnnnnnnnnnnnnnnnnnnnnnnnnnnnnnnnnnnnnnnnnnnnnnnnnnnnnnnnnnnnnnnnnnnnnnnnnnnnnnnnnnnnnnnnnnnnnnnnnnnnnnnnnnnnnnnnnnnnnnnnnnnnnnnnnnnnnnnnnnnnnnnnnnnnnnnnnnnnnnnnnnnnnnnnnnnnnnnnnnnnnnnnnnnnnnnnnnnnnnnnnnnnnnnnnnnnnnnnnnnnnnnnnnnnnnnnnnnnnnnnnnnnnnnnnnnnnnnnnnnnnnnnnnnnnnnnnnnnnnnnnnnnnnnnnnnnnnnnnnnnnnnnnnnnnnnnnnnnnnnnnnnnnnnnnnnnnnnnnnnnnnnnnnnnnnnnnnnnnnnnnnnnnnnnnnnnnnnnnnnnnnnnnnnnnnnnnnnnnnnnnnnnnnnnnnnnnnnnnnnnnnncatgtatttatgtatctatcaatcaatctatatatantcacatgctgcataattatgttttggccaacaatgaacctaataaacaaat

SEQ ID NO: 300720 - DNA, 576 bp, Homo Sapiens
cattttctacaaaatgagaggttaatcaatgttaatttgagtttatagactgaacataactatgtttcacagattttgtttattctcctagaataagccttttgtcaagctctgtatttcagaaacactactctattatacttggcaaaacaaaacggcattcctgagagtgaaaccctagtaataaggatttacattatgaaattaagacaaaacaaatgtagctgttacggattttaaaagttaggtcactacatgagtctagtgggaagaagttatgagaaccaccagaatcatctagaaatttttataagagaacatgactaaaattagctaaaacttaggaattagattagaaaaacagatacatccattcatttgaattgcttctataagcaacagtgtttcttttctaaaatattaatacagtaatcatcactctcctaaagctctccttctgctaggaggaaaatatttcctcaccctactgatgtggggcttagtcatgtgatttcattcacattaattaagatgcagaattttatctagaaatattacatgacttagtctaacatt

SEQ ID NO: 300721 - DNA, 594 bp, Homo Sapiens
tgaaagttacatttctttattcatgtctaaattggtctgtttaacaatagtagggagaaaatcaacaactgcattttctctgggcctctattctgtgataaaatggtaactccaagctgtatttattctgcctggaaaagaggaagaaagcgttcttttcctccaattatggtggaacgcggcccttgagaaaataccgtggagccttttgagcaggcttcactggtgtgagaacacattccaagttaaatcagcagagctactggaaggaatgcaaggtgggagagggggaagtttatatgtttctctcttcagtggtgactttagcttcatgtgacatgtcctcaaaccttctgggccagtgactttcaaccctggtggctgtggcggtgctgcagtcacactaggttggagactggatgcgccatgagtcctgtacttacgtatgaggcacagctgctttccagtgtaggaatttactgtaatggtcagtacattaggatttcatttaaaaccttcatattaactagttatccttgggatatgctggttaacagcatgttaatcagtcagataaagcccaactgtgccata

SEQ ID NO: 300722 - DNA, 790 bp, Homo Sapiens
  misc_feature (19)..(19): n is a, c, g, or t
  misc_feature (28)..(28): n is a, c, g, or t
  misc_feature (527)..(660): n is a, c, g, or t
  misc_feature (735)..(736): n is a, c, g, or t
  misc_feature (759)..(759): n is a, c, g, or t
  misc_feature (770)..(770): n is a, c, g, or t
  misc_feature (772)..(772): n is a, c, g, or t
gaatcttcctaactgcttnttctctgancagatttagaaactttcagaatatttataatcctgaagtttcagcagatccaaattcaaagtaatgaccaagcagggctattaactactccaagactagatctccagatgctggtgaagaatcacagatcatgcagaatttgaaaggtttgtttttgtcatagatagtatatgttctaatgattaataccggaaatctgacaaaggtcaaattctgataatgagaatgttaggtaataatatgcatcacacatgtaattaacttcattttactggattttatagactataatgaaggtcagaagactatcacactcaagtaggctattcaaaagtttgtttgctactaaaataaaacatcactgcttaatcttgtaaaatgtccagaatttaattgcaggccaattaagaatgtacgtaaatggcagaaatttcactttgaaaaaaacaagccaactataaaggacaaaataaagtgaattaaaaagtttccaattttnnnnnnnnnnnnnnnnnnnnnnnnnnnnnnnnnnnnnnnnnnnnnnnnnnnnnnnnnnnnnnnnnnnnnnnnnnnnnnnnnnnnnnnnnnnnnnnnnnnnnnnnnnnnnnnnnnnnnnnnnnnnnnnnnnnnnnccaatttttatgtgttgagatctctttagttatgaggctaacatcacctgcaagtgtcttttaaaagaaaaaacnnaaattttgacaactttttaagcngatttaagacncnattaataaaatcagagat

SEQ ID NO: 300723 - DNA, 817 bp, Homo Sapiens
  misc_feature (473)..(483): n is a, c, g, or t
tttttttaggaatggtaaaataggtttgcttgttatagtggaagaaataactaagatatattttggctaaataggtcaggctatattacacagagctatgaatatcacagaaaggatttttggaaagtttagctgcctcagtgttgatgttatgtcacagtgtcataagaacactgttatgaatactgtaatattataaagtaattaaattcctgaatctccttttttaatgaaatagagcatattcaaatgggagaatttgtctctgtgtatgcttcatgctcttgtatcttcatgtactttgtttgggaggaagagagaactgatgacaactagcttgctgggagttgggtaacctgtagctgtggaagtcttgtgtccagggctggtattccaccagttaacaagaggttggctgtattggtttttccaccagcctctttccttttggtcagtatctgtgctgaatagannnnnnnnnnnaataacctgaatttcatgccctactctcttgaggtgaacaaattcacagaagtcagtcactgaaatagaaatattagtacgtacaccagtgtggtagtgattgtcaattattgtggagctttactaatccatttaatttttttcactttgttgctaaatgagtatatacatgagaatgctttgtatgtgaatgaccctcacatgtgtcatagtgaaaaaagggttgaaaactactgctaaagataactgtgaaggaaaattccttggtagaaaatgaccattgcacctatctcagttctcctcattttaactctcctttaaagtcctcttttac

SEQ ID NO: 300724 - DNA, 649 bp, Homo Sapiens
  misc_feature (622)..(622): n is a, c, g, or t
  misc_feature (625)..(625): n is a, c, g, or t
gatttcaaagtctttcctcacagtcccttaccatgcacaagtactctgaaaccagagaacagcacggtgggtgaattcaaaaaacagaatttagaattcttgtttaattgctaactttctgaaagccctcagaaaaagacccaagttcatttcatatcagccccaaaactaagagacaatgaaaacttgacctatgagagtctggcactgtcaatgtccacagcacttctctcaaaatgatccctctgaatacttacaataatcccaccagggcaaaaggttcacaacagcagttcctcagccaagtcgtgggaaaggctgtatcacattccggtcttctgcttcccagtctcacactctccccacatcacaggcacagttacctcgcaggagaatgtctctgaagccccttagagtcattatgcaagaggtctcacggaacaacttttcgctgtgactgaagagatgaaatgtaaaatgaggaaacacgaaagaagaaatggtctgctacacaaacatacaaagtaggtgtgatgtgctagataacgaggtgatgtgctgatggagctcaactctgaccccagttccacagctccagtcaaaagatctgcgtttaagaaanganaaacaaggtggctcacgcctgtta

SEQ ID NO: 300725 - DNA, 646 bp, Homo Sapiens
  misc_feature (337)..(480): n is a, c, g, or t
gaattccacagacagcaggaggtgatagttgcaactggggttctctgggagagggaagccagggatgggtaagtgcagggcccaggaggctttggttctcagaggccccttcccttgaggcagggccctcaggccccacaaggttatattcagataggatgacaacctgtgtacagggcttttttgggaaagcactattgcataaaactgtttctcaaaatccttgatagtaagaatcacctggacagttgttatgcacgtggaccagcatctatttccctaaaattctaattcatcaggtgttggttgtggcccaggtatttgtcatagtcattgnnnnnnnnnnnnnnnnnnnnnnnnnnnnnnnnnnnnnnnnnnnnnnnnnnnnnnnnnnnnnnnnnnnnnnnnnnnnnnnnnnnnnnnnnnnnnnnnnnnnnnnnnnnnnnnnnnnnnnnnnnnnnnnnnnnnnnnnnnnnnnnnacgagattcttaccatcaggaaaatgatgagatcatgatctctttagataacagaactgtgagagggcaaggcgcactgaggtttgcactgggcttgatatttgtatggaatgaagtatcatacttcattcactgagccccagttttttctatttgttaaatgatt

SEQ ID NO: 300726 - DNA, 299 bp, Homo Sapiens
aactctgctcccagtctgcaaaactcttcttctactagcccctgatcacaccaaccttagaattagttatcagttccatatggagtaactcctcatggctcctctgtaactaaatggcaacacctcccttcttttacataacattaacaatttacattccttgtcaagttatttggcagtaaggtggtctgcactgtccactaacaattactatcaatcttgtaggctcagagaaatgtactcaattctaccttccccgtactcaccaaggactaatgtctgccattagtgtgggggtt

SEQ ID NO: 300727 - DNA, 525 bp, Homo Sapiens
  misc_feature (193)..(251): n is a, c, g, or t
ttttaagattaaaattttttaaattgaaagaataaaaagtttttaaaggtggcaggtgctacatagatggataagtaatagacatgaaaaactggtagactaaaaactgttgatagtgattagatgtttttattatataatctttaaaactatttctactttttatagtcttattttcatagtaataaaagtnnnnnnnnnnnnnnnnnnnnnnnnnnnnnnnnnnnnnnnnnnnnnnnnnnnnnnnnnnngtgttattttcataatactataaaaagttaataataattccaaggctcacaatcctatattttataatttaattctacatatagtgcatatgtaggataccaacagcaatatgtagcttcagagaaagcaagagaatttttggaaaaattttgaaaccgtaacaatgacactgaaacatttcagtaatctgtaattggagatggcaggttgaacacttgtatagccaaccttctatcctaaaacagaacagtgaaataatttttataaggggct

SEQ ID NO: 300728 - DNA, 319 bp, Homo Sapiens
  misc_feature (213)..(254): n is a, c, g, or t
acaataagtttgtaagtagcacaaattatgaggggtctagggattgcatttcagggaaggaatgacattactatgttccttccatattagaaatcttaaggagtaagatctgacttaaggtgggaggggatatacgtgggatttagactcaggcaggtcaggagctcaaatcccagcttcgtaacaagctgcctgatgttaggcaagaaatgnnnnnnnnnnnnnnnnnnnnnnnnnnnnnnnnnnnnnnnnnntcatcaatcagttaccatcagagtttgtgtctgttaactctgcttattaataaataacactaagg

SEQ ID NO: 300729 - DNA, 247 bp, Homo Sapiens
ggcaagcagcccttgctgattggctcaaagatgtcgagtagaaaaagcagccaatcctgccttcaagccagaactgtgccatggagacattacaaccactgcatggcgagaatgtgtacaaacctgtccgtgccacaaatatcagatcctagttacaaagactgccgccgaaaggaagagcctttgaagccaacactgacactgacctgtcatctacattctattactctagctctctttcggaggg

SEQ ID NO: 300730 - DNA, 677 bp, Homo Sapiens
  misc_feature (606)..(606): n is a, c, g, or t
  misc_feature (661)..(661): n is a, c, g, or t
ggattaaagcctgagatactgttggatctaagcactgcatatgtacattttgagattttttttctccagtcattattgaaggaaaaaatttagtctctatttttccattgcaaatgttctagaaaaaaactacttataaatgttaggtatattttagcagtgctgtataataaagacatattactgctgctggagaacttacatttattggttaatacttaaagggtatttttccataaataaattactgcaatcaccattaatgagtatttcctccaaatgattcttttttccccaagatagaaactagctctggaagtatagtaatacacattggtcatataagtttcatttctgtttccattccttgccaaaatctcctttgccaatggccctggctcttcttttgtaaaaataaccctgtagactccatttaattgtcacattggcctaaagccatcaagggcagttagcctcataccaagctgcagccatctgtcagaatatgctaaaaatcaatgaagatggttacttgcactctcctgccccggcatgattcctccacacaattctgatttgtctttgtgaactgaagtggtcatgttnatcccaacaccaggttttctctagttgttgatcatcacagcaaaaacctttgaantaagatccattttggt

SEQ ID NO: 300731 - DNA, 534 bp, Homo Sapiens
  misc_feature (24)..(24): n is a, c, g, or t
  misc_feature (133)..(133): n is a, c, g, or t
gaatgactatcctctaagccttgntcttgtcatcttggaagttccccttatcactctgctttctagatcccatattcttttgctggagcagtggcttacaacagaaggctgtataaaccttgcgtatctattncaatcccaccctcacaattgaccaatacttcccagatacagaatttaatgctgaaaatattgaatgttgaaaacttccctcggaagtttgatactattcctctaccacactcagcattcataatgaaaaatctgatgccactctgacttttactcctttataggttaccattttttcctcagaaagttctaggatcttcatttatccttaatgtcttaaaatttcataatgatgtgtctaggcataaggtcttctttcaatcatactgtccagcccttggtaaatcctttcatttgtttttctgtttattttagactctcctttgatgcagcaggctttcctcagctatttagtggcccttagttgtccagtgacagttaagattgaggttatataaatcc

SEQ ID NO: 300732 - DNA, 686 bp, Homo Sapiens
  misc_feature (581)..(581): n is a, c, g, or t
  misc_feature (609)..(609): n is a, c, g, or t
  misc_feature (624)..(624): n is a, c, g, or t
  misc_feature (626)..(626): n is a, c, g, or t
  misc_feature (668)..(668): n is a, c, g, or t
ccaaaagtgagaaaaggagagcaacttggggacagtgaaatgatgatatataaaagagattatacaaagaaatgtgtaaacaaataggagaggctggtttaggggaattaagttgagcacaaatcagagtggagcaaaggagcatttacttgattcaaaattacagttaacacctattttgtgcaggttgctgagaaatggggcgtcccacatgatctaatatgcctatatcccttctgtccttcactcacttgttcattcagcactttgaatggtaactgttctggggacagtagtctaaatgcaaagctgatctctcccaatgccaagtcttaaattgacagtgatgaatgaaaaatctttatttgcatgcttgtggttttcttaaacagactacacgagtaaaatttagctgtttattggtcatattttttacccatttgaacataaattttgttactgggctaaaatggagaaatgctctccaggatattgagaaatgtatatactctgccattagccaaaaaagcaccacattctctttttaatgtacatgtgttgagctctctatctcttctacngaaatgtgatgcatgggctttgtggcanctgtctgaatttccnanaaggactttcccttcccacaaattgccagactctgggctgtntttctgggaaaaaatgaa

SEQ ID NO: 300733 - DNA, 637 bp, Homo Sapiens
gggagacacagactgtaaatgagtaacaggaaaacattcctatagctgtaattgctaggtcaaaattacctgaaaaaatataaaaggacagagctttagcttactttataccaatgactatcctttcagcaaataaacaacaactaaaacccagcaatattaactcaataacacgttctgttttcctttaaggaaaaattttcttaaaccataatatcatggactcaaacttttatcaaagctcaaagctaccaacttactaaataggccatcttagaaatgtctaaggtagacagtttgtcaattgagacaaaatttctgcaaagctagggaggaaacaggtttcatagttttgtacaaaacaatgagaactaattaattttataccactttccataaattcaagtccagagtaaatcagatacacctgtatttttaaagtaaccagaatgggagaagtgggggagaagcaatttaacaagttatccagacttacattatccaggatgaaagtccgtgataatcttgggtctgtcttgaccacaaaaacatatgcaccaaatcaaaatttaattacactgtataacatagtttaagttgtgcttcatattttattgactgctttgcttctgacagg

SEQ ID NO: 300734 - DNA, 645 bp, Homo Sapiens
  misc_feature (553)..(553): n is a, c, g, or t
  misc_feature (559)..(559): n is a, c, g, or t
  misc_feature (572)..(601): n is a, c, g, or t
  misc_feature (625)..(625): n is a, c, g, or t
gtctgcaccacaacagagggtgagacatgtcatgggggtactcaggttactggaaagatttgctgcctagagtagaaaaaggtagatttctattgctcaccccaaatcatgtataaagagcttctgattcacttcctcatgcatcttaacttttacttggcttctcatatatacatatagattctagaatgagtttccttgacatggggacataagtattctaggtattgaaaaggagcatcttcaattgtagctataaatcatctttctggtctctatcttgatttcttattagttttcttggcttgaattatgacttcacaggatatgaatacccagggataaagggccactaaatcaaggtgccagacttgcaaaactgacacctagatccctcaatagaggaaagagaagctgtttgtaatgaccgaggacaaattgaatggtttccctcaggccaaaatttctcctaaggttgatcacctcttctcttcttgtcctaattctccttgcactctcatccaaataggagatgcatcattcctaaaatgtntataangccaacataatgnnnnnnnnnnnnnnnnnnnnnnnnnnnnnngctctataaatctccatcatccantctgtctgaaaacctagggc

SEQ ID NO: 300735 - DNA, 357 bp, Homo Sapiens
  misc_feature (64)..(77): n is a, c, g, or t
aggaagtcgattatgatataaagacagagttggaaaagttgggcttatgttgttgtttgtttgnnnnnnnnnnnnnncctgagaatattctctgttaccctgcagtaagctgtctacattccaggattcgacagcctgcttgcttaatagccttcaaaaacatacatgtcctgtcatacctgtgctatgttctgactacttggtaacttgttagctcagagattaattttagggatgttttatataaggaaacctctcctctaatgctacctccttttgttacctgttaatagtcatggtgttaggtttattgaatgacttttgcctctatattattttcttctcaatgttcttttc

SEQ ID NO: 300736 - DNA, 356 bp, Homo Sapiens
  misc_feature (46)..(82): n is a, c, g, or t
  misc_feature (107)..(125): n is a, c, g, or t
aaaattgctatcctttgttctgcttgggtacaaggttgggattaannnnnnnnnnnnnnnnnnnnnnnnnnnnnnnnnnnnngatcttcttggataccaaagaaaannnnnnnnnnnnnnnnnnnagctatattctactgaaagttacttctcaatccagagattctattaatttaggcaacaacagacttcttaggacctcataaattatcccattaacccttaacaaaagaactatttgcttagctaatgaaatataattcatcaattagaggccagtggtagtcactggtgtttggactttcacaagattgttataatttgcaaaataatgtatttattaaaagcagtaatcc

SEQ ID NO: 300737 - DNA, 639 bp, Homo Sapiens
  misc_feature (590)..(590): n is a, c, g, or t
  misc_feature (599)..(599): n is a, c, g, or t
  misc_feature (602)..(602): n is a, c, g, or t
  misc_feature (616)..(616): n is a, c, g, or t
aataggaagagagtcaggttgtgaaactagactgtgcttggaggcgatgtattaaatattctgaagcattttctaattgtcagtccttaaaatgtaagaaaatctcaagtgttaaaattgaagactgggtgtgctctctgctgaaagttcaatcaaaagcaactgtaatttcctacaaaggtaactaggtcaactcagcatttgtccctgcttactggaaacaacaaaatctcaacaatcaggccattaacttatcatgtcctatatatagtttcaaaagaaatctaaattcactcttaaagaggtactagtacaattttacacataagatgtctcctagttatttttcttagacttcaaaaggaaattaccaccatttagactacaacaatacaaccctacagcaaaagtatcttccccttcttcactagcatgtatatgcactcatctacccaacatcagggaaaaaacaaacagaacctagacacctatgtacaaagaatcacattctctccataatggcgaatcattcattcttccttgtgccaacatttctcaagaatgctatcatgcatgaagtctactcccangggttcatnacnccgctcgggatcanctctgggtcagttcctcctcctc

SEQ ID NO: 300738 - DNA, 195 bp, Homo Sapiens
  misc_feature (48)..(48): n is a, c, g, or t
  misc_feature (67)..(67): n is a, c, g, or t
  misc_feature (73)..(73): n is a, c, g, or t
  misc_feature (90)..(90): n is a, c, g, or t
  misc_feature (109)..(109): n is a, c, g, or t
  misc_feature (134)..(134): n is a, c, g, or t
ggtctgtagttgagtcagtaatactataccaacatgttaatctcctanttctggtaattgcactacnattgantacgttttaacattaanggaaagctgggttaaaganttatatatgaactcttcctgttatnttcctgccacttttctgttagttttaaaattattccttaccaaattccgattaattccgaa

SEQ ID NO: 300739 - DNA, 500 bp, Homo Sapiens
acatttctctgggtccaatataggatttgtcttaaacttgtccgtattctctaattttttatccattcgttgccaatttcatttcatttcttcaaaatctctattttgtcatctctctagtcccacagcttaatatggactcttatttactttcggaactaataaaattacactgtccattcacacaactaagaactgggtaacctaacccaaacttttgtctccagtgttacaatctatcctacaaatatcaaaagttataaccactcagtgctctttccagaatgtctttctccactataatctcactgtctactgggtcaagttcaatcagctctcccagacactcaacatcctctacatctatccaccctacccctaagacatactctttgatcctatactttctctttcccatagcatgtttatttcacttttcaaaatcctatgttgattcttttcttcttgaatgaaggcccttccctctccatccacttctt

SEQ ID NO: 300740 - DNA, 603 bp, Homo Sapiens
gaaagtaagttctgataagtgaaagcatatattttagtagcagctaaaacaatttaacaaacagctaataaattctattgttccatgtgatgcttctcactgagttaaaacaactctgccagtatctaagaaaaagtaaagatttttctatgcctacacttggatttttaattatctgaatttcattaatataaaatatgtcttgtgtgaagaagatgtcagagagtacatgtgggggtttttggttctgcgttatgttttcaaggaacaatttaacctttctcttcttctccaatcttaaacaaaattacaacagtttcctctttacctctacacaattggcttttcaggtacattaaccaaacaagattatttcttatttatcattcaatgtgttttaaatgttggtttgctgcaaaaagaagagtcaataatgcttcccttgcaagaaactaagtaagagaaatgattctggtactcacgtggttttgttattacaaggtttataaagataaagctcccaaaataatctacgtgttttaaaaatcctgaactgtaggcaatctgaacttgtttaaattgcacatctttattcaggctatt

SEQ ID NO: 300741 - DNA, 617 bp, Homo Sapiens
gtggcatttatgagaaagatggtctataaacattactattgctctggctttacctttaggttggtgtgatcctgaaggaaggaagtgcgtgtgtaggaaaaggagttccaggggggttatgttaatttacaatcatatcaaaataacatgactcttcctcctctccctgtagctgtatctaggaagtaggagtttaacatttccccattcaacctcttaccagaaaactactcctaaataaacatcactaattttgctgccacatcactaagtcttgacagaattacccaaatcatatgtgctaggaaaatcaattgtcaacagattttgagcgtccatgccgttctaggcatcatatttgtatatgaagagaaaagaaatatattagctcccaaagggatttctatctttatacccacagagaaaatagggatgggtagacttggacttggtgtaaaaaatgtacaggtaagtaatacccaaagtcaaaaggaattcaacaattttgctaatatcaaacagtacacagttggcaaatttgggtacgtgtgtacacagatcgtacaaagtattttaagcaacatactaaaattttacttccaagttgtcgtctgcag

SEQ ID NO: 300742 - DNA, 496 bp, Homo Sapiens
tggttcgcattattcttaacagtttacttatttggtaaatctccccatatgtaaccaatcttctgcggctgccaccacctttcctcctggggctgccctcctcagctgttagtgctctagcatcctgtgccaccacccccatccccatatggatacctttctccctgagataccctgctctgggcttccacagcatccctcttcctacgtttttgtaaacgtaggaagcctaccagattggacctacctaatggctttgaattttcaggaaggagaaggcgaagagcctcggctactcttgaatgatgtaaaataagacttatcttccttccccatggtccttcattatttaaaaatagccattatgtcattcctaaacattctgttttccacctttaaaagctcctagttcctccatgtgtttacactaatgatgtttttcttgtaagcatctcaaagagtcttccaaacatattatatctttgtgacagatgaa

SEQ ID NO: 300743 - DNA, 401 bp, Homo Sapiens
  misc_feature (334)..(334): n is a, c, g, or t
gtgtgagccactgtgcccagccagagctgagaaatatctattgcctagttgttgccctcatgtcagagtgtaacacattaccttttctatgtttagatatacaaataacattgtgttacaactgtctacagtattcagtacagtcacatgctgtgcaggtttgcaacctgggagcaataagctatataccacatagcctaggtgtgtagtaggccatacaactagatttgtttaagtacactctgattgtacaacacaatcacctaacaatgcatttctcagaaatgtaatctgtcaccaagcgacacatgaatgttaatactgtggtcagtcncaaaataaaatgcaaagctaatttacctatttctgttagtacctctttgctgcttaatgtttactca

SEQ ID NO: 300744 - DNA, 320 bp, Homo Sapiens
  misc_feature (62)..(205): n is a, c, g, or t
ttcttcaggataggccacaggttaggacacaaaacaagtctcaacaaagtttttaaaaattnnnnnnnnnnnnnnnnnnnnnnnnnnnnnnnnnnnnnnnnnnnnnnnnnnnnnnnnnnnnnnnnnnnnnnnnnnnnnnnnnnnnnnnnnnnnnnnnnnnnnnnnnnnnnnnnnnnnnnnnnnnnnnnnnnnnnnnnnnnnnnnnccttaaataaaaatcgaaatacaacataccaaaacctgtgggatagagcaaaagtagtgctaacagggaagtccagagcaataaacacctacctccaaagagtagaaagatttca

SEQ ID NO: 300745 - DNA, 649 bp, Homo Sapiens
  misc_feature (536)..(536): n is a, c, g, or t
  misc_feature (554)..(554): n is a, c, g, or t
actagatatttatattaattctgtgaggtatctatctacattctttgcctatttttctactagattatcttttccttattatctttgtagggaatttttatatattaataatttacattaaccttttgtctgattataaactgttttctccctattagtcttttttaatagggccttttaccatccagaaacttcacatttttatgttgtaaaatcctctatggcgtcatgatgtttggagaatcttacccttctgaaagattacaaaaatagtcccccatttttccagttgaaataaggtactctataatagtcttttgcatgttcttccaccccagtatccacaatcctggattgtgaaattagaatttttcagagcaaacagggagcatgttggaaccatatatctttttggaggaatactctctggaaatgcaggaaaaaagcatttatacaattttcagacatctgacctacaccaagaaaagatgggtcagaatagatgagtcattttgcaaattataggaatttttgtnacaaaacagttaaaagancatctatactgtaattcactgttggctaatcatgttctctctggtttcacagaaacttgttatgcatttcttatccttgctactaaattactcta

SEQ ID NO: 300746 - DNA, 543 bp, Homo Sapiens
  misc_feature (108)..(180): n is a, c, g, or t
  misc_feature (354)..(354): n is a, c, g, or t
  misc_feature (510)..(510): n is a, c, g, or t
  misc_feature (533)..(533): n is a, c, g, or t
aataaaagggcatttgtctgttgatacataatttcttttaatttaggagtcctctcttaaaatagtttgaaaataatcttagcatcgatcatcaatgtacttttttannnnnnnnnnnnnnnnnnnnnnnnnnnnnnnnnnnnnnnnnnnnnnnnnnnnnnnnnnnnnnnnnnnnnnnnnatgagatatttactgaacgaatgaataaaatgagaggtaaacaaaaaattttcttcacaaataaagataaccaaaatctacactagtatataagtgtatctttttccccatttctccaagaacagaacaaaaggttggaatcagtagccaaggacactggcttcatcatgttgntgatgaacacatcaggagatgcaaaccgtccacccctggctgaaactgagaagcccgatctgccaccccttgggtgatctatgcagggaattctcatctgcagaagatccaatgggaaaaacaacacaatcatttaagcaatccacctttagattntccttctttcaatgtgccatttnacataacatt

SEQ ID NO: 300747 - DNA, 319 bp, Homo Sapiens
  misc_feature (61)..(262): n is a, c, g, or t
gcggccagtcaaattagtcatgtatgaaataacctagcataatcaaacatacacggacacnnnnnnnnnnnnnnnnnnnnnnnnnnnnnnnnnnnnnnnnnnnnnnnnnnnnnnnnnnnnnnnnnnnnnnnnnnnnnnnnnnnnnnnnnnnnnnnnnnnnnnnnnnnnnnnnnnnnnnnnnnnnnnnnnnnnnnnnnnnnnnnnnnnnnnnnnnnnnnnnnnnnnnnnnnnnnnnnnnnnnnnnnnnnnnnnnnnnnnnnnnagctgaagaaaaaaggcaaggaagaaaacaatatagtatactgccacttagtttttt

SEQ ID NO: 300748 - DNA, 646 bp, Homo Sapiens
  misc_feature (502)..(502): n is a, c, g, or t
  misc_feature (514)..(514): n is a, c, g, or t
  misc_feature (530)..(530): n is a, c, g, or t
  misc_feature (548)..(548): n is a, c, g, or t
  misc_feature (558)..(558): n is a, c, g, or t
  misc_feature (567)..(567): n is a, c, g, or t
  misc_feature (571)..(571): n is a, c, g, or t
  misc_feature (600)..(600): n is a, c, g, or t
  misc_feature (610)..(610): n is a, c, g, or t
  misc_feature (631)..(631): n is a, c, g, or t
ctgctctctggccttgctagggaagagagagtgagtgcacggcccctcgccctcccccttacccccaccctggagggggagacagatgttctgaatcccaggctctctgtgagttctacctgtcttccaggtgcagtgctagcagggaggacaaagagctgaggagtcaggccacaaggtcaagggaatgccttccctgcagcaggaagagccccatagccaggggagggccaagaaaccagggggagggaaccccaaactggagttggaagggacctcagggccataagccccaaatgctcacttcagatgagagaatgcaggccctgaacagggaagtgattccccagaaccccagaactcgcaggtcagtggcataaccaggacggaggccttccagatcctgggtccaggtccttcatgttatgcggtgctcttatgcctcctctgccagttactgtcctctgggcctggtggtcccctctgaagtagcagagatgcngcttaggaaganctaaggaagcccctanaaggccctgcatccccantaaggacaanccctggcantctnggctcgacaggggccaccacctcttctanaacatctacngggggctttaggatcccccanggaagaaaccccccc

SEQ ID NO: 300749 - DNA, 210 bp, Homo Sapiens
agcttaagaaggtactgtttgaaagagaaggagattccacgacaaaagcctcatctctcacctggacaagtgtgcagcctcctacctagcttctgcacctaatctctgcccctacccctaacacacacacaattcaccttgcgaaggacagtccatgataaggactctggaatgcccaagaggaaagggtgaagagacttgtagaccccc

SEQ ID NO: 300750 - DNA, 675 bp, Homo Sapiens
  misc_feature (520)..(520): n is a, c, g, or t
  misc_feature (534)..(534): n is a, c, g, or t
  misc_feature (582)..(582): n is a, c, g, or t
  misc_feature (602)..(602): n is a, c, g, or t
agagtccaaacattagacctttgtcaaatgcataacctgcaaatattttttcccattctataggttgtctgtttactctggtgttagcttcctttgctgttcagaagctccttggtttaattagttcctgcttttcaatttttggttttgttgcaattgctttttggagtctttatcataaaatctttgccagggctgatgttcagcgtggtatttcctcttttcttctgtgtttttaacacttttacatcttacattcaagcctttcatccatcttgggttgaattttgtatatggtcaaaggaaggggtctagtttcaaaattttgcatattgctagccagttatccaagcactatctattgaatagggagtctttccccattgcttgcttttgtcagctttgtcaaagatcaggcagttgtagatatgtggctttatttctgggttatctaatgactgtgttgcattggtctatgtatctgctcttatgccagtatcatgctgttttcattactgtngccttgttgtgtantttgaaatcaggtagtgtgatgcctctcactctgttccttttgtttangattgaattggctatttganctccactggtgacatttaccccatgttaacaaaccctacatgttgtacccccaaacctaaaaatgaaaagttg

SEQ ID NO: 300751 - DNA, 598 bp, Homo Sapiens
  misc_feature (490)..(490): n is a, c, g, or t
ctgttgtcctgtttggaggggtgacagcagaaatcaaagaattccactcctccatggaaagacaaaagacaggtgctcaccctgggatggagggggcagtgggagcctgttagtacatctgtgatcccaggggtcagggcctacagaaggaccctgcaggctaatgggggcaaggataccagagagtaggggcctgtttgctcttctgaccctgcagcactaaccatggggggatagggagtttctagtgcactgattccaggcagagagatggagcctgtgagatgtccacagggaatctgacatccctggaaccccgtcatgtcttggggaatatggggtccaaggacagatgggaagacaggagagacattatagaagctaaagggtatgggatggcctgaatttgggctacaacctctgaagaagtcacttcctcatttatagccaaagtaaatgggcaccagatagtctcagtgtggaccaaganccacctcacacatccctcccaagccctccctatccatcaatactcccaccctccaattttcactccccacttacaggggcaagccgattgggttcattaatcactgcc

SEQ ID NO: 300752 - DNA, 634 bp, Homo Sapiens
  misc_feature (341)..(405): n is a, c, g, or t
  misc_feature (534)..(534): n is a, c, g, or t
  misc_feature (552)..(552): n is a, c, g, or t
  misc_feature (619)..(619): n is a, c, g, or t
caaagtcctaaattctgagggataatgttttcaagagaaaataaattattgtacatttggatagatactccagacaacgtgtgggctagagaaatacttgtggtccttagggtggtaagcaggagctcaaggttctaagaaggaacacctgagacagggccctgctggaggaaatcccagcgtcctagcaggggaggtgaagataaccgccaactgctctcaatgggtttggagatgaagtggaaggtactagcagacagggaaatgacagagcttggccaagttagggaggcaatggatacagtgcaaacaccaaccccctccgccggtcattaagtagnnnnnnnnnnnnnnnnnnnnnnnnnnnnnnnnnnnnnnnnnnnnnnnnnnnnnnnnnnnnnnnnngagttgtttggagaataataggagataatacataaaacacaagaaaagtaaatagctagctggatagagaattcctgaagacacttgatgaaggatatctattatgactgaaaagtaggtgggggggtntcattatcaccttcagantttctctttgaataggtcattcccaaatctgcattaaaaaatcatgttctaatttccccatcaaaanggtccaagtttatta

SEQ ID NO: 300753 - DNA, 470 bp, Homo Sapiens
  misc_feature (241)..(426): n is a, c, g, or t
ccaagaacttaggaagaaacacagcacaagagcattaacaaatgccagacttaagataaaggtatttttaaaaacgacagatttgagatgtttcaggtaaaaatctggcttagttgacaaaatttcaagaaaaaactttgggttggcggggcagaaggatcaaactgtctgtccaagttaagtttatcaacactgtattacacaacatttgtgactataatattgtttgtttgagactgannnnnnnnnnnnnnnnnnnnnnnnnnnnnnnnnnnnnnnnnnnnnnnnnnnnnnnnnnnnnnnnnnnnnnnnnnnnnnnnnnnnnnnnnnnnnnnnnnnnnnnnnnnnnnnnnnnnnnnnnnnnnnnnnnnnnnnnnnnnnnnnnnnnnnnnnnnnnnnnnnnnnnnnnnnnnnnnnnnnnnnnnntgcgactgtaatattaatttgcctctgagtctgcacacttagta

SEQ ID NO: 300754 - DNA, 544 bp, Homo Sapiens
aggtgtacatcctgacaggacttatagaggcaagtctaggggcagtacagaggcaagacagatgatgcagtgaagagagaaagggatttcagaagttcttgaacaaccaaagggactacgatctagtacagaagtgaatatgggtaagctttaggcacacagttcatttattttaacaggctggaacacaaagcaagattatttatttgagaataagaccaggaatcaggtattggaagtttaacgtgcagtctgcgagttggtatagagaaggcagagctgcaatccggatggtctggactttctgtggtgacaggctaaaagggattcaggatctaaaaatagtcctcatgatatgtttgggggatgcttaggggagcttggtaccaagtggataatcacttaaatttagtcatctacacgtgactggttttcaccaatttgtagaagggagtgctaggaggggaggaaaggtcaaaaaactggtagtctcatcaagaatttcaaaggctctttggggcacctcccttaaatcctgtaattc

SEQ ID NO: 300755 - DNA, 638 bp, Homo Sapiens
gagcaggaagtcgattatacacttccccacattgaaattgggaagaagaattatggagagcagttcaaggcataaggggctctggggaacaacataattttgctttaattctccagcttgttttcagtaagggtggaaggagaaagagaggaagtatagaatttacacacttcagctcgtactgccaagaaaagacagaaagcttgttgtaacaacccgtagacactgtgggagaactaaggagacccctggtgtagcaacagttttcctaaggaagacggattgtgaggcaggaaggtgtgaaaagaggaagtcgattatataattttggagtttctgctgaggaaacctgagtgaactcacttcagatgcatttggaatattttcataaaaaatatttgcttttggctgctccaggaactactggaagcaggaaacagtggtataattggaatacaccacactgacccattactcctcttggttactaggaggcatcagagatacatgttttgttgattttagttataaaaatgagataatcttgaatgtgaataaatttgcttccttgttcaaggagctacctcgtggataaaatagctatttaatgttaacttctttagagaataacacgattc

SEQ ID NO: 300756 - DNA, 663 bp, Homo Sapiens
acgattcggagtgggcaggtgttctgtgtcaactagatggtgcaggtgatgatgtggggctgtcagcaatgcctagtcctggaatatttcatggtatttcatggtcttcgatgaaggtggcattattctcttgtatgatgatatgcccacagatggactctctcagaaatggatgctctgatcagacacgctgagactttctcacctccacataactagttttagctctcacagagtgtgcctttcatgaactcaccattcttaaaacaggttcaacgctaatctaggtgttaacgtaaatttaaaaatatttcacttagcatataaaatactgcaggtatgcactcacaaacaggggattcaactagagaaagcctgaatagcacttgtgacacgcaagaggaaaatgcacaccctgaattaaaaggtcttcagaaaaaaagcagaagaaagttaccggagttcagcaacactaaggcggccatgtgcattaacgagctcattaagagtagggctttctcagttaatatttgaaagccgtagccttctagagttaaatgcataattccttgaactttgataatttggcgctggggacaatgaagcacttttaaatcacttaaaaatctccttttgaaccaagaacctcctccggatcatttt

SEQ ID NO: 300757 - DNA, 712 bp, Homo Sapiens
ctttaacatggattgaagtaaaaatccaacaagagttaaataataacgatgacatccgcaacttgtattcttttagtaatattaacagaagatttccatcattttacttcaacttcaataactgttactgatctgaagtagtagttccttactatgatcaagaaaaaatctattctaagaaatgtctgaattacatgagatgccttttggcatctaataaagtgactattacagatacccttatttgacctgctgatgaaatatatgtattaaaagattttctaacatcgactaatcatgacattccttcattatatagtgtattaaagaaaatttccttaaatatttttattttaatctcagaaaactccagaaacaaccaatactcattggcatacattaacggtctgcagtcagctctcttagtctctgtgatggctattgcaaacttctgctggattcctttagccttgagtacgtattatttatgtaatatagtaaaatagtatacatcttaagtactgtttgtatggtccacaatgccttcaaggcacaatcatgtttggtttatgtttgggatcctcccatgatcactaattttacaagtatttgataaacaaatcaatgagtagccaaatactaataaatattttctgagaagtaaatatctaattggtaacccaaaagcttccagaagcagaaaaaccatgcc

SEQ ID NO: 300758 - DNA, 222 bp, Homo Sapiens
aaatacaatggtactccaacaggcttctaaaacagcactaagtccttcatttattgaaggaggagccaaggttattctcaatcaatcgtaaagcaagttcataggaggaataaattgcataccaagaaaaaaagcaatcaagagttaagtacttagagctgttaacactgagtgttatacaaagtaagtctgtacctcaaagaatctacaatcaagaagccc

SEQ ID NO: 300759 - DNA, 408 bp, Homo Sapiens
  misc_feature (72)..(72): n is a, c, g, or t
  misc_feature (301)..(301): n is a, c, g, or t
  misc_feature (314)..(314): n is a, c, g, or t
  misc_feature (330)..(330): n is a, c, g, or t
aaaagaaaacctttggtatatattatataatatcctcatgttttatctcaaagatattgaggtcactatttnattgtaaaggtatttcacttgtctagtaatgggattgctgatttttaaaactactcctttgctatctctgcagtggctgctgagtgaaaaaggcagagtgctacctgggaaataaacttgttgtgcaaccacttgaaagaaaattttatcctctaacaattttttcccgtatccagcttggttattcctgtggcaaccacagatcatataacttggatgttttatctcnacagtgcattctnggcattgcttactcangagtgaaactcatgatatgttaactatgcttccttaagttctactttattttgatttgacctcataagggacaaggaa

SEQ ID NO: 300760 - DNA, 380 bp, Homo Sapiens
ccagcctctccagtactgaggcctctctgggattctttatcttttgtctgaaagcattatgaggcttaattcccataaaaataaaacacattccaaagccaaggccagggtttgggcattctctgctggtttatactgaccactcccccaggtcccgttcatgagcatggagaatagagaactgatggtagggctgatattgtgcaggcatggccctttcatggaaacagagggctaaggaggccttgaagggccttcggggccagtcctttgtctccaggaggtcttgcttagcacgaatagatcagaccactctccccctattttcctcccagacagtgagacttgctaaggtcttaggaatataaatattccacctg

SEQ ID NO: 300761 - DNA, 385 bp, Homo Sapiens
  misc_feature (225)..(225): n is a, c, g, or t
  misc_feature (265)..(265): n is a, c, g, or t
  misc_feature (338)..(338): n is a, c, g, or t
  misc_feature (349)..(349): n is a, c, g, or t
  misc_feature (358)..(358): n is a, c, g, or t
gttatctcctaatcaaggaaaggctaattagctgattcatggcataaatctacagacatttactaattccttttatggaatcttcaaatatgtccaggccattctagtctccataaaatgtgactgtgttttaaagatgaaaatgtttattctaagaaggggtgtctggtttgctcagaactccgcaaactactgaaatgatgttttcaggaccaaaacagcatntggtgattatataaatcaggcatgaacatacccacacacntgcatgcacagtttacagctaagaggacatgtgaaaattcccctacagaaagcagagctacggaataaatctnaagacagccanaactactanaaacggggagtacatctggatgaaccc

SEQ ID NO: 300762 - DNA, 379 bp, Homo Sapiens
atttctcatccttcctagttctaagtcaaacaagaagaacacatagtaaacccatgttatttttaacttagttccctgaagcgaaaaaaggtgttgacaacataagtccaatgtgaaagcttcatggtctatggtcacacgagtcaaccataaaattacaacaatgcaattaagacccagcactctggtaccaaaagattttatttaaggaatttttccaggaatgacaccacttgtgtcctcaccttccccacaaactggaggggtagggcaggggcagaggagggaacaaatgtacacctgaactgcagtctaatccaatcaggtgctttccaatttaattagcattttcttctttggccttttttcatcacccagt

SEQ ID NO: 300763 - DNA, 615 bp, Homo Sapiens
ggctgggagagaccagggatacgagagaggagagagagcctgcagatttctcggctcccatcctagaccatgaagaccccgtgctctgggaattccgtgcctgtctggcacacagatggtgctctgaggctaggaaatcaaggggttttctccaagtttgtttgaaagccctggaatcgacagggaagtgttcctgggagagggtctggctgtgtccccaggcaagaggccccatagtgattttccaggcctttcctggagtggcctcactgtagccattgggtggaggccacaccaagatgcactggagcttgggtctagtctgcttcccaaacctacacttgccccctccactgcactgtctttgagatggaggaggttgatagagccactctagttatcactggtcaggcaacatcaagagtctaggtttggtcctgggccaggtttttcttcaactggaaagcatacggtgaaagatgatcacacattcatcaagtgtttgaatgactcacacataagcttggcagaaaaaccttagttttttcccagttcactcatgtactaagcatttatcaagcaactctcagttgccttgtggcagacactgaccta

SEQ ID NO: 300764 - DNA, 659 bp, Homo Sapiens
  misc_feature (110)..(384): n is a, c, g, or t
  misc_feature (597)..(597): n is a, c, g, or t
  misc_feature (599)..(599): n is a, c, g, or t
ggaatcattacaggtaccacagacatcaaaagatattacgaacaacatttccaataaatctgacaacttaaataaaagtcacgtattctttattaaagaaatataatctnnnnnnnnnnnnnnnnnnnnnnnnnnnnnnnnnnnnnnnnnnnnnnnnnnnnnnnnnnnnnnnnnnnnnnnnnnnnnnnnnnnnnnnnnnnnnnnnnnnnnnnnnnnnnnnnnnnnnnnnnnnnnnnnnnnnnnnnnnnnnnnnnnnnnnnnnnnnnnnnnnnnnnnnnnnnnnnnnnnnnnnnnnnnnnnnnnnnnnnnnnnnnnnnnnnnnnnnnnnnnnnnnnnnnnnnnnnnnnnnnnnnnnnnnnnnnnnnnnnnnnnnnnnnnnnnnnngaaatataatctataaattacaaaccttctcacaaaggaaacttcagtcccagatggctttactaataaaatttgtatcttaaatttatataaacttttccagagaacagggaaaacaggaaacctttcctactttgttgtatgagtctagcataaccttattactaaaacttgacatgaccattaccagaaaaattattgaacaatctctcntnaacattatgccaaaatcctaaacatctaccaatccaatccaccatatgtttaacactttc

SEQ ID NO: 300765 - DNA, 580 bp, Homo Sapiens
  misc_feature (533)..(533): n is a, c, g, or t
  misc_feature (535)..(535): n is a, c, g, or t
  misc_feature (538)..(538): n is a, c, g, or t
  misc_feature (547)..(547): n is a, c, g, or t
  misc_feature (559)..(559): n is a, c, g, or t
ggcctggccatcctgctatatttgtctcctaaagactatttcaaacttcttaactcttctcaaatctctaaaatgattccctttccctgtcttctgtctcaagtaacctccctttgaccattgaaatcattgcataatctgtctgtacccattgcctacatttcctagcatctcacgctctccttaactcacatctgactagtgtatgtggcatcaaacacagctattgccaagatcacttatggcttctgtcaccgctgccctgaggcccaggccagagggcgcttgccctagattccacactgtggatagcccattctagcccctctctagctaggctgtcttcatagggcaggtgccaagacagtaggctcagtagagcccatggctctgcttctaatcatcatgcctggaatgtcttgcttaaatagaaccaaggctattggttatattggaaaagacagcagggctcttcccaacatccattcaactggggagtgaccaagggaagtaggaagcactatttgcataananatnaatggtgcncaatgggggaanccaaaaattcccatatatcca

SEQ ID NO: 300766 - DNA, 296 bp, Homo Sapiens
tgatgggtgactaagctctgctcggttaatgtaaacagacaagtgttgatttctgtcatgtggaacggtgtttcgacagttaagtctagcacccagtagtctccttattggtagacgattctaatttcattggattcaaaaatctctgactcaagggtctttccttagtgcgttttaatgggtgcatggctgagggaaaatccaagtcattgttaaactctaggtaaaagacaagagtatgggataccctcctaaccataccggtagttgtcagttttatttaaagtgggttccac

SEQ ID NO: 300767 - DNA, 697 bp, Homo Sapiens
  misc_feature (278)..(287): n is a, c, g, or t
  misc_feature (605)..(605): n is a, c, g, or t
  misc_feature (639)..(639): n is a, c, g, or t
  misc_feature (649)..(649): n is a, c, g, or t
  misc_feature (659)..(659): n is a, c, g, or t
caaacgtgagtttgacagtattcaattcactcttcactgaggaaactgtagctcagaaatgacatgtaataatatttaacactagtcatttcacctacagtgtgaccacaggatcacgattaatctgaaattcttattctggtcatttaccttttcccactctacaaagtattccagcaagaaagcaccatttaagagagagtgatgcgttatgaaaggaagaaaaaaatcacttgctatgaccagaataagcaatgctgaaaagtttctcagctggnnnnnnnnnntaatactgctgggctgtagctgctgcggtctaatgaagaatgcagcttctgtctcattgtcatgagagctaagatttgtcttcccacagtggtgatggtccctttgatgacccaggtggcagtcttattgatttttatgagtaaatgagtttctgcagcttatatgcataactagtcttaaatgcttccctgagtgaaattgacagttcattttatttggtttgcacagtcttctcgtcccttgcacatcttataagccacgtgagaagaagttgattacctcctatttacattagacaagcaatgtttactctccanggttgcaaacaggctgtggtgaaaaagtggtaangggggttganattttcctancaatcatcttatactttcttcgggcaaaagtactgtgg

SEQ ID NO: 300768 - DNA, 393 bp, Homo Sapiens
  misc_feature (257)..(257): n is a, c, g, or t
  misc_feature (281)..(281): n is a, c, g, or t
  misc_feature (306)..(306): n is a, c, g, or t
  misc_feature (312)..(312): n is a, c, g, or t
  misc_feature (317)..(317): n is a, c, g, or t
  misc_feature (334)..(335): n is a, c, g, or t
  misc_feature (352)..(352): n is a, c, g, or t
tggaccaggagagatattagtgctggttgggtggctccaaaggcagacactgttgggggactgctgcattaggtgactcctggagccttcaagtcttcaattttctttaggtttcatggggagtgaggcccttcaggctgctgagtgttacaagaaagttctccgctttcctgcctcactgagcagtctaaaggaagtgaagtgagccttctgctggcattacttctggcaccatctgcttttccctaagggcaaantttccctgggatctaagggtttangccctccaaacacaattttccgccnggtgcnaaagntcccccctgttatcccnncacttttgggaaggctnaagcagggggatcactttaaggtccggaattcccaaaacaa

SEQ ID NO: 300769 - DNA, 466 bp, Homo Sapiens
  misc_feature (328)..(329): n is a, c, g, or t
  misc_feature (360)..(360): n is a, c, g, or t
  misc_feature (395)..(395): n is a, c, g, or t
  misc_feature (428)..(428): n is a, c, g, or t
ggtggtgaggggaggtattattgttttctgattcctcccctcccagagatggtcattattttcccatgtctgtgtcttttgtgttgtgtcatacagaagagaatcatagggcaagaacacaggcctcaaagactggtgagttcacagttctctgcaaaccaatgtctgttcagactaattttgctgtgggtccccaagacaaaaaccagatgaggtgctccttgggtcttgttttatgtcctcagagcttggcttttccatcagtgagaacactctggcctctgccagctgagggtgcaagtgtcagcctgtgtcagccagccagtcnnataggctggaagcccacgatgcagtgacaancggcattctctttgtccactcgtgccagctctcangagagtttggtcccaataactgtcccattccgnagggctttgttgtctcaaccttcaattggacaatgcta

SEQ ID NO: 300770 - DNA, 498 bp, Homo Sapiens
  misc_feature (330)..(330): n is a, c, g, or t
  misc_feature (434)..(434): n is a, c, g, or t
  misc_feature (466)..(467): n is a, c, g, or t
gtgcatttgggatgagcacagatatcaagacaggaagaccatggccctggtatattaccatcttgtctccagagaaatgtagaaggaaataggtttcaattcactgctttccagtctgccacgtgcagccttatccctcagaggagtgagtctctcaatatctgggtcactggcccagatttttctgtctctgtgctgactgaccacaagacatctctagatgtcaggattgtttggtatgcaaatttaagtagccctccttgtgaggcttactgtgcactttgtgcattagaatggcatgttcaatgaaaaaggagtgaattcaccctnacaggtggggaagatgccagaagggaggtgtgtctcacctgtcagatgcaacttcataaatgctgtttgctgggataagctctgtgcatgttcctgagaattcnttttctaagatcaaacttttacatgtaacttnnaaaacacgtgtggtatgtttgaatgtgcaga

SEQ ID NO: 300771 - DNA, 712 bp, Homo Sapiens
  misc_feature (80)..(379): n is a, c, g, or t
  misc_feature (381)..(415): n is a, c, g, or t
  misc_feature (453)..(653): n is a, c, g, or t
  misc_feature (669)..(669): n is a, c, g, or t
  misc_feature (680)..(680): n is a, c, g, or t
gttataatctatgcaataagattccatgagtctaatattaatataaacaaagtaaattggggaaagtaaagtttattccnnnnnnnnnnnnnnnnnnnnnnnnnnnnnnnnnnnnnnnnnnnnnnnnnnnnnnnnnnnnnnnnnnnnnnnnnnnnnnnnnnnnnnnnnnnnnnnnnnnnnnnnnnnnnnnnnnnnnnnnnnnnnnnnnnnnnnnnnnnnnnnnnnnnnnnnnnnnnnnnnnnnnnnnnnnnnnnnnnnnnnnnnnnnnnnnnnnnnnnnnnnnnnnnnnnnnnnnnnnnnnnnnnnnnnnnnnnnnnnnnnnnnnnnnnnnnnnnnnnnnnnnnnnnnnnnnnnnnnnnnnnnnnnnnnnnnnnnnnnncnnnnnnnnnnnnnnnnnnnnnnnnnnnnnnnnnnnaagagaagtagaaagccactatttgacagccactatannnnnnnnnnnnnnnnnnnnnnnnnnnnnnnnnnnnnnnnnnnnnnnnnnnnnnnnnnnnnnnnnnnnnnnnnnnnnnnnnnnnnnnnnnnnnnnnnnnnnnnnnnnnnnnnnnnnnnnnnnnnnnnnnnnnnnnnnnnnnnnnnnnnnnnnnnnnnnnnnnnnnnnnnnnnnnnnnnnnnnnnnnnnnnnnnnnnnnnnnaatccacaaaacaccntgtgcctctanatgaggtgccctgaaagcaatatcacttctga

SEQ ID NO: 300772 - DNA, 710 bp, Homo Sapiens
  misc_feature (530)..(530): n is a, c, g, or t
  misc_feature (577)..(577): n is a, c, g, or t
  misc_feature (665)..(665): n is a, c, g, or t
  misc_feature (667)..(667): n is a, c, g, or t
  misc_feature (697)..(697): n is a, c, g, or t
gcttggttttcagtgaatttacaattaaatcttcccacaatctctaacagctcaagctgtaaaaaacattcttcaatgtaattttccacaaagacaaacttgttagataagttatgtgttccaattttttccccctgaagactttcctcttgaaggagatttggacctgctaggtagctgctatcctgaggcttctactgaatattatttgggattccttttaacttttcctgttctggacttcctgtttcctgaggggattccattcttttccctttcttggttactcccttatttgatgaaacacatctttcaaaacttctagggaaatggaacatgagatgtaaattttctttctaacttccatgtccataattttgatagcttccaaattttcctaatttctccttacagagcacatacaagtttttaacaaaggacaaaccaccatgtcaatgcgttctagtggcactgaaggacagactggtatatcaattgatgtgctttttcaaaccatacataccgtgttncacatcataccatgacacacactggtcctatatgaaatttttaaganaactactctcataagtggcacatcatctatatgttaattaatgcaccttaagtgcctgaaaacttttacagattttagtttctttgananttgtttatgatactaattttaaagattatnataggatttaccc

SEQ ID NO: 300773 - DNA, 643 bp, Homo Sapiens
  misc_feature (546)..(595): n is a, c, g, or t
ggtattaattcttccaatccatagcctggaatgtttttccatttgtttttgtcacctatgatttctttcggcagtgttttgcagttctccttgtagagacctttcatgtccttgggaagatgtactcctagatacttttctgtggcaatggtgaaggagattacattcttgatttcgttctcagcttacattggtgtacagatatactactgatttttctacattgattttgtatcctgaaactttactgaagttgtttatcaggtctaggagacttttggtggagtctttaagggttttctaggtatagcatcatattgccagagaagagagatactctgactaccttttttcctacttggaagccatttattccattctcttgcctgactgctttggctaggacttccagtactatgttgaataggagtggcaagagtgggcaaccttatcttcttccagttcttaaggggaatgcttctagcttttgcctgttcagtatgatgttggctgtgggtttgtcatagatgactcattattttgagnnnnnnnnnnnnnnnnnnnnnnnnnnnnnnnnnnnnnnnnnnnnnnnnnnaatgcctaacagtacagagccatgactcaataaatacatgttaaatgg

SEQ ID NO: 300774 - DNA, 600 bp, Homo Sapiens
ggcaagaggtttttctgtcttcctagaatgccactttcctgttgtccacctgtgtgatgcgcagtaagactctcaagaggtatttcgacttgtaaagcttccctgcgctttcataatactttatgtattatctattatgtatcatgcttatttcattgaattttgttttcatttaaacggtacatttttttcacaggaattttaaacctgagatctacaagaatgggtccagggatagaatcaggggtctatgaatttaaatgagaaaaagacacaactctattattattaaacacagcctgaaatttggtgtttccttcactctcaaatgcaggcaattaacaaggtagtattaggcagtactgggtatattagtaattacacagggtagtatattaggtagtggtgggtagtatactagctagtatactaaattaggtagtattaggtgactccattaacaagagaaatcttacatcttttcatatcatattatagttgttgcagatactttgaaatatttatgctcatcactacttcaaaattctggtacttatatctgctgctagaatttattatttaatgcattaataaagcatt

SEQ ID NO: 300775 - DNA, 696 bp, Homo Sapiens
gagttactatatatctttcaagataaacctcttggttaacctttcttttcatctcctgtggtgttctttcaaggttaaatttgagaaaatggagtagcgtagaacatagtatgcagcagttctctactacaagttttaggggccatgctagtcaggatgttgttggttcctttgttttctggtattagtttttagaagcccctcattaatccatactatctttaaggatgttagtaacctcatcgtatagaatttctgcattctaaaggaaacataagcttgtttcagtacactcacgctgtagattaattctgatattacatatctccatcagactttgtaccctctctcttccatcccttacccttaccgattaggttggtattacctaaaaatccatagaaaatgtccaggtgaattgccttatgctttctaccccataaggtataattctagaccagatcggttatgagaggctctattccagtctgcacctgctaagaatttgaatctattttagtaccaatcttggagttcttgtttggctctactcttagccaaccccacagagtctaaaattggatctgaatccagtatttgccagccagtgacagacataaactaggttctttataaatgtttcatgaattgacctgcatccctgcattgaatcaggatcttattgtccattgggaa

SEQ ID NO: 300776 - DNA, 342 bp, Homo Sapiens
  misc_feature (201)..(254): n is a, c, g, or t
cccatgttcacctcctatggtatttttaaatcaggggttaaactatcaaaaaaattgtgaagattaaaaggatgttaagaatatacatgcagcttccccaggggaaacaggcatagacatcattaaagtcaggaaccaaccaaataaaagggaatctacaatactagtcatgaatatttgagttacaagaactgattttgnnnnnnnnnnnnnnnnnnnnnnnnnnnnnnnnnnnnnnnnnnnnnnnnnnnnnncatagattattttcaccctcataaatacactgagggtaaacagctacatttgagttccccttccaatcagtgtcatttgtcagctatt

SEQ ID NO: 300777 - DNA, 356 bp, Homo Sapiens
atgctgtattcacgttctgaactctttccagttattttgtgagtatgggtagacaagattcttagaacagtcttgacagtctctgagtttattgcttattggtgggtcctatgaaagataaattacttctcacagtttaaggaatgtcctaagttgatctgcactaatttataggatttagttggagtttaaggaatgtcctaagttgatctgtactaatttccaggaattaatttgcaccttgggctgtgccttaaattctagctggatttatcagccagcttctatttgtaatatgggtgactatggtccttaactcctctcctaatttttgctctgagaagaaaattatcatc

SEQ ID NO: 300778 - DNA, 364 bp, Homo Sapiens
  misc_feature (125)..(205): n is a, c, g, or t
acctttgtcatactgttttctctttagaaatgtaatattacctaaaaaataacttgaaatgtggattaaatttatgcataaacaagttcattgaatctttattcacaaatataaatatgtatctnnnnnnnnnnnnnnnnnnnnnnnnnnnnnnnnnnnnnnnnnnnnnnnnnnnnnnnnnnnnnnnnnnnnnnnnnnnnnnnnnttgcaaactaaaaacacagaaataccattgaacataaacttatttaccttccctccctttcatttttagatttatttatgtatcttcagtatttttaccatctttctcaatggaggaaaatgttgaagaagaaaattcaatataccatgatattaactg

SEQ ID NO: 300779 - DNA, 617 bp, Homo Sapiens
ctgtcttatttcctgtttctctactaggggcacagcagcctgcagcctaggatatgtcttccttaaatccatgaaggaagacatgtgcttttcaccacaacctccattgttcttgatagtgcctttaggtttgagcttcttcacagactattgtaaatgaaattaattcctttgggaagagattgggagaatctgttttctgacttgcctctccctcttcttttccccttagcaaaataatcagaaccaggtctctggagctaggggtgaagactactgcaggcttctctctgggtgataccacaactctaggagctgagtgctagattggggatagagtagccagaggtcctcttggcttgcctttcccactatggaaccacttcctcatgagccagggcaagacagtcagggttccagtattctcagtgttctgtgcccaaggtagaccctccattccatgagtgggggctgggtcaatgaaggaatccccctcctcttgactgaacttgcctggaagtaacaggtgactggaggctagatgagaaatgttcctatcctcctcttcccagggagaaagcccaccaaatgagagctgtgggatgagggagccctgt

SEQ ID NO: 300780 - DNA, 462 bp, Homo Sapiens
ttatactctatgaaacccatatatggcatgatacatagtatgattgtatatatggtataaatatatggtatgatcccatgatatgcatatacgtacatatgaaaattagagtaaataaccaattagttatatctctattttagtaacccatagggatactcctgatctttttacctgctaagcaaaaagtaaacacaaaagcagcaggtaaatatatgtattatgattctactttggtaaaaacaattgaatccccacatatgtgcatctaaccttgcataggtttgcacgagcaaggtaaaagctgtggaaagacacacaggctgttattagctacctcaggatactgagattgagggttgaggtagagaaaaaggggataattaacttcatacatatttgtatcatttcacacattaaaacagcaagtctatacttcaaaagtcatcaaataaagaaaac

SEQ ID NO: 300781 - DNA, 403 bp, Homo Sapiens
caaataatatactgtgacgaatattgtatagcactcattccctaacatatatttaaagggtcatatgtatctgtaagcaaacaagataaaaatacaagctgacagaatatttacaaaagaaaactacataaaagtgaaagtgaaaaacctcactagtttccaaagagataataaaggaataaatttgttttgaaaaacaaaaggctgtttttaaattataataaataattgcaagaatacaaaatgtgggcaatctcacatactgtgagaagataacttggtataatcctgctggaatgcagtttggcagggaatatatattcaaaagccttaggttcacaatctttgacaaagtaattctagtgttaataattcatcctgaggaaacaatcagggatgagaa

SEQ ID NO: 300782 - DNA, 621 bp, Homo Sapiens
  misc_feature (330)..(367): n is a, c, g, or t
ctgagaggtccactgtaagcctgatgggatttcctttgcaggtaacctgcgttttctttctggctgcctttaacattctttctttcatttttaccttggaaaatctgacaattatgtgtcttggggatgatcttcctgtgtagaatcttgcaggagttgtctgtatttcctgtatttgactgttgtcctctctagcaaggttgtggaagttttcatggacaatatattgaaatacgttttccaaactgtttgctttctcccccttcctttcagggatgacagtgatttgtagatttggcttctttacataatcccctacttcttggaggnnnnnnnnnnnnnnnnnnnnnnnnnnnnnnnnnnnnnngtctgactgtcttatttcagaaagccagttttcgagttctgagattctttcctcagcttggtttattctactattaatacttgtgattgcattgtgaaattcttgtactgtgttattcagctatgtcggacccattaggttctttattatactggctattttgtctttcagctcctgtatcactttattgtgatttgtagtttctttggattgggttttgctgtcctcctgaatctcaatgatcttcattccta

SEQ ID NO: 300783 - DNA, 491 bp, Homo Sapiens
gcagtttttactatgtgaccctgtgcctgtcacagtatttcagcctgtaaaatatggacaatgtttgcctttttggcttccagttagctttgtgaggattaattgagatgagtgcaaagctcatttgtaatgtgtggcaggtggttttattactattttgagcagtagtggaaaagcccatttgaactggtaggatgagataagatcatggtggccttgacaactacatggaggagccacttgggtatgggaaagtttgagcagggaaagaaagaatgtagtgaaagcagtgtcaggtcaaagaaaggtttgcctaggagtgatgtaaagaatgggatggaggagtgggcacggaaagaggaaagaggagacatgtctgagggaccaaaaaggaggcagcaagtccaaggtcacaaacctgagtgactagaaaacttagcagcatcactaacacccagttggtgacgtggaactggtgctctcctgggaga

SEQ ID NO: 300784 - DNA, 703 bp, Homo Sapiens
  misc_feature (550)..(585): n is a, c, g, or t
ctggtaaatattcagaaaataactggaacacaagtactttaaaaactaatccagcactgaaagaatagaaaacactgtgccagtgcattctacaaggcaactcacactatatgtgacgccaaatgttaacggctcattttactttttccagaaaataatctgagctggttctcaacccaggcatatttcctatgctccctctatataatatacttttcccacacttaataaaattcttgtgactgccagctgggttaaacttgtgagctttccttctgctttcttggcttgtctctgttctacttgatattatcttcctgagacttctttgatgtcatcctaacttttccctgattatttcaatcctactatggctaaaacagtgcaccaactataaaactggaattacattcttcttttccatgcttaatgggttcttcctaactttgttctctattattaataagtctctctttttcaaacccaaatttttcattttgtactaacaaaatttttttactaattttaaaacttatatatgatattgtgnnnnnnnnnnnnnnnnnnnnnnnnnnnnnnnnnnnnttacccatattcccactaatcaaagatgaggtaaaatttgattgctttttttgtttcctatactgaatgtttaattaatgattttgaattttttcttattaatagcaaaagtattcaa

SEQ ID NO: 300785 - DNA, 540 bp, Homo Sapiens
  misc_feature (132)..(186): n is a, c, g, or t
  misc_feature (192)..(210): n is a, c, g, or t
ggcttctgcaggaagcagcaacacagcacaacgtgtccagggttgtttcagacactgattctcgatttagggcaacttcgtccccatgggacattttgccagcctggaggccttggtggttttcgtgatggnnnnnnnnnnnnnnnnnnnnnnnnnnnnnnnnnnnnnnnnnnnnnnnnnnnnnnntaccannnnnnnnnnnnnnnnnnntccagtgagtggttctgactttatcaaactcagatctgttttaccctctatccaccatccagttaccgccacagtggaaatctgcatgtccaaggcaggctggctcagtgattttgcggggatttgacctggtacccagacaccatcttcgccctgaagtaactcccaggctaatggcatgaaacggagccaaccagcattagtggtgccaaccagcattagcggatacagagaggggctcttgagccatctagtctgccaggactttcttgcctgttttctgtgggcttggtatctaggctaattattggaaatgataataatttgggt

SEQ ID NO: 300786 - DNA, 571 bp, Homo Sapiens
  misc_feature (448)..(457): n is a, c, g, or t
caaattggtaattatttcagaaacaaattaagataacatcttagaaaatcaatttatggacttgagccgagtgcttcatacaacgaatgggttttttctaggtgtttgtcaccgggaattttcctgagaggcttgtatatattaatagaaaaggagtgtagcttttttttctcttcgttataatttaggtaaagtcttacaatgtgtgaacaaggctgtcatttttagcttgcgtttgaacgaaaacatgctatactttttggagaccctgattgagtaatcagtacttggggtagtgataaaccacaggtgagctaacttgcggcattctttagattaaaatttgatcgtcattgtttgttcccaacaatgatttgccaggaatggtatgcatacttctcttctgccccattcttccttgttctaatctcttcttaaatagttctgnnnnnnnnnngctgaacaggaattcccaagtaaataattctttcttgtgaccgagggtgcagttggtgaggtcttcttgccttctgaatggccagtaactgcttccggactccggaaaatatgt

SEQ ID NO: 300787 - DNA, 720 bp, Homo Sapiens
cagacatccaaaagattaggagacactataaacacttctacaattaaatttcaccttttatgtgaaacagacaaatttcttgaaaaatagaacttgctgagtttcacgaaataagaaatatacaaaacagttgaatatctactaaagaaattgaatctactattaaaatccttcccatagaatatgttaaggatgataaatatattgtggatatgaagaagaatgaccctatattctagagatataaactacacaacggtagtaaaggccacgatgtctctaatttacttttaaatttgctaaatatacctaatctaagaaaaataaaaatatatatacaggcatatctttggagatattgtaggttctgatccagaccactgcaaaaaagtgaatttgatgataaagcaagtcacacattctgtttcccggtgcatataataattacgtttacaccattcatagtgtactacgagtgcaatagcattatgtctttaaaaacaatgtacataccttaatttaaaaatattgctaaaaaatgacaacgatcatccgagccttcagtaagtcgcaatctttttgctgttagagggaatactgcttttatgttgctggctgccgactgatcagggtagtggttgcttaatcgccatctaccggatggcagcccaaacttcaacatcaaaaatactttgcaaccctgtgaaaccaatgcccaga

SEQ ID NO: 300788 - DNA, 416 bp, Homo Sapiens
gggaaaaggttgcagacaaaagacacaaaagtgagaaatcagaagagccaagaatcctatcaaactgcactggcatttctccgaatgagaacaaaacttctttttgtcctttttgcaaagttcttaccatgctcatgacagaggagactgcttctcagcaggagaaaagattcactgaactcaatgggatcacatttatttaagctgtttctttccccttcaacatagagacgcaacctgaaagtcctggagcttccagggctgcagggaatccaggaacctctagaaattatacataatattgtatgggcatgtttatatgcatctttttaggtaaggatgaatgttttcatcagatgatagaagtgatcttggtccacaaaaggttaagaaccacgcctttaagatccgcattc

SEQ ID NO: 300789 - DNA, 186 bp, Homo Sapiens
  misc_feature (45)..(58): n is a, c, g, or t
agataatccagacttaccttccagaaagggcctcaagcaataagnnnnnnnnnnnnnnggcagagagagccaagggaagcccatggagaccatagttaagtgagggcttttgagtccaatatattggacttgtattctgtctttattagcattcaaccttaggactataatttaacttactttaca

SEQ ID NO: 300790 - DNA, 536 bp, Homo Sapiens
  misc_feature (135)..(151): n is a, c, g, or t
  misc_feature (278)..(406): n is a, c, g, or t
aatcgaaatagagtcttgctatgttacccagactggcctcaaactcctgagctcaagagatcctctggcctcagccttcttagtagctgagatatggtgcacaccactgcagttgcacctggttcaaatagggannnnnnnnnnnnnnnnngagctaggatcttgctctgtttcccaggcaggaatgcggtggcaccatcatggctcattgtagcctctacctcctgggctcattcaatcctgccacctcagccatcagagtagctgggactacaggnnnnnnnnnnnnnnnnnnnnnnnnnnnnnnnnnnnnnnnnnnnnnnnnnnnnnnnnnnnnnnnnnnnnnnnnnnnnnnnnnnnnnnnnnnnnnnnnnnnnnnnnnnnnnnnnnnnnnnnnnnnnnnnnngtgtgagccactgtacctggggataccttcaagagtgggaattatgaataaacaaaaccaatcaatagccatggagtgggctgtcctgggcagactgggacacagggccacctattgctcagctgaagtt

SEQ ID NO: 300791 - DNA, 581 bp, Homo Sapiens
  misc_feature (267)..(318): n is a, c, g, or t
tccatttctgaatctcaattattttcatttctcctattcagtatagtttttaatagatagcattgcattacatggatgtcccttatttaatcaactgtttggtatttcttttctgtttttcaaaatctaatgaacactccagtgaatatccttttgttcgggatttatctctagaaggaagattactggctaaaaatatatgtacatttaacattcatatacatatctatacacacttttttttgagacagcgtttcactctgtcannnnnnnnnnnnnnnnnnnnnnnnnnnnnnnnnnnnnnnnnnnnnnnnnnnntgggctcaagcaatcctcccacctaaacctcctgagtagctgggactatagacacgtgccatcatgccagctgagtttaaaatctcgttttgtagagacatggtcttactatgttgcccaggctggtttcagactccttgggctcaagtaatcctcccacctcagcctcccaaagtattgggattataggtgtgaaccactgggcctggcctatgtatacataattaggctatactgtctataaaatttggctatctatagtc

SEQ ID NO: 300792 - DNA, 433 bp, Homo Sapiens
  misc_feature (323)..(323): n is a, c, g, or t
  misc_feature (339)..(339): n is a, c, g, or t
  misc_feature (386)..(386): n is a, c, g, or t
tagtacatgattatctccagatgatgggattatatgtgcttttttttccccttatttttctacagtgtacatatgtcactttcataattcttaaaagcttgagccattatctaaggacaacactgaaataaatatacaggtaagacaaactagaagagaaattctggcagtcaacaccagtgctgagaaaaaacaccctattgatatagtcagtgtgctcccggagagagcgctgggagggctaaagtttcctggtaaccaggagcctaaatttatcattcctaagggcttgctgatggcacctgagttaacttaggaaaccnaaggtgtggtccaaangttagcgctcttcatactcggtaaacctactgtgttcaggggttccngattttccttaaatcctttttattcttggatctcactcttcccaggg

SEQ ID NO: 300793 - DNA, 425 bp, Homo Sapiens
ctgaaagaaatgaagatttaacttagctagtctgcacgaacatcagtgcctccaccacatcaggaaatatgttctcaaaaggtcatgtgcacacacatccactgcaaagaagaaaaacagttgttctgggtttcttgacaaatcagaacaaccagtctataataacagcaactgctggcgggcatctgtagctcaacaaaccggactttgtgcacctggcctcccacagaagttccacaaggggacctcgaaatggtgtcagcggaaggactgggcagccacggcagggggaacccaggccccaggctcctcttctatctcccagggccgaggctaaggcaaagcctcattctctctgggttttggtatctttgtgataaactgagaggattggtctgattttggtccgattctacaaaacattt

SEQ ID NO: 300794 - DNA, 187 bp, Homo Sapiens
gagaaatcctggctgaaggtgtagcaagagccagaccttgaggcaagacacatattggagaattcaaaggataggacagtggagttatgattcaaatgcaaaacaatagactcaggacattgagctcagggtcagacttagagggtcctgagctcaatgtcctgagtctgaccctgagctcaggacc

SEQ ID NO: 300795 - DNA, 616 bp, Homo Sapiens
ctgactctgtctgggcattcttcctgggctagagatgctctgcctcccagcagaagacaagagccctagaaagactgtcattcatttactggagagagaaatggttcatctacacacacactcagagcctggctagctacaaagccgtggtccgtggtaggatgtacgtcttagtggaataagtaaccttgagcagacaatggatccagcagtaacaagcctgccctgatgccggcgtaaattccgaaggagctggagaacgattcttcccttcactttatctaaatcctctgaaggatgagtgggaggatggtttcttctcccttcctgaaggttgttttgttggtgccttatgctaagagaactcagcagatacaaatttattattttcttttagacagcattttccctgcagttagaagaaaacagcagctcacattgaaaaatatctaattcccaaaatacgtgattccaatagggagtttatagaatttgcttcttaccaaagcaaaatcttgaatacatgaaatctaaaatcttgccaatttaatgaatgcctaataatttttaaatagcatatatcattttaatacattaaatagttggaagattgttg

SEQ ID NO: 300796 - DNA, 553 bp, Homo Sapiens
  misc_feature (367)..(403): n is a, c, g, or t
  misc_feature (416)..(459): n is a, c, g, or t
ggtgggtccatggtcctttgtgtctcactcctctcccccttgtgttctttgctgttcccactctcagtgcctcatgtggaaccatattgtctcttccctacactagggcattaatttctaactgttctccccacctccagggtgtgtatggccagattagtgttactgaggcatatatttgctttctcacttcactgaaaatcttgactggtttcggagtcatagcagctcaaactaaagtccttacaaaacatactatagaagggtttgtcataacctgactacagtctgtttctatctttagttctcattcctttccttcagtccagccaaactgtataaatgccttttcccatggtccttctannnnnnnnnnnnnnnnnnnnnnnnnnnnnnnnnnnnnaaagtaagggcgnnnnnnnnnnnnnnnnnnnnnnnnnnnnnnnnnnnnnnnnnnnntatgatggtttgtgactggtgtactttctagtgaaaatacttaagaaaggtgagagacattagcatgtacacaatattccactttaaaggctga

SEQ ID NO: 300797 - DNA, 512 bp, Homo Sapiens
gtagattgggctgggaatcaccaccctatcttattctcatactgcagtggcactattcaagatgctgggcccaataaaagagaccctttttacttagctgaaagcaagaaattagttgaccttgcttgctgcttctgtgaactttttgatccctaaaacaaaattaagattaggtttattcaatcacttccttctaaatatgaccttccattctaaagcaacaactcagcagaataccaaggaccctcaggaggacattgacatatttgttcactaaacagtgtgacaaaaatacagcttccttttgtctgtgcatcattatctcatgtcatacaaacattccaaatctgcattcagtgccaagcaataggcgaacactctcacaaactattaaaccataagtggaatattgtacctgttatttagaagcatatggaaaatgactattaataccctatgtattcttttcaataaggtgattaaacacaaccgtctataatgtacagaccccc

SEQ ID NO: 300798 - DNA, 461 bp, Homo Sapiens
gggatttttaggctatgttttaccaactttgcttttcattttgagcaaaaaaggaatcccactggataattttgagccaggagaatacatgatctaactttcatttttaaaagagtaccctacctgctgtactaagaatagattgtaaagaaacagggcagggagatccatctaaataggcagtgaataggacctgggtattataagagggtattcaaaaccacatggagattaaagttctggatatgagggatgatgatctgggacacttggatgtcttatagttactcatatgaacggggaaaaatgggtcatgagattagtcttgatcgtctcatctcaaaatatttgaaaaataagctcaaagttaatttaatcatattgagtaaaatccatatggttaaatagaaaatttttactgtactaatgaccaaataagaaagactaatttgtggctgggc

SEQ ID NO: 300799 - DNA, 530 bp, Homo Sapiens
  misc_feature (305)..(468): n is a, c, g, or t
gcaagtaacttaaacactgtactctgatgacatgtactcaattgtagggggaaaactacaaatattcttcttaataactttgtttttcatagtgatgtggaattatttcatgtgtatgtggattgagaaaatgactaagtgtgttgatgtttgggagaaccccctgtgaagaagagggacacttacatggagtaggcatcaaggaagaagttggtgcagttgacttggaatcagcatcatctatatggactcattatttctcaaacatgcacatatgtacacacttcttccagctctagctagannnnnnnnnnnnnnnnnnnnnnnnnnnnnnnnnnnnnnnnnnnnnnnnnnnnnnnnnnnnnnnnnnnnnnnnnnnnnnnnnnnnnnnnnnnnnnnnnnnnnnnnnnnnnnnnnnnnnnnnnnnnnnnnnnnnnnnnnnnnnnnnnnnnnnnnnnnnnnnnnnnnagaagaatgataagcaggatgagaaggaagaatacaaaatgagcccagaattagcaggggga

SEQ ID NO: 300800 - DNA, 289 bp, Homo Sapiens
gggcagcaaacaggaccagaaataaccaaaagaaggggggagccctaaaaataggtctacacttttgcttactcactatctagttatcctgagtacttttctaaattaatttcaaggaatatatctacaaaaaggtgtcttacagtttgcaagtcaggattattttttgcctaaaagtataaaagtttcactataaaattttcccttatacataagaaagtgttactattagttaactccaaggagaggaagtgagggtccaggataggaagtagatttttcagttctg

SEQ ID NO: 300801 - DNA, 713 bp, Homo Sapiens
atcatcttcaattattaacatctttgtttttttaactaagagtttcacctctgaataaactactcattgaagttctttgacttctaccattcaaagaaaataatcactgactctgtataccagattaaatttgggacacaaaaagagtgatgagttctgttctctcttaatatcctcgtgctattaagtttctcttgagaacataagataaacatttctttgatgcacaatggtatcttcagcactgaatgagcggtgacattcacttaataaaccacgggttcttctttcaacttaattaatatcctttggaggaacctatgagaacctcatcatatcatgtacagcctattgtgccttactcataaagctcttctaaaatagagatttaagaacaagtattctagttgtaaagaaaactctttagagacttttgactggtcagtatactgaggtgtgagatttgattcatgatgaagaaagcctatagattgccaaaaaattaattctccaaaccacctttcactctcagaaaatgagaccacaaaggagtatgctataaatcaaatttgccaaccaattatgtagatattactcattctaggactaatgatgatggtaaagaagttgccagtgttatggcaatgaaaatttcagaaaggaggagttgatgatcttctagatgtatatgaacacctgtctatatctgcatg

SEQ ID NO: 300802 - DNA, 414 bp, Homo Sapiens
  misc_feature (183)..(269): n is a, c, g, or t
gggcagacaccgaactagctgcaggagtgttttttcataccctagtggcacctggaactccagtgagacagaactgttcactaccctggaaggggggctgaagccaggatgccaagtggtcttgctcagcagatcccaccccgatggagcccaacaagctaagatctactggcttgaaattcnnnnnnnnnnnnnnnnnnnnnnnnnnnnnnnnnnnnnnnnnnnnnnnnnnnnnnnnnnnnnnnnnnnnnnnnnnnnnnnnnnnnnnnaagcttctgtagccagattcctctctagattcctcctctctgggcagggaatctctgaaaggcaacagccccagtcaggggcttatagctaaaactctcatctccctgggacagagcacctggggaaaggggtggctgtgggtac

SEQ ID NO: 300803 - DNA, 226 bp, Homo Sapiens
gaattcgataaaacatttcaatatggtcagtctaactggcaacgggagtaccagaactgagcaggaaaataagaggctgtggcagcaatccagatgagaaatgacactggctcagtccaggatttcatgactggacatgagtgaagaaaaggactcacagatgtctccaagatttctagcctgggtcaactagaaagatggagttgtcttcagttaaaacaaaaac

SEQ ID NO: 300804 - DNA, 501 bp, Homo Sapiens
gctccccttgattaaaaaccgcctaaatccagcccgaaaacatcagcctcatgactcatgtcagcataaccagaaacattccaaccctaagataaacccgtctccgaccaaaaacataccaaccctgagacagcctcccctctgaccagagatattcaaccctgcaataaactctccctcacatacaaacattctgaacctatgataagcacccccttccaaaacccttaaatgtgcttagtctataagagagaagagctctgacctaactcagccagaagcccctctcaggtttctctaaaataaacctgtgtttaactgtcaagtgacatttcatgcttctttcctctttaattcttacagtgagtgtgtagagcacgcttgacataagtgactccaccttagaaaaagattccatgttacatttcattcaaaaggcatcatgcctacaggagccagatgttcacctgatcaataaagaccacattcaaacagttaagg

SEQ ID NO: 300805 - DNA, 593 bp, Homo Sapiens
aagaacatcactggaatgcatcacagaaatactaaacttgacacaaataatttccaaaattgaactctcaaattttcaccctgtattcatcaggttctagttaggaaaaaagaaaccactctaagcattaaaacagatacaaattaacagagaaatgtggttacatggcaatagaagatccaagactccaaacagggaatgggaaggaacaccaaaatgaacaacagcagtgatggggctcagagcacactaccccaaaatataccacctcgacatagtgagtattttaaatggaagagatctgaaaaatagcagaagcaggaaggtctctctgaccttgtccctcttgtcttccctgaaacaagtcataaaacctagaagaaaatttctgaccttcccctgaagcaggttgtaagaccctcatctgagacatgcccttcctatacccagaggaaaggaacatccttatctctgaagacgaggggacacagaagaatctggcaaaatcaggtcctactatgtttcccccagtttactaccattagatcacactcttttaccctaccatatttcttcatgggtcttcactcttt

SEQ ID NO: 300806 - DNA, 536 bp, Homo Sapiens
gtgtaatgtagcctaagtacacagtgttgataaagtctatagtagtgtgcagtaatgtcctaggccctcactctcactcacccagagcaactccaggtcctgtaagctccactcatggtaagtgccctatataagtgtaccattttaaaattttatttactgtacctttttttgtttggatacgtttaggtacacaaatacttcccattgtgttataatagcctaccgtgttcagcacagtcacatggctgcacaggtttggagcctaggagcaacaggctgtcccatacagcctaggtgtggagtaggctctgccacccaggtctgtgcaagtgcactctgtgatgattgcacaacaatgaaatcacctaacaacacattactcagaatgtatcgccattattgacacatgactgtatatatacatatacatgtatatacacatttcggcttacaaataataaatagctgcataatcatatccaggcaagaaacagaatggtaacagaaccccagaaacccacaatgtgtccctt

SEQ ID NO: 300807 - DNA, 666 bp, Homo Sapiens
  misc_feature (621)..(621): n is a, c, g, or t
ctcgaccgtgacacctagaaataacccggttaagagaaatgcacaacagctatccatcctgccctggttcaagcaaaaaggaggacaaaccaggcagtcagtcaatgtgttttagagttcagaattaaaatcacacaataactccaggcccaaggcattaaggcagaaaaggcctataaaccctggagaactgaagacaaggttttagaccatactgaaaactcaagactgtccaactgatgtcacaaggcaccagtgcttgggcctgatttcttatctgtgtgttcccatcaccccatccctgcccaaagccattcgaggatgcttatgtttctgggctgctgtacatatttgtgcatgtgtgtttaagagaaagataaagaaacagtcaaggcaggaaggcactgaaccaatgtctatgggtcaatgcaaatggcctgacaagaaaaactgccataggctaatggtttttcagaacattttgcaaggtatgtaactggaaatgcctctagcctttagccacccacatctctcttctcattctgtccttactccctgcttttcctgctggggagatcctctcttgaccctaaaatcctactaagaaggttgacctacttncacctggcctggtaccaattatagaagtaaatgagaatctgaagg

SEQ ID NO: 300808 - DNA, 480 bp, Homo Sapiens
caagcacatcttaatatcactgttgtattaagttttcaagttccagttatttcataaatgatttttttgtttgaatcagtatccgtatagggctcatagattttattgatgtcgcttataactgtgtctatagttcttcttccgttatttccccatgtcgccccaccctttccttatttagtttatgaggaaattggatcattggtcctgtaggattttcctctagctggattttgctgattttcacctccctggtggtatttaacattatttgttaaattgatggttacatttagaggctccatcagattcagatgtttaagattttaaattaaaacattttttatttttggcaagtatactttatatttagtactgtgtatctccattaggaggcacctaatttttggtggtctccctgctgtgttttgagggctcaggtgacaaattgaagcgattccagatggatcagtgttgagg

SEQ ID NO: 300809 - DNA, 388 bp, Homo Sapiens
  misc_feature (234)..(245): n is a, c, g, or t
gctatcctattaaatgttgtggcttttaaccttttattctacgagcctcatttgtcctgtgttctcctcttcctcagagccaggctattttgagttatgctgttagccttaaaggggaacagaattgtcctggcacttgaggcttgtgaagctaacagatcacagatttttaaaatgactaattattataaaatacttagttttgcctcagaataatgaccttggtccaggtgnnnnnnnnnnnnctttagttgttaactgggaaccaagtaccagactttatatttaggcctggctgtaggcaaggggattaattagtcaatacttgttgagtagtttatggatcaaagatagtacaagtgtgttgtagtgaaacactacaaagcag

SEQ ID NO: 300810 - DNA, 683 bp, Homo Sapiens
tatcaacagtattgattgagttgattttatatttccaccagttagtataattgctaaagatgaaaccccttccccagagcagtagaatttatagtggaatttgatatgatgtttactattagtaaaagtgatgacatataaatatatatgtttaaatattttagagatgagaatgtgtcttttattttgtgatgtagctgactttctctgaagaatagtggtttccttttaattcaaaaattgccatttattccagagcagttatgtattgcatgcattaaaagaatcatctttaattctaacaagaaaactacatgaaggaattctaatctagaaatttaatgcatatttgggtctgtctggctctaaaactcaagttatttttacatcatactgctgtcaggtgacttcttccacattctaaattgcaaatagtcataggatgttagagacggaaggaacgaagtattggtcatgtagtaaaactttttggaagggccaaaagaggtttatggacttgccaacaaccaacagatagtggccagactagaatttttgtcttctaattactgatatttgctgtttccaagctcctttccgttccatttaggagcagttaattaaacacctactctcttgggacattggttatattattcaactctctctctttctcatatatg

SEQ ID NO: 300811 - DNA, 321 bp, Homo Sapiens
gcaggggaaactgccactttttaactatcagatcttgcgagaactcactcactatcacgagaacagcatggggtaaaccacccttatgatccaatcacctccctccctcgacacatgggattacaatttgagatgagatttgggtggggacacaaagccaaaccatattaaaatagtactgaattttgaataactgtaattgtgaattgatgttaaaatctgattgaaagagtacatcttagcacaacaatacggtatattgcctagtaatagaataatgcttcaagaaggagctctggagaggggacggggtgcttattt

SEQ ID NO: 300812 - DNA, 421 bp, Homo Sapiens
  misc_feature (231)..(371): n is a, c, g, or t
gggcagttcatttaagaaattcataaaatctggtatttttcctccaacagtagtacagatcaattcttacgatactacagttactagaaatacaagtttactaaaaaaacaagaactgcagcattttctacagaattctgaattgcctacttttctcagttacaattaaacgccaaacagaatgaattgataatatcataatagaactaatacaagaatatgccaatggcnnnnnnnnnnnnnnnnnnnnnnnnnnnnnnnnnnnnnnnnnnnnnnnnnnnnnnnnnnnnnnnnnnnnnnnnnnnnnnnnnnnnnnnnnnnnnnnnnnnnnnnnnnnnnnnnnnnnnnnnnnnnnnnnnnnnnnnnnnnnnttttatagcccggtctctaaataaataatacaaacttaaaagtaaaattt

SEQ ID NO: 300813 - DNA, 228 bp, Homo Sapiens
gagatggggtctcactagctcaggctagagtgtagtcacagctgcactacacagcaaaatcacagctcactgcaacctcaacctccctgggcccaggtgatcctcccacctcagcctcccaggtagctgggactacaggggtatgccaccaagctcagctaatttttaaaaattttgttgtagagacagggtctcactatgttgcccaggctataataaagcagagtt

SEQ ID NO: 300814 - DNA, 579 bp, Homo Sapiens
  misc_feature (133)..(141): n is a, c, g, or t
attagggaaacaactcatgctttttgcttttaccagataattttgaaagacttgttcctaataaatttggcacgcaatttcctaagatgtccacttctttaaaagaaatgagaacatgtagagaaaattttgnnnnnnnnntgcttgttagaaaagaaatttacatttagagacagattttttaaaggaagtattttcacaaaaggcaggtgacaacattatcacatgtacacaatattatggacacttcctagctttagacagactgtcagttttgttttgcagaaaaccacacaatggcttatctgcttcagagaactttataaacatgataggtaacacattagcatttctaagaaaccatgggaaccctctctgctgagtgatagctcatcatttctccatctctactctttgaagctgggcaaggtaaactatataatagatgtatttacgaaggaggtttaataaggtgaagagaagagcaaactagtcctacttcagagaccctctacaagattctatatttaaatgcagaaagatgtattagccgcgtataaatcttgctacctttgagtc

SEQ ID NO: 300815 - DNA, 314 bp, Homo Sapiens
aaaaccctagtccagacgcaatggggcactttacagaggaggacaaggctacgagcacaagcgggggggagcaaggagaatgcggaagatgctggaggagaaacccggggaaggcacctgggaggcaacccaaggacccagaggatcaatgacagccgaggcaacctggccactgccactgccaacatgggcaaccccaaaggcaaggcacatggcaagaaggagccgactaccctgggagaagccataaagcacccggaagacctcaagggcacctggcccagctgagagaactgcacctgagacaagcagca

SEQ ID NO: 300816 - DNA, 903 bp, Homo Sapiens
ggtggaattcctggataacagtcttgcctgaccgcttgacggccgccgaacgatccatggggcagccgctgaaggggagggtgacactagagattgccctaaatgaacacaacaccgaaggctgcaacagcaactgactctaccactccgaaggaataagccgaaacacggcctgcggatggatagcccattacccacacatgagccattccgaaaacggaagcaagcctgttacactcagctgaagttttatcaactaaggatactgaaagaggccaagtgctccgctgcattagaacaatggtcacagggatcctcaccaggagtagcccccatcgccagaaaccacctaagaggcccctacacgaacaagcaacgccccatggggtcacgctgaatcatgagaatgcagcaccccaggccatatgcaggtcacacggctaaggctagacaccatgctattcacaccgcatctgcaggtacactgtccaccacaggcttgaacccgtcacggatcatgcctcagaggcgacgtccctggcggcagaacacccgaggatgctgataccttgaccctcacccctgagagccccaaaacccccaatggcagtctagcacggagaccccctcacaaagccttccagccgctttaaacacaaccaaccctagggcagcccccaggctctacagaatgtaagccccaagacaatacgtgaaaagcccaatgacgtcgttgacccatggccgaaacgggacccccagaacggacggccaggcagcccccctaaaaacattaaatccctgcgaacaatgtcgtcagaacgccatgagcggacaagaccccttaacatcctccctgcaagggttcgaccctaacctttattcgccgatctcgcgccatcc

SEQ ID NO: 300817 - DNA, 598 bp, Homo Sapiens
tcgaggaaaaacggcccggaagatgggctatgagattaacaccatttgatggaagccgagatattttggggacacctgaggggggacagaggggaggaggaaacagcaagagggaaaagagggagacgaaaggatgcaagagggggtccgcggggaatgaagacataagcgcagagagcaagacgactgtggagcaaaacgtaagagagatcacacaggggaaacaggatataaaaggtagaacagggcccaaaagggaacaaagacagaggagactagggccagcgcataggggtaaagattggaattgactccgaggatggaacaggaaacatggagaaagagtatgacaggtgcaataggacacgaagagcaagatgccaaaaccttatggaacaggggggggagactactaaaagaatgacaacaggaacaagaacaacgctggaccgaaggaaagggagccaatgaatgagtgaagcaatggagaactctggagggagcatagagcagaacgctatgagaagggggagaggagaagccagcaggatggggcataagaggagagaaacagatggagaaccaatggagaaaaaaa

SEQ ID NO: 300818 - DNA, 717 bp, Homo Sapiens
tgccgaaacggctcgacagtgtggtgcaattcgcggaacttcggtcccagctcggttttcggctaagtttcgacgtggaactcaacaggggaggctggacgcttgcatggcgcttgagagatgccatcgtgcctggctcaaataagcgcttactggaagcgaagaggagcagtactgaacgcggaagaggtagctgaggactgggggatttggagcgatcatcgaatgaccatggcggttgaactccagagggacagatgctagcttaaactggctgagggcttggaactactggaagatgatgaagaggagaaggatgatgatcgacacatgatgagagagcaaaggatagagcgtgccacatcctgagactaccatcatggtgttagagtcatgctgacgtgtctgatgactgcatgcactgagagatttagaaaccaatggatagacttgttgatgtaccagagcgattcacaggttcgccaggactactaccagaacgagtgtattgaccaggagcacgcgctgcacgagaggtgacaatggaccagaatggggagttttcagaagcttggatggtggagaagatgccgtacatgcggcataaagcattgctgggacatgtaggtgactaattgaatggagcaagacgaaggtgaccttggtcaagaacatgaagctgaggaaatgggaacttgaaaatgtgggacttgataa

SEQ ID NO: 300819 - DNA, 416 bp, Homo Sapiens
accccgctcggatccggagaaacggccgccagtgtggtggaattccagaaatgcatcaaacagaactaatgcctgggcatgagggagtactgactaaacaacaattaaaataaataagcggccaagcagctgggaccacaagcgaacgccatcatgcccagctaatttttgaagccccagcagagatggggttttgccatggcggccaggctggctcgaactccggacctcaagcgaaccacctgcctgggccttccaaagcgcggggataacaggcgtgaaccaccgagcccggtcccttggtcctaaagggattcgaagacttgtgaacgaagtggaaacattgcatagaatataatacacaaacggctggatttaaataatacgttggactgatgttaagtatttttgggcta

SEQ ID NO: 300820 - DNA, 354 bp, Homo Sapiens
aattcctggcgtgaggacagagaggcaagtgccacgggccaaacaagagcaccatgcagaagaggctctgcaatagaggaactgctccttaccatcagctgttacaaagccggggacaaaggggatcccagactacgctgtacataattgtgcgtactccatagatagacgatgggtccagcaccaaggagcccagaaaaaactgaaacggtccggaatcatgagagccgccaatgaaaggtctcgccgagcagaaaaaacaggctagagccacggatcccggccaagacggtccagaagcccaactgagaaaccaaggcatctcagcggatgagggaaacgagaaagggacac

SEQ ID NO: 300821 - DNA, 404 bp, Homo Sapiens
cggggaaatcgccccgagggcgccccaacccgaaaatggtaatgcaggtttggtagtctaggacctggggggctgataggtactgggagcattaagaaattaaagctccatagggacttctcggcttgctgtgacatgcccgacacatcacgggcaggcaaacttcactgggtaaaagtaccagacaagctgaaccctagcggggccattcagacggggccctgcccttgaaagtaggaaagaggtgcctgaagaccagacataaaatgtgccattgcatagaggacaagctgtcactgctggatgcagctaaataagtagcttggaggaattctgggtaatagacatcagagggaaaaggcacatgagaagaagatgcggttaaaggattccgtaagagagta

SEQ ID NO: 300822 - DNA, 693 bp, Homo Sapiens
gggagaaggtggaattcgagacgtgagagtacgacgatgaccggagcaggggaaagaagaatgggcaaaaggagagggactgatacagaggcagaatggaagagatacgctgggagtaaacgagcgagggagtgtggaccaagaggcagagagggaagatactgagatcacagaacgagaacatagggaaagagctgtagaaaagaggtggggcaggagaccataggagaagctatcagtagagagcaggcatgaaggcacacaaaggacgaacgaccgatcatgaacgacaacaagccgcagaacaggaaacgatacgatcaagggagtgaagggactgccgaaagaaggggagggaaggttaaccaacaaccaaacagacaagggattagtatggagctatacgaagctctagaggaggatagcactaaaggactgaagaggcgagaaagaaggggatcaaaggacaggaacggacatgacacgggagacgtaccaggggcaaacaagcacaagaattggcgcgggacgcacaggagatacatcatgagaaatgcagaacaataactaaggacgagacaggaggcccgtccaggtaaagaatggctgaaaatcccgatggacggacaaggaggaaagaccggctgaggatggtgaaagaaaagggaaaccgagggacacaggaggcggcaa

SEQ ID NO: 300823 - DNA, 1008 bp, Homo Sapiens
  misc_feature (890)..(890): n is a, c, g, or t
  misc_feature (915)..(915): n is a, c, g, or t
aattcggcagacttgatattatatgagaattttaggaacaaggaagagctgaaaataacttacggtgttaacctgaccaagagaatggttaggttaacatgaacataaatgaacttaccagcaagtgtggagtttttctgaaagaacaatacgaatctgattttatcattacagggtggaagccacatgtgctgttattaagtggaaatgtctcgtgaacatgtggaaagtgatgactggaacttcagatgaaagtcaaagctggagataggagattcagaagtcaccccaccaaagaaggaatggttaaagctataagaactaatgagatcctatttatttgcttattcaatcaacatatgtagaactaaatgctaagaatgtaatgataaataagacagaaagggaccttgcccatatggtatttacaatctactgccagttcataatctcctaaaaaataatgtagaagaacaataacagaatcaaagaaatcttgaacgtctatatttaaggcgttgaatgtaccagaaaaggccttaaaggaggcagaaaaatagcaatgagacaagtttgcgaattctaaaaccaagacaggatttcagaggaagaaaacgcatgtaatatatgggcaaagcttcacacacagaggtgatgcatcctggtgaccaatattacaaggacgagagatgatgactgaagacaggctggaggacttggattgaggtcaacgggatgaggataatttcacccatggtgcgatggactgaacagcaggtgcgtcataattgggttaagctttgagaaaggggagactttagatgcctacactcattccggaatcgggcttcctaaccatgaaaaagcccaggatggccgggtatctgccngggtcaaccaagccattttttttancacgggtaataaggtaacccggattctttaagccccttggcttaggaaccccccaaggggaggccttatctcgagggcataggcacttttccg

SEQ ID NO: 300824 - DNA, 458 bp, Homo Sapiens
  misc_feature (31)..(31): n is a, c, g, or t
  misc_feature (33)..(33): n is a, c, g, or t
aattcggggtttgaagtaaggagggtcactntnctgaagctttttgaagtaatctagccaataaaccagatggatctcacagcagggcaggaatatctaaaggagactgagaagaggatttataggggtagaatcgaaggctaatgagatgttggaggtaagcaaggcccagatgtctaacttcagtgaactgcaatgctataagctggaggatgaccagttttggggaatgtggtggggaaagtgatgaggttagtttgaacatggagaatgtgtggtattagagtagatgttgtatctgtggggggtagggggaaaaaagacagaatggcagacaggcaatgacagagcagctgccctggaagtcaggcagaaagccaaaaaaagggaagaagacagctctatgagtgaaaaaagcacaatgagctagccaggcagcagacatctgagaaacacag

SEQ ID NO: 300825 - DNA, 765 bp, Homo Sapiens
  misc_feature (194)..(194): n is a, c, g, or t
  misc_feature (223)..(223): n is a, c, g, or t
  misc_feature (291)..(291): n is a, c, g, or t
  misc_feature (627)..(627): n is a, c, g, or t
  misc_feature (653)..(653): n is a, c, g, or t
  misc_feature (675)..(675): n is a, c, g, or t
  misc_feature (680)..(680): n is a, c, g, or t
  misc_feature (693)..(693): n is a, c, g, or t
  misc_feature (708)..(708): n is a, c, g, or t
  misc_feature (739)..(739): n is a, c, g, or t
ataacaataatagctaatttatggactcttgagtagtacttcgcacggattatccaatttttaggaattttagggtcttaggaatatgtacattacttcatagcagtgagagcccttgttttaataaaaaggggttttgtatagtcttcaggggaaactgtagttattggttaaaaatcttaccattttcctgncagattctatacaggtaaatataacaagngaagtgacttcaccacctactaggtactggtgtgaaatgcagaccccgtggctgtctggaaacacctncaacctccacactgacttgagagtgcttccgatgctctcccctgtagacaatttaatgagctctaagttcctgaaggcagacgccagcttaaagatggcacatggcactgattatcaactacattaagctaaaaagataacaattctctgcagtctaaggagaaagccaatatttgatttcacctgttgtgaccgccagatggctgggctgctgacaatattagatgaggcaatgcattgcccatggggaagacaacaaggcaggctttagagcaaggcgaagcaagggtgtgaacagagaggaatgaggggaggcacctactaaaattacccttnatcagcagcagaatgcagatgggaangctcaaaaaaagcactggcagnctcangatatggggaggngggccaaaatcccanggcttgggggcagagacaccccgatgagagnatcctgggcggaccatggggaccctt

SEQ ID NO: 300826 - DNA, 567 bp, Homo Sapiens
  misc_feature (448)..(448): n is a, c, g, or t
ttttttttgtattaacaaaaatttatttctcacagttctgggagctgggaacttcaagatcaaggtgccagtagacttggggtctggtgagggcccacttctgttcataaagacagtgctttcttgctgtgtcctcacatgggaaaagtacaaggcatctctgtgggtccttttccatgcagcccattcatgagggttccatcctcatgacctaatcacttctcaaaggccctatctccaaataccatcacatttgggatttgtgaatgttgtaggggacgtaaaccttcagttcatagcagctttctcagctatattcaaaataccctacatattttagaaattctctatttcaaaacagtttatgggccactttacctcagatttcagtatctaccaaggacgatcatcttcctttcaggggtttcttaaaaggtgtattacttanacaggataattattaagacaagggtaaggtcttgcaccagcaattaagaaatactttgcctacccatttgtgtctaaacttcttccagatcatgaagctctttgagattatgatgaaag

SEQ ID NO: 300827 - DNA, 498 bp, Homo Sapiens
taggcatggagaggaggcggtcttttattaagagtggacaagatagtgtcttcccctagatgggttagaactgtcctggacagcttctcgaagcttctctctgttctcagtcttcctggaacctctcttcacctcttgcctcttgtgcctaactttcccctgtcctcaatgtctagtctcacttgttttcctcccccaattttaaaacatacagagttcatcgaaagatacataaattttaataggtctgaagctcatggccattggagatgagttaattctcattccctcaagattccctattttgacagctccctaaggaaaacacaacttgctggcttttctgttacttttgtcccccatgagcaattttgcatctgtgcagttggactgaacatctccagtgtgtcaagcgctctcctccagcagacaccccgtgtccagcagcaccccacggggaatgctccccttcaatgagctttgtcgtctctaaaaagg

SEQ ID NO: 300828 - DNA, 164 bp, Homo Sapiens
gaacatctctttcgctgtcagacccagagaggagagtgagacaaacttgagttgacgagaatggaactttaatttctgggtggttgttcgaaatcatcagtctggttttggggaacatgactgtctcgaaagtcctttaactctttccagtcccatagcttttt

SEQ ID NO: 300829 - DNA, 440 bp, Homo Sapiens
  misc_feature (76)..(85): n is a, c, g, or t
aaagcccggtcttgcttttctaagggtaactgatttgcagttgctactttgaggatgtttatttgtccactgcagnnnnnnnnnncatgttaaatacgatcatgtattcaatcatgtattatgtactgaatttctaagttatttttacatacatgtagatttccttatgcttttaatatatttgaaatgaatttattcagagaataaaatattacctcgatataagttgttggcagcttgaaaattagtcacttccatataaaatgggaaaccttttctagaatagaaagggtgtccagggtaacaaaaatatcaggaaggttttaagtaaaatttgattagtctgcaatctgaggtataagagaaaggatgagctcagaaaattagaagatctgagttcaagttttaattccactccttgctggctaggtaacaatgaa

SEQ ID NO: 300830 - DNA, 114 bp, Homo Sapiens
ctgattaaagatcagcgcctgaaacagattctccgggatattaccggagacggagtgttttacttattagcctttcttaggtggacatttccatttgaattaaaagtcctttag

SEQ ID NO: 300831 - DNA, 530 bp, Homo Sapiens
aataaatccaaatatatctttagttacaataaatgtaaaggtactgcactttttagttccaagacaaagattgttaacactgcatttccaaaaatccaggtatatgcagtttgtaagtgctatgcctaagttataaatttaaaaatggttaaaaataacaagtgaaaaataatatatcagccaaataataatcaaaagtaagcttggatagatatagtaagaaataacactttaagaatgaaaagcattgctacagattaaaaagactattacaatttgataaaagattaaaatattctgaaagatacagtttctaatttatatctgaagtctggtttaaatttttttataaagctaaaattaactgaattataaggggaagttaacaaattttcagtaggagatttgagcataatgttctctgttaatgattgaccaagcaggtcttaaatctgtaagcatgttggaaagttgagctctacaaatactgcacttgatataatggctttatgttggatattatgctacaa

SEQ ID NO: 300832 - DNA, 604 bp, Homo Sapiens
  misc_feature (485)..(485): n is a, c, g, or t
cttgcacaaaacgtgattttgcttggaaaggtgctgattctaacctggtcctgctctttaagtccccttgctggtgatggctgattccagggactgttttgggctttgaacacctcttggttggtttctgagatcctcttggccttactttgaagtggccttttctttaaggatcatgtccacgtaacctgtattcttgctgctttaactcatttcaagcctctgactgcaggtccatttcatctcctgtcaggttggttaagtaaagtcagcccaaagtcaagaattacttaaagagatgcaaaccaaatatttgggctccaactttcacagggcttatagcccttattagcagtttgtgaaactttgggtttcatgaagtgagacctgtcctctggctactgaactccatggagccacgttcatgctccctcttctactggcctggctgctcctccctcaatgaggagaggcagctggctcanagaggtgggacagacacatgctgtcatcagttaagtgagctcttttccagaagtatctcagataatgttgggttaagacagatagatagatgttgaaaatggtggagatcattacacat

SEQ ID NO: 300833 - DNA, 521 bp, Homo Sapiens
agcgaaataggttatattttaaaaacaatagaaaggcaataagttgcgataagctcttactattgaccaaggttatacaggaaagagactgaagtgtacccttgaataggttttctgtagtcagagttctaaactctaatttgtaacttggactttctaattgcaaatggcaataactattaagttatcagcaataataaatttagcattaaatttgagtacaatgttttgtttttgcactccccatagtgcgtatgtattaagacagtggatagtgtttaggtcctgttaattttctttggaattcaatgtggttgtgaatcaaacttaaggaaggaacgtttaaatagcaatgagatacagaattatgggcctttggaacaagcccgacttcccctaaattctccttagtttgttaataccagtattcagattcctgattcatttatacatctgtttccatatggcagggacattatgatacttaatgaataatgctttgaggagttctgcagttaact

SEQ ID NO: 300834 - DNA, 325 bp, Homo Sapiens
gaaagaaaaatggattgagagagtggctgagagtagaaatgcaatactactggatggagtaactgaaggagcaggagagaggcctgcgtacactctgctgctcaagtccaacccccaaatcttcaagtgaggggtgtggcctgtgaaaggcaagtccaaatgccctttacctcacccctcacattgctgctgcaggtgcaagcttcctatgaaggcagggctgtctacctggaaaatgaactctggttttgacattgcttgttcttacatttaacaaactcaagtctgttttgtgcactggattgcaagtggggtggtctaagaa

SEQ ID NO: 300835 - DNA, 510 bp, Homo Sapiens
gagttatgtatgtccagctccttttttttcacagaatgattctcctcaaaaatgtgttctccaaccaaataaatctgaaaataatgcaaaaaataataatacaacagggaggggaagcatttcaaatgattacaaaagcagactcttagtcatccacacatatattaaatcctgtgttctaaactcaaacaccttttccacacagtagacagctcttccaattttacaaagacatttctgtaccatgcataacgtcaagcataaaatatggaagaaatttataaaagcaataactagtccttttgaagactgaagaaaagcacaaatacattacacatttagtctcccaaatgttaatctcattggaggcaagaactaaaacttcagagcttactatgtattccccggtattcagctaaagaactagtggagtctccggagccaggtttcacagcttttacccaactaaagaatctgcttggctccaacaactatatcctttatattatc

SEQ ID NO: 300836 - DNA, 467 bp, Homo Sapiens
  misc_feature (362)..(362): n is a, c, g, or t
cggcacgaggagagcatataatgcagagcatacaaataggggccatcgaagtgtggcaatgccctaggtatattgtgattaccacaaggagctttattcctcatacttagaaaacaagcacacaaagaaaaatctgccatctgtctatttcccaattttccttctgactgttcctttctccttcctcacacaattaaaatgctaggtttcctgtaatcgcaatcttcagggaatttttcactcaagcccagaaaataaactccagataatgatactgagaaatttattggttggaaaactgctatctacaggccttccactacctatttcttagtagattttacatttctaaagggttgtanaacaccaaaacaatatatgacagatactgtgtttgggccttaaagcctacccttcatataaaaagtttgttgactcctaggctctcatttgcaagtagacaaatg

SEQ ID NO: 300837 - DNA, 241 bp, Homo Sapiens
accattctgtcaaaaatacagtaatacaagactggctttagtgtcactagcttacactgcttttcatgtatttaggccacctgttgttcctggtactgtatcatgcaataagtcatcaagggcttagtctagtgtaccggtaagctagtggcactgaagcgcttttcacaatctcaacatacatttgaattgcaacacacagatatttctagagtattaactagtgaacccttttattatt

SEQ ID NO: 300838 - DNA, 437 bp, Homo Sapiens
  misc_feature (272)..(289): n is a, c, g, or t
aaggaggttaagataattgtgactgcagggctttcacaagaaaacaggtgagttgcagtggaattggaaatgattcaaatgtcacatgagttttggcaaaaaatacatctaatcatggaagctaaaagtgggaggggggtaagcaaacactgaaagattaaatgcataccagaaatgagaatgcacactgtctctgccatatcaagaaactacaaccctaaacacaggagcattccaataaaagttaacaggttggccacagaaaactggcnnnnnnnnnnnnnnnnnnccattgtcatttttaaaggtacaagcattgagttctgccattctttacttttctgcatacataaatatcaagttctgggcttattggaatggttcccataacaaaaactgttgtttaaaatttacatgttctttttcaacaaatggta

SEQ ID NO: 300839 - DNA, 216 bp, Homo Sapiens
ttggagagcagaaagataagggccatacttcagagctctagtcccataaaaatcccacaggaggagccactgtcacggcttctcctcacatagatgggcttgcacaacttaagagtaccaaggcatacagcaggagcggtcttcccgtgcctactttaaacacttccatatactaattctaaagtacagtaattctgcatttttattggaataagg

SEQ ID NO: 300840 - DNA, 381 bp, Homo Sapiens
cattattgtacatttcctaagatcaattaatgtagtatagaagaggtagaagaagggccagaaagatcagtggaacaaaatagaactttatggtacagatggcatttttaatctgtggagaaaggtagattattaagtagtgttgggagaacacatttggaaaataaagacaaacctctacttcacaacataaacaaaaatacagttagattaactatctacatgtagcaattaaaacctaacatgccaggatacaatatacagaacactttaatagtaacctttaattatgggaagagtgagttataaacccagaagtcacaggaaaattttgataaattagactctatgaaaatttaaatctgtatacagcaaaagaga

SEQ ID NO: 300841 - DNA, 437 bp, Homo Sapiens
tgagccattgcactaacccaagtttactttaaatcaatggttctttcagccaactttaagtgcccaccacatgccaagcactaaactggagatataaagaaagttcctagacatccaagaagaagcctggataaaggagttagagataaaaacttcttttcactacaagattccctcaagtagcaagcccaggctcccggcaccctcagggcctcacggccaggcattgcatacatgtctccctagcaaacaggtatcacagcagcacacagcagccaccccagtcacccagggcactcccctctcctcctaccttcctgtctcatgttgtggtttgctttctgtttattcttaccctttacaccttgtcatgaggctctcatcaaacagaaaagacaaaatgctacatacaactacaacctagtgcacaaagggct

SEQ ID NO: 300842 - DNA, 621 bp, Homo Sapiens
atacaaaggagcctatgaacttcataaattaggagttaaagttattggtcttccaggaacaatcgacaatgatattcaagaaacagattttacaattggttttgatactgctttaaattctattgttgaatcagttgatagattaagagatacaagtagatcacacaagagatgttttattgttgaagtaatgggaagagattgtcaagacttggcgctttatggtggaattgcaactggagctgaaattattattacaaatactcacattttaactgaagaacaaatcgttaatttagttgatcaacaaatgaatcagcaaggaaaaacaagcacaattgttttaacttctgaacacatttataaagacttaaaagcaattgctaagtttgttgaaaataaaacaggtatagcaactatagcgatgtcactggaacatacacaaagaggaggaagaccaactgcatttgaaagaattttagccactcaaatggggcacaaagcagttgaactacttttagaaaataaatcaggcttagcaatcagccataaaaatggtaaaattgaggctgtagacattaccaaagtgtttgttactaaacaaccccaagacgataaact

SEQ ID NO: 300843 - DNA, 380 bp, Homo Sapiens
gaagtctgttgagtacaaattaggctaagtaaaagatagccagagttaacaaaaattgatttgaagggtctatttataggtaaagttatgcccacaaagtattgcttacatagaaatgatttgtgattatgccaatcatataaatagacgtgtcctagaaatagtgtgtcctcttaggcatgtctttcccctaataatttatactagggatgaagaaagagtttgctaaataaaggtaaacttcaacccagtccaccaaactcactgagtatcgctcattaatgatcttttcctttcgataagtggtttaaagtgagcagagaattgaactctgcttcttgcaccgcatgttgagtggctgctgatccattcacactatt

SEQ ID NO: 300844 - DNA, 323 bp, Homo Sapiens
ctttctacagaagatctagtcctgaaaccagatgagttagttctttaaaaagcaaaatacaaagcatacttagcatacaatttccaggttctgaagtgcaataaatgtgcaatgtgggaaatacatcaaatgagaatggatttttacaatttgacttcataagaagaatatataaaagtaacatgtcagaaaaagctctcacaacatgacctcgttggaaaacaaccgttttcctcaagtgagtcaagtgccagatgacgcagcagctggtgcttctctcctgtgtgcttccacaggaccggcctctgtggttggctgtttcc

SEQ ID NO: 300845 - DNA, 396 bp, Homo Sapiens
tgggcccaagcgatccttccacctcagcctcctgagcagctgagactacaggtgcatattcacgatgcccaactattaaaaaaattttttagaaacgagtcttgctatgttgcccaggctgatctcaaactcctgtcctcgagcaatcctcccacctcggcttcccaacattctgggtttacaggtgcgagtcaccacacctgggtcaggtaagacttcttgaacgcacactgtgggccagtgatgactgctgacacctgggattcccaaagcaaagcaaatcacaacatcctcgcgcacttggatcctcctcacagacacagacagtaaacaaacaagcgcagaacatcaggaaattacagcctatgtgaaaagccgtctgctgtactgaacatc

SEQ ID NO: 300846 - DNA, 160 bp, Homo Sapiens
gacaacaataacaaaaagtagataaatatgaaggccagagaaatggcaacttcttcacgaagggaagctgcttatcctcaagcaagtcagttgaggactatcctgtgagctattttccgtgccttgttttccactcatacagggaagtatgccctggtgt

SEQ ID NO: 300847 - DNA, 100 bp, Homo Sapiens
ggtggggaggggtggttaggaagcaagcaatgttgaggttctaacagattggtaccatgaacatgtaatggtaccaatccatatctttgtgctattttct

SEQ ID NO: 300848 - DNA, 494 bp, Homo Sapiens
ctgaggaagtgatgaaagaatggaaatcaatatgtaagagctcacaagtcagagtgagatgtttcttcctatactgcctgcttctaatgagcatccacttcattgaaccacctcttcattgagccaaacctaccatacagggatacattctctggaggaaagttgagcaactattgcatttgggacattagagtatgggtgggctgacaggtatgtgtatgtttattatccaagacagccaaggtgtttatcctgttacaacatcccagaggacagaggctcttatttgtgactcttttttcttacctgtaacaccagaggcataacgtacatcataatgctgcatcttgttgacgcttcaatgctcacaattcaaaggtgatttctgaagcactttgttacactggggacagctcctaaatcctcccactctttttttgcctcaccttggagtcttgggctctgttgatcactgactctgccaggtctttcag

SEQ ID NO: 300849 - DNA, 480 bp, Homo Sapiens
cctaatcatatctagtttgttctcatttaatattttatcaatcccatcatgtgcatacagaggttaaggtgatgtataaattttatatctttcaaacacattgatgctaatcagctcttgatctaattactatttcatttattcagaaatagcatttagacataaaaaccaatgtctcactttgtaaaataacctttggctaatttacacacatctaatacagcgtgttatataagttttaagtaatacaatgagtcactactatcattcagttttaaatatttttagtgttaacagggctgagaatatcatgtggttcagtcttctgaaggaagttatataataaaagcatagtgcctttgaacatgaagactatcctcaaggccagaaatcctacaaaggaactgaaaggagagattccagagaattgctctcctcatttttaatatgtaaagtgactgttttaagtcacttcattga

SEQ ID NO: 300850 - DNA, 625 bp, Homo Sapiens
agagaggatatgcctgtccccccagagctcatcacatcactagagaatttcccagtccagaaccccttattacctccagaccaagacctctctctctggagtagtaccaactgagctgagggcccagggctaatgatcaaaaggacatcagtgtgttcgtctagaaataagaaggagcagggagtttaaacaaattttcagagaacagttgaatctagagaaagggtgactaaagatgatcatgattattgttgtcaagtagtagaaagtttctcacatataaaagagagcagattgttcttaatacccctgaaagacataattagtccagtgggcagaagttacagtgagaaaggttttgatttaataggtgaaaaagtagttccttctacaaaaatacctttttgtgatttcaaaagaaatacttaaaataaaacattgtagaagtataactttagaaagccagagtcccatgaaaatcactggtagctgtttgtttctgttcaagaaaaggtttctgacagttttccagcaatggaaaggggtaccccagagacatataggaatcagggattactgcatcaggtaaaggattaatgtagagtaacttccaagtttcctggta

SEQ ID NO: 300851 - DNA, 179 bp, Homo Sapiens
agaaaaagttggcaagcatgcatcagctctcacctgcttcagtcctcaaatgacacttgttctcagcatattggtgtaggtcacgtgtcccgacccaacacaagggaggctaagaaataaggggaagcccatggatattccatgggtggggccatgtttctgctacaactgctagcagc

SEQ ID NO: 300852 - DNA, 328 bp, Homo Sapiens
  misc_feature (136)..(171): n is a, c, g, or t
gtaaatttgcctcccgtatgtctgttgcgttgggtttctgaggagaccctgggtgaggaggatgcactggcttcccgcttctcgccccccacccctgtgctgtccgggagacagtggtctggggccactggttggnnnnnnnnnnnnnnnnnnnnnnnnnnnnnnnnnnnntgcaggccgttgaggggggctgtctgtctcaatctgtctctgctcccactcttgaggcactggttaccgcaaagtgagcagccagcaggggggcgaaggtcctgtgttggccactgcctcctccagtgctgcaagaagcgggctgaggccccacctg

SEQ ID NO: 300853 - DNA, 676 bp, Homo Sapiens
catctctaaacctctgtagttggagtctcctgaaatctcagactacctcctgctttcattttctacccagggaatacactattgtcctaagttatttagccttgaaatgtcagaggcattttaggttcttcatgtttctcccactttcagttgattaccattacaggatcttaggcttctttttatctttttgcagtgccttgcatccactggttgtttgttttttctgttgggcactacttatttccttacctctggtttcttctcctacagcttatgttctgaaatgtgtattcctaaaatactgttttcctcttgttacttttctgctcgaggacttccagtaacttaccattgtttataaggtgatgttcaaacccttcagtctggagactttctgccacctatctgactgtacctttatcttcaagcttatctctttccaaacaagaggctcatttagcagctttctctgattgccatgttcatcctacactcagcctcattcagtttacagcatggaaactgtataggacctctttcctatagaaattgaagacacttaaataggaagaaaattaaaatatacatttggatacatgagtattccagtcaaataatatctataaaataccagatagagtataaaagacaactgaaggacaacagagtgatg

SEQ ID NO: 300854 - DNA, 321 bp, Homo Sapiens
ctttaaatgccatgaaattgtcgatgattgtaatcagatacgatcccagagctgcctttttcctttagtaagggactgttctctaaggttaattttgtcaggctttgaactttggtaggggagtcatatagtagaaggctaaagaaccacagaagattagcctagtgattttcaaactctaacccaaggcaccctacaagttgttcagaaattcttcagtgccactgcaggagagttggaaagatgaaaaggcagaattctcatctccatatctcactttaggaggagcatcttttatctcttttatattgagttttcaag

SEQ ID NO: 300855 - DNA, 340 bp, Homo Sapiens
cctataaagcatctttatgatgcctacaaaaggtggagtttatttcctggattatcctttgatactctaaattggagctttccaacctgtgtgccatgagtgtctggggcctccagactggttgccttatgttactgttctatatgtgcctgaggagagaagagttggaaagcactgctctgcataattggctttcatgctttatggatgattgagaaagaaagaatttgaaagaaacaccaggggttggtgttgtagcctaagaaaatgaaagtactacctttctttgagacacttggggatggaatgatcgttgttaaggacagattctgagaaagtc

SEQ ID NO: 300856 - DNA, 301 bp, Homo Sapiens
cgctgcaaggctcgatcgtttacccgggtaacttcggcgtgttcgactggggcggcatctcggttgacccggttcgccagatcgctttcgtgaacccgagctacatggcgttcaaatcgaaactgatcccggcggccgacattgccaagcaaggcccacgcgtcagcgaaaccgaaggtgtgcagccgaacaaaggcgcgccgtatggcgtgatcctcgaagcactgctgtcgcctttgggcctgccgtgccaggcgccagcgtggggttatgtggcggcggtcgatctgaccaaccacca

SEQ ID NO: 300857 - DNA, 302 bp, Homo Sapiens
agagagaatacatccaaaggaagagggaaccaggcattacaaattgaattgaacaaggacagatatctgaagggggtttgtagttcccagtaaagtatggtacagctaggtgcacttccctggccagaccaccctacagtgtatgatccccctggggagcaaaaggctgcaggtaacactttggtgccctagaaattctgctgtggtgcaactatagtggatcacaggcagagtggggcattgttccccttcttagcacaggatactgggtcatttcaacaccacaaggatttgcagcatct

SEQ ID NO: 300858 - DNA, 378 bp, Homo Sapiens
gagaactgtatatgataccattataagctgagggatggagagatgacacttgtcatcttaatagtttaaacccttcctactatttttttagtgagaggtaagtaagcttgaatcattccaggccaatattcttttactctcaattccttctattaatataccaccttccatcccaccaatcccctcaaaattatacagtgatatccaaatgcctaatggttcaaggagaggagagaaacaacaaaatactctcgttgttgttcttggatccaaatcattatcttgctgcattttccctatcatagcacactcccaatttctttcatgagtcattggtaatgagagttctgagtacttgttaatcttgctgtacttgtc

SEQ ID NO: 300859 - DNA, 414 bp, Homo Sapiens
tagcaaaattgattgcatttaaaaattattcttgtgaaattccatgcaactataatttatcttaccagtttaaccctaatgtatcacagaaataataggaaaatagcaggtggcagtcacttgtagtaggatttatttagtttctgttttgagaagatgtagtcttttaggtataccattaagtctttaaattactcccttaattccacccgccaattctaatgcttacatgttccagccccactcccggctcacactcttaggcagaaattcattgctcctgtaaattaagtaataattaataccgctaatgagaaatctgggagtacaggaggtgattttaaaaaatgctcgtatttcctttgattagagtagcaattgttagggatacatgagccagatttggttttatgt

SEQ ID NO: 300860 - DNA, 532 bp, Homo Sapiens
taaaattgaaatgtagaaagtaaaatatgaataattttttacaaccactccaaattagttgaaacaaaatcttgaacggtcacgcacttaaatttaagctagccaaatatgttgcactgaattttgaaaagaatgagtgagataactgtaagatacgctcgttcccttttaaaaattgttatttttctttaacatgggtgccaaatcaaatatccatgggctatacttcttaagataataacagctcaaaataatattttttaattcagtagaactaatagcattatggaaaagattctattaaatgttccacaggcccactggtcctcttatataagccaaattttggccatggagcttgtgatacacttgccttacattgtagggtttcttaatttgagtcaagtacactgaaagcaattaaaaactggtaaatattaatttactatgtaaagtgaacttacgaattaacttactaaatacatatatgtagaccttcccgaaatgccattctcaattttattttatgggc

SEQ ID NO: 300861 - DNA, 502 bp, Homo Sapiens
tttaaaaagaggaccagtggatggggcttttctaggctctggctacagaagactcccctggtctttatttttttccatgttcatttatacagtgaattatgtagttatcacttatagtaatggaataagcccttgcaaactctttttttctaaacaaaaacaaggaccctgatggcagccatattgctccctgcctttcccctccttaccttgagtaatgtttaaaaagcacagagatttgcttaagggaacccatccctgctgccagcacccatttcctctatacctgttgcccctgaaagtgccattctgaaatgactaccctagtggtgtgatttaggatgtcctctaacatccctccagctggggtatcatttctttaaggttttttttccctgttaaattcagtgcttctagagaaggaaacaccttaatatgaatgagttaggcgagagttccaaaagagggtaaaaccataaagagtatgactctggaaaccggc

SEQ ID NO: 300862 - DNA, 461 bp, Homo Sapiens
tcgtacccagttaatctggcagctccttggcaccaagacatattttttaaatgcacatttgtgtatttgtacaaaatacgtatatatgtgtgtgtatcttccttttatggagtcttacagaaggaaagagtccttatactttaatacttgaagcttaaagtacaaaggatgtaagaaaacaggaaatcagagattcctggaactttctccacattagagcaaaggatttctggaagctttcctctttaagttatgccagagattcagagttagaaagagaaacagaggaggtgatagtagggacttgcctggctatagtcttgagtttcttgtccgcatctatttacttgaatcagattttccttcctttacctgtctccatgctgactctgagctgtgcagttagttccatttcacaggtctgctctttctaaactatgtctcaagatgtgctagtaatg

SEQ ID NO: 300863 - DNA, 456 bp, Homo Sapiens
  misc_feature (257)..(271): n is a, c, g, or t
  misc_feature (282)..(396): n is a, c, g, or t
cttgtggaactctctctcctgcatctgctacctgcccgcagatggtgtgagggagggttgatggcgggaagccaggaagtagatgtcatcatggtattggccaggcttttacttcaactctttttgtggcgttagatttaaggaagcagggggcatggccaacgttgagtcttggcccagtggacatagtgcggctttcccttgagcactgcccagatgcaggacctgcacatgttacaggtttgccaaaagcatcnnnnnnnnnnnnnnngagatagtctnnnnnnnnnnnnnnnnnnnnnnnnnnnnnnnnnnnnnnnnnnnnnnnnnnnnnnnnnnnnnnnnnnnnnnnnnnnnnnnnnnnnnnnnnnnnnnnnnnnnnnnnnnnnnnnnnnncttgcaccaccatgttcagctaatttttgtatggtaaagacggagtttcaccatgttggc

SEQ ID NO: 300864 - DNA, 425 bp, Homo Sapiens
cttaataccttatcatttagtctgatatttttttcacttctgtaaatattagtatttagatgtctattttagacccaaattattggttgccccagtagcataatttgaacttgaagcagggcttgagggagtaaaaagatcccagcaggatcacacagtattaaaaggtctattaagtgctattatatggtttaggatttatggaatctatgtaagtggcttaagatacagcctcagttttattcattctgcatacactgcttgagtccatttacatattattcacatttttgtacatatattctgaatatacctttccaataaaaaaactgtaatatacatttgaaataagatctactggaaagtagcataatcattgttgtttataattttattgttatatagggaaaatgtttacgtgtttc

SEQ ID NO: 300865 - DNA, 442 bp, Homo Sapiens
ttttcctaagtgccagttaaaaagcacggtgttttgagaatacaccattaataatgtttatggaatgattgcaaccaaaaaggtagctgaatatttcttaagggaaggaagcattgtgcatgatgtctttctttagaaagcttgattatgtttaaagtcctgttgcttttccccactgcagtttgtcagttaaatattattaacactggcagatgttggaaagccaagcaaacaagaattgctattaaaattggcatacctttctctgattaattttagtttacagtgtataattccaaagctctttttgtatgctgtgcaggagattaccctagagctcagttactgagcagattacaaagagactggatttggtcatttcattaaattgcaagcttgcttcatgctgccgtctaagcccaagaattggttcaagtctcaa

SEQ ID NO: 300866 - DNA, 122 bp, Homo Sapiens
atgaccatgctgccatctgttctggagctgggtctcagtgcagagggacagtgactgtggatggttgcagtctctggtgggaggtgaggatagaagtgataaagagctaagaggagcttctg

SEQ ID NO: 300867 - DNA, 572 bp, Homo Sapiens
tgacttaggtttattacttaggaatacagctggggtggaccccaggagcagagtactgcatgcagctgtgcccatgcatggttgccccagcgtagtgagatgggacctgccgcagcatgcccactcctgagctgccatgttgatccatggaggactgaaaggaggtcgcccggcatcacctcccgaggtgagacctgctgcaaaagccaagccagcagcattgacgccctttgatatcttcgccatttttgctgctgaaagacttggcttttcagtctgaccctggccctctgtgaccatgtgtctgtaaagccagtgggtcaggcccttccatgcagggccagaggaaaagcgggcccagggctgcagtgagagcggggcaggggaccagcctaccagatgggttggaaacatggctcagaaggaccaactaccccttccctttgaggagcaagtctctgccgatcagcaaggcaaggccaggagccctcctggcgaaaggcaggccacaaatctgttctcccccaggagaagtagcagtgccagggctttgcgttcctggtaacttccac

SEQ ID NO: 300868 - DNA, 601 bp, Homo Sapiens
cggagccccaccccacagccccagccccctcgccacctggggaggctgagacagaagcagctgggccccccaaagtgcctgagcccagggcacggaggagcacaaatgcccagcagggacaatgtcacagcgtctcagcggccaggcagcaggacgcagagacctctgggaggttcccggggccagccctggccctcctcctccaggggccagccgtgggatgcagaccacactctccctccagggcccatctctggggctgaggcgggcggggccggtgcccagctgcaagaccatgggatagggaaggcaggtgcttggggccacgcagccctgcactgggggcccctccaccccaggcggctcacgaggtgtcatctggagctgtccccaagccgggatctgcaggttgacctcccccacccggggctatctccagaccctctttcctccctggggagatggggcagtcccccgcagggccagctgaaaccacccccatgctgctgccgcctgagcgacgtgtgtggggaagaacttggagtgccacccccagaatgtggcgtccacctcaccagaccgcacgggtgagccctggact

SEQ ID NO: 300869 - DNA, 294 bp, Homo Sapiens
ttttacattttaaaagtttatttgattttcatattattcactttcaaagccctttcaaatagaaaaggtatgaacttttggggggataatttatgtatcgtaaacttattagaacaaaatattcctgatgtataatgagttgttttatttatacaactttttcaatggtagtttgcactattctttattatgctacaggtttatttattatgaaacaaaggaatatgtattttatgtattttaccatgcataggttaactctttgccacagatttattggttcttgatacacct

SEQ ID NO: 300870 - DNA, 450 bp, Homo Sapiens
aagtggggctggagacgccggtaggggttacggcgagggttagggggccgtgacaggcagggccccggaatgatgcggggaaggatgtgcgaacaggacgggaagctgcagctgcgtacttttccaggccttcaggaccacagcgtccggcatgccccgcggcgcgcctccctgcgcggacctgtgggtgcctgagaaggggtctgcggtgtctggattcaattgccgtcctcacggaccgttgagtctggctgtggggcgtttttctccagcccgtgttaggagaatctttgtccgaaggacctcagaatttgcagcccacctatttcgaactctaaaaataaggaaaccgctcccgagaggggcaatgaattgcctgagtaatgcggcagggcagttaaagaagtcctcgggctcccgagtcagtgctcttctttacccttggctgac

SEQ ID NO: 300871 - DNA, 426 bp, Homo Sapiens
gttgtggagtgaatgtaagttggacacagaaaatccctcataatatcctcctgtttggttgtatagtggcctatgggcagattctgtggcttagactcccagtcccatggttcctggctcctgatgtcttttcccataacattttgacattccaacaaactctaattagctgaatgatcaatcacagaaatgtaaatgtagaagcgaatttacagatcatacagctccaccctgtaaataaaccaggatgattagggtattcacgatattgcagattggccagctcatgacttgccctttgttcctagctctgtgcctggcctcagaggagagccttggtgcacgtttgactttttaatctttatttgaacctgttacacaccgtcacccccactgctctgcttgccacagacatggaaggttcac

SEQ ID NO: 300872 - DNA, 478 bp, Homo Sapiens
cactttagcaaaccctgctgcagaggactgtaaaaacaaataactaaaaataaacttagaaaatacaactcagaagcctggctctgttgctgtggtcaaatgcttgcctttgaggactttggcagattgtgctattacattgggctctaactttctggcacccgcaaggcagacctatgatgtccacatggctgactcttgacccctggccattgtgagcagaggaatcaagggtttagggaggcagtattgggcagtgtggaagagttagatgagatgaagcagttagcacagtgcttaacccatactaagtgcccccaaccctgccagccaaattaggtgcatagttttcagcttgggtctggattcaacagcattcccgctgcccactaaaagggtgggcttggacagttcctgaacctccctaaatctgtttcttcatctttaccacacacagtctgtctcagtggtggtgtgg

SEQ ID NO: 300873 - DNA, 413 bp, Homo Sapiens
tgctgtgcaggctgacagcacgagtccctccctgcacctctcagctctttttgttgccagggcctccctgagcacttgaagttgctgctgcaagagctgtgagcgttagatcaggccctgtagctccctgagcttcctcaggcagggcctcccactgttcttggttcccttcctgggcctgaggactccccttaccccttccacacccactgctgcacctgccacaccctcctcctggcctagcctgtgttcttctctatgggggtccaggactactttctccatggtggtggctcatagccagggctgcgtaaatgacctctaagggggttctctctgcttgctaagacttcctcccatttggagatcaacaaaggatgagagcaaagttggcctcctccccacctgccata

SEQ ID NO: 300874 - DNA, 577 bp, Homo Sapiens
  misc_feature (59)..(207): n is a, c, g, or t
ttagtctaaagtgtgctgggaggcataattcgatttatatctttaaaagatcagtctgnnnnnnnnnnnnnnnnnnnnnnnnnnnnnnnnnnnnnnnnnnnnnnnnnnnnnnnnnnnnnnnnnnnnnnnnnnnnnnnnnnnnnnnnnnnnnnnnnnnnnnnnnnnnnnnnnnnnnnnnnnnnnnnnnnnnnnnnnnnnnnnnnnnnnggggggaaaaaagagagagggtaaaaaaagttcaatctgtttgctagggtgtagagaatatattacaggagcagagagaccggtaaggaggtggttctagttgttttttcgtccagcaaatatgtaccacattgggtgctcttggggatgcacgagtgataagaagagtctctgccctcctggcacccacactgtagtgtagaatacagtgctacggtggaccccttgtgggagaggagatggagagaagccagccgaaaggtgcgaggctcatggggagtgccaaggaatgagaatcaatgggactgatcaacacttcaacattattaagtgtatacagtgatctgaaagagatgaactgatgtggaaa

SEQ ID NO: 300875 - DNA, 472 bp, Homo Sapiens
catttcacagttctgcaatggatgtagtattttgggattgccctgtccagaaaattttcagctacacacctttaaaggaaaatgtttctatctcagatgaaacatgtaatttgggatggttcctcctttgtcacttaaaggaagagataggaaaagtctcttacccactttaaacatgagggtaaaggtttaggtcaaacttactggctttgtcattcaagcatatctgaatcctcacttttttctctttgctttttagggtcagaactgagatattaccaagaaaaggcacaatgccataatattatggtgttatggtattttgacttaaaggggaaaaggtacttaattttggtgggatgttgattgtaccttgttaaaaagactctcattttctcatatgttttctcctaataagatggaatatggagtatactgtaataatataagtgttcattataagctatttgga

SEQ ID NO: 300876 - DNA, 318 bp, Homo Sapiens
  misc_feature (161)..(170): n is a, c, g, or t
gataaatcttataaattgaccaaattttctcaaaatcattgaactttttctaaagttactaaaaacagacaaatatcatatactaatacaagaataatgatcttacttctttggagcaatggaattattttttacatttacgactatggaaatcttgggtnnnnnnnnnntcttaattttttttccttgaaatctagtacttcattgtatcagcagtgacctagtataactcacttaaggggcctgtaacaggcaatatcaatattattgtcaattgttttaactgtcaattatataaactatatatcagataaattc

SEQ ID NO: 300877 - DNA, 218 bp, Homo Sapiens
aagtttgagaaatgctgatctaaaagatactaatgaccaggtgtgtagaggacattttcttaagcccttaagtacaaatttaagaggtaagtgcttcagccattagggttactggcttgttcatctttcccactgagtgtaaatatttagcttagggtttaaaatttgttatgtagctttttgcacttgtccatgtttatactactgtattattatta

SEQ ID NO: 300878 - DNA, 177 bp, Homo Sapiens
tttaaattagccagttattttgacaattaattttttactccacctgtatctttagtgcccagccaatgatctggcatagttaggggtgcaccaagaatgtctgtaaactacctgaaggtttgtagatatggagtacaccttacccattaatcaagctgtgcatagcaggaaccaata

SEQ ID NO: 300879 - DNA, 327 bp, Homo Sapiens
cagtgaattgctgactaacctgtctcaacacagcacaactgtacacaccttttcctggcctcatccctaacccatcatagcagcaaagaggggaagttgcaggggaggagctgctaaggaccctggactccaagtaccctgctcctctaggccagtgacatcatctgagatgtggctcaaataaagggtgggtgttcaagaaaaaacacttggggactctatagctgcaacacccactttacatgtcatttccatatgatttgtaggcaaaatgaagcccaggctgtcctagccctccaatacctccctctctcatcacctctccaa

SEQ ID NO: 300880 - DNA, 119 bp, Homo Sapiens
aaaaaacaggaggccctttttttcaccagggaacaggaccaccccggccactggaggagggcaggaccactcctccctttgaatggctgcaaatttaatgttcccaccccattcccctt

SEQ ID NO: 300881 - DNA, 524 bp, Homo Sapiens
ctgtcactctacatgaattatgtgctcaaatttgaccaactcagtttaagacacaaaacagtaatttgaagaaggaaaaatgaagagagtttctagtttaatgggttaaatttttgttgttgcaatagtaagtttagtcttcttataatatttctaaatgaaaaatcataggtatttgttaccatgtgtgaagattactttgttaaaagcaaaagtggtcgtgtgatatgctaaatgttaattactgattttatatgtttaaatcacgccaaacaaattatgtctgtgccatccagggtctgttgttaatctttttctgagtacttggattgggataaagggcttgtactatgcactttttattaatgaataaatagaaaacgttagtaacactttgtgttttctgtttggcttttgtgggaagagaagcaagcatcttttgcctagtagatgttaacattgtgtattaaacagtttctttgtaagacctaactaaagacattcctaagagagaacttaagttt

SEQ ID NO: 300882 - DNA, 416 bp, Homo Sapiens
  misc_feature (134)..(143): n is a, c, g, or t
ccattttttgtttttacttactactgaaggatctcaaatgtaaaattatgtatttggtttgagatggccacttattgtccttaaaaatccatactgatatatgcagtcattttgaattggacagtgccttctcnnnnnnnnnnctcctcttcttccatctccctcacccatgcccccacccaatctaaagagacagtgctgtacactctcatagagatagagaagatctaaaaagttgagactactcaatccagttaacaacagcaggagcactagagtttgttcatttattctctctgtaaaacaagctgtgctttttttcttctgcctttaaaatgccacccgtgtattcaaaccatggccacttgatacttatgtagaatccatcgtgggctgatgcaagccctttatttagg

SEQ ID NO: 300883 - DNA, 472 bp, Homo Sapiens
  misc_feature (51)..(51): n is a, c, g, or t
aaccatgggcaacattacaattataatacaaaatttcaaaagtagacctgnggttctttcacaaacaactaaaaaatccctcaggaaatcaaacttgaaaaccaatcctgcatgaagtcccatcccacagaattgtatacataataacttcaagtgttttttgtttcatgcacatatcagatgtttaaaaacatattcacatagcccatctgcaatgcatttttaaaaacagaatggatgagggctcagagaacttccaccataaaaattttcagttcttacaagtctgaaaactttaatcagaaggtggctgagctcaaccaatatgtggtccaagtgttctcagaccttagaaataaggttggttatttatcctctgtgacactaactatatttaaggaaccagaatgcctaaggagagggagtaaaaatatctgagctgagcaatatgactaggttattataagctcaa

SEQ ID NO: 300884 - DNA, 364 bp, Homo Sapiens
tcattcaagacaagcattaagatgcaaggacaaaatgtgctcattgtaagcctgcctgtcctatagacaaaggcattctcagtacactaaacacttgttaagagtgttgttaagagccagagtgagtatcatgtaagacacagaccctttcttcctaaaggctttgtggcatcagacacataaagggtatatgtagtgtggagcactaaccatggcagggtaatttattccaggcacagagtcataattctggaaacatctagactcactgcattaacagagcattttgtttctaaagtagacctcttatgtcatccagatttcactcattctgaccacagccaggaagctgagggtgaagcca

SEQ ID NO: 300885 - DNA, 268 bp, Homo Sapiens
  misc_feature (54)..(167): n is a, c, g, or t
gaaaaatcatgaaagtctgcacagatttagttgcaaggatgctcattatggagnnnnnnnnnnnnnnnnnnnnnnnnnnnnnnnnnnnnnnnnnnnnnnnnnnnnnnnnnnnnnnnnnnnnnnnnnnnnnnnnnnnnnnnnnnnnnnnnnnnnnnnnnnnnnnnnnnctctgcaaaagataagttattgacatgcaatatttgccaccggcttcacctgtgaaggtagataatgaaagggtatcgagtatttgtacatttatgcttag

SEQ ID NO: 300886 - DNA, 384 bp, Homo Sapiens
  misc_feature (207)..(230): n is a, c, g, or t
ctgatgccaattcaatttcagctctgcaagttcttgtcaggctaatctttaaacattgagtgatcttgagagattgttaatgaaagcagtgagtcattttttgatgattgatttgttggaaaaatgttgatgtgttttaaaaaatgtaatcttcaaaaacagaatataacctgagatgcatttgtagagacaagacggtacgagaannnnnnnnnnnnnnnnnnnnnnnnagagagagagacttttgatgaagaactaaatcttggattgctgatagcaaagatcatagtgctgttggaatatcagcaatatagagttattcttaaacacattctattaacatgtttttgtcattgggtccaaaaattttgctgctgaccagaa

SEQ ID NO: 300887 - DNA, 514 bp, Homo Sapiens
  misc_feature (259)..(342): n is a, c, g, or t
ttggttgtggatgagaagtaaatgaagtgctgagtgttaactgttgcctcagaagaaactgggagggggaagtcttagaagtgtttcaacataataaaagctctctcattctgaaatgtgggcaaatttcagggattgatagatcctagcaaactgtgtccctggttcccgtgcttgagatcttatacaggacttgaaccaggtaagctgctacaggatattgggcagaatgcaggaccaggaagcaagaaaactgagnnnnnnnnnnnnnnnnnnnnnnnnnnnnnnnnnnnnnnnnnnnnnnnnnnnnnnnnnnnnnnnnnnnnnnnnnnnnnnnnnnnncctggataaacattcaggtcacttccagccttgacattctatgactacctatatctcagggtgtttagggcacatgcctttgggtagatagcatgtggaaattgttactattccccatgctcctgtccacactactcaccaaatatgagatatccgggaagaatggagggta

SEQ ID NO: 300888 - DNA, 201 bp, Homo Sapiens
gttatggagccttacctgggcatgccccccgctgacacctgtggaaaggcatgggacagccccggcccatcccctgctgcctgagccctcccctcctctgaccttcctccttccatgaccctgctgccaggggggcttcccaaaaaagatcttgagtcttagcgatgtggtcgacacgcagagaacttggagcctcatgcc

SEQ ID NO: 300889 - DNA, 447 bp, Homo Sapiens
gtcactggacatttctaggattttggacataggttgttaaatggatgttatgtcatatgcaatgttgataggtatatgtggatttcaagactttcctacttagatatttctttagaagttccttattgagggtaatgatgtttttaaagaacatagaacattctttatgttttaaaagaatcatgccttcattaagtaggctttattctaagtttggaactgagactgttatgcttttaaagtctccaacagagaggttaaggagttaacctggggcatgccagaactgggatggaatggccttgaaagattttagtgcattgcacttgacttagataggatctttactgacccttgcttacttaggagtggcagagttaattggtggttcagatattaaggggctactgtcactctgatatgtagcttttctatcatctctgtaac

SEQ ID NO: 300890 - DNA, 292 bp, Homo Sapiens
  misc_feature (193)..(203): n is a, c, g, or t
aaagtattgtaaattatttctctcaaatttagagttattacagtttatatcaaattcaaaatgcttaatttgcttttgtgataaagagcaatagaaggtggtgagatttctaaaaattaggcctccaggtatgcatttcaaatgtagacttcttaaatgatcgggatcagattgtgctgcctaggtagtctgnnnnnnnnnnnaatgtcatttacataatcattttccatttcctaagcacaaatgaagttaacatctgagttagcttttgaaagacacctttttgtggggt

SEQ ID NO: 300891 - DNA, 445 bp, Homo Sapiens
tggccccgctcggccccaggtcgtgccttccctccccggcggaggcccctgcggactgcctagagctgggtcgcaactgaggcgttatccgcgggcctggcctcgggaagtggcggggaggaagaagaggcggccgggacgcgtgacaggagcattcgggaagattcttacggtgcccttcacgcggtgcctatggacggagaaagccgccgcaaataaaaccatcccccagagtagttgtggcggaataatctaaatatgggtgttggattgaggaaacttgaatatttttgtatcctgaagggagaaatggatgaagaagaaatggatgaagaagaccgaagataatgatgaagggataatttggaataggattcacagcaagagagacagaagggaaagacattgaagaaacagactagttaacacatgaaaaaaatagagc

SEQ ID NO: 300892 - DNA, 147 bp, Homo Sapiens
aaataatagactgcctaaaactatctcttagagttcaaaatacaggtagacttaagatacatggacagtaaggacaaaaggtgggagggaaataaaggattgcaccatcctgcaaggggtgaaagtatggatttcaagtagattctg

SEQ ID NO: 300893 - DNA, 225 bp, Homo Sapiens
ggctgcgtgtcacacacagtagctgtgttgcagtggcctatggccttgggggttgtctttaggaaacaccctgacgggaagcaggtaaagagcctgggcagtattgtgactagtttcattgttttcctcctgctgaggtctatcagagcccttgctttgtcctctcagatgggtctggctgccagctggtgtgatttgagaaactgaccttacgcgcagtcaagg

SEQ ID NO: 300894 - DNA, 557 bp, Homo Sapiens
ttatttcaaacgccatgtgttagtataagatccgaaatcaaaatatgcacagtactgtattctaagcaaaacctcaaaccttctcgttgtcttcaataccgctctatctccaagatgaggctgaaattttcagagagacttagctagaggcttagtatgtatgggagttcagcgcttctgctggtctcaggtgtggctgctgctgtcgagtttgaatgttagctgttgaaggtatcaattcagcagccatgagcagctccagacagacaggtgagctctgctgtttctgggtggatcatcacagatttagccgggcaggcagtaaggtgtcctcttactattcaaaaagtgtagactttcttacatattcgcaatacgttcacagtgtgtgcattttaaaataattcttaaaggagtaactgaaattttaccttgagtgaatggccttcataatatagcttgagaagtccttttgagtacctgtcagtgactcaacaacatttaataagggaaagtagacttttaacagttattatatatgtaacgaaaagcctttc

SEQ ID NO: 300895 - DNA, 351 bp, Homo Sapiens
  misc_feature (193)..(204): n is a, c, g, or t
accagtttgactttatctccctcgccctgcctccatccccacattgccccccactatcccagtctctcctactccagccttcatctagtgctaactgattaaatattctaagatgaccttctctggtgtgtgtgatgataattaaaaggcattcagaactgtgtggaccagactgaacctctgcactctagannnnnnnnnnnngaagcctctacaaaggataattaaaatttacaccatgactctttgtcctggggtgcactgtctgtaagccggtggagttatttcccaaaatccttggtccttcccagcttgaggaagtctgcaggactgagggagtgggacctgtgc

SEQ ID NO: 300896 - DNA, 600 bp, Homo Sapiens
cactttctgtgcaaacttaaccaagtgatgatcgtctggaagctgcattccctcatttccactgtttggtgtgaatctagtctccccactttatctaaaaggaggctagcagggccccagcctgagcagagcagctagagagtgcttccagattcctttgccaaaggaggcccattttccagctgtgagtgacatctgtagtcattggcttcattgcctggcactagccctgtctagaagtggagaaagctggatcacagctggaccacaaccagccccaatccaggatttcccataccatgctggctgtgggctctgtgagcctcagccaggtggccaggctatacttgtcacagctggccacaggcctgctgaaggaacatggggtgtagagccagagcctggttctggttctccgcttgaacagctgacctcgtgcaatcacaggaactctgcgtctccatgtttcactcaaatagagaaaatgcctcctttgtttacctctttgaagctgaagtaagtgagactggtgcatgtaaattaatggtagtagagcacctcccacatctgattttataacagtttcccatcactccttaa

SEQ ID NO: 300897 - DNA, 600 bp, Homo Sapiens
  misc_feature (510)..(510): n is a, c, g, or t
ttttcacttttaaatgccacgttgtctgcatcccaggacccaggcaaggggcacgagtgtgacccccccaggccttcccctggttccgtttccctccctagcccggtccccacgatgggtggggacagtgggctgtgacaatggatcgcgactgctgttttcacctggcggacgatgcgcccgaattcgctttaaccagatgcccctcttcgcctggagccctgggagcagtccccctctccgctcaacaataattagccttgtaagactaatggaggaaatcgtgtctaattaccctgttgaagacccaattatgcgattaacattcgtggctataagctaatgatgagaagagcctctcatttgcatagcattaagttaattgctggcaagcggaggggcggacaaggcggtgatggcaggattctctttctgaaaggatactaatgaccagagaggacgagccacctgacagctttattaattaacagcgatctgattacctaccangaatggcaagtggcctcgctgaaagtctcggctctttgagaaatgagagatgggagccctcactgccgatgtttcttccacacgctttgc

SEQ ID NO: 300898 - DNA, 584 bp, Homo Sapiens
tacatctgcaacaaccctatttccaaagaaggccacattctgaggtactgggggttataacttcaacatgaattttttggaggaaacaattcaactcctaacacatctctacccaacctctgtaggttccctcaatccaccaaaattttttggctccactggattatctagcagttaggaaaccaagatcattaaatgaattcaccgcaactacagtgagactgactaccttagcttacctctgtgaaaggagttaagccaaaggaatctgtgaaattttggagagtttgggagcatttgggggcaggaggcaaatgttcttcctttaaatcacaacacttagttctcttccatttataagactcacccctccatcccaacccctgcaccacaggacaaggaagtgtccttggtcttcagctttcatccctgatggtgaaagcagttgctcctgacctatttgcccaccagcttctcctctggagcctgaggcttctgatgcctgcctggctggttctcagtaagaaggtcaagttcaaccagaggggagatgctgatgcctttcagtacttaaatatgagttc

SEQ ID NO: 300899 - DNA, 561 bp, Homo Sapiens
  misc_feature (462)..(474): n is a, c, g, or t
aacaaaacactgaccttggtccacagacaacacccacgtccacgtggtgggtgggactggctccgtcagaggatgggaagatgagaagtgcttgtcgcaggcctggaggtggggaccacccaggcatgcaggggatgctgcctctcctccatccaacaacaagcctgcgtgtgcccagccccctctggtacacgcattgctccccatcctcggcattgatcaattgaaaataagaccttggaagaaccccttgcaaagctgacattgtacgagccaaggcagtggccccggagagggtcagcgaggggcctccactgtctgagtccgctcctggcaacgcctgctctctgcactcagaggcccggtcccggcagctgccacgttgctcagaagttctggcagggggagcctgaaacccctgtctgctggcgacactcccggagcagcaggaaatctctacannnnnnnnnnnnncttaacagacaaaagtatttgactccagaatgatttccaggaattacagtatgagaacttagtctttgagatttttattttcttctt

SEQ ID NO: 300900 - DNA, 387 bp, Homo Sapiens
tttcagattgacagatggttgtagtaacaaaaaaatgaattgccttggagaattcgagttattttaggcctgcctttgacacttttatgcacttaattcactgccaatttagtctaactcctcaaccatctgtggtatggacttctcagtccccctaattggtatgtcttttatctatcccagagtcagtagtcctttaaggatgcaaatttaattcgataagaatgtggatttacttcatctttaggacagagtaaaaacctttatttcacttggtctgacccctatcttctataacttgtttttttgctcattactggcctttgcacggatgtctcccttcacctgtacctcctgcattgcctctggcagaaacatcgctacccc

SEQ ID NO: 300901 - DNA, 413 bp, Homo Sapiens
  misc_feature (308)..(372): n is a, c, g, or t
taacattgagataactggtttttaatctactttaagcagacttgctgtcaaacatctactgaaatatatttcactctaactactagcctgaggtagaggttatatagggacaacttcatctcatccaaacaaatgaactgcttcctacagtcggggtgctgcctttaacatagtcccaatatttgaatggcacacatggataaaaggatgctgtcagtcaggggctgcttgtgtgtcccaattcctaataggaataataggcatatctatgacctattcactgtgccccttggttggggaaggttctnnnnnnnnnnnnnnnnnnnnnnnnnnnnnnnnnnnnnnnnnnnnnnnnnnnnnnnnnnnnnnnnncctgagtcattcttaaggattcttaattggtctggagtgtg

SEQ ID NO: 300902 - DNA, 633 bp, Homo Sapiens
cacagaccctccctgccagagctcctggaaggttcctgcaggcctgacccatctattcctgtagacctggtttaggatgaagtctcggtgcgatttttgcagagttgggtttatctttcaactatagacccttctggctgttctcagccatatcatgtgactctgaatagttggatgaggaatggaaagaaagcaaggatgagagccgggcatgtggcagtctccgcccagcatcggctgtccgcacagaggcacagggcaggcctcctgtgcactccccacctagcactggcctgtcctgaatccccgccttccctggttggaggccagctgtggcatttgcaccctcttctcacctcaccatgcacatgctaactttaaagccttggggtctttcctgtaccccctcctcaaccctggtccaccccctctcaagatcttgtcaacgttatttttcctgtcccgtcttcctatcgctggccttcctttcccatcctaaaaacttgccgaggccctatggctccctccctttctttcccaggcagcttcttatctgggctgtctgtaccccttcctttgcaccacccaccatgccccacgtagctgaaagctgcttatcccaattgtcaactc

SEQ ID NO: 300903 - DNA, 503 bp, Homo Sapiens
tcttaattctacttttagtgcaattttcttagagctggcatcactttcatcatgacgtgagaacttactagagataggcaatgatgactcacagtcaagccacatgtcatatgctgcagacatctggactgctgcttatttgcaaatccttttcttcatatttttctcatttgtagcactggatcaattccaattaagagtttaataatgaattaactaatgatttaaacaggtggataagactaacactgaaccaatgattttaagtaaatctaaatacataaatccccccaaattattaatctatgttgtttactaagaagtgtattaaaatgatattgaaaaagtttgctttgggaaagagctagaagttagaaggtctaggttcaaatcccgcctctactccatccttgactaagatgttggacccatcacctcaactttccttgggtcattttgcccagacatgacccgatgacacagagcttacctggacctccaca

SEQ ID NO: 300904 - DNA, 438 bp, Homo Sapiens
  misc_feature (305)..(305): n is a, c, g, or t
catgaaacgattctcttttaaaaagagggagcccacggcacggacgcttcctccgtctctgaccccatgagccgacctctgactgagggaggccactggcacccagcgggcctgcgtctccttcgcgagctgaattcactcgtctcttagatgttttttctggtgcttcagttcacactaacgttttagaaacactatttgaaaaagccctttgtgcagtcagaagggtgtgtacgcagccccgtgaaagccctggagcactgggaccttttccttgtgctccggagctgttggcggaggtgagntggggcgggcagctgcccggggcacagtccgctcttgtcttctttccttagcgcttgcttcaggaatgggttaaggcctcctttcctcactgctggtagagctcagctgatgagtgcctgctgtttcccaggt

SEQ ID NO: 300905 - DNA, 504 bp, Homo Sapiens
cttaaataatgtgaggtgactgtgtgcacctagactgtcaaatggttcagcatcccctatagagccacatagtatcttgatttatgtcagtaaacatcagggcacctatggaaaagcacaaggatgagtccatttgttacagacccagggactaacagagatctacactgtaaagttcaacaaaatgctacatatcattaactacagctccttatcatttgagattctgggctaagtaagagatatcaaatatcctatccagtactgtgatacattaatgtaggcttacaggcccagaacctggcataaatcaagccaaacccttaagaaattagaatgtgaaaagaaaataatttaaaatagaaaatacatgctgcttttcctcactcccaaacttaaaacttgactggtcctacatattctacttggtatattgaatttttgcagctagcagatttatcgtatctgaggccatagtgaatagaagagctgcaaaagagcttt

SEQ ID NO: 300906 - DNA, 266 bp, Homo Sapiens
tttcgtaaaccataaagcagtttattgtcattgatgattctcagctttgcatgaacctgagggacaccagaccacttgctctaggagcccatattctgggttctttgtcctaaactactttttgggccttttcctaaaaatacacattctaagagtcaaggtaagagtgttcctaatttggtgcatggatgagagttcatgttagttttcattgaggctggaagttaaacctgagccattttcctgtccagctgcactttgccaca

SEQ ID NO: 300907 - DNA, 401 bp, Homo Sapiens
tttcttgtcgggtggatggtcaggtgcggcccgcgacgggcagcaaggcgccggtgatcgccgcagcgtcatcggacagcaggaacttgatcacgtagcccagggcctggggcgtgacccagcggtcgaaggcggcatccggcatgtcggcgcgattggccggcgtgtcgatgatgctgggcagcacggcattgacggtgatgccgcggtccttcagttcttcggccagcgcctcggtgaagcgcatcacgccggccttcgacgcggcgtaggcgcccatgccggtggcagccttcaccgcgccgagcgcggcgatgttgacgatgcggccacggccgtcggtgctcaggtacggcaacgccgcctggctcgccgacacggcgctgcgcaggttcatcgcg

SEQ ID NO: 300908 - DNA, 553 bp, Homo Sapiens
atcgactcgcgcacgattcttgaccagatgggcgccgaatcgctgctcggccagggcgacatgctgttcctgccgccgggcaccgggtatccgcagcgcgtgcacggcgcgttcgtcgccgatgaggaagtgcatcgcgtggtcgaacactggaagcagtttggcgagcccgaatacgacgaagccatcctcgccggtgatccgggtgaagctgccgcgagcggcgatttgtttggtggcgatagcggcgatgcagaagccgatccgctctacgacgaggccgcggcgttcgtgctcaacacgcgccgcgcgtcgatttcctccgtgcagcggcaactgcgcatcggctacaaccgtgccgcgcggctcatcgaacagatggaagcggcggggctggtgtcgccgatggggcggaatgggcagcgtgaggtgttggcgccaggtggtggagagtagttgattgccgcttgaacggctgacggctatggcgcgacgtactcaatgtataagacccactcgccggcattcatggggactgcgatcgcgcgtttgg

SEQ ID NO: 300909 - DNA, 559 bp, Homo Sapiens
atccaaaggcctggatctatcaactgcgcttgttttcagcgacagggtcgaaggcacagtggtggttgacggcaaaacagtcgcgcgaaccttcacgaccaccgacggctccggctggtgggaggtcagcgcgaaagtgagtgcggcagtgaagcagttgaagccgagtgatatgggtgtattgctgccgggccagcacacggtcaaatttcgcgattttaatgcggtgcttgaattctacggtgtggaatatccggcccctcaaatagatgcaaaggcgcttgggaaacgcctgaaaaaacacggctggccgccgatatccgaccagcatcgcgaccagtggcgccggcagtatgagcagctcatgcagcacaacagtgacattgatgtgcgaacgcacctcacctctcagttgcgagggttggtcaaggaccgtggggagggtgatacgcccactctgagcgcgcagtacgccaccgtttatcctgaatcgacgctggcacacaaaagtcatgcgccccgtgaacgttttgttgagtggctgggcaggccggcgttc

SEQ ID NO: 300910 - DNA, 546 bp, Homo Sapiens
ggcagcggcgcggcaggcggtttggggtttgccgccaaggcctttctcggcgcgcagtttcgtgcgggcgtggaggtggtcgccgagctggtcggcctggactcggccgtgcgtggtgcggacctggtcatcactggcgaaggccgcttcgacgcccagaccttgcgcggcaaaacaccttttggtgtggcacggattgctcaacgtcatggcgtgccggtcatcgtgattgccggcaccttgggcgaaggctatgagcaaatgtacgcccatggtgtggacgccgccttcgccttgccatcaggcccgatgagcctggaacaggcgtgcagcgaggcgccgcgtctgttgcgcgagcgcgcggcggacatagcgcgggtatggcgcacagcgttcagccagtgcagttaacaagccagcacccaccctagccagcatgcaaccttgccgcctacactggccggccacttgtctttcataggatgaaacgcaatgcacacacctgaaccccatatcgtgatccagcgctttaccgaagcccacctc

SEQ ID NO: 300911 - DNA, 329 bp, Homo Sapiens
ttccacagtccctggttcaggctcaagtatgttttgtgattcgatgtcctactgtgttcctcgcattaatcagcccctgggactttatagattaatgatcacgtttcctattcttgaagtatgcataggcacaaggaacccaatgtcttatgtcagctcactcgggtacatctggctcgggactgctttggctaagattggccagtgcgacctggcggatatagggccaattccatgggcgcgcggccccgccctggcctgaggatagtgctcccaccccgggagacttctagggcggggcccatcaagaatggggacgcggggaggtc

SEQ ID NO: 300912 - DNA, 510 bp, Homo Sapiens
tcctctgaggaagcattctgacttcccactgaccacggaaggcatgtcagcttcatgcctcgggctagagttctgataatcggggctgaggggtgaaaagaaatccagtcagacagacagtggggagacaggtccctgccctttatttgcgggatcaatcagggactcccagaaaggaaggagaatggtgagaagggccctaagagttcgtctctcacctgggggctggtgacgtggtcaccacaagctgaagacaggctaatggggtggcgggtgtgtgtttaaacctcacgtgcctggaagctgcacattgaccaaaggagggagggaagtgctaaccatgtacagagtgggcaggcggttccagggagacaagcagcatgttattaaattgggcctaggcagttggacgataatggagaaaaagcagggatgctataatgagtcctccccaagggtgagttcagcaccccagccctgttctgcttgtatcccagtgatacttgggag

SEQ ID NO: 300913 - DNA, 607 bp, Homo Sapiens
  misc_feature (385)..(448): n is a, c, g, or t
caacagtaagaatgagaaacctgtagaaataaggagttacttcagcaagatggctatatatagaatccatattcaatcaacagtattctcattccctagcaaatacataatagtaaatgcaatttttaaaaagaataccattcatagttcatggtacctaggacaaatatataaaaacttaaatggaaaacttaataaaaacacaaatgaaggcccaaataagagttatgctatagtcatgcataggaagacacagaatcccctgtataacaattagcccccaaattaataaacaatcaaaattcaaaaggattacattagaaatttacaatccgatcttaaattaatatcagagaacaagcagccagaataacaataaacattnnnnnnnnnnnnnnnnnnnnnnnnnnnnnnnnnnnnnnnnnnnnnnnnnnnnnnnnnnnnnnnngaaataaaggacagaaagcttggcttgttagatatcaagtataatttcaagttacagtaaataaaaccatgtggtgttcatgtaggtttatacaattagaccaatgaatctgaatgtcgagaaactaatccacccatatgtgtaaacttagtgttgaca

SEQ ID NO: 300914 - DNA, 554 bp, Homo Sapiens
  misc_feature (41)..(52): n is a, c, g, or t
  misc_feature (303)..(356): n is a, c, g, or t
  misc_feature (417)..(466): n is a, c, g, or t
gccctcctcctccatctcactgaacaggcagctccagaggnnnnnnnnnnnntccattatgttttctcacctgaacagtttgaatgaaatatctattttgaagttatagagaagaaataataatcttacacaagggctagtttgatggaacttaaactcttaaatttcatgtaataaatgctagttattagaagaatatgttctttagtggaatttaaaccatcaaaacttaactgggtacattactagttttaaaagttaacatgggagaaataaaagcattttcctgcactaatttagagnnnnnnnnnnnnnnnnnnnnnnnnnnnnnnnnnnnnnnnnnnnnnnnnnnnnnnaacaagcatggctccatcttccagaaatttagacttaattgttatgaggtggattccatannnnnnnnnnnnnnnnnnnnnnnnnnnnnnnnnnnnnnnnnnnnnnnnnnatttaaaacaattattaaattattaatgacttatggtggtcttgatttaaataaattatttaaaattcaaatacatgagcacttttta

SEQ ID NO: 300915 - DNA, 605 bp, Homo Sapiens
atttgaagtgaaataaaacttccttcagcagtgactatagaaacaaaagaaaatttacagaaggaatgtttaagaaaacttcagtaaattattttctcaataatcataatgttagagcagaagatagtcttagagatcattaagaacagctgctcatcttgcaaatgaaaaaaccatggcctagagagggaaagtgagtttcctaagatcactcaataatgtagtgacagaccagagatgagaatcgatggtccctaattttcagtcggtattatacagtattttctaccatactgggttagcataagaatattactaagacatgttggggttttatggcatatttatcctagacaacgatgtaaatttatttaaaaactgtactaattatggatacatcctaaagcatacgtgttatatagtaaaatcttcagtgtgactgtggtattaagtaaacagtctgttatcttacacatcaagcttaactctaagtcaaatggaaatatacaaagctagtttctattttttgtcccttgtattttagagactgaatttgaaaataaataagccaataaataaatagcgtctcttgatactgcttccta

SEQ ID NO: 300916 - DNA, 619 bp, Homo Sapiens
agatcatccacataagccgtgaaccctgttcctggtaaggaaatgaataacatgaagtgaagtcttcatctccattcccaacagtccccattctacttgcagaaaggttgcttacactgaaaatcagtttattttcccctggtgcaaagaacagtcgtttctccaaaactgaagctggaaattatctgaaatatcaggtcctccggaaaagggacgtgaagccccctttgtaatttctgcattagcgtgctctcctggcaagcaggaaacctcatcagagaagtcagccaaggaaagtctttaaatggaaattgtgcaaacgaggagcaaatgcattaaaaagttgctgacgggcatgaaatgctttgatgtgaagacggaaaactccaagcaggaaggattttaacattttgaatctgattgactctgtggtttctcagcacagttattccatgggctaaaataaatgcagaaatggtactttcagaccacagctgcagaggggatcgtggtgaatttcaatgaaaatccatttgaatcttgaggttcagatcttaaaaaagcaaaggacatgagagaagtaatattgttgcttgaaatttcattgcttatatctaaa

SEQ ID NO: 300917 - DNA, 577 bp, Homo Sapiens
gaagtgatggagatgaaaatgaacataccagactcttccatatttatgttataggacaagacaaagaaattagaagtagtctgatagataacatttgccatgtttggaaaatactgattatttactgatgtaatgaacaaatttgcctatgcaaacaaaataagtttcttccaagtaatgtccattgtcatgttacatcctttgtgaaaaatcctgtgcaacctgtgtatgaggatgtgtgccttttgtttgggtattattgtatacttccacttctttcatagttactacaatccatgaggtggcaggcagatgtaatgttattttgcacatgggaaactgaagctaggaatgtttgttcatgctaattcaaataggtagcaccagaaccagaattaacgtgctattcttcaaaattgctgctgctattgacaagaggtagttgagcattttcaccatctgccaatatactgtgaaaattttagtaccaattgatgcttttgagttaaagcagatcagctatgagaagaactagtggtatacaacattgtacagctgagcacgtggctcggtgggt

SEQ ID NO: 300918 - DNA, 197 bp, Homo Sapiens
ttaacagcttcccataagggaaaagaactatgaaggatgggagccagctgtttctttcaacttataaccaaatgtgtccaggaacagaatgggtttcctttaaagagattcgcttcggatcactggaagaggttccaaacgggctcgtcaaattatcggggggatttggggattctcaaagtcactttggcatggga

SEQ ID NO: 300919 - DNA, 434 bp, Homo Sapiens
agaaaggtttagatgtagaagggaaagaacccagaatacaaattgagaattgaatttacaagtctaaaacattttagtaagtttataaaggatggaagcttcagttactactgaggtaatgaattctgccccatccgagattgttagttctgaccaaatagagaatgtaatcgcataaccaggaattatgtaaatcccagggaggaatgcacaagaaagatcgagctggtttcaactactaagatagcaattcagagggccaaatcttattgtggtctttcgcatattatgattgcacataaaagatgaattttttcatattaattattatgcagaattgaattactggaaaattgtggaagagttctttatttttgtcgcttttaaattttttaatgtcgttcctcaattatttaaattaaaaaaagaaatgg

SEQ ID NO: 300920 - DNA, 464 bp, Homo Sapiens
cgcatgaacagcatgatcgacgcgctgctgtcgctgagccagctgtccacccggccgctggcgcgccagccggtcaacctgtcccagctcgccggctatgtgctggaggagctgaggcgctccgcgccgcagcgcgagctggtgctggacatcgagcccgacctcgtcgtgcagggcgacccgacgctgctgcgcatgttgctggagaacctgctgggcaatgcctggaagtacagcgccaaggccgagcgcagcgagatccgcttcggcggcgcgcagcaggacgggcggcgcgtcttcgtcgtgtcggacaacggcgccggcttcgacatgcgttttgccgagcgcctgttcggcgtcttccagcgcctgcacagcgccagcgacttccagggcaccggcgtcggcctggccctggtgcgccgcatcgtgcgccgccacggcggcgacatctgggccgagtc

SEQ ID NO: 300921 - DNA, 548 bp, Homo Sapiens
ggaaagggaattatgagtaacctctatttttttaagccttgcttttaaattaaacagctacagccatttaagccttgaggataataaagcttgagagtaataatgttaggttagcaaaggtttagatgtatcacttcatgcatgctaccatgatagtaatgcagctcttcgagtcatttctggtcattcaagatattcgcccttttgcccatagaaagcaccctacctcacctgcttactgacattgtcttagctgatcacaagatcattatcagcctccattattccttactgtatataaaatacagagttttatattttcctttcttcgtttttcaccatattcaaaacctaaatttgtttttgcagatggaatgcaaagtaatcaagtgtttgtgctttcacctagaagggtgtggtcctgaaggaaagaggtcccctaaatatcccccaccctggtgctcctccctctccctggtaccctgactaccaggaagtcaggtgctagagcagctggagaagtgcaggcagcctgtgcttccacagat

SEQ ID NO: 300922 - DNA, 289 bp, Homo Sapiens
tttatgaatagtttattacatttcagtaagtgtattgtgaatcaataaagcaaaagttaaggacaatgagctcattaccaagccagttattgattctctggttccaaaatagaacagtacaggaagggtatagagaaaataggatttttcatgataaaaattttaagcatcttaggaacacagacctaaagaaactataagacacaacggaaatttcagcagctacttaggatgtttatttatttacctttttttgccaattagaattagttatttggtttttactctt

SEQ ID NO: 300923 - DNA, 626 bp, Homo Sapiens
cttttaagagtttacattaactgggttcccagtccaagatctatgaattacaaagtgctcattcccaggacagagatcttattcttcataggattaaatttagaagatgtaaaaggtattttctaactttgctactttaattaagataattataatatggcttcttaaactgcatattgatcatcttacaaaccaaatatgttgatggttagaaacttatgttgttgactgccaccttgaagatgtaattataatctaagaactataaattcaccaagtgtattaccaggacaaatgcctagacattattaagagtatagagacattagatgaatgtactgacaagttatcacaataatctaaaagaaatagcaatagagggtatccgatatgtgtaaataagaatcaacaatacttgaacttaaaaagtaatgcctgctttcaaaacaagaagtttaatcctactttgatctctcaataaaaactatacatattgataatcttacatgttataagtactttaaaaataatgtacatcttactattaatgtatacatacctgctttggcacaaaaaaggatttaagacacaataaccagttcaattccagcctgattttaaatgta

SEQ ID NO: 300924 - DNA, 269 bp, Homo Sapiens
cccaagttgaaaagatttgaaaccccctgctttgttcaatttaaaaaatttgggaaaaaccctcgtcccccggacccagggaaccaaaattgcttttgaggggcccaaggggcgggggtttaaaaggaattttgctgatttgcaaaatgaaaaaattgcttttaaaaaattcaacctgtttcctgaaaatgttcgggggaaaaaccgcctgactaacttccaggggggggattttccccgggacaaaatgggttccttgggcaaaaaag

SEQ ID NO: 300925 - DNA, 534 bp, Homo Sapiens
cctgcgcaccgagctgggcaatgagtgcgtggtcgacctgaccgtggcggtggccttctacaacgccgtggtgcggattctgggcaccctgcaaatcgacgtggaagacgacgtcgtgcactacctgcggcggtttccactgccgcccgcctgaaccgcggcgggcggcggtttccactgccgcccgcctgaaccgcggcggtcggccggccggaagaagacggtagtatcttgaggcgcaaggtaatacgctgcctggcatgggcaccctgaccgtcaagctcccccaatcgctcgaaaacgagatcgcgcaggcggccaggcggcagcgcatcaccaagtccgagctgatgtgccgcgccgcgcacaccgacatcgccggcgaggcgcaggcgcgcccgcggcgatcggcgctggacctggcgggcaggctggccggtagcgttagggacgcaccggccgatctggcggcgaatcccaagcacctggaaagctacggcgaatgaacggcgccgtcgtgctgctcgacaccgg

SEQ ID NO: 300926 - DNA, 165 bp, Homo Sapiens
aaattactttttagctaggatagatttgagcgtgtagtcaaaacggttttaaataaatgattacagttatttttatgatcttatgaacgctcagtattcatcccatgtgtttcacagctcacatcagtcccgtatgtgagctctgagacacaaagggtgcatatt

SEQ ID NO: 300927 - DNA, 129 bp, Homo Sapiens
caccaccagaaaggcttccaaacaaagctactcctcaattttcaaaactatacaaagattttgagcttgcggttctgcctggaaggtctatttaggagactctccaatgggaccatttcaccattactt

SEQ ID NO: 300928 - DNA, 111 bp, Homo Sapiens
agccccgatcatgggcaagggcagcctttcaactgtttttgaacaaagaagacagtaattactaaatatgcagtgttaacatgtatatccagattctgaaaatgtgccctc

SEQ ID NO: 300929 - DNA, 455 bp, Homo Sapiens
gttaaatgattgagtacatatttcaagaacctctgccctgagaagatataaagcacaaacgcaaagattaatgacattgtgaatacatttttataaagcagttgtaaccttatataaaaatgaagtatcttttttcttaaaaatgtagaattgctcattaaaaaaactgtaaagttaaaaagtgaacatttccacacttggcttaacaaatgcttgactatgttaccaaacattctcagtccaaagatcaaatatatttctggaaaaacaacattattataatatggacacccaagtaccaaaataaatattttttttaaatggacccatgttagtatttgaaataactggtaatggttaacactatttatgctttaaatggagtaactgctggaaacacaattaatgagcccagaacaggttatgtgaactgtggagaaatactgttctttttg

SEQ ID NO: 300930 - DNA, 174 bp, Homo Sapiens
  misc_feature (87)..(95): n is a, c, g, or t
gcttcaatacttctgcccctttggaaattgtaacaattaattactttgaatgttgctaaaaggacattttgtgtaggggcaaattannnnnnnnngagttaatgggaaattggaaatggaaatttttcctttaaataccacacaaagatgtctggataaaactgtctgtttaaa

SEQ ID NO: 300931 - DNA, 291 bp, Homo Sapiens
gtgccctttactagtcagctacttcttgaccttcctttatctgccaccggatgatggagccgccagggcaaagcgcgtgctctatgagggccgatatcggactgttggcgcatacgctcgcgaagtactacgtggctttgtgcatcataccaaccgcgtgctgcaactgtttgaagggttcatgcacaaatgtgcctggctcgatgatcatgacaccctgacctacctgcaatcaacgatctctaccaagcatcatcgcgttcgggtgcctgaaattgccatgtgcatgga

SEQ ID NO: 300932 - DNA, 341 bp, Homo Sapiens
gggaaagaaaaaataactttattttattggggggagcgggcccatgtccaacctcaaaacttttggaactggtttttggggcccgcagccttggggacccttaacaccttgaaacacactgttttgctcaaaaggccgcactccccccctgtgaccaagtcacccatctggacctcccttaaacaaggggacaggggtacaaacatgtttttgtggggctttttcaaacgggtgtactttcggatgtaatgcaaataatctcgggggatgacaaagggcctctgcatttttattttgggcaccacccccaaaaagatcccccctccaatgggcccctttcc

SEQ ID NO: 300933 - DNA, 498 bp, Homo Sapiens
attttgtataatgactgtcttttagatctgaataagtcactttaaaaccttggcctatgaactttgccttatcaatcatgaatctagatgaatgctatctagttcttggttcagttttacctatttttatttttggttcactgcttgcttgagcatagctgggatttgtagcccattttctaggcttattgcaatctcactgtggtattttatagaagctattacaactgataggctagcttcatggtattgatgatacatggcttaaccatactaaaagctgctttccctctctaaattgtaaaaaggtgatgaagtttcacttgatggagacatactatatatgtgtgtttatcatggaactagtgcattaggccataagctgtttttctggtctatgttttttgtatttaaaactttactgaagacaatggactccttcgggttttctttctttcaaccctgaattgtccttgtttgaatttttaagtactgtaa

SEQ ID NO: 300934 - DNA, 160 bp, Homo Sapiens
gacacatttgccaacaattgaaagtgctttcactctgttctcagagtctttttgatctgataaaactaaaagagggtggaaacttgactatgcaatgtttaatatggaaatgatatgctaaagcatcccgaaataatggaatgcagaaacccttgaagaa

SEQ ID NO: 300935 - DNA, 179 bp, Homo Sapiens
ttgtcattattttttaatagaaagaaaactgttatattaagtgtcacgctaattttggcctaaaagtcacagcttcattttaaatcccaacaactgggagaggtgtgtacatgtgctcactagagacaccatttttattaagtttcactcaattaaacagaaacagatggaattaaact

SEQ ID NO: 300936 - DNA, 527 bp, Homo Sapiens
cgaattattattaattcctagaaaattcaccttccaaataggagtgtcccttttatatttctacggacataggaaagacactcagattaggttacaaattgagtttcccttctccctatgaaaacacagcttgagactttttctcaagtcactttgagtaattactttcatattttcaattctgctctgtctctatcttatttttgttatatgccaagtgttattttttaaattgtttatacttacactaacttcctctttcatatgtccaagatttcagcaaacatttcattttcccctaccttgccttccaactccttttatccaaaacaatctcactgtttcttctagaatgcctaagatctcaatacgggtttactaaatcaatcactgtttccattgtacctctgggaatgcgacatgttattgttaatggtacatatgacaatttctctcacatgaacagtggctttttaggaaacagcgatgatctaaaggaccaagaagttgattctacagaaaaccat

SEQ ID NO: 300937 - DNA, 564 bp, Homo Sapiens
tgaactcggccgtgcgctgcgcggcctgcgcgaggacggcgtgctcttcatgggcacgggcagcatgacacacaacctcggcgaattcttcgacggtggccacgagcccgcgccctatgtgatcgagttcagccgctgggtggaagaccgtgtcacgcgcggcgacctcaagtcgctgctcaactaccgagagctggcgccgcacgctgcgcgtgcccacccgacggatgaccacttcctgccgctgttcttcacgctgggcacggcgggtgacgacgcacgccccgactacatcagccgcgaagtcatgtatggcatgctggccatggatgcatttgcgctacagtcttgactcaacgcttcccaacggaggcatcaggatctgtttcgcatgtctgctctcttgcgccggctgacccggcaccggctgtggagcgcgggtgctgggcgccgcgctggccaccctcgttgcgcccgtgtacgcgaccgcaccaaaatttgaagactccatggcccagcgcatgcaggcgtgcaccgcctgccacggcgagcagggccgtgccg

SEQ ID NO: 300938 - DNA, 490 bp, Homo Sapiens
tcgcctaacaaatatctaacatgtatatagcactttatagattaagtgtgttactattttctgtgcagtgggcaggaattataacttctacagatggaaaatggtctcttattgagaagttttttgtcaaaagataaccgtcaaaaggattcatgtccgggtttcatcactgtgtagtcccatactgtttatcactccatcacaatttgaaggctgtctgaaatatccatgaactccactggtaattcatggagttcaactctcttaaccaccctcctccctgacccatgatttttaccctaacagccatgagagtttccaaaaatgttatgttttacttttctagtgtatgtcaaaagacattttgtactgttttaaaattactattcttgctattcaaagaataaaaagtattgtttttcagatgatgggtggatcatgctataaaatggtaacaaagttttggaaataatagctttagattattcca

SEQ ID NO: 300939 - DNA, 538 bp, Homo Sapiens
  misc_feature (273)..(299): n is a, c, g, or t
tttttcctggttaaaatctaaaccatagtgaagatagtatttatgtttacattttatctgtgaatgtggctaagcagagaagctacatggctttggtctacatattttttgaccttgtatttggttctgtagttgcagacttgtgaaggcttacatcatcatggagactttagtaaggaaggaaccaaaaggtttttggtttggggatgcaaactggaggttatgttacaagtcttcaatgcattttctgtgttcctggcagcagtgttgccnnnnnnnnnnnnnnnnnnnnnnnnnnnaaagaccaggtagggtagtgttattgaagggtaattgaagagtggtagagagtaagaggttttgaaggaggcaggtttgctgttatcacaaaataatttgggggaaacctttcgtggctgtgctgcaagaattctttatgtggctatcctctccatagttttctgaccagaattgcaagggcaaaaatagaacttctagctctatttatttgtatcctttgaaatcagaacttatcctt

SEQ ID NO: 300940 - DNA, 225 bp, Homo Sapiens
atattctacttctagggagccacctaatgaaggtgattagaaatgtggccaaagatgtattcacaaatattcttcaactctgtgccctttttcctaacatttggcctctactcgaagccccccaaaacatacagtcaataaaattctgtgagtccccctccaaagatggagaggatggcctatgttctctagatgggcaaatgtgacagttcactgtcctgctcc

SEQ ID NO: 300941 - DNA, 154 bp, Homo Sapiens
acaaaagccaggttgaggcctctaggtgggtctccgctaccgatggattcagccggtggggctgcaggaggttcctataagcgtggtcccctctccccgcaccgagtccggccccggccctgggatttccccatttttcgccgccgccccgccc

SEQ ID NO: 300942 - DNA, 165 bp, Homo Sapiens
ctgaatgtgggaaatccttcggttggaatatcatggcttcgtgtacatcggaagactcgtaattgaaacatcagaatgatgcgatgtgacatactgatgttcccgagactgcggataatataaacaggatttacaagcgagacgccctaaagttacactcatgtc

SEQ ID NO: 300943 - DNA, 581 bp, Homo Sapiens
gccgctccaccattctgtctggcccactgcttcttacaagattaagatagcagatcccatgggtgtagctgtagaccaagacctggaattaacacatcagaagattctatgaggaaacccatttaaaaataggatgcatttttttcttttctgcacagggagaaagtttaagctctcctcactatgagttttcaagtataaaagactttttcttccacgattttgagaacaactgaggactcttgtgaccaggacaacagggaagcttgcagcaagatagctccaggttggattcatgcttcgcaccccaagggctgccagccagagaggaggagaagcaatcactcctgcagtttctgaacactacacagacgccaggtagcttcttcaggagaacagccctctgaggaggcaggaagaggaggcttatctttcagcagccggagctgctgagatctctgggcagattaagctctctctaatggatgggctccagcctggcacattcagtggagagggatccactcatccatcatcaacataatatggtcctccctgcacttcacagtgtcctcttgcta

SEQ ID NO: 300944 - DNA, 679 bp, Homo Sapiens
ccattctgagtaaagatctgttacacaccatacccttgttcatggtgcccaggggaaatgaagaggagagtattacaggcaactggaagattaagcatcccagaccccattctgaggtatcagaaatattgaggaggatactggacttcctaagatatgtggaatgggggcctacaactttttgtgtataggaaaataatacctcagagggcagagggcaaagggaaatgaggacattcctaactggtctctctgttttaccttttatgctcctctaatccattttccatccagactgatgtccaaatttaaaggtctcatcgctcccctgcttaatatacttgaatgacttcttatgtaaactttgtcatgatctaaaagttcccgctagatctgcaactgccttcctccccccgtttcatctgtttagcagaccgagggcaccagtctctgtggtttaaacttgccaaacttttcttcacggaagttttgctgttcttttctccactagacagctgttccagaagttcttatgtctgattccttctcattcttcatgcctaagcttaaatataacacaagaagcccttccctgattattctaaacagggggccttgcctattgatagtttctattacagtattatttatagttccttaattgcccccatatgatgca

SEQ ID NO: 300945 - DNA, 573 bp, Homo Sapiens
gcggagtagtcacttatgccttggtctggctgggtgaatctgcatttttacacaaacaatagggcagaggaagcaatcagatgtgcatttgtttcagatgagccgagggatgactttgagttctgtcctttgtcctgcacctgtgaagataagctatcaatttacattgccagagtgaaattcaacagaactgttttagtgtaaagatcttgaggcccacaaggaacttcctagtaggcaaattgtgagggagatatgaagatttttaaaaatctttgtaactgtcttatttaggaatagaatgagaggcaggtgtgcctgatgcagttcccagcttgatttttccctttggcttagtgatttgggggtcctgagatttatttgcctttcacattggcatgaggagaaaaaaatctattgaattgtcttgagtaggcatccctcttctggactttaatttgtgcaggaggggacactggtattggttatcccacccagccaagcttggggtataattgatttttggtctttgggtttctaaatcagtcttatgacctcattaaaaaatgaatg

SEQ ID NO: 300946 - DNA, 537 bp, Homo Sapiens
  misc_feature (427)..(427): n is a, c, g, or t
tgtgttctgctgcttcccagagccgcttcagtcttcagctcagagtctaccagacactaaaatgcaactgaacactcagttcatacttgttcttctaattagctgcctcttccatttgattaatattgcctcctaatttaattgtaaattgtatttctggtttatatttcgcttctccctcctgttgtacctggtgaccatcttcattaatcatattgtagctttttaatgaatctcatatgccaatttatggtgaacaagacttgatatgaaggcatcttcatcaaatcattcataatcttgtaactattggtttattttctgtaacgacctataaatgtacaccaaaaaaatgaaagattccccctaaaatgtaatggggcagaactttgtttacgtagatttctgaggatgggttgagacgccnaattctgcttgtgtttggaatttctatttcactgggcttagtgagggtgcccatgttttgcaatcctgtgctctagaatctatcataaacagattcttctaattgtttga

SEQ ID NO: 300947 - DNA, 120 bp, Homo Sapiens
cgttgtttaactaattttgagcacttggtagacagaggagaacaaaatgtacattaaagttcacctgtcaaattttcatttgtagagggaaggatggaggttctaaataccagcaatctt

SEQ ID NO: 300948 - DNA, 484 bp, Homo Sapiens
attaatgtggagcaacctggcagaacgtagtgtgtatttaaatcaccagacttctgaaggtgcctttgaggacatggagttctcttccaattctctcccttctgcaaaaagatcgtgagacagcgcagggtcgagtgctgtggagactatgagctgcctttctccctgggatgttagaagaatgagtattggctttaaggatgagaggtccttttgagtaaagaacattctgtgaacacagcaggcagtccacaagggttggggtttgaatgaagggggtggctgaggatcttccaggcacctgtgttttgggattagccgtacttggaagcctggtggaagctgcttttctatttatgagtcaaattctctttcactctgaatgtaattataattgccaagcagctgtatcttaatttagggtcttgaatcggtaacgtttcctaaggctttaattttaattttctttattccttggcctttc

SEQ ID NO: 300949 - DNA, 297 bp, Homo Sapiens
gcagtattgttttcttctctagtgattgttaccctacacatttcatggaagcatcttcacaaaatatcggacacagtggaagggggaaaaaagctacgagattgtttttacacttttagcaaagtttctgtggatgctagtaatttatacttgatcagttgtattctagtaaagaacctctttggggactgtaggaaagcatgtttttgtggttataaaaacacttaaaaatcctgataattctgggcttgtataatgcctgttgatcttgccctcttaatcagtttattgttattc

SEQ ID NO: 300950 - DNA, 444 bp, Homo Sapiens
cctgttctggtgacttaaaacgctggaccttaaaacttgaatgcatttccaggagcttgtgctgcattaatatataagggctaccataaacccaaacggaatcttttatcagggtggcctacttaactgcatacccaaggaattgtccctgtgttggggttgggacaagaaagttgagagatggatttcagtatgcttacccattatcaaaagcccagagtattaatctattttctattactcttcttgtgggagaaaagatgtacccatttctgttcaagaagcaggacagctgcatttttaggtagcaaaaatcctcttgggaggatcaaagcagatggtttctttttatgagccatataaaactgtccagtaaatattctctgcgctctctttatttactgttatctgggcttatataaagatacaaatacacaggtgagt

SEQ ID NO: 300951 - DNA, 133 bp, Homo Sapiens
ccataccaagcttttcttctcaactattggcagaatagaaagaatttaaaaagagatcacactcctttatttttatatagagtaggtctcccaaggagagtgttacaattaacctagaaattccctaacagag

SEQ ID NO: 300952 - DNA, 338 bp, Homo Sapiens
gtcacagtcacatggattctatgcctgtggacagtaatactcaaaacaaaacaaagaagtatctacttctcaaattcagacaggtgggtgagcagaaaggaaactgacatcttatgttggtgagactaatacctagaactggtgtatatgggcagattctgggctctggacccctccctggagtacaccagcagctggggcctattttgcacttcccgcttcagccttttgcacaagaagggctcagcaaacacccgctgaacaggattccatatttgcgttcttccaattttcagtaatctgtctcctctaattcccagttccatctgctatccagt

SEQ ID NO: 300953 - DNA, 457 bp, Homo Sapiens
ctgatgttgtcaattgctcatgcaagaatctgaactactgtcaaactgtgtcctcagatttaatgaatattgtctaagaggagacaaagttgtttgtaagttaagggttcttagagttactactaagtcaggtgtgtctggtgagacgcagcatagcaaactggttactctcctttctagttcagggagggctatgcctagaacagccacttaaagcctgctggcaggatgtgcttaagctgccaaatggcatcccgatcacctcctctccaggaaaagttcagatcctcctgctacactgaacacaagctcaacagcattttagagggatcattttcaaggcctccagattattttagatgaacttccttgaacaaattgtcattgacctttactgagcatcaatttgagttaaaaatgaaggctgtgtcagcaacgtggtacattggtggacttg

SEQ ID NO: 300954 - DNA, 435 bp, Homo Sapiens
ctgcattccaactgggggcaaggaatggtggtttagacaatgaggaaatcattacaatgtggtaagtgtagtaaaagaggagaacgatgttatgggtgcatactaacaggaaacagcctagttgagcagggcaaaaaaaggccttcctaaggaagcaaagttttagccgatagttgataaatatgacctgcagtggttgacaagcttgactacatataagtagtattcaattataacttggcttcttatggtatagattcctatatgctgtgagtcaaataatatcctctggagcttaacaattacaagtaataacactgatagatttaatttgcaacacagatgttattcctgtctcttagttcctatgttaatcaaacatttttcgaatgtctacctagctgtgcaagccagtaagcccagtgatgtggaata

SEQ ID NO: 300955 - DNA, 447 bp, Homo Sapiens
ctcatttcttaggtggaaagacccctctctcctttgagccctaacagtgctctgaatagaatcaatgccttttttgtttccacatatatcatcctccactgctactgtgaactctgtaaagtcagaacatgtgtgactgacctttacatctgcagtgccaggtgtgtagttggtatctagtgagtggttttagtgaatgaatatactgcagtcatactgagataactggagggatcaataggacttactgccatacatttaaatccgatctcattctctttttgccagttaacaggttacttcaatctgttttataaataatctgtgtatcaagagtaaataagtacagtttcgttttctctgtttctagaaggcatttcagttagtgcctttgtaattccactggaggaaaggtagaccatagtataggtagcaggtttgatacca

SEQ ID NO: 300956 - DNA, 488 bp, Homo Sapiens
ccacttacatttttacattccttctgctgttcatattaaccttgcacaattacttcattttttctttgactcttttaccacaatgttttggttatttataatttatcagccatatgtttatcagccatataaccaactatatcccaaatagatccatgtatttgtttccgtgatttggccacattaataaattcataaatttcaatcaaatatcttatatatacacacatatggtttaagctacagccctgtgtatgccgtttaactttatttgacgttgcccacttacttctttgctgaccacttggataaccgtaataaaaatcctataagcctaaatggcatttcttttgggatatttttcctgcattttattccctttttatataagtaggaattaattatttattttatgtcttaatctatttgataaagaagactacattataataatctcaaagatcatattaccaaaggttgcccacttg

SEQ ID NO: 300957 - DNA, 459 bp, Homo Sapiens
tagacttaggaaagatttagaatagagccttttccccccgaacaataaagcagtgacataaagacatggaaaataatatatacaaacctggaatgaaaaagagaaaacatgaataacaggcttacatgagtgataaattgcattgtactttgatgaagaaaatctagagatataatttgctgaaatcttcataaaaatgcaaaaatatatcttctttagcacaaattatctccagaatcacctatgtactattctccgagaaacaaagcagaatagaatgtctgtttgacagatttccccatgagacagttaatgttctcggctaagacatttcaattatagccataccacagtaaatgctgaattcctcagttaaacaaggatagactgggttttaccagatgtgtggtgagtagatagacactgatgagaaacacgcaactgtaaaacccccgaaag

SEQ ID NO: 300958 - DNA, 359 bp, Homo Sapiens
aatggacttgagcttaacttctcaccctggaattattagtgggtgaagaggggaatcattagcattctgggcgtttttatattaaatgttttgtgaatatgccagaagatctgccttcaacttgtaattaggcaagatagtaacgcttgatggtaacttctatgtttgtgtagaaataataccagttagttttggaaagccattcagatccattcaaaaattccataaagtatgatgtatgctttggaagagggatatgagtgatacaattgttatataaatggaatagaacaaccatttgaatgcatttttctagggcaaacattttttgagatttttgagttaagaagatttttcgg

SEQ ID NO: 300959 - DNA, 178 bp, Homo Sapiens
  misc_feature (66)..(77): n is a, c, g, or t
cttatttataaatggaaaccggaaacttttataccaaactataataatgtgcagcactgtagggcnnnnnnnnnnnnccctccaaatacagtgaaatttttttattcacaagagctgccacatctcagcatttagtaatagagctgctttaataaaattctagtttgattgtcatgtc

SEQ ID NO: 300960 - DNA, 422 bp, Homo Sapiens
tttgcataattatttcccttaacttacacaataatctaatcaggcaagtatactattattttaagcccatcttacacatcagggaacagaggaacgaagattacctgatctgtcacttaagtggcctacctagggcccaagcccaggctgttaactactacactgtactgctatccacactttaccttttaattttttgctttttgccattctgcttaatacctttcaatttcactatgtgatttgtatatctctttagccatattaagacaatggaattattgatggaagtctgagagcaaactactatttttagtggcttcctttacccacaggatgtgagggaaggtctttctcagtctggcctccaatatgtatatatccttatcgtaattattttacctattctgtgctccaaccag

SEQ ID NO: 300961 - DNA, 301 bp, Homo Sapiens
cagctgtggaccgcgaagcgcccggcttcgcctctgcctcctgcagccccctcccttccctgtccgccgtcacccgtacccgggcccggaccaggcacgtcggcccaccagctggcttggtgggggaggctgaaggccgggccccgcgagtgccatggcggccgccctgggagcgagcggaggagcaggcgccggatatgatgactttgaccagtttgataagcctggcgcggaacggtcgtggagaagaagagctgctgatgaggactgggacagtgaacttgaagatgatttacttgga

SEQ ID NO: 300962 - DNA, 393 bp, Homo Sapiens
  misc_feature (165)..(182): n is a, c, g, or t
aatatttgaggaactaggtactgaattaggtgctctgagttggcaccccgaaatgtttggaatcacgactatgatttacttaaacttaacacattcaaggatatataaatggagtctaagtattttgcttttgaagagaataatctatgaaatggaagacttgannnnnnnnnnnnnnnnnnagaagtaatacacatttatgattgttggcacataaaactatgcaaaataattctttttaagtatctgtaagaaagaattggcagtttaaacggattttgcttatttatgcactaccgaatgcagcatactgtattactgttgaggctgcttaataagtttaccaatgtgaaaagcagatcttgggtataagtgtatgcctgatttgagctt

SEQ ID NO: 300963 - DNA, 483 bp, Homo Sapiens
tacactttgacgcttttctgcaagcacaattaccttttgggggagcccttctcttaaagcagagtaggttaatgtttgtgaatgaaacggaactttggcaggctgaggtgtctcaggtcatcagcttacgttgtctactgtgtgactaattgaggcaaaagatgtcctttttaatagtattttctcatcacttttgcctgggtgccctttaggaatgttatttttggcatacaacttgagtttcacttaaatttataattctttctgttcattcctactgctctgttgcccagatgtggattttgctttgtctcacaagcgttgctgaaacactggtagaaaggtggacgacggattggttgtgattagtttgatcttcacagtacagaaattcaaaaggtcaataagctcaacaagattgctgtctcactgatgatcagagttgccattaaaatcgtatttcccgcacatcaggctggaaaa

SEQ ID NO: 300964 - DNA, 345 bp, Homo Sapiens
ctatttggatatttttgtttttaaaaggggaggggaatatgcttaatacttctaaagatgtgaattgataattgatattaaaatagaattactctcaactcaccagaattaaattttatatctgcatatttaacactattagctcatataaattataagaaaaattttcaaaggatctggttttaattttttggatatgaaatgaatttgccttttctgccttttcttaagtactattttgtaactatattgcactaactatatccaaaacacattctgagcatcactgtgagtaacagccttccagtttgtacccttttgattcacagcatggccctatagtta

SEQ ID NO: 300965 - DNA, 472 bp, Homo Sapiens
agagcaataaatccaactctttatgaggtcaggagtcctttaaaaaagcctatgtcttggtctttaactgtccccttctgcaagatgtgactctatacacatggagacagattgaagaaagacttcacccatcttctaggaaataaaatcctgctcttgtcttctcccagtcactcccttatgcactgaaaggagaatttgactcccttgcacttcaaggccaggtgcctctccactagacagtcagacaaaggcaaataatggaggatagagagacaggtgttcattaggctggccatagggagaggaagggggtgacagcaggggaaaagaaactgtagtatcagttgtcacaagtagagctcggcccagctttccctcccttcccagccaccctaaaattgagagtaccagtgcccctagtgtcgactttctatgtacatcctaggggtgagggagtgcggggcaatgg

SEQ ID NO: 300966 - DNA, 113 bp, Homo Sapiens
ccttggctgatcaaccctaagtcgaattgctcctgatggctggccgcgatggggccaagattggtaactgcccattctcccatatactgttcatggtactgcggctcatggga

SEQ ID NO: 300967 - DNA, 481 bp, Homo Sapiens
ttgatattcagatttttaaatactggtttctaagaaaagaccagccaaaaaaattaagtttcatctacaaactctgaagtattttataccgtaacaccacaagagtagggacactgtgtgtgttcattgccctatcatttactggaacactcaataaataatgttcaataactatttttgactaatgggagagaactatgggcaaaaggagcagccttagaaagtgacttaactaaactcacagatccttggataaatgaaaaatgaaggagagaatctagagccaggaatggggccacagatgagaggtcaacaaggataccaagacaattcaatgtacaaagaactgtcttttcaacaaatggtactggaactaccagacatctacatgcaaaagaatgaaaatgaatcccttcctcacaccatatgctaaaacttaaagtgaggatgggtcataaacctaaatgtaaactataaaact

SEQ ID NO: 300968 - DNA, 545 bp, Homo Sapiens
aatatagtccctgttctctgcatccgagatatttatgttgtgtctatggaaataggaactcagtgagcaaatggtgggtagcatgtatttatagagagaatggagggattctaaggagggagcaaagtgactataacaagattagggacaagagacttcaaccagagagttctgtgatcaattccccgagatctctgcatcttctgagttttctgcttagaatcagggaagctcagtgcttgacaggaacgagcagtggcactctcagtttcactgtgttacaaaggagccctgaggaagggaggccgctggctgcccaggtgccctggggggaaagggacttctgctgctgcagagagtggcacccggtggggccaggggctctgggatggtccgtaaagctccccaggacttctttgaaggatgctttacagaatgtttctgggagaccagcctcaaggtcaacccatcacaaacgtgaggaccaggaaagaaccatggccagggttctccatttgctgtaaagtatctggtgatacagtgag

SEQ ID NO: 300969 - DNA, 109 bp, Homo Sapiens
attattttcagcctaggttttaaaacattttagtatgtcatgaattatcttcaaaaggatcataaatcttttttaaaggtccattttatttaaaatatataaaaataat

SEQ ID NO: 300970 - DNA, 542 bp, Homo Sapiens
atgtgaagtggtatctcatggttttgatttgcatttctctgatgactgacaatgttgagcatcttttcatctgctaattgctaagctccttaaatggaaaattataggaagcataaagcatgtttgcaaagaagtgattatattcgctaggattaagattttaagtgaatatttaagatgcccatgactagtgtccactctctcgaatcaagttttatttaaaccattgacttttcctcataactggaaatggtcccagtgaaagtctccctcacttgctggaatgtggggccatctctgctgtctgtcaagccttgatgcccaagtggccattttctcctggagtctgcatcagatggtagagtgtgtgtttcctgagtgtgagactggatctgctccacaatgctttgctggttaactccttccaagagtgcaatacccaggggtcactcctactcttagtgctctggggcctgggcccttacacactcaatgtttcttccccttttctcacttatctgatcttctgctacttctttctc

SEQ ID NO: 300971 - DNA, 219 bp, Homo Sapiens
acaaattttggttggatatatagagaattttataaatgtattgccttagaatttctgggtggagacccaactacaatgacattgtcatgcaagaactataaagataattagagttaaaagttgtttaaattgtgcccttaaatacagcagaacctggagaaggtcatacttcaaaggtcgattttgagtccgaataaagaaagacctagtaacagatag

SEQ ID NO: 300972 - DNA, 500 bp, Homo Sapiens
cggcacgaggagattcatgagtttggttaaggataaatgtacatagctcacatcccctcagtctctccctatagtccaaagttgttgagcaaggaatctgtagagtattgatttaaattgattaagttacatgtttatgaaactctaagagactagttttagaaatttcactgtaatttctgctgggataaatttgttagcctgggatatcttccaaagataaggcggatgctcaaatatgtgtaaattcatgcaactgttaacagagactgtgctgtaaggagtacttatgtcctatagtaattttattaaacaaatacatgtatgtctccttttgatgtgtacagaaatatactgtttaatctgaagaagctgattgaaacaggaaaaatttaaaaagtaaaaacactcaacccatgtaatactttatttttataacaaggtgttctctttaatacgcctattagattatcctgaagttctctatttactcttacttt

SEQ ID NO: 300973 - DNA, 626 bp, Homo Sapiens
  misc_feature (67)..(383): n is a, c, g, or t
aagtagaccattgagagtattcatctatggaaagtaatttacattcacttagtacaattggccctcnnnnnnnnnnnnnnnnnnnnnnnnnnnnnnnnnnnnnnnnnnnnnnnnnnnnnnnnnnnnnnnnnnnnnnnnnnnnnnnnnnnnnnnnnnnnnnnnnnnnnnnnnnnnnnnnnnnnnnnnnnnnnnnnnnnnnnnnnnnnnnnnnnnnnnnnnnnnnnnnnnnnnnnnnnnnnnnnnnnnnnnnnnnnnnnnnnnnnnnnnnnnnnnnnnnnnnnnnnnnnnnnnnnnnnnnnnnnnnnnnnnnnnnnnnnnnnnnnnnnnnnnnnnnnnnnnnnnnnnnnnnnnnnnnnnnnnnnnnnnnnnnnnnnnnnnnnnnntatatattttggatggcagtctgtacacattctctgttatcattctgttagtttcacagcctctcccagagtctcactttaagcaggtattaatattagtcctctctggggataatgcaggggtcagatgactgtggactccaggccaaaggagaaaagagcaaagggtaaaggcgaaggaaataaaaaataggagggccaaaggagagtactctgtgaccctcaattaaggtcacagaagct

SEQ ID NO: 300974 - DNA, 480 bp, Homo Sapiens
cacgtgactggactaatgtaaggcagatgacgtgatctttaagactgctatatatatcagtctcttactctataaggttttaaattagaataagcttttatcaaatagataattgatgcaatttaggattcacgcaagtttcagtgtcaaatggcggtcttatagtttcaattctgaaaatagcaaacttaataaacagccactttaaacttgttctggcaaaccagaccctgctgtagatatagtctaaggtagttaaccatataagccttttcaactcttaatgccctccacatgaatcagcagttaagaaggttctagaacccatgaaagcttttgtatgtattactaggttttgtttttcttatgtttgctgattttacagttctgactaaagctgacctaaatggatcagtttatgtgtaatattctagtgctttaatgactccttttttctttggagggagggtaacattattt

SEQ ID NO: 300975 - DNA, 445 bp, Homo Sapiens
gcttgcttttacatttttatggccaagccactttctcacctttaaaatggtaataacgtttccgtactcatctcaatgggttttgagtgccaagacagaccgtttgatggaagccctctggggagaaaaatgctacccaagacaggcttttcaattggagactgatccattggtgttttggtcagttggtgttgaaatccctatttttccagctcaagactgcctctctccctggaactcttcccgaggtgagttctgcagccttccttgggaactctcagcctctggatcccttcttgccaggtggagtggacatgccaaagttgtgggccagactcggactgcctggcttgtctcagcacctttggggacccacttcccctctctgggaactggggaagctaacagagatcttgctaggggggtggaatcctgtatccatgtg

SEQ ID NO: 300976 - DNA, 568 bp, Homo Sapiens
ccatttctccaccatgtttaattcccctgaaagtgtgcacttgggttgacaagacaacccaaaacagggtaaaacattcaatatttggttaaagctgtccgagtagctagaatagttcctcacgtaacttttagtataaattatatgaacacaattaccaaaaattttttaaaaagtgtttttataattacccttctttatatgggagcaaggctgtactactagaactcctggatattttcttacacctgattactgccaatgatgggttttggccttttaccaagtaccatgacccaggtgcataatcctgaaacggccaatctgaatatattctcatccccctacatcttggcattccagccatccatatataaaaccagctaataataccaggttaccaggaaccagctttcaaatctaaaaatgctctaatcacttgccaataagatggttttgctgaagtggaattatccctgacagctgttaccactttcttcttcttggataatgaattctaaggtagggtcacatcttctgccctacctggaatgtatcaaaacctttt

SEQ ID NO: 300977 - DNA, 585 bp, Homo Sapiens
tgagttttcagactggcctctctagcaccttaggtggccacgtgagctgggtgctaatccttaccacaccaccaccaatttcaatcagagcagctctatttttatgctatatattgaggtctacaagattttgtggagaaaaagagttttgccgtttaaagaaaattgaggactctttgtctttacggagttcattattccaagtgcatgtgttttgacaacttctattccaaagtagtaaaacctatgaaaaagatctggatcttgtactccagtgtgactttggttaatacatagcccctacatggtgaattaccataggacatcattgctctgtgatgtaaagaggttatttagtaagaggcttcatcttaacacattttagttttcttaatagaagcaaggtagatttcctcaagccgtggtatgcagctaccatgtaattgggaggtgacactaaggggatgtggggtgttgggctcagtgtatggtatttagctgtaattatagcatctgctaacctctcttgccattgtagatgattggtataaaatgtgaaggcatgccagagagcttcatcatcgt

SEQ ID NO: 300978 - DNA, 172 bp, Homo Sapiens
ctcaagtttgagtgtttaaagttgaaagatgtgctctactaaaagttatagtaattctaacctcacattgaaatgagacagtattccttgttatacaggctgaatttgaagattagagaggatctaatgtttacttaggtaaaggggcataggttttgtagttaagatgacc

SEQ ID NO: 300979 - DNA, 520 bp, Homo Sapiens
  misc_feature (267)..(424): n is a, c, g, or t
cgctcctcctttttcattgtttccgttgtgttgcttctgccttgtcaaagcacataacatttgcataacaaattatgcaaggaaaaatgaatagaaacctagaaataacagagaaatttaaaacacctctctctcatccaagactgaagttaagaagacaaaaaatacatataacgatataagtgatctgagtaacagtatctataaagtagatctaatgaatatatgttgaactttctaccttgataatagagaatattactctannnnnnnnnnnnnnnnnnnnnnnnnnnnnnnnnnnnnnnnnnnnnnnnnnnnnnnnnnnnnnnnnnnnnnnnnnnnnnnnnnnnnnnnnnnnnnnnnnnnnnnnnnnnnnnnnnnnnnnnnnnnnnnnnnnnnnnnnnnnnnnnnnnnnnnnnnnnnntagaaatttatgactcttctaggaatcaagattgttgtcccacagcagcctcacacacctggcatagcagtgattaaactcattgggagctatctc

SEQ ID NO: 300980 - DNA, 320 bp, Homo Sapiens
  misc_feature (214)..(214): n is a, c, g, or t
ggtttcatccgaagtctggctcccagccaggagtttgagaggcaggataagaataatctgtcctttccctgcatccccggttctgcctcttcccgcagtaggtgacgggttgccccagctgagtacgtcgagttgtttttggctatgacttgccgtcctgcatttttctgagcatgtcagaacagagcctgcaactcattactgcctccactanagaaaaagtgtagtgtggagacttagggagaaaccattaatttcctgaatgttgaaaagaggcacaggagagtggtcagatgcaaaaagaacacacttaaggaggt

SEQ ID NO: 300981 - DNA, 591 bp, Homo Sapiens
taccattctcttattattttgttccccattattattgtcctatgtcccagaaaaactgcacagaaacatttaattcctaccactgatttaccaagctaattgtttatcccagatccctaagacaggaaagaaagtagggagacctaaggaagaatcctctgaaatgtgagataccaaggtcctatttgttggttgacctgctaattgttattactctcttttttacaacctcaaagggacagtttaagagaatactgagacaaaaatgactagcttctttggtaaacagtttataatagctcaagttaccagggggaggaaacagtaaaaaagcagaatggcacacttctgagatttaagcccaaataatgctgttgtaacagagaaaacaaatcaaagctggccttgccccaaaagatttccaaaacagaggtcctttgggaggtctataaaaattctgatcaattcaggttggcagaggagacgtcctcaaaattctacatagggttccttaccaaaaccaagtaacatctagacttcataacgaaactaaacagttcaataatcaggtatactacataaaaaactggg

SEQ ID NO: 300982 - DNA, 209 bp, Homo Sapiens
atcttctctttaactgtgtataaataccacaaaccaaagtttcatgtgatcaaattatttccgtttattatcagatggccagttctgcacaaagaatgtctcaggacagaaatgatagaattcattcttgtgagttggtgttggtgattagcaactctgacagtttactaccttcactgtttttttctaagccttacagttacaccccc

SEQ ID NO: 300983 - DNA, 563 bp, Homo Sapiens
acaaagttggtaccaagttacctttatttcagaaagaagcatagactttctttaatatggaaaaatctgcctctttaaaatatttggtgctagggcaaacaccattgtcatcagtggaataaaggaggaggcccacgtatgtctcaggtcaggcagtgccccaggaggacgctccgcccccaggaggacgctccccactgggctgataccaggcttcgtgagggtcggagccttgtgctgttgtccagtgtccccagaaccgagcgagtttgagtccatcagtcagtggatgccattttgaaggtgcagtctggtttcatggttagctgccataacatatgccaagtatcctgctcacatttacgtctctgaacaaatacgcatcagtctggtttcatggttagctgccgtaacatatgccaagtatcctgctcagatttatgtctctgaacaaatatgcattctgctttgttgtgagttccagacaagcactttaaccaaattggcaggcagtagagatagggaaggagtaattgaaaagtattagaaaataaaatgatcca

SEQ ID NO: 300984 - DNA, 511 bp, Homo Sapiens
tctggcagtatcaaacctgaatcaggtagataagtatcatgtttattgggaaacagtgcagttgggaccagttttaggcaatggcaatcttatgggaagagcttagaaaggaaaccactgtcaaagtagctcgagtagaatttttatcttttaagactagtcaagaggaggagggaaagagtagatcaaggagttccatttgtaactgtgaacaatcaatggagacaactcactaccttcagactagccctcgggtagagtggaccttaggtaacaaaaggccacctagagaatttagaaactccttggctgtcttctcattttggccaccaaattatccggtcagatcataggtataaacaagctgcagggcccttaggccaagggttaaatcaagagggaaattatcacattccttcaaatatagaatataatattcctgtatgatttggcatgactggagaaatattaaataggtgtaacatttcttgcttaagaaagggctggtatt

SEQ ID NO: 300985 - DNA, 167 bp, Homo Sapiens
gcaaatggctcttgggaaaaggaaaaatattatctatcttcatggcatgtcaatttccattgctcagaatgctctgatcattcagacacatgaaactattcatactgttttccaacagtcactaccattacttcttcatcattgtatgtattaggagcaagtcacta

SEQ ID NO: 300986 - DNA, 555 bp, Homo Sapiens
gctgacatcttgaggaaagctttggggtagtggagaggtaagggggtcatggtcagtctgaactcaacaatagggctgaatgaatttaccaaaggaagctgccttatattatatgccaggctgctggggaagcctcaggtcctggccagcccctgttctcacaagaacatgcaggttaccacataaataatggcatatgccttccataggacgtcaacctgacttaaatctacctataccctactctctattctttggtttttggttctcatccctgtggaaggaaatgggcctcttctggcatctcatgctactctgtgcttttccttgggctccaaattctagctcataaagatgcaagttttgcaatttcctataaatggttaagaaaagagcaagctgtccagagagtgagaagtttgaaaagagaggtgcataagagagaaatgatgtccatttgagccccaccacggaggttatgtggtcccaaaaggaatgatggccaagcaattaatttttcctcctagttcttagcttgcttctgcattgattggc

SEQ ID NO: 300987 - DNA, 299 bp, Homo Sapiens
cctacagctcatttcttaacacataaagctttgcacctctccacaaaactgccatcagggatgtccccagaaaccattcatcccaggtgccacgcagagaagagttgcttgttctccttttccctttacctcttccctctcacctcatcatgttcattcattcatcccttttccattctcacttttaagctttaacctttcaaaagcctatcttcccctataagtaatgtattgtaactcccgccatcaccatatccttctccaaccaaccaaactgccatcctgagtttatggaaagt

SEQ ID NO: 300988 - DNA, 558 bp, Homo Sapiens
tcttctttgggcctgtgagataccctgcctccttccatttacatcatcccatatctgtgggaaaatgtgtttaaaaactggcagatgcccttcaactttttggtttacactacacaatttaatcataaagatggcgttttatgaattaaataaatacaattacgaaatattaacctttgtgataaaatttaaggataagctagtagaacttgcatgggagcacaaagcatttggaatcactaactgagagaccgccacccgtggtctgttatccatgcctctgtaggaaagttgtgtttaattcaatgtaaataatgggcagatttgtacaggacatacctaccttagtgattaaccaggatgtttatttcaaaatagttctttcaccgatacttatgtttgacattgatacgtcatcagttagtcacttcagcagtattcatagcatcttcattttatagtccaggaaacagactgtcagcagtcaagtgactttaccaaggaagaatagcctgaagggatgagagcatcctgatgtcagtatgtttgtttctggtg

SEQ ID NO: 300989 - DNA, 488 bp, Homo Sapiens
cttgtgactctcagcacttcttgcctcttcctctccactctcttaccctgcatccttctttggctaatgagtacccttggaagaacttttgcagaaggttgacggcagctctgtggtatgaaagagccaggaagagctctgcaaatatgaataaggacaatggagttgtggcaagcataccctggcaggggcctcccaccattcagaggaggacatgtttaggatatgcttacaaggacactcaggttcccatgatcttaatcactcagcagcctctcttctgaggtgggtggataaacttgccctttccagcacagtgggtggcgggaaaagatgggtcattgtgatatcttttgtccaggctagatctgagaaaatgacaatctatgtctctgtcagtgaggcatccaacactcatttgttattctgttgggaaggttcatttcagggttcaagcagaactggtgctgccatgggagatactttaa

SEQ ID NO: 300990 - DNA, 484 bp, Homo Sapiens
  misc_feature (147)..(165): n is a, c, g, or t
agtttattaacatcttgctgaagtttttataggtggtacctaataacaacatgctgccaccaaacacagaactggatgaaatctgtctatcaatcacttatctatcctctaagtttatgtgtcaagatatacatatatagtattcannnnnnnnnnnnnnnnnnnaacttggttttaagagtttcactacctgaagcataagtcaacaaatataagttacagaatgctcattatctgagaggagaaatttttttcttgctataatctccaagataaatttttcacatgaggtattttatagcattggttgatattgatctctcctacttccttgatcaccggtcatttcttcacagacttctttgatggatctatttcaacaactaaagtgcagacactggaatgtccaggattacatccatggacccctctacttttctgcttgcattcactctctctgtaatgtcatccagtcaatcccttg

SEQ ID NO: 300991 - DNA, 608 bp, Homo Sapiens
tttagatgcagttcacttttgttttttaaagtaagttttattaatggaaaggaagaactttttccaagaaagcattttgaaagccactgggggagggggacatttatgcttttgggctgtggagatcctttaggtggagagactgctctctcatccctagtggaatggaggtttgggttggtgagtttctatcaatagcctgctctctatagtgggtcagtgactggcaccaaattgtagtcctgttccatggacattgccctgttttggttttatgagcttttggccaggcacaggacgcagggtggtagggaaaaaaggaaatggttcctgtgcccgtggtgctgacaggtaagggaagggccttctgatgtattttatggggatgcttcagaaacctgggggttgcttgtttgtgtctctgggaagcccttggtaaagaaagccaccattttttttacttaggtatattccagtggtttatcatcgggagagggatgataatggaggaaggctcaatgagggagaaagtattcagctgcttgatgttagagcttaatggcaggacctaccagttgcttttcacagaaatgctgtgtattgatcct

SEQ ID NO: 300992 - DNA, 584 bp, Homo Sapiens
  misc_feature (384)..(463): n is a, c, g, or t
tagccaccctgaagatgtatagttacaggtcaatgggatagccaatgtctaatgcagtacttagcacttctgagcagctcagtgatgttagttttgtttcctgttaatataggttagtttaatcagatttcctttctaaaatctaacaaacatgtaaacagacaacagcccttttttctcctaagtggtgtctacctggactgttggattgcacaactcctatacacagatcactctgacgggtgctgcctggagtggtacaacatggtgaccctgcacatttccttgttaacctaactgaatctatcagatagaataaacgatggagatattgacaaaaaaatctcgctcatctcccatttacccaggttatcaaggagtgannnnnnnnnnnnnnnnnnnnnnnnnnnnnnnnnnnnnnnnnnnnnnnnnnnnnnnnnnnnnnnnnnnnnnnnnnnnnnnngatcaaaaagacctctagaggactttccagtagtaagtctccactatttggggattccctctcgttagtgtgggctaagtcagtctttaacatctgatgggaatcaccatggtccttggaa

SEQ ID NO: 300993 - DNA, 390 bp, Homo Sapiens
gagaaccaatccagaaaaagcctgaggtgcctttattaagctcttctcacggctgccaccaagttgaatatgaaaggaagtggttaggtgatgtgttctgctgtttcttgaaggaggggagcaaaagtcagcaatataaggaaagaaaagggtaccgcaaaatagcaaaatagaaagtgtgttaaagggctcacacatacctgcagtcctcacctacccctgtgcaccagcacattgtccttgctcatttcaatgcctgcagctcacgacgacaagcatcggagctgggtggggccgttgatagcccattgcttagccttctttctccccaggatttctcggggcacagaggcagtgtggaatgaaacatccacaacttctacagtaggg

SEQ ID NO: 300994 - DNA, 502 bp, Homo Sapiens
ggagtggcaataaaacacaaaataaaatgacacagaaagatcaaatactgcatattgtcccagtaaatatgaatttgttcagcttcttaaaaaataaaaagccctcaaatttaatagaaaagcaaagtcaacgtgattaccagagactcacctacataaagtgacatagaaaagataaaaataaagaaatgaacattgtggtgggcagaatgttacaatgggcctgaggttctaccctatccaaccctctaacctggtgtatgcatcttacataattctcctgggattatgtagtgtgatatgaagcagtagactttaagaaaggaaaattatccagatgggcctgacctaatcagacaagccctttaagaacagagttttctctgactgctaggaacgaaaggtcagagagagagaagtgtgagaggttattaactgggggttctccagtgctgagacggaggagccacatgtccaggacctcagaatagtccccagccaa

SEQ ID NO: 300995 - DNA, 513 bp, Homo Sapiens
gatatttgtgtattttaatgcagtgttccacacctggagctccaattctgatgtgttttatggggcacagaatggacagaaatcaattcctggtacctgtgacaaagaaaaaaccatccagaattggagactgttccctgccgggggaacagccgcaaacatgtgagcctgtggttgacaaaagtacgtcatgcatttcagagtgcgtattaggaatcagaggacaaatggcttgagaatgtcacacagaaagtgcatagcataactgcagcagcacatgactgaatttcctgggcgcaaaagctgttgaggactgaaagtcactcagtagcccatctcgtgttttggatgcaattctttgaacttttagagtagcagattccatcagggaggccacatgtggatttaagcagataatttgtataggcacaaatcatatcattttgactaagttttttggaatgaaattgatatctgctttatcaccacttgtacttattggactattttggc

SEQ ID NO: 300996 - DNA, 557 bp, Homo Sapiens
  misc_feature (315)..(461): n is a, c, g, or t
aaaagtgacttggacttgtaccctttagggtagatgcctgagtatagtaatctctaaagctgtacatggatggaacttgttggcatcacactggtgagcaccagaggcaaagaagagaaacctgaccatgacttgctgtagtttctcagaagtgagtccattcctgatgagttactatgcaggcccttggatatgtcctcacacctactccagatttccctatgattaaatctgaattttattggtggcacttttaaattagttttataaagaactgttttgatgacaccaagaaatgttttcagtgtgcagttnnnnnnnnnnnnnnnnnnnnnnnnnnnnnnnnnnnnnnnnnnnnnnnnnnnnnnnnnnnnnnnnnnnnnnnnnnnnnnnnnnnnnnnnnnnnnnnnnnnnnnnnnnnnnnnnnnnnnnnnnnnnnnnnnnnnnnnnnnnnnnnnnnnggagaggaagagcaactggaactgggacacatgcttgctctgtcttgccttttgatgcctcctgccatgtcatgatgcagcaagtaagcccttacc

SEQ ID NO: 300997 - DNA, 154 bp, Homo Sapiens
actctttaaaaaatacaacggaggtggtacatgattgggattagtcacatagatgccaagtaatttagacccaaaggcaaattctgcttctgccgtgaggagctgcgtgactaaggccagttactgaacctcaaccacgcaacaaatgtttttt

SEQ ID NO: 300998 - DNA, 535 bp, Homo Sapiens
tgggggagaagagggtgctatgaaatgtaaaattaaggatgtaaaaataacattagggatgccacaaaaggtgaaatataaaccatgatcatttgagacaagggaaaaacagggctttgaaaatgcctgtcatgtgataggaggcatctgtaagggagagactgaaatggctcccaggggtagtatatccatcctcttcccgatatacctgtgccatacaaataatgaccctcaacacgttaaaatgtggtttacattaagggtcatcagagtttaggcctaatttctgcaattcaggtattcatcattaccttgcaaacttactgtaccaacataaaaagcattttgctggtgtggcggggagaatcaggttaaattaagtagaagcattttggaaactttgcctagtacttcatgacttttgaaaattataagtgaaaacagagataagtcctattcttcgctcacattatttcccacaggcctttccagatccttatagctaaaaatttcccttttgccattaactgtcatt

SEQ ID NO: 300999 - DNA, 538 bp, Homo Sapiens
agaaaggaattttaacttgataaattttgactaggtaacaggttcttttatcaaggagtgacattttatgtcacaaaaatttttaaaccatttctgtctcttggaaaacccaaaggtagcagtggcatgtgcaaaattcttgttttaaaagattcaaacaataaagaaacatgtagaatattttgtgtccgtacattttatgtttaggagttgaatattaatttgtaattaatagaatggagaaaagcaatcagttaattagaattcactttataggaatgaaatctaggcttaaagtgtgagaataatctgtcttgctttgttgaaagtgaccttggtattcgaagacagagctgctcactactgtcagtaagacgtatatcttaaattgattaaggctaggtaatcagtttgtgaggattcattcttaacgcttgtgccattggcaggcatattttaggtgctgtctcttgggccataaattagtgacactgagtgctgtggatttacccaaataacctctttaatatttgctact

SEQ ID NO: 301000 - DNA, 394 bp, Homo Sapiens
tgtaatcaaagtagattacagtacttatgggaatttcatctaaggcagtaaacataaacactgaaaaattacaaattgcatttttgctattttgcctagaaaatgaaagaaaccctagttaaaccaaagtgccaaatgaaagaaattaattaggtgtctcaataaacttagaaaagtctatagcttttctttattagtgacaactacacagaattctgaaatgaagaaaacctacgttctattcacactgacaaaacaaaattcatagggataattttaataaagaaggtataggtcctatgtgaagaaaaccataaaccactaaaaacatagaatctgaatacagaaagataccccatgtatcctcatgggcagtcttgtaactaaattatca

SEQ ID NO: 301001 - DNA, 180 bp, Homo Sapiens
tgtatttaacattatgtttcacccagacaacagctcagagaactgggcaatggctgctcatgtgttgagccggggcatacaggatgaagagggacaatgagagggaatgaattctattctagacaccctgagtttgaggaacctatggaaatgtccaggaggcaactaaatgaaacagcc

SEQ ID NO: 301002 - DNA, 114 bp, Homo Sapiens
tgattcagttcagtaatggtgattcagttcagtaactgcctatcctcatcaatgcttgtttgtgatgatgaaatagttgacaaccgggactttacaaaaatagctcctgaaaaa

SEQ ID NO: 301003 - DNA, 435 bp, Homo Sapiens
gctccaccaaagtataagtgctgggtgcacaccactgcaaaaatctgttagtatgagatacagctatggctaagctgtacattcatgtgaagttgtcttaaaagcttgaaggtgacaggtgcttccaattccaatctgtcaattcaatggtcatagaagtaaagcagctcatctacatcagtaattagtagttgcattaatgtccatcacttcagtcagagttacagcacagggaccctactggtcccacaggccaaaccacagaagggagttatgtataaaggctgggccactctccagcccccactgcaatctaatgtgtggagtatagtggagtgtggcattaacaaacttccaagtgggatcacagaaaaatcaaggcaatcagaggcactggtaccagttggtgtgatttaaaaccttttaagaaactga

SEQ ID NO: 301004 - DNA, 409 bp, Homo Sapiens
attatttcaaaaaagccatgttacagatggctctccttggatggctattccagtcggtttccggggctgactggcccactccatttagggtgtgtagctgtgagtgtattttagcagaataaaatttcccccatctgattacttggtgatctgggtataaacctttcctgtacctgctttggtattagtgtgggttcttgttccattctgagaagctgattaaagctgtgcccaaagaagtgaactttggtttggttttgaatggtgaaggttgccactgctgactatatcaagctattgagacagctgtctctggggcaggcctatctgataggaacaggaataaattgaccttgaaatacattgaacttattctgtttatgaaatctgtagtcatttttgacagctc

SEQ ID NO: 301005 - DNA, 502 bp, Homo Sapiens
  misc_feature (320)..(320): n is a, c, g, or t
gaagaagtagaaacatgggaacagaattgtagttgactaaggaattagaagaaacagaaaaactttctttggccccattctcaacacttactcagtgatacaggtgaaggaaaaacaacatgcttaaactaaagaatactgaaatcactaataagtacactgggttcagaaatatatttggaaactaaaatcaagatagaaataaacaagatgaataggaacagacagtattgtaaaactctacattaaaattttaaaaggaattgtatagattggtgagaacctagcctggcagcagcttacatgagtaaaaaccttantaagagctgctgtggtaatgtaggtactaaaactctcaacacagtccatggtgacattgattcgagtctgagaggtgcttaggtggaggtatgctcccttatgtgtgtgttggccaaataaaacatgatgtaattaatccattgtatcattgatacagtgattcaatatatatcatcaatac

SEQ ID NO: 301006 - DNA, 376 bp, Homo Sapiens
  misc_feature (127)..(151): n is a, c, g, or t
agataaatgacatgttcaggcatctgatgcctgatagcatttctctccgagaccccacctatggccattgaggttaaagaaataaagtttgagcttggaaacactttgttagagtaatattgataannnnnnnnnnnnnnnnnnnnnnnnnataaagtaatcaaggggattatctggtgaatttccatgaggctgccacctgaaaggaaagttgaatcatgggtgctcaagtgtgtgggaaagtggcccgcattcagggcatttccagaccatttgagatcaccgtcaagccccaaattcccattcttaagataaactcctaggggtctgctctggatttcccctagacatgagttcaaaagtttattcttttttt

SEQ ID NO: 301007 - DNA, 531 bp, Homo Sapiens
caaatgacaatcgtagacatgcccaacagaggaccagattaacacggaactagcttctctagatgaagtcttgtttgttttgccttttcttcctccttggtgacctttaggtgggtgggcaaatgttaaggttccttggaatacaatttgagaacccctcctttatgcatctctgggagtactgtgcattgactcagtccacacggattctgatgctctttagcagctttctttgacagctaggtgagaaagctaagatggacatttccaaaagtctcttgctaccaggttctggatgtggccaaggttctggaggagcctgggcaaaacgtggaaagtgggtatgagcagtgtgaggcagccacagggaacgagatgggtgcacttcccagaaatgtgtgtgtgtcgggggtaggggtagagggagaagaggggcgtgcctttggttcttctgggacagttctggcagcaataatggagtcagtatagaagctagtatcatggatgccatgtgggataacagtgaggcag

SEQ ID NO: 301008 - DNA, 317 bp, Homo Sapiens
tctgccagtaatttttcagtctcaaagaatacgtaattcctactctccctaccctgacataagtgaactgacttcctcttcaaaaggttgaagtctccttccacgccccctccctccccagaaaggctgctgcctcagcatggggctgggcgcactaaccttgatcatctccactgccgcccctgccaggcactcagaccctgatgcagggagagtggggtttgccagtgtttgctgggggtgggaggcgggatacccaccagccacctgcctgcggcccaaggttctgttctgtccttgcatcacaatgggaacct

SEQ ID NO: 301009 - DNA, 553 bp, Homo Sapiens
  misc_feature (446)..(446): n is a, c, g, or t
tccctatgaggccttaaatgtgggtctagaaaacttacaagaaggaggaacaagcagtaggggagtctgggctgttaatccctgcagtttacttgtgccgtccagacctgcttaagcccagtcttgcttttactgtaccaagtggattactgctgtacatgtccagttttatgattcagtgaaccagacaatactctgttcacgatgggctgttgtttttacatagtctcttggttttccataggcggtcattgcatctcttcctgggcctagtaacaagccaggaaccacagacagtgattgctggcaaaccctaagggtctgaaactcttacccttttcttggtgcttgttagagagaggggtccttaattcattcctgtttgccatgtcatttccagtactactgggtgtgctgaggcataggctcaagggttagggcagctntcattgctctagaaccttctcttggaatgggcttcagtaaaaactggcaggctcataggttacccagtaaatgggtcagaacagcatatccaagtattgaaactcac

SEQ ID NO: 301010 - DNA, 161 bp, Homo Sapiens
gtaattccaaatattgaaaataaaatgcagtgaacctaactatacatccagttagaagcgcagaaagaaactatttcaagtaacttctaaaaacaatagtttggccacacacagactagtggcaaaaataacagccaagcaaaacaaacaaaataaaaatc

SEQ ID NO: 301011 - DNA, 455 bp, Homo Sapiens
caatctttgaaagtcacttagtctaatgaggaaataagcccagagaggtgcccacatgctttggtctcctgcctttttgcatattgcattgaccacagcaacaccaacaagaaaccaagtacactctgaatcttctcgacattttgctatcagagcaatttatgttcatggaaagtcacaattataaatttgttccttttaaaaggaactcaaatggaatttctaatattagcctgtgagaatgtcctgactgattactgaagaatggacaaacttctaggatagaattatgggtgttgctcagatgggtagcagagaaactggggaagctcttgtactggccattgaaatgttaacactgaaaccctgcagcagtggggagagtgtgcatgctttctgctgctggtaggtggtaaggctgtatgatgttttaaagcacaggctcaaaaatcaca

SEQ ID NO: 301012 - DNA, 133 bp, Homo Sapiens
aacaaaattgatattttgttgcatttaaaaaatttaaatggtggtcaaagcgtacaaaatctgacaattaagacacccacaagagacacagaattatctcccaataaaattgtctcataaaaaccttgctccc

SEQ ID NO: 301013 - DNA, 530 bp, Homo Sapiens
  misc_feature (398)..(406): n is a, c, g, or t
acaacaaacagcctgacaatctgaccagcatttccattgatataaaatgtaagcattccttcattctgtagttaggaactccaacttcagccttatctccaacataatttcccaatttaacctatgtactgatatggacatttctttgtgaatatgccagattcaagaatgtatttttctaaggtcaatagagatacgacattttaagtcaggaaaaatcacctataaattagtaggaataactgtagaagcatcacaaaagataccccatgaatagatggcatggtgtgcatgctgacagccacggggtcatactctggagtttcaacatagaggctgtgtttcaataaataagacaaattggggaattaagtaaaacaaatggatgtaactgaggnnnnnnnnnaaaaaaagccctctattactaacctcaagaaaatatttagtttgactaatttgtgcagtttccagctcttctacttgttcttgcctgtaagagaatcactaatactcaaaagctggattattga

SEQ ID NO: 301014 - DNA, 119 bp, Homo Sapiens
aattgtcatattaggataaaacatcagttgtaccagaccatcccaagcattgaaggattttaaagttcctggtctacactcattaatgccaatagccctctaaccctaatatgacaatt

SEQ ID NO: 301015 - DNA, 584 bp, Homo Sapiens
  misc_feature (375)..(375): n is a, c, g, or t
  misc_feature (485)..(485): n is a, c, g, or t
tattggaaaagcactaaacctatggttctgttttccatggactttggttctccatgcattgctctctaaattactagaccaccgttaagggtcagaaccttggagagttccaggcagtagacgctttacaatgtgtgtgactactgcactagcatgaaatggacaggatgaagctagtataaatgatgctgaagcagacctctcatgtgctttctgttgaaatctccaagtttaaaaggctgccacctctacctccccgcaacctcaaggagatgttggtgcagtgaaatatttcagtccatcttgtgaaagaggcatgaaatcagcatagttaccgtagggtttctgttaaattttgatgttgtagaggggtgnttggagttcctttcaggttctgtgctttctcctgaggtcttttctaagggtatggtattgcttctctgttatttcctgacctgttataaaattaattggaatctttgtanggttggaagagtgagtttgcctaaatctacccttgtcgttttctggtaagtgcttatatttgtaacagaaagattaaaaaaagatactgtatgttatac

SEQ ID NO: 301016 - DNA, 621 bp, Homo Sapiens
ctaagccttacctgagtgagaagccctttacctaacaaaagtccaatatagctgaaatgtcgctctaatactctttacacatatgaggttatatgtagaaaaaaattttactactaaatgatttcaactattggctttctatattttgaaagtaatgatattgtctcatttttttactgatggtttaatacaaaatacacagagcttctttcccctcataagtagtgttcgctctgatatgaacttcacaaatacagctcatcaaaagcagactctgagaagcctcgtgctgtagcagaaagttctgcatcatgtgactgtggacaggcaggaggaaacagaacagacaagcattgtcttttgtcattgctcgaagtgcaagcgtgcatacctgtggagggaactggtggctgcttgtaaatgttctgcagcatctcttgacacacttgtcatgacacaatccagtaccttggttttcaggttatctgacaaaggcagctttgattgacatggaggcatgggcaggttctcctttctttggaacacatccatgctgggatgcacagttcttttcctaaggattgtgtttactcctgactgcaacgtcttggccactgtttg

SEQ ID NO: 301017 - DNA, 580 bp, Homo Sapiens
ccgcttcactatcaatgttttatctactaaattcttaaaagcaaatctccatccgtcatatagatttgcgtcgggagcctagcacagcacttggcacagataggctctcaataaatattcgttcaattgaatttgactgatgtttgttttaaatatactgaaatataaaatgtactggcttggtttggaatgtggctgtattcatgcagttaatttactctctgaagttttcaagttagtgactttctcttatgtcttctaagtgcaacactgtgcttgtcacatctctaaagcaatttgccatgctcccactaagatgaattttcctgaaataatgtctgtgaccattttggtggcattttgtgatgctactagtgaatttccaagttatactgaagcaagcgagcacccatttgtagagctcaccttattcgctttgaaaatgccattgctcttggaagaacacttcgagtgaaaagggaaataagtgtggaggatcagcagtttgttttataccataagtgtttctcagtaattattttcccgaactgttactatagaaaaaaatcaatgcttatca

SEQ ID NO: 301018 - DNA, 557 bp, Homo Sapiens
ttaggataaaagccccacgagagtggggactttgtctatcttgtccacttctgaatccctgaagcacaaaacaaattattggcacattagttgaatgaatgaatggcattgcacacttacaatctattttgtttaacttacaaacagcaaaaatgctaccacaattctgaattttgattaaatagtgtttcaaaatcacagatctgttttaaagattaaatgaggatttctgctttaaaaatgtatgtttagatagaaaaatagtgtaagcaaagataagtgaaagtgcttaacccagggtgggaaactcaatgacatttaagttgactttaagtctaaagataggtttgaggaggagtggatgttttccccaaaccagcctcaaattggaccttaagtggtccacatgcaaaacagttccttctctattgttctgaagggggtgttttcttgggagtatagactagtcatcttgcaggcagctaacagactacattgttctcatcagatggtagtattgagcttgccagaaaattttacttacagtggggaactcc

SEQ ID NO: 301019 - DNA, 479 bp, Homo Sapiens
tgttaccattctgaaagtgttccgtactaaagaacccctatttattatacatttctagttatcttcccatgatttgtacctccctcaaagtccagaacttgttttcctcagtctagccttttccccgtactttcaccctttgttaagatggtgtgtaaacccaaattttaatcacccttttgagttaacactgagttctcctttgtgtatgcacattgcatgcataggtaaactgctttttttccccctcctgttaatcttttatctgttaaattcagggaccccagccactgaatctaagagggtagggaaagagtgttttcctctccaacagtgtgcttcatttttttcctgttgggtaattcaacactgactctccccaaaattacacagaagaattaaagtaacacaggaatgaagaagcgaacatagatttatctgtcagatgcatttaaataaagttatttctctacaatttc

SEQ ID NO: 301020 - DNA, 547 bp, Homo Sapiens
  misc_feature (75)..(86): n is a, c, g, or t
ggctcaagcaatgtgcccacctcagtcacccaaagtgctgctatcacaggcgtgagccactatgcacagccaacnnnnnnnnnnnnaaatagtagatataagtgtaaagtattgagaccagaggttttcttgttgttttggattttctcattcataaatcctctgggcctcacatatccaatgggtgttgtcagtgagaagtggtcactatggggaccatgtacatattccagccatgctgccatgattccggtgtttttacttctgttttggaattatcttcagggtccctagcatgcctatcattccctcactcaatgcatcgcctgaaaggtactgctaggcatgaagcaaatactcagtaacaacctggacagtagcaaacctctgccctccaaggacaagctccatccagagccaaacaccctcggagacacattatttgcaagatgagggtggccaggtgagggacgccttggggctaggtgagaccagtagctacagacatgtctggggtctgctggggtcaaacaggctatacttgatg

SEQ ID NO: 301021 - DNA, 218 bp, Homo Sapiens
cggcacgaggcagtttctgatattctttcagtaaacttatgtcctttttctacaaatagatttaatgtttaaatgtatctaaacgcagagttaatttggagatttttggcaaatatttgtacataagactttccagaatcttaaaatcgcttacgtaagtgaaattcaaattttacattcttgtatacatttacttttcaagaaagtaatttgtgatt

SEQ ID NO: 301022 - DNA, 611 bp, Homo Sapiens
  misc_feature (69)..(96): n is a, c, g, or t
  misc_feature (528)..(528): n is a, c, g, or t
agtgctgtcaacaagctgtgacaaagagaaggctcctctgtgaggcagggaagtggggtcaaataacannnnnnnnnnnnnnnnnnnnnnnnnnnngaaggagaggagctgatttaggacaagtaaaatggttgtcagagagcagaggaatccagggaaggcttgagaccgtgaatctgtggtggcctctgccggtgcttctgtgggctttctccagctctctcggcagggcggagtcaggagcagagaaggcaaatggtgggatgacctgaagttggggttttatcagagaggaggagcaggaggacagggtgtaaggcagatcaaggagtgttactaagggtctcaggtcctagacagtgggcctagacaggtaggcagtgagtgttgtgggggacagggaagacgcgtggcaaggggccctgaaaaccaggggaatatggcaacatcaggggcctggcagtcccaggaggggagcaggtctagcaggaatgcccttgtgcctgtgcaggagagcagcaggactangaggctgcagacagacagtgggtaactgaaaggtgaactttctactagacagcaaatccctggatgtcatcctgatggatcta

SEQ ID NO: 301023 - DNA, 638 bp, Homo Sapiens
atttttctgagtcaagaaatctcttcttgagccggggatctctgtggacttctgccagtcttgggaaccagacctaatgtgggcaatcaagcccaactatcggactttaagtgttagagaatgaagctgtataatctaactatggtatatttgattgcttgaaataatcgctttataaatttattctgccttttaagcaaacttaacagatggctgaatctggacataactgtggagaccactttcaacacttttattgttggctaaagcatgctttgttaatgatgttcccaagttattcattcatttttaccaacctgcaaacactgttatatattagttattgaaagattctgatttcacaaaaggaaagtttcactagggattgggttagcacattgtcattccctttttgcatgctattctcaaaacactcgtggccagggtacacattagtgggctgtaaaagcatgtgttctgaactggtcagtgcccatcccctcccagttattaaatactttcactgtgcatatgatttgcatatgacttttccttcatcattcctgtcacttcatgcaagtgacacagtattttagataagtcatcttaatatttattcttcctggctgattacaaat

SEQ ID NO: 301024 - DNA, 548 bp, Homo Sapiens
agattaaaaactagtggtgatttatacttacacttatccatttttgtgtggagatgaaactgtcgggcaagattgtcaatttttgatatttcttattgcagtccagtaaacaatgactaatcctggaaaccaggcacataaactataatgtccattgagaaacgtcaggaattttgttctgtatttgccattatgagaaagaactcagtctggattctgacttggagattgaaacaacgaatagttgacttcataagtttgggcagtttaaataatcaaccaacttgggtaaatatttccacccctaatacctagaaaggaggccttagggctaaatggcatgatgtaagctgaatgccctgcccaggaaacagggacaggcaggagctcctttccctctttgccctcttccatcaagatggtcatgtgaccacgaaaagtagatcaataactttaaaggctatttattgcaagtccccagtgccatgcccaggctttttgaggggagatgacatgacggtatatggttaggaactagataaattcat

SEQ ID NO: 301025 - DNA, 246 bp, Homo Sapiens
gagccacggttcccagtctgtgtagtctttttgttgctgagttgtagtaactttctacttaattcaagtccaggaggacacaagcgccatgctgccatggatttaacttctgaaccacctggagtgactggaacattccacccatccacttttaagcaactttccaaccaagcaagctgccatttccaactactgtgtgcactcagaatctacacctgcatataaatatactcattttcttcccaa

SEQ ID NO: 301026 - DNA, 505 bp, Homo Sapiens
actttcctgggtgggggcttgcatctgggttcctctggacttcacccccatgcaccttttccctttgctatttgtgcttcatatccttttgctgaaataaatcatagccgtgagcatgactgtacgctgtgtcctgtgagtcctcctagtgactcactgggggtggtcttggtgacccctcacataccttccaaagctgttctgcctcttgaattttcctgcctcctcaggtctttctcttcaccccagtacaacccagtatccaaagtcagcaactcagaattgtctttgattcttcccttgactcaggtaccaacatcctattgattttgtctcagaagtgtcctcttgggcccaggcccctggtggcctttcctgttggcccagtctgggccctcagcacctcatcttcacactccctgcaatagcttctctgtctggtgtttctgcctccgttctccattccagcccgtctttgatgtaaccattgtttagtccaaaacct

SEQ ID NO: 301027 - DNA, 411 bp, Homo Sapiens
  misc_feature (224)..(233): n is a, c, g, or t
gacacagagagagggaatttcagaatttttacatacattttagcaaacaagttttgatctattggcttcttggtgcagtaatgcaacggcaatccattctggtgccaaaggctcatactattacaaggaagttgtgaacactaatttcttaagaggtgaggccagccccacatgaacttctcttgcatccctctggtccaccatgacacataaatacttagacnnnnnnnnnncctctaatgaatcattagacattaaaaacggaataacagagtcacaaagggccacatgcttttcggtataaagcattctccttctctaggttgctatcacagtgcagacctgactgcctgaatatgctcaggagatttagtcaatattgtctgtatttggttatggaaaaggctctcc

SEQ ID NO: 301028 - DNA, 450 bp, Homo Sapiens
tggcatttctaaataaagtctgatcacaagcttctaagtgtactaatacttactacatagcattactactagaaacatataagtaagattcttcttccaaaagtttaagtttctgttctggattataaaagcataagtagcattattgcttctaaaattcatatttaaggctcttagtaatagcgatactatattcagagatgaagaagtataatatttccttataataaaaaactctactataaattttcttgattaacttttatcctgttttctacatcataactgatattagaacttccttatttcaaaggaatatttcttattccttcttagtccttaggaatataactgatttttgttgcttttgataggtaagtaaatgaacaaacagatggaactataaaaaattatttacaggactgataaatgtgcttgcatttgtcacat

SEQ ID NO: 301029 - DNA, 548 bp, Homo Sapiens
catgtgagtgtgtcttggggaaaaagaatcagactttacttgggaggtagcctcttcctgttctcttagatgaataataccatttatgttttataacttacacagtgtctcgtgtacataccatttgagcatcccaaccatcctttgcagaagacagaatggattttattaggtcttctttattacttagctagttaggtaggtaatcagaaagaaaagttaaatgacttgcctagaatcccttgaccagtcaatattggaaccaacactagagctaagatctgattctagcgtctgttttttccactgtacatgttgcttatctattatcttagactgtattatttacttagcaccttgagaaggcagggtatagggggatgcagtatagggtggcttagtgcagtgtgagaaagaagggcagccctgagggatacagtgctagagatgagaaaattcaggacagttacttttatagacacctacctctatttggaattgtttgtcatgagtcagacatgtgaccttatgtacctaattgatgtata

SEQ ID NO: 301030 - DNA, 517 bp, Homo Sapiens
aggatacttcatagggggtaacatcaggaggcacatgtctgccttgtcccacttttagtgatgctaagagtgatcagagggttcaaatggtaacagcctcagctctcttatcaacttttatctaaagacttgatagtcattccttgaatcaattattacatgaggggctgtaagtggtgattttctaatgctgctggtccaactacatttattagttggaattcttctctcaccaactaaacctattttgatactctgaattacactttatacaggaaaactaggataactatttaattctttccttttaccttccaattttcaaaataaagtactggtgccttagttacatcagtaactgatgtagagtttatttccaactaaatttaacagataccaaaactgaaatatctatttacaaaacatttaaacaaaggagaggagagattctgtgagcaatccaactaacatataaagggtataagccagtacttccgatttgtccagtgatgtatta

SEQ ID NO: 301031 - DNA, 317 bp, Homo Sapiens
tgttaccattctgaccccctttttggtcattttctgggatgaatgagcgcaggacagagaatttctgttgttaggaataatgacagtattctccgcagctctcctggcagtgatgggtcctagtcctagcgcaggaatttgaagctcgattagatcaaaagaaatggggccaaagtgtttttgactcatgctcgatattgacacagtgggtgggtgtcagggttttgctgtccaggggcaacagttggaggtcgacacctgagaacgttaatttcaccctctgtggttgggtgatggatggtgggggttaggggatt

SEQ ID NO: 301032 - DNA, 381 bp, Homo Sapiens
agaaaactagtaaatgcttttgaataggtagtatgacagctattttaaatgtataaacatttgtgtgccaaacaacatatatgaagggatgtgatgccactaactagtgcacattgtttctcaatgtgccattgagacacaaggcacagtaagtcaggattctgaggcattggaagggttttcttcagctgtaattgtttccacagtgcttttcatctgaggggctcaaagtttaagagtgcattcaataacccatgtactagcttcttgaggtaagtaaataaatcttgttctcatgttacatgttaatacaccaaggcaccaaaacatttaaagtgccatgaattagattacatcagaaatcagaaaagcttggattga

SEQ ID NO: 301033 - DNA, 652 bp, Homo Sapiens
  misc_feature (501)..(501): n is a, c, g, or t
gttaccattatgatgtttattaatgttatgcattccatttgttttgaagtgagtaccaatgtgctaatttgtattgtctgaaagtatgtaatgtttttacagcttgtttttaagaatctgtaaatatgtacaaacaaatcacagtactgctttatgttagaaggcatatgatgttgtactgtatgtaagcaataatacatagcagtgctaactttacaagtagcatcaggaaagttctaaaaacatttcagagttattaattatccttatttcatttaataatgattatctttaatcagtttttataagcaaattccattgttcctcctattggaacgtaacactgtttacacagcataattgaagttgcaggggagacaggctaaatctgacttcatctgtactcactttcactaagcattgaatggccttaccactcttctgcaagatggaggaagaccgcaaaacttagtgcccatcacactgaaggaagggatgtgngttttttttcctgcttctgtactgctacctaactttgtgatttgctttggattttaatatttgtttctgttttagattcaagcccgtaagttttgaggtgacttcagctccattgtgaaatagatagttctcttcatatttcataactaca

SEQ ID NO: 301034 - DNA, 488 bp, Homo Sapiens
gaagtcttctctagcccagaccacccctcaagactgagcttggttggtgggtctgagtgccccctcccactccacctgatgtggcatgaggcggcaaagctatgaggtcgtggggtaggtgcacacgtttccagccctgctttggtgctggtagccactggcccaggagcattttcctggcatccaggtgagtgcgcagccacacgtgcatgaagccaagcctgagtgtctcctgagggaggtgggctgaggaaggaggatgacctcacaggctgggtagagggatgaggttccttactggtccacagcgatggagactgcctcagggctccaccagctccacaacaccccctcactgaaatgacattcattcagcactgactgttggtccactgggcgcacacccttggcctgcctttgggacagagatcccttcccttttatcttgtgcaggcccagaattgaggaggtgccccacaattgtgtgc

SEQ ID NO: 301035 - DNA, 634 bp, Homo Sapiens
  misc_feature (548)..(548): n is a, c, g, or t
cagttctagaaacccattgctgagaaagtgaagttctctttcaatatccataatgaaagtcagtttactggcgagcacacctgggtttggcttcctagttattcctccagtagcattgtattgcatgtcttaggaaaaactatttgatgagcttagatttacaaattaaagtattcttccacttacttcagataacgatactgcaagatcgttaatattgacctagaagaagtctggctcagccttctgattgatgagctgtggtggctgtgaatgctaacataaccttaatctaaaatcatgagcctctaccaagggaggtagtagttcctctgaatgctacacagatcatgtcacttttgaagtcatggtttttgtcttggactgcctatgccctaaggggaacacggccaaacatgtatttatctagaagatgtcagaaaaagtgattgatctgaaaaacttctgtctgagagattattaaagtaacttggaaagttgttttggaaataggaagaaagaccccaaggaagatattttcacagttnttctttatctgaagagctgttgccaactcatcacaaaagggtagaacaaggagtacagattaatttgaaaaatatttctgattctg

SEQ ID NO: 301036 - DNA, 207 bp, Homo Sapiens
  misc_feature (80)..(122): n is a, c, g, or t
gttaccattccatgtaaaagcttactgtgagtcttggcctcatttctcttgtgcatatgaagtacaacttcttgagactnnnnnnnnnnnnnnnnnnnnnnnnnnnnnnnnnnnnnnnnnnnaaggtaactttccagcatctgtatatcacatataaaaagaaatcgtgtttttccagtaagactccagacactaaactgtggtgtc

SEQ ID NO: 301037 - DNA, 382 bp, Homo Sapiens
attacagacacttaaaccattactgccttcttcctcaaaagaataacagctttggtaactgggttagcagaggtgttagtggacttagggttgtaaacagatactcatggcactgacatcgatgagtctatgagggaaattagaaagataaatacatctgggatgtaaactcggaaaggcgaggctgttcaaaatgttggtgctattgaattgtgattctcggtgtttgtacattgctaataatgttaaaccatgaagcctgtgagatcttgtgttgcagcgtggtttggccctagcgttcttgcatgctaacctaaggtagaagattagcagcctgtttgcatgcagccggatgctgcccctgacgtgaagcatgttctgg

SEQ ID NO: 301038 - DNA, 543 bp, Homo Sapiens
cccacctcaaatcacggcttatagcaacaccctttatttgcttataatcctatgctctggcagtctgggcagagctctgctggcgtgatccaccactgctccatgggtgccagttgggactccacacacctttgtggttagtgagcagattggttggaggctgattgaccttgactggcctcatgtatgtgtctcaaagttggctggggctgtcggctgaaattccttagttctactccacatggcctttccccatggccagcccaggctgagatctgagattgaagagggtgagaacagaaagtacaagatcttcttttgacttgaaagctagcccagaatcgagggaaataaaccccaccttttgatggaaggagcttcaaagaatttgtagtcatttccaatccacgaagagtaggtacccactatttgttgaataaagccctattgaaagctttttagctatccagatgcaaattactggccaaccttttgggtagaattataaaattctgcccaaaattctaccaaattactggtact

SEQ ID NO: 301039 - DNA, 572 bp, Homo Sapiens
aaaagttgaccctatttttcaaataaaagatcagtgttctcaaaacttacatatgtagtcttcttaaacagctccctcctccctccaaacaaactaccttgctggtccagcctgaacaacatgcacaaagactttggctcccctagaacaagccattgagccttcctcttgagataggggcatcaagaataaggattcacatgtttattcacaactcaggctcctcaaggggctgggatctccccaattagactcctttgtttcactatgcccacaatctcagaggtgtttgaaattgtctgtactagggaagaaaggattttcaaaaatagccagtcacacagaacagctctggaccaagccattacccaatcccggatgggaagttgcttcacatttctcttaagttgttacgcagcattgccatggcagcaaaagaggttaaccattaaggaagaacctgttcaactgactgaaccaacaaaaatctgaacctagatcaggatcctgatctatctcatgtactcaagtgtgaggcctaatagaggttagatcattaagacgactaatct

SEQ ID NO: 301040 - DNA, 230 bp, Homo Sapiens
cctaaaaaatgtttttcatattatattccaggtaatcccagacctctatggggtaaatctggggatttcttggaagaaagtgcactcatggagggtctgtccacttggctcactccaacagtttgaatttggaattctgctcttcttcatgaagcacagtctcataagcccacacctacggtctgagttctgaactctcagcaggtgggaactgggaactgcgggttggc

SEQ ID NO: 301041 - DNA, 529 bp, Homo Sapiens
  misc_feature (44)..(84): n is a, c, g, or t
cctattttctattttgtttatttactttatctatctatctgtcnnnnnnnnnnnnnnnnnnnnnnnnnnnnnnnnnnnnnnnnntatttatatatctgtctatctagctagctagctatgagataggggcttgctatatggcccaggctggccttgaactcctgaacttacacaatcctgcctcagcctcctaagtagttgggactgcatataagcgtcctttataacagctctccttcctaccctcctccctctttatttgtttgttgacttattttagagacagggtctgtctgtgttttccaggctggagtgaagtagctatgtacaagtgtgatcatagcacactacagccttgacctcctgggctcaagcaatcctcccacctcagactccagagtacctgggagtacaagtgcacatcaccacacccagctgagcagcatttttaaaattttcttttcctccaaagctttcttatatcctgattttccctcactatcctcatgtaatatttgcatatattcat

SEQ ID NO: 301042 - DNA, 442 bp, Homo Sapiens
taatatatacacacatatatacataaaacattattatatactttgtgttccaataagccacaagctactttttaaaaataagttgctaaataattttctttttaacatctgctaatttcttttctcttagccccactctatcatattaactgcaatcacatggaaggagatatcagaatctatttaagtgaatattttaaaaagaataaaagcatatctactctctcaagtttctatctctgtaaaataactgccctttcatctttgataattttttttcttcaacttttgggttctggggtgcgtgtgcaggatgtgcaggtttgttgcatgggtggatgtgtgccatggtggtttcctgcggagatcgacccgtcatttgggtgtgaggcccagcgtccattggctattcttcctgatgctctccctcccgccacccccc

SEQ ID NO: 301043 - DNA, 518 bp, Homo Sapiens
caggtaagctccaaaaaaattttaaaataatctatgatcctccatctcctgagaataaccattaatgttttcattatatattaggttagtctatttgtgtatgtgtgtgtatacttttaaaaaatggagtcatactgtattaatccatgttcacactgctctaaggatctacctgagactgggtaatttatgaagaaaagaggtttaatggacccacagttcagcaggcttaacaggaagcatggctaggaaacctcaagaaacaggatcatggcagaaggcgaaggggaagcaagaaggtcttaccatggcagagcaggagacagagaaggggcaagggccacacattttcaaacaaccagatctcgtgagcactcactcactatcaccagaacagcaagggggagatccgccccatgatccaatcacctcccaccagacccctcccctgactcgtgggaattacaattcgagatgagatttgggtgggaacacagagccaaactatatcacatatt

SEQ ID NO: 301044 - DNA, 558 bp, Homo Sapiens
gttggttaagaagaaagctgggaaagtgaaggagagggggaagaaaggaagtgaaaagactttggctgttggaatctcagatctggaataggctgtataggctatttataatctctaattgccgaggaacctgaagttcagagttaaccagtgactgactcaggacatgcaaaatggcaagacccgaggtagaagagctcacctttcctgactctcagtttcctgttccctgaaaatgtaagctaagctggcagccctggtgagtccggaggaagaaggaggcgtagccctccgcgctcaggagatccagggcccaggagagagaaaaggggggacaagaacgaggggaaaagtggagaagagaaaccaaaatagggtgtgtcccaagtaaataaatgtgcgtcgagcccgccaagcacattctctcatagggacccttgcgcctgctgttcgcgtttcctggaatgcacactcaggtgtctgcaccagctcaagtctctgctcaaaagtgacctcttcggataaaacttctctgaccatcctatccaagtcccagca

SEQ ID NO: 301045 - DNA, 477 bp, Homo Sapiens
tggaagacttatcgggaatgcaggcagctgtgcgatttcagcttctctttgtttttggaccatgggttttctggttcttctttggttcctgcaggtctgactttctcctttttctgttgatggtctttcttggcctgtgtttgcaatgggtcaaccatgtgctttctggccatacttcacacttacttcccaactgggacagatagcatttcttaagtctaattccaaacttctgggataatctgattgcccttcattgagtcagaagccagtggatagggacatggaagatgctatagctgggctccacccttgcaggtgagaggagcagtttcaggaaagtctgccaggcatgagctgagaccttaagagatgtcagctagaattagccactgtcagtatatctgcttctgggtcccactcttcatcctgcttttcaaggatttcaaacatacactcctactcagtctcatgaaa

SEQ ID NO: 301046 - DNA, 123 bp, Homo Sapiens
ttatgcagtaaaacatcaaaatgattgaatatcttccattttattgtgtttgacctaacaaaataagtgttaccccctccaaaaaatattaaaatgcagatctgtctcaccgtgaattaaggt

SEQ ID NO: 301047 - DNA, 417 bp, Homo Sapiens
aggatttttattggaaagaatattaaagcttaaagagataaatggcttttttagggattgcccagttggtgaatgaagggtgaggatattaaatatggaatcttgtaactggaagggaccctagagatcatgaagtcacctccccacccttccacgacttcagtgtcacaattctctccaaagcatctctctcaagtggttatccagcctctacttcaatacccgcagtgatgggaaacttatcatttgaggcagtacattccattctggcagttctgatagttagaaaagtttccccttatactgagttccttgaaatttcttttcatttgtttctagttcttcccactgaagccactcctcaccttcaaatgtgtcaagacagttactctaccctctccacctctccctacagaa

SEQ ID NO: 301048 - DNA, 430 bp, Homo Sapiens
  misc_feature (295)..(295): n is a, c, g, or t
  misc_feature (337)..(373): n is a, c, g, or t
tgagccaccgcgctctgccctgcattcatgtttaatactcactttagttattagattgcaagacataaaaagacaagtctgaagaggaggaccagatagccactgagtttcagtatgtggtgctacccatggcgacagggagttattggatacctttatatatacactactcccttcaacaaactgcctggtctataggatcttgctcaaggacctgttccaggaaacctctagattttcccccttgcctagcctctgtgaaggcagaaatcactaatggagtggtttgccttanatacctttgtacgtgtaacatcctgcaatgtatatgatattnnnnnnnnnnnnnnnnnnnnnnnnnnnnnnnnnnnnnaaaaattaatatgtatctgatgctgattaatcactctatataaaatataaaatgtgt

SEQ ID NO: 301049 - DNA, 526 bp, Homo Sapiens
aaagtatttgggacaactacccactcaattatcttgccctttagcttccatgacattaaattctcccctattttctcctagctctaaaattcttccttctcaatctccttttctgctttctcctcttaactttggcactttcaaggttctgttctgagcgttttttcttctttttgccttggtgagattttattcagtgcaataggcagtaacctgcctctcatactacccctctagcccaatcctcttctcctgagcccaaactcaatattcatcttctaacttaggatctccacttgatgacctaatatgcacttctaaactaaactcatttatcatttcttcttccacccacccagtgtctctcaagacatacgtctgactcctcccctgctctggtcccaacatctgaccagtaaccaagtccttcagtggtatgtccaggtatttctcaaatacatattcttcttgaaaccccactgtcaggtcagcagcatctgttccccgggtttcccaactgattcct

SEQ ID NO: 301050 - DNA, 340 bp, Homo Sapiens
catggcatggtcttcagctcggccctttagtagatcatagctggggccaaaatttatagccatggtccttctttccagctcttcttctgaccttcttctggtggagaatgaagggcagctaccaggaaaataagttattcttacaaattccccattcatagtctaagcttcagatactcaaagaggatgccaagacacaggcaagataaatggttcgttgaacaaagtacagcagacaacccttgaccaagaatgtcataggctgacctgttctgaattgataacattcccagagtttacttatctccagaagtacacaatgatttaaaaagatgtttta

SEQ ID NO: 301051 - DNA, 461 bp, Homo Sapiens
aacaaatccaagagtgtaatctgttttcaacatgaggcgggggacagtgtctctctgaccctctcattttgcagattaatcagctagaagacaggctgaccttcccaagaccacacagcagttgggcacagatgggctctgagctctccttatgcccctcaacaatgaacttaaagcaaatgcaaaagtagtttacgatgccttcaaaaagcctcaggatttatgctaacctaacaaatttatttcaagcctcaatattttcccttatgattaatttaacaattacttcatctatgcatcatcttttcaaatcaacatctaatgttgtggtatattagtcattgcttaagtttcttttttggtgaataattgacactacatgccaattctatgatgttagtgtattcagcacgattaacttcattacacacattagatgatatgactctccttgaaaacac

SEQ ID NO: 301052 - DNA, 546 bp, Homo Sapiens
tgtttatattaagatcaccccacaaccactcccccgcaaaacacaagccgtgaattttgtccccgacaaccctctttaattaacaccggattttctcaagagccagttttgagtcagcttgagataagcattgttttcaggaactgtcgtattttaataaaggatggtcagccgggcggacttctgcccctgaggctccgcatgccgtcctcaaggggcgccgctgcaggactgcggtctgctggcgctggtccccagatctgaaccctaaacaccggtggcctcgtggcctgtgcgatgcaggccgactccagccctgccagtcccaggggatttctccgccggcgccccactcttgggaaggtcgctgcgcttccgggtgagtgcctgacctgcgtcagcggctgggacttgaacccgcggccgctaggaatctgcgaggccatatggggccgaaacctgggagggtccgaagactccgttcctgtggcctttgaacgcttgacaactttaccctggagctgtctgcagcggcgcagggaaata

SEQ ID NO: 301053 - DNA, 566 bp, Homo Sapiens
gaaagggaccagtggataataggagaggccttccaggctagaaggaggacaggtgcagagatctggagtggagaataaggcctgtggttccctgaggggagcatggagtgttgggtggaggaaaggccagggcaaatgagagacaaagctggaaaaggaggctgggacctggctgggaaggtctgagcccagagatctgagctatgtttgttaagtctgggtggggaagaagtgggaatgtttatttacttagtgttttgaatctgttaactcatttcttaaacctttacatcactttatcccacaaattgtcattataccatcaacttctccctccacaagccactggactatttgagaatatccctcaagtcttcatgcgtgcatgcctcagccccaagattagagacagctattccactaaggctgtgttttcagactcttttaacagtatctcttagtaagaaatccattttcttatgtgtgcatgtatgcatatagatccatgaagcaggcgtttcacagtacaatccttttggtttgatgcatgttgatacttgcctctc

SEQ ID NO: 301054 - DNA, 568 bp, Homo Sapiens
  misc_feature (283)..(397): n is a, c, g, or t
agaaaaaacctctgacacacacaagctggattaaaaaagaagaggaaatgaattattgatacatataataaagattactctcaaaataattatggtaagtcaaagaagtcagaccatgctccctaagagtatatacttcatgattcaatttctgtacaattctataaaatgcaaattaatatatgataacaaaaagtgattgcctggaaatggtgagaggacagaggggccagaatcagccaggattacaaagatgcacaaggaaacttttgagggtggtggnnnnnnnnnnnnnnnnnnnnnnnnnnnnnnnnnnnnnnnnnnnnnnnnnnnnnnnnnnnnnnnnnnnnnnnnnnnnnnnnnnnnnnnnnnnnnnnnnnnnnnnnnnnnnnnnnnntataaaaagtagttccaggcaatactagacactcaataaacatttgtaaactagtcgttgactttcttggactgtgacttgttagcagttagggattgattattctgtacatgtttatgtaatacctggcaaaataccatgctggagtaagtgctcaataatgctatttta

SEQ ID NO: 301055 - DNA, 283 bp, Homo Sapiens
caatagcagtatttaatgcccagttaatatcaaatattatctgagctaagaactctatactgcaatatcaaactcctaaacttttcatctttgttttctggacctcataccatgcaaaaatggggttactctgataataatgaataaatgtgaagcctgtaaattactgtcaatcacctgcactgctacattaaccccctggaatcacagagtcttatagtaagaaccccacacttcgaaagtcatttagaccaatgaccttgacttgcaaatggggaaactg

SEQ ID NO: 301056 - DNA, 613 bp, Homo Sapiens
cgcaccgacccgcgtgcactatgagtccatcgagccgatcgccgagctgttcagcgacctcgacgcttcgatcgactcgcgtgttgacgaccacgagaaaggcgtgaccgctgaagacttcaccggtttccaccgcatcgaatacgtgctgttctccgaaaagaccaccaaaggtctggaagcgctgaccgccaaactcaacaccgacgtcaacgacctcaaaacccgcgtggatggcctgaccttcccgccggaaaaagtcgtcggcggcgcagcagcactgttggaagaagtggctgccaccaagatctccggtgaagaagaccgttacagccacaccgacctgtatgacttccagggcaacatcgacggcgcgaagaaaatcgtcgacctgttccgtggccagatcgagaagcaggacaaagtcttcctggccaaagtcgacaagaactttgccgccgtggacaagatcctggccaagtacaaaaccaaggacggcggttatgagacctacgacaaggtcaaggaaaccgaccgcaaggccctggtgggcccggtcaacaccttggctgaggacctgtcgaccttgcgcggcaagttgggtctgaactga

SEQ ID NO: 301057 - DNA, 358 bp, Homo Sapiens
ggctcatgtgattatggaagctgagaagtcccacaacaggccattggtgaactggagactccgggatgctggtagtatggcttaatccaagtctaaaggcctcaggtctagggaagctgattgtgtaattcttggtgtgaggccaaggtcctaagaacctgtgaagctgctgatgtaagtcctggaatccaggctggcaaacctggagttctgttgtctaagggaggagatgagtgtatcccagctctagaagacatgtttgcccttttcttgatttatcataagtattttaaactcatatggaagtgtttggatacatgttttatttgctccttagcaacatatttctggtgagttg

SEQ ID NO: 301058 - DNA, 559 bp, Homo Sapiens
  misc_feature (339)..(403): n is a, c, g, or t
ggattatgggtccttcactaagtgattttataagcagaactggctttccttttctctagtagttgctgagcaaattgttgaagctccatcattgcatggttggaaatggagctgttcttagccactgtgtttgctagtgcccatgttagcttatctgaagatgtgaaacccttgctgataagggagcatttaaagtactagattttgcactagagggacagcaggcagaaatccttatttctgcccactttggatggcacaaaaagttatctgcagttgaaggcagaaagttgaaatacattgtaaatgaatatttgtatccatgtttcaaaattgaannnnnnnnnnnnnnnnnnnnnnnnnnnnnnnnnnnnnnnnnnnnnnnnnnnnnnnnnnnnnnnnntctgatagctttaactttctctgcatctttatatttggttccagatcacacctgatgccatgtacttgtgagagaggatgcagttttgttttggaagctctctcagaacaaacaagacacctggattgatcagttaactaaaagttttctccccta

SEQ ID NO: 301059 - DNA, 579 bp, Homo Sapiens
gctaaagtgtgttgtcaatgcaagtcaatcattaaccaacaataatttacaaaagaactttatatttgctgtaatcattaaatttagttactaatcccaggaaaagggttagtccttcctcctagtttgtagatttgcaaatggagatgaataattgaatcctattttaatcttttatctgcagtaatctgggcttcttattactggatatatttgcattttacctccaggccatgttagttcttagaagattattttcctcatgaaccctgttttgttttgcttcctttctgcttcaattctaatgtcacattgcatacctggatgtaaacagcagtcagtttctcagatcaaatagagccctgtagcaacttggaagacacagaagacacacggacataaaactgtatttattatccagggaatgtcactacggattaattatgttaatgaggccatcaaaatctatggtaatctttcaggctttgttgtttgataccagatacagcaaatgagataataatgtgtctaattgtgcctagccagtattggtatttaataaaactttgtcattgaatc

SEQ ID NO: 301060 - DNA, 560 bp, Homo Sapiens
  misc_feature (209)..(289): n is a, c, g, or t
  misc_feature (308)..(382): n is a, c, g, or t
ggcagaggaattagaaatttaatggtttttattcagactttattatttgggcatgagccattggtgattaactcaatctccagcccctttgccctccctgaaggttggggaggcaggaagtccatccctctgatcatgccttggtctccattccccaaaccccatcctgaagctatctagggcccccaataccgagtcatttcattagnnnnnnnnnnnnnnnnnnnnnnnnnnnnnnnnnnnnnnnnnnnnnnnnnnnnnnnnnnnnnnnnnnnnnnnnnnnnnnnnntaacaaaaagatgttcccnnnnnnnnnnnnnnnnnnnnnnnnnnnnnnnnnnnnnnnnnnnnnnnnnnnnnnnnnnnnnnnnnnnnnnnnnnnctatttcttgtcatgtcccacaagaggatgcagaaaatctgggattgtaactgttgatggttatgtaatctcaggaaacttctttgtcctccattgcttcacaattaaatggggcagatatgcctcccctctctcactctatttcctgagcacacattccagaatctcagcaaactct

SEQ ID NO: 301061 - DNA, 578 bp, Homo Sapiens
acaattttaaaatcctgggaccatatttatttagaagtagctgttagtaaaacattagaaaaggagtcaggccattaggttatttatccaaatctctaagcaattaggttgaagttataagtcaagcctagaaaagctgcctccttgtaaggctttcatgacaatgtatagtaatccacagtgtccaattcttcacactcctcaggaatatcactacctcaggttacggtacacaggctataattgatgatgatgttcagataactgaagacacaataaatgacattcagacatcaggacaattccctcatgttcttttctatgatggccacctgtaccagcaacgtgggtttcacccacacaacgatgaactgttctcttacttctccagttgattttaaagacttgttaagaggtcttactaataaaatttgggtatgatagaaaatccacaatcaaatcttgaaccaaataacatattaaattactaatatttaagtgatggaagacacacaaaaaacttaaaagcacgaacaacctaacttgaaaaagaattttaaaatatgattaacctgaag

SEQ ID NO: 301062 - DNA, 257 bp, Homo Sapiens
gatacgtggttcactttaacttcgcacatggtaaaatcagtttctttccatgatctgtttcacagtctctgtgaagctacctaccacaaagaagtagtgagtgatgactttctagaatctaagtatatggcatgtatttattataagtaaaacattaagtttgctgattgtttacttgtgataaacaattattgtgaactttatttgtgctggacataagtgtctgttttacagtgaaattccattatagagggtta

SEQ ID NO: 301063 - DNA, 127 bp, Homo Sapiens
caatatccaagccaaagaagaaaacatggacacaagcaacaccagcatcagtaaaatgaaaagatccagacccacatctgagggctctgacattgagtccactgaaccccaaaagcagtgctcaaag

SEQ ID NO: 301064 - DNA, 565 bp, Homo Sapiens
  misc_feature (81)..(127): n is a, c, g, or t
agagacactgtcaagtaatttaatccagagatcagccaccagatttgaaatgcttatgtatgtgtgtgtgtttggagttgnnnnnnnnnnnnnnnnnnnnnnnnnnnnnnnnnnnnnnnnnnnnnnngtgcctcctatttatcatgctgatgttagaagcagcagtcatccagccacagagggagctaaagttaactaaccagaactgtagaaatcattatacatgcctttgacaacaaaggaagttcataagaaaagccatgtcggcttttcctctactagatacagattggaggtagatgaatatttgccaaatggaaaaaaagacaatgctagtcagaaaagacaaactgttttccagcttctcaaaaagccatggagagtagaaaccaaaaccaacagggaaataaaaaaccttgaaagtctcactttctagttgtcccatgcaggggttgaaatttgattccaagcggaaagtatattatgttttttcaggccttcacatctagagagatggataacttccaatttgatttttcaggtaatagagaaagctgctagtaat

SEQ ID NO: 301065 - DNA, 533 bp, Homo Sapiens
gcgccagcgcccaacgaatacaccggtaaaaaatgcccccttgctgcagcctcgctcctgcttggctctgggtattttaacaggtggtgtctgtcaggttgctgaacctgaggtattcgcaccacagggccggtatttgagcgctcaagcgggtccgaaacgccccagcaccgcctcgacaaagcgccgcaacttggccgtgcgctggcggttcgccgtgtagaccaggtgcatcgagcggctcggcgcctcgaagcctggcagcacccgcaccaactcgcccttggccagtgccgtgcgcaagaagtcttcagggccaagcacgatgccgaaaccatccagtgccgccgtcatcaacgcccggctttcgttgacctgcaaacggctggcaacctgcaccttgtgcacagtggtgccttggtaaaagacccattcacgctctgccgggcgtgaccagaacgcataacccaggcattcgtgatgctcaaggtctgccggcaccaaaggcacgccccgtgcggccaggtaggcag

SEQ ID NO: 301066 - DNA, 484 bp, Homo Sapiens
  misc_feature (77)..(228): n is a, c, g, or t
aataaaaatttaagatctgtacatgtttaaaaaatgttagaatgcaaataagttgggaaaatgtgataaagggtttnnnnnnnnnnnnnnnnnnnnnnnnnnnnnnnnnnnnnnnnnnnnnnnnnnnnnnnnnnnnnnnnnnnnnnnnnnnnnnnnnnnnnnnnnnnnnnnnnnnnnnnnnnnnnnnnnnnnnnnnnnnnnnnnnnnnnnnnnnnnnnnnnnnnnnnnaattgcataacagtaagatactatttttgtctttcagattatcaaggcttaaaaaattataatgccagtgctgacaagagtgtggtttaaagggcatccttatttgttgctagtggcaatgtcagctactactgacaacattatttgaaaggcaatagtgtgtatcaggacctttaaaatatatggacatatttatccttttaagtctaaccttcatcctttcttcataagttttacaaatactgtatgcatttct

SEQ ID NO: 301067 - DNA, 453 bp, Homo Sapiens
acttccctcacacaggaacaccagctgtcctgtctgtgctctgcctgcgcccaaaactcaatattttctctcagcacagaagtcaaaaatgagatatgccccttataaaaccccttcgattcctgagaaaacataataaagccatatgttgcttccttgttggggctcctccacaatgctcccaacacctgtgacccctaggaagacagggagcaaggtggatctggccaggagtcacaggatatacacccattctggagctttcctctgttgttctagaagatgttatttgattagttggggctgggagcaggggatatatgattttgtggaaaaggtatcagataatcaaatcaggtctgcctctgctatagccagtgtgctgctgcattaaaagggaacaaaaggaaggtgcaacgtaagagcagacacaacctgagatgcccttgagat

SEQ ID NO: 301068 - DNA, 605 bp, Homo Sapiens
ctcattagtagaccattatatagcaactcagtcgagagaggaagttgactttggcttcaggtggtggcagtggggatattcagatatacaagatatatttttgagataaaagccattggactgggtgatggtttggatctggtgagtgaaggagaggaaggtgtgaagagtgattcccaagtctccagcttgagccataatgagaggtggtggaagacaggcggggaagcaggattagacttaacactatgcagacacccgtgaactaggtaagttgaatacacagcctgaaacttagggcaggtgtctgggttagggatgtacctttggaagtgctcaggattagaaagcatttgaaatcttgggaatggaagacatcacccgggagagacccttattttttagagtttggtaaatgagaaaaatgagtagtgtgacgacatagaaataggttacaggtttctcccatcctgtgagaaaccatgtgagttttggactagagttcaatgctgtttcagatttggggaaagcaacaggttaatgtgggaaaatcatgttgaggaagaaagtaatacattttattttcaacgttgtattggagactc

SEQ ID NO: 301069 - DNA, 506 bp, Homo Sapiens
cggcacgaggtcagatcttcctaccttagggtcttagaactaaaaccaagataagtcaacttcaattccacaccccgaaacaaaccagtgcatcctgtgaatctcctactaaaatttcctgttgcgataacatgcaaaaggagaggttctagtaaaatttgcctctcagccctagtatcacctgaaacttaagtccactgtgaaagtcccaggcagatagcatctttcactaataaccctggatactgcgtgaaggtagtcctaaatcaacttttcaggcaaataagcccacaattactatacgttctagcgaagggaactcagtccctaaaacctttccctgtgattgtaaatttatttctctaatagaatctgaacttgagaaagtaaggtcccaacagagaggtttatatagtgatgattcattaattagaaggatttaattagaggattagagccaccttaaaaagcctcgtccaccttaactcttagcaatgccaattctt

SEQ ID NO: 301070 - DNA, 414 bp, Homo Sapiens
  misc_feature (233)..(245): n is a, c, g, or t
ggttatagtatccctgtgttttcttttgtaagtattaggggtgagtttcttgttccagactaagctgaaacagtcccacttaaattttcctgacttattaccctggccactgtcctacaaggccttagcatggtctccttagatggttgacatggttctaaaaaagtttatgagcattggatagacgttaccatttgcatggtagttgtgatgaaagtctagagtttggtagnnnnnnnnnnnnncttaccccaaatctgaatacatcataactagtctttaaggtgtttcataagcttttatgaactttctgatttttttctgattttgattctacgatgcagccattaaaaatgatcgtttataaagaccgtgcagcagactggacaaatggatctgtccttttgagggtct

SEQ ID NO: 301071 - DNA, 611 bp, Homo Sapiens
  misc_feature (264)..(308): n is a, c, g, or t
gacaaatcagtgcattgctttgtgggcctcacatcagcctctgaggagacttgcatctctcagtggtgggggacacattcagggtttctagacgtgtcccaaaccactcactttccctgaattttcagcatttaggagaaatttccatggagaagaagaatcgctgtctggtcatccatgcaatttcctgctcagttttaatagcagctgggcttctccctgtctaaggttgaaaccaaaaggctgtattttcctgtgggggcnnnnnnnnnnnnnnnnnnnnnnnnnnnnnnnnnnnnnnnnnnnnncgcttacaaacgcctccctggacatttagaatttctaaatagaattttggctcaagtcttgaaaagcacagagtgatgtcagctgaggcggccgcttaattgccctaacttcttggggaggggtaaggcaggtatcatctcttcttcttcatgacctcctactcaactgtgggtaggcatccatctggagccagaaccatgcacttcagtcctggttctgacacagttggctgtgcagtttcgggctcatcatttcatttctgtctgcctctgctccattttctgtgatctaacaattctgct

SEQ ID NO: 301072 - DNA, 474 bp, Homo Sapiens
  misc_feature (43)..(256): n is a, c, g, or t
gttatggttcttaaaacttaggtccttatggtgaaatgcatannnnnnnnnnnnnnnnnnnnnnnnnnnnnnnnnnnnnnnnnnnnnnnnnnnnnnnnnnnnnnnnnnnnnnnnnnnnnnnnnnnnnnnnnnnnnnnnnnnnnnnnnnnnnnnnnnnnnnnnnnnnnnnnnnnnnnnnnnnnnnnnnnnnnnnnnnnnnnnnnnnnnnnnnnnnnnnnnnnnnnnnnnnnnnnnnnnnnnnnnnnnnnnnnnnnnnccccacacaacttaggtccaccatactagatgattcctcacatactccccatcttagttctttactgtggggcatgaataagcaaggactgtgtaccttggcccagaatgaaatgctaaccaaactgtgcggggacaatgccaccactaacctccaaaagccctcactttttgtctgtgcctaaagctgctcttcatcagaaagaaccagactctggt

SEQ ID NO: 301073 - DNA, 323 bp, Homo Sapiens
cggcacgaggagaccaagagtgatgcctttctattaggaactcgttgtaagtttcaagattccaaatcaaggtcattgaagatgaagttgtcatttggtcagtagttgtctaataagaatcatgtcttcaaggtttcattgtgcattttcccaaagccttattaaacctgaattagctgaaatccgggtgaacaaattggcaacagcagtggtatccctccctatgtaaacaaccatcagtattgttttactgttgtaataaatgaaacatgattagccaccatgagttcatgacctacctttattgtgctcagactagtgac

SEQ ID NO: 301074 - DNA, 231 bp, Homo Sapiens
  misc_feature (65)..(73): n is a, c, g, or t
aaaaggccatatattttaattaatccaggcaatgattggggaatccttaatatattactcaatgnnnnnnnnnacaaaataaagataacattaataaacttacttttatgtgaaaagttgaaaaaagcattcaaactttattgcaattattacatacaaatattgaagggctatacacaagcttcatcaaatatttttatggcacccccacttgttttgaaatttttctgg

SEQ ID NO: 301075 - DNA, 551 bp, Homo Sapiens
  misc_feature (326)..(337): n is a, c, g, or t
cggcacgaggcacaattctgagctgggatagaaatgcagtgtgataaatatgtaaatatgttgttatggtatggacattctctagagggagtaatggtaaagaggcagccaaaaatagatccagcagttttgatacctcacagcagagttaaggtacttatcaggaataactatcactgttaaaagcatcagccctgaaaagggaatctgcaatctgtagccagtaactgagcctagtacctaaaatgggcagggtgcatgcccaaaggcaaatttatcagcaatgtgatttacagaaatggaaaacaaggacaccaaaagtctcnnnnnnnnnnnnaacttcttaaccttgtggctaaacagttttgggattagctcccccagtgctcactaacagtagtattttattcatctggcgaccttaactctccagaataagatgaaaatcccaaagtcaacaaacaggccttaacagagtggcccagagatgagaaaccactggtgcttccttgggctctcttctctgtcatgtaactccatcaagtctacca

SEQ ID NO: 301076 - DNA, 567 bp, Homo Sapiens
  misc_feature (220)..(238): n is a, c, g, or t
  misc_feature (246)..(517): n is a, c, g, or t
cttcttggtggactgacagtacagactggcatgtatagataggtcaaggttaagtgaatttatagatgacaatttcacaacagataagagagacagggtcataaatatccaggctagatctccaactctggggaaagccatgggaaagttaatgaatcgttaaagaaaagagtcattttccaccaatggacttcggtcagaacagaccactaagctctannnnnnnnnnnnnnnnnnnttgaggannnnnnnnnnnnnnnnnnnnnnnnnnnnnnnnnnnnnnnnnnnnnnnnnnnnnnnnnnnnnnnnnnnnnnnnnnnnnnnnnnnnnnnnnnnnnnnnnnnnnnnnnnnnnnnnnnnnnnnnnnnnnnnnnnnnnnnnnnnnnnnnnnnnnnnnnnnnnnnnnnnnnnnnnnnnnnnnnnnnnnnnnnnnnnnnnnnnnnnnnnnnnnnnnnnnnnnnnnnnnnnnnnnnnnnnnnnnnnnnnnnnnnnnnnnnnnnnnnnnnnnnnnnnnnnncctatgttgttcttatgaatgtgtgtgtggcagggtggggtgggacatgg

SEQ ID NO: 301077 - DNA, 564 bp, Homo Sapiens
caaatttgaatccaaaatctaaactgaagtcctatagtgctggccctgagttctgcttggccacacttcattttcttactccattgtgcattcccgtccattctcagtctccgtgtccctcatcttaatgtgaagtcttacttcctccctgcctcctacacataacaggtacttctccagtaaaactactttagaggtttgggaacatgtgagagacaaatttagtgtgataacatgaccttgcattccacataaaatcaggactagtgtccagctgtgctgtgatgggttttccacaaggatgacatttgctatgtcatcctaatcaggctgtgaaatgattaaccttttgagatcccaagctagcaataaatttcatctgtaaaatattttagtaattatagtttactaaagacttggacatatttctagaggaaggctttgaggagagcgtaagtaacttgtctgtagctcatgaatgcgtcgccgtcagaaccagtttttctatccagaatttacactgatgaagggaggacaagtgcgcatatccaagccctttgagca

SEQ ID NO: 301078 - DNA, 430 bp, Homo Sapiens
  misc_feature (131)..(266): n is a, c, g, or t
aagttgtaagcaaaccctcatgtgttgttttttagaaaactttgatgtttaagtgtttttctttaggtgccacttttcctaatgttattttatgtcgtaccaatccataagaaaaatatagctcaataatnnnnnnnnnnnnnnnnnnnnnnnnnnnnnnnnnnnnnnnnnnnnnnnnnnnnnnnnnnnnnnnnnnnnnnnnnnnnnnnnnnnnnnnnnnnnnnnnnnnnnnnnnnnnnnnnnnnnnnnnnnnnnnnnnnnnnnnnttgtgagaggttaaaatttttgagcagtcatctgagtgttagagagaaatgtgctgttgaaagtgtgaatttttgtacattttggaatccttttgcagggtgactttgcattctctgtaactgttagaaacaccaacgtctcatgtgttaatgtgcaaagatct

SEQ ID NO: 301079 - DNA, 172 bp, Homo Sapiens
agtaatctctcctgttggtttaccttcacctcagaactacaagaatattacaatacatagtgaatagttgtctgtgacatttctaccagttgtttcagtagcatattggtcttggcatttcttggcactgtggttctgctgtattatttgtgatgtcttattgtttgtgagc

SEQ ID NO: 301080 - DNA, 640 bp, Homo Sapiens
  misc_feature (539)..(539): n is a, c, g, or t
tgctcgttaacattggcaatgggacagtatatccaaagctaaaaatgaaatccagaaatgaaacagtgatgagtatatgatccatcacaatccccattcccaactcccaaccaagcatgatgccaagaattatttttttgacctttgttccaaattgtaggaaatgaggggagctaccaatgtcttctggaagagatataaacatcttcctgaagcactagccttttgtaagacctgaccactgtcctgggaggtgataagggtgaatagggtaaagatggggggagcataaggtacagagtgaaactaggaaacaatgcagggatacattttccagggccatcacccctaatgcgtactggaagctacagtccatccttcagcagcatgtatagatcagatcttgaagatgatctatctagaagtggtccatgcttctctcccactgggtaatcccatatgcctccgttgttggtagagagtctgcagcagaggacaagaaggtagatgtgggtgtttataacagcaaaagggcaagncagtctctctgacctgttgtatgaagcttatcgagacagacaccactgcttttgcttccccatagttttcttcattgcatgataactaacttttccaaact

SEQ ID NO: 301081 - DNA, 483 bp, Homo Sapiens
caaacatgaaaatcctaacatctttctccagagacgaaaaaagtggcttgcctatgaaaagaatgagaactagacttaacgcccgtcttactggcaataagaagcttttagacaatggaggagtgtcctgtaaggtcacagggaagatgactttcaacatgtgctcacacctagccgaatctatctggatattttcagacgtgcaagggtttgccaccccacatctcttcctaagaagttatttagcaatgtacttagcaaaatgaggaattaaccaagaaaaaaggaagacgtgagttttgggaaactgaaccctcatttggacattagcgaaggggcattctgataaccatgcaaatgacctgaagttacaaatcctgtgtggaacaggttgggggagcacctgagaaaaactagaaaaagccagaaaagacaaggatatcaaagggtcatagtataaaacaaaagctcttgcattatttg

SEQ ID NO: 301082 - DNA, 647 bp, Homo Sapiens
  misc_feature (191)..(274): n is a, c, g, or t
ttagcagtcaacacgtttacttccaagttttattgtatatgcttaatatacattttattagatcatttaactcaataatttagagtatagccttagacaccagactgcctaggtctgactcctggtacgctgctttctgtgacctctctgtgcattcctctctgcgaggatgatgatcacatctgctcccnnnnnnnnnnnnnnnnnnnnnnnnnnnnnnnnnnnnnnnnnnnnnnnnnnnnnnnnnnnnnnnnnnnnnnnnnnnnnnnnnnnngttatatgttaatgtaatgtggtagagttcagttgccattaagtgggataaatcctcacagggcacacattatttaaataatttgttacattaaaacttattttacttgtacataattgactaaaaaatggggggttgtacattcaaacatttatgaccatgtgcaacactgagaatctcaaaccgacagtgtgctctgtgacccaaggcaagtcttggagcctttcaaggcctcaatttcttctgtaaccttgtggtttcacaattgtcaaccttttgttctgccgaccattgtcgtcatagtcttacttgcagagggcatagtgctgatgggacaagtgacatgggtatgagcccccatgtaactaaaaca

SEQ ID NO: 301083 - DNA, 612 bp, Homo Sapiens
aaatttactactcagaagttaaagaaatagcagatatagggagcagttactattctagatctgacacagagcaccaagaaaagaccagtctataaaaggtctactctcactcacagggcagagatcagactgtgtggagagggcacagctatgtatgtcagagaaacttactaaggtgccatgccagcaaaatgcactagaaagccactctctgtgatgccagaacaagtcatctactggacaactcatgccagcggaatttgttgggaagctgaccttcgcgatgccaggggaagccacccatggggaggcagtttcactaggaaattgcatatgagagttgctgctaaaactccttaggagctgggtgccattgagtgtcccactagttcctgcatgctatagaagcaagccacaaagggcacactagactcagcaagaaacacccctcctccagggtccttctagtctctctactgacaaagtttaacagtaactggcaagggaaaaacttccagtatcacaaacaggacaatgaaagatgtgtttagagctgaaatgaaaaaagataactggtacccatattttacagatctaaaatataacttgctc

SEQ ID NO: 301084 - DNA, 420 bp, Homo Sapiens
caaagcattcaccaacaatttctttatttaataagggtatcttatatagacaatcttttaaaaaataaaatgccttatttgggttgcatacatttattccgagggagcctccctacaagtcaagagtattctcttagccaaaaatacttctattgctaaaaacatttttaaaacagaacagatttttcctgttatcatggctgcatcaaatgttaccctgcattttaactaaaatggccaaacattttcaaagtcatcatgcactacaagaatctaaggcagtgtgtctaaaatgccaaacccagtacatttagttaaatatctggtcaattcaaaaagcaaaataaattgattcaattgtttaatcagttaaaccatctggccaacatagagtgaatcctcaaaagggcaacatgtcct

SEQ ID NO: 301085 - DNA, 494 bp, Homo Sapiens
  misc_feature (215)..(239): n is a, c, g, or t
tgaacaccagtcactcataagatggatgaatgttggattaattcaccaggaagatcctttataccttgagaatcatggggctaagaggttgggaaggaggaggataaggtagaaaaatagccttaggctgaggctcattgcaatgaacctttgatgctaaatgtgaaatagaaagggggtgttttttctgtgacttaaagcaaaacctcaacatnnnnnnnnnnnnnnnnnnnnnnnnnttcattgtgtattcacaggtgtttataatagttctgatacagttggtaggattactacatgtggtcagttctgttgacagaattattatttgtgacttttaataaccaaatgatttttttaaggaattgtttttctgttacgttgaatggagaagttctatgtcatcgagaaggaaataaagtccttcatgtaatgattttgtgcggagacttttgttgacttgtctcgtgtctgatcatttggcccctcagttg

SEQ ID NO: 301086 - DNA, 453 bp, Homo Sapiens
cctgtgaaagcgtcatatgaaaaactggaggtaactgtggatcatcttgctagacattctttgtactctcactgagaccctttctgcgtggaatacttgctcttcattgggactctcaaaggcagacagaaccaagtgttctgattcaccaagagcttttgtctcctaatgaattactttgtctccctttaccaccatttctcaaaatctcaaagtacttcattggcatgatcagatggcactgcgattcttcctattattagcactgctggctaaaacataaaagcggtgaagaccaaggccagagcttaaactcataggggtcattcaactctgtttttattagttgtccttggtttatactgttaacctcagctaggcatcacattaagtataagtacttattcacaataaataatgaactagggccaattcagcatcatgaatgaaaaa

SEQ ID NO: 301087 - DNA, 285 bp, Homo Sapiens
aaaaaaagaagaggtcttccttggaatggaacgagggtgatccaaatcccctggatgtgctcctccaatcccagctgcagtcagctagttaaccaacctcaagtagggaaccccagccctgtttctaacccacacctaattctggccctaaccctgaaattgaacaactgaacattgacctcaacttaaacgtaaccctaacattaaccctgaccatgaacctgaccctcccattaattataatcctaaacctgattataaacctgactataaaccttaatgcta

SEQ ID NO: 301088 - DNA, 239 bp, Homo Sapiens
cttcctggaacataactacctggagtcatgagaatggaccgtattttctttctggccttccaggaaaaaaatataagctctaaaaatcatcctatgattttatccttctactttctgaagcaaattcattagcccttcattggcctgaaaagtgacgtgacaatattttcagtaaacctgtaactgagaaaataactttccacactataaagaattaaacaagagtgaactattaaaaa

SEQ ID NO: 301089 - DNA, 145 bp, Homo Sapiens
attggatgaaaagcagaacatctgcttcttaaaatgggcactaattctaacaccctatgaaaattctgtgtattttagattctccctgtcaatcccttccttggcttcttccctagctgtccagctagacattagcagtcacttg

SEQ ID NO: 301090 - DNA, 106 bp, Homo Sapiens
ccataatatatttttaaaatgctatgtatatgccatcatattcctattcctattattatttaaccaccatcatagagcatttaagttcttttcactttctgttgtg

SEQ ID NO: 301091 - DNA, 358 bp, Homo Sapiens
tattagtaatgcagccactaccattgctgatggggtctgtgtcctagtccctgtgggattggccttctgaagaaaagcacatttatggtacacaaggttgattctcagtttggtaggctctatagttccatcccagctgtctaattctgaagtgctccagtcttattggtgcccaatggggtaatctgtgcctcttccccaaaagcaatgacaggcaccagtgtctccacatttagatatattcccagtctctgtacatttaacagtactctctggggcaagcaataagtaggaccttgtgtgcagtttcattgtagagacatgtatatctgaggaataaaacagcttgttctgtgtc

SEQ ID NO: 301092 - DNA, 427 bp, Homo Sapiens
aatttggtaaaataaaaaacaggccttttcaattaagagatactattaaacccctagttatgatagtgatgatgctgttcataagaagtattgatggagaacttactggtcagagtctatgcaggcaaatgaaacacttcttttacttgggatctttcgttgtgaaagatcttacagcctaaaaacatgacggttcaacatgcagttgaataaatgtttagcgaatcgagtaaatgtagggaaaataaaactagctacattaggatgttaggattgctttcccgtatttaatttgagctgttaacactttcctgtttatactgttaattttgcaaacagtaatgcttgtgatcccatacactttgtctagtaaaatgaaatcttccaaatggagaaaataaacctctatagtacggatttttgccat

SEQ ID NO: 301093 - DNA, 263 bp, Homo Sapiens
aaaaatccaatgctgaccatcttgaccagaatagaagagggaggcaaaatgtgtgtatccctgagctggaagttcaaccaggcagatttcatgggcttctttcacacaagaaggcaataccagaagaaatggatgtgactgctttacattaatttctactgatcccatccaaacagataatatcagaagaaatggatgtgactgctttacattaatttctactgatcccatccaaacagatgaacaacttgatgtcttccttt

SEQ ID NO: 301094 - DNA, 458 bp, Homo Sapiens
catttaggaagcacagacttctgcccgtagcagcccatgctgggcagtcggggcctggctctcaggggtggtggcccagcacacagctgttcaacttgatcataactgtccttgacacagccctgacctgttggttatcagcttcactgtgatataattcacatagcacacaattcacctatttgaagtatattattcagtgggttttaatatattcaccaagttgtgcaacaacgccacagtcaattccaaaatatttccatcatccccaaaaggaaccctctatcagtcctctgctgagggccacacagatgcctcttgctgcagagctgggatcacagctgtccccttgctcccaccaaaggtcccctcccaagatgggtgtgtgtacggcaggatctgggtcctgccatgaagggaaaaaaccacttcaaacagcttgtcctgctttcccacct

SEQ ID NO: 301095 - DNA, 295 bp, Homo Sapiens
tgagcacctcatatgtaccagtcaccatattggtaggggtggggggtaaaatgatgactaagtccttgttttcaggaaggcttacagtctaaggtaacagccagccagagacatagcaaatttaaaagggccgactgaagcagagcaaagtgctaaaaagcgcagagggtgctgagtgacaagggtggggggtgagataaatggggatggactccatgggacacttcacagaacaagtgacagttcaacctgggcctcagaacagtttgtctgaaagcagccacgggcaatacgc

SEQ ID NO: 301096 - DNA, 435 bp, Homo Sapiens
acaaatttttggttcatagtgattagcttataatcattaactcagtgaaggtgctaatggaatttatttagcttaagctgtattctgaggcattttatccagtacatttcctgctgctgtgtatttggccccttgaaaaagttgtcttaaccttgatagcagttaatggacttctcagacacaccttatgaataagactttattacataattatttcttacatttatttacccgtgtttatctttttgaaagtgtagagatatatcttagaaataatctaaagttagggaaataatttctataatgccatgtacatattttgtgtaactgttgattgattctttgtatagtctgttatattggactcatgttacataaatttagcatgacttacaaccacatggaaccttagaaaacttaaaagacgagaaatta

SEQ ID NO: 301097 - DNA, 344 bp, Homo Sapiens
catgaaaagcttgtgccacatgacagaagtgagatcatagtcttaacctcttcttgacgtggactggtcttcactcgggcaccgataaataacagatttggagtatctcctggtgcttattttagatgatgaagtcaaatcaacccaattagtgtcctgttagtaggtataatgagcctatttctttctaaaaagacttgtgatctggacatgcttttacaagaaatagtgaccttggggaatatgtaaacaaaagacctttttctaagagttgggagggggtgggggactgtataatgaaaagaattagcttacaaaaaagaaattgatattcaaagtatttt

SEQ ID NO: 301098 - DNA, 412 bp, Homo Sapiens
caaaaagtacataattgtttaattagtccctcatgtctctatttagtttttctcttcatcaggcaggtacagactcctaccatggccaaagttgggtggggagtgactctcaagagaaaaatctttgatgccctcaagatctgtttctctaccaagccctctccaggtagtgtctctaactttctttaggtatctgtggcttgaagaaaaaattagcagctaccaattgatctgttgacacaggaagtacctgttgcagctgttcttaacattctttaataaaatcatctggacaaattggctcaagacttacctttgtcttacattacagttttctctcctttttagtttttttccaaactaaaaagtggaaatcccaaagtcactaaaatttagattcagatgaaacttt

SEQ ID NO: 301099 - DNA, 497 bp, Homo Sapiens
  misc_feature (144)..(144): n is a, c, g, or t
  misc_feature (236)..(261): n is a, c, g, or t
catactggactaacccactggatagatggatttagaggatgtctgagcagcacaggcagcccaggaagagcgagcgagacactctttgacacaagggagagcataaaagcttaagactgaccccaatgtgcgccagcccctcgncaggaagtaaagtgcagaaacacctccacccctgcacaaagagcacctaggagtgagtgcgcaagcgtggacaagccctgcggtaccgtgtnnnnnnnnnnnnnnnnnnnnnnnnnnggcaagctcaggcagggtccttcacagatgtctgcagtcactctggagggtgacccaagcacctgggcccttagacagtaacaccactcacaccgagcacagaccagctcgcgcccacaacacgagcctgtgacacgcaagtctctgtttctgagctgatgccgtctggctttggccatgagaccctcgtgtgaccaggtgcgtgcctaagttagaatcgcccaggctaagttcgt

SEQ ID NO: 301100 - DNA, 422 bp, Homo Sapiens
  misc_feature (361)..(361): n is a, c, g, or t
gcaaatccctcaccaaactgagcaaagtagtctgaaagaaatcagtcttcctcaaggaaggttcaggcctggggtcctcagacaaccaggggctccgtgacaatctgtgactgcagagcagtccaggaacaccggcctctccaggttcgggtcccttgtttctcaggcccagcttggtgggaagctaaaggcatgcagaggaggggaaggggagcgggtctgagtcttcggcatggcggggaactcagcccggcgtggtggtggcagcggtctcaagtgatccacaactgggcagcgtagctggggctgggggccgctcccggcgtgggcaacagcagaagcattggtgtccccaagctangccagggtgggtttccgttcatccgccctgcgtgggcagatcgggcgctgcggggctgtgc

SEQ ID NO: 301101 - DNA, 345 bp, Homo Sapiens
catgttttacgttttatcaaggcacactggaaagggaattatgtggctgacttcccttggccttcccaagagaagattctgttcttatgtcagtgtggcttctggaagtgtctcctatcctcccatcctccaggcctgtggtgtgacttctgccccgaagttcctactatagtgagtcatctggggagaggccactgaaaagaggccttcccttcccatttcctcccctgcctccttagaacacactctaagtcagaacttaatctaagaagaaggaagctggaccaggaaccttggaagtcagccagccctagaacagtcagcctaaattttggccgtaatggc

SEQ ID NO: 301102 - DNA, 337 bp, Homo Sapiens
  misc_feature (121)..(297): n is a, c, g, or t
agagaatatttctgggaatattaagaaggggtcacaaggcagactcaggggttgggttttgtgtgtaaccatgtgacccccacctttacaagtgtctgtaattctcactagcagtatattnnnnnnnnnnnnnnnnnnnnnnnnnnnnnnnnnnnnnnnnnnnnnnnnnnnnnnnnnnnnnnnnnnnnnnnnnnnnnnnnnnnnnnnnnnnnnnnnnnnnnnnnnnnnnnnnnnnnnnnnnnnnnnnnnnnnnnnnnnnnnnnnnnnnnnnnnnnnnnnnnnnnnnnnnnnnnnnnngagcagagtgacaaatggggagacagccgtggtgcatgat

SEQ ID NO: 301103 - DNA, 309 bp, Homo Sapiens
aattttaaattcagttactaaagttcactctgtaaaagaaacgctcataccttcctagacactgcttgttaaggtctctccagctctagtgtgtgatgagtaggggtaggggacattcacagtctccctttaatacaataagctagcttgcccgagatccttggtgaatcaaagctccactgccgtgtgtcagcttggtgctctttgtttaagctgtgtggacagatccaccaaagtcccctccagtcacccctggggtcccacagaggtaaacccccgggttctctctgcccatgtcctgacacgcca

SEQ ID NO: 301104 - DNA, 227 bp, Homo Sapiens
tatagatgatcgtctaaaatttacaatgagagactgatgaaattgacataaatcaatcagcatgaacacttgaattaatccagaggactacttaagttaattctgtaggtggttgctttattgagaatattttgtattatgacctgcttagctatgcaagtttgtaacttcagaggtcctcataatgatacttggataataaagattccccatagacacttccattg

SEQ ID NO: 301105 - DNA, 353 bp, Homo Sapiens
ttggatactcgaggtcctctgactgagtttcctaaacagaaatgatacttatatgcctgaaaatgaataatctagaatatttcattaacattcagctgaccagttttaaataagagcagttgggattgcattcaattaaactggagtctataagagtgtcatgaggcaagatggagtttcttattgaaggtgaaggccaagcaagaccagcgacagcatcatgacagagcatctcatggaactagtgatctacaaaatactttggaagtcctagtacagtttgagcttgtgcagaaaatatggagcattttaaattgaccaatcttaagtaagtgaagaagacaaagttggaa

SEQ ID NO: 301106 - DNA, 332 bp, Homo Sapiens
gtcccagcgctcacctgagggacttggccacggtatcttgttagaagcctcttcatggacaacgtggccaaccccacctcacccctatcgtctcccccggccacaccctgtgccaatcgggctcccacgtcagggtctttgcagtaagttgtgttgcatgcctgatacctccttcccgccggggcacctgtagcctgtacatcctcccaccctcactgcgaaggcccctgctcccgctgaggctgcgtcagggaagagcgagcgagcgtctgcgagcctgatccgcaggcggctcggattggcacttagattggccacggtgtccagatgga

SEQ ID NO: 301107 - DNA, 343 bp, Homo Sapiens
cggcaccagcattttgtggttacgaattctacagtcacaaatatctttgggcaaatccccttctatacctcaaggcagcttttgttttgcaaccccactggccagagggaagggccagtcacttggctctctcactgccctgcgccccagatggttctagggctgctgttttcccttggccctgccaacaccactgtttttacttctgctcattggctgagtgcagtggttcctggaagccagtggcacgtttccccgcgtagctcgcttatcccacagcacacacccaagggttctgttgctaacacgctgaattaattctttgctcatcttacagagtgtg

SEQ ID NO: 301108 - DNA, 498 bp, Homo Sapiens
agagctgggcgggttaaggaggaggatggcgccgtcctgcagatgtgcggggacgcgcgcccgccgcaacgtgaggctcataggccacacgcaactctgagcattggccaggacctgtagtagccaacaggacacttaataactgatgtataggtgcgcactgtgtgtccagagctttacgttaaccacctcactgtgtcatctcgctgaggttgtgtggtttactattactgctattagcgcatttttaagcgggaaacctgaggcatgaggaggtaaggagctttgaggagggttgcacgggtgttaagtagcgcggtcagcacctgatccccgtcactcatcagtacggcggttggaggggaatgcctgctggaggggaccacgaactaaactcaatcgcccccacagggtgtgctcgccgtggttcctataaagctgtaagggaggctacacagcgtgcagcgttgttgctgagggatcgcacacttcccgtag

SEQ ID NO: 301109 - DNA, 249 bp, Homo Sapiens
cctaggggacaagcatgggtgtttgatttcagaaatcagtacctggcgagatttttgtctcaaaacgactatttgaatttcaagaactgtgctgcgaagacactctgagaacatttgcaagtcaggggcattttccttgacccttgactgatgctatgcggagactgatacattttcttaatggacaatgttcaagccaggtacccatgcttgatctgtcttcacaccagacctcctcatattaaaagg

SEQ ID NO: 301110 - DNA, 456 bp, Homo Sapiens
ctggcagtttgtgtggcaaagtccaagttgttacactgtgctttaaaaaaaatcttatctgcatgtattgttaacttagagaccatgagatctatttatcaggaccaggaagatacacacttcaggtccattgcaactgacttttttcttgtttttctcaaaccctggtggagcctgggaagggggcctccacaattctgtggctttgatattagccccaattctcacaagcacatacaagccccataattgccgcaggaaaacacaagatggaaaattgcaataacccatgcactgagacttagaaaatcatccttactaggcaaaatgtattatgatgcaataagtgccaactgatatttctcacgttgggactggccaggaactgctgcaaagaaaaataagcagctccttctccattatttacattttaagatgtggtggggggaggttggg

SEQ ID NO: 301111 - DNA, 428 bp, Homo Sapiens
taatagttttgataatcacccataattttgtgtttaaacattgaaattatagtacagacagtattctctgtgttctgtgaatttcagcagcttcagaatagagtttaatttagaaatttgcagtgaaaaaagctatctctttgttcacaaccataaatcaggagatggagattaattctattggctcttagtcacttggaactgattaattctgactttctgtcactaagcacttggtatttggccatctccattctgagcaccaaacggttaacacgaatgtccactagaactctgctgtgtgtcacccttaaatcagtctaaatcttccagacaaaagcaaatggcatttatggatttaagtcattagattttcaactgacattaattaatccctcttgattgattatatcatcaagtatttatat

SEQ ID NO: 301112 - DNA, 560 bp, Homo Sapiens
ttttgtttacaaaaaccaccaatctcaaaaggccctgtatttatgtaattctttgaaattattattttattttgatttctcagttattgactggctgggtgtgacttagtacataagtactcaatattataaaaacctcaaataattgacttgattttacacaacatccttcccttttctacaagttaatttttttacaaatcatttgggttatctcctaaataggttatattttattgcttctagaaacaatgtttcaaaatatatgtgcattatcagtaataatttgtataaatatttcccacaacaattttcataattttcaaagactaatttcttgactgaagatattttgctagggaagtgaaactttaaaattttgtagattttaaaaaatattgttgaatggtgtcatgcaaaggatttatatagtgtgctcccactaactgtacagatcaggacacatatttttagacatctaagtctgtagcttaaatggaggttactcttccatcatctaaaattgtttacttagtaattgttgtttcttttattattat

SEQ ID NO: 301113 - DNA, 308 bp, Homo Sapiens
cttttacactgcttagttttggacactggtgatatcaagcaatagaacaaggagatttatttacctggctcttagttttaaaaaaacttcttaatttttgaacattattttcattttgaaaaacccgttatttttaaataacacagtctattgttaaaatgtctaaacttgtcattattgtcagcagttactatttgtgcttaagtgtacatatttaataaggatttccgtgagttattggtaaaacttgagtggggaaaaaaagtcaaaaagggaatcttaatctttataaccatcatgacaagccc

SEQ ID NO: 301114 - DNA, 200 bp, Homo Sapiens
tgtggtttctttcattctgattgaattatattgacctacttcttcatagttggtttgcagtgttccatgagttttacttttcctcatcaacatacttgctttaacacaacatatttatttaacacgtacaaataaggtcaacttcagatcctactgagtgtgtgacatgcttttccaacatcagctttttgtaaccacct

SEQ ID NO: 301115 - DNA, 255 bp, Homo Sapiens
gtgagctgctggacagcaagctttcatggggctgcagtaattaacacaccacatagtataaactctgaaataatgacaaatgtgttaaaggccttgggatattgggccatgtactctgaagagcacaaagtgaagtgcaagttcctgcccctaaagaactctatctttcgagattagcaactaacagtgtgagcccactaatacgatgtgaaagttgtcaaaatcaagttctggtcattgtgttaaaaatcctaa

SEQ ID NO: 301116 - DNA, 388 bp, Homo Sapiens
ctgtgccgtgtgcccagggccttgcatgtgtgggccctcgagtgatttctactggcaggctgaaagccctgtgaggggcggctgtgggcggaggccacgcaggaagagtgcttaggagtaacttgtttctaacacctgtgtgctgagtgccaatgctgggtgtggtgttatgatatatattggttttcatccagcattcctgactcgtaactctcatagtccttgttccagtctttgttagaatactgggtgtgttagggcttgggacaggcctctgacctctgggtatcctttcactaatgttcgcccacctgtttcacagtgggtcctaaagaccttcccatgagagggtctcaatcctacgggaaggaatgttgatgtcatgaac

SEQ ID NO: 301117 - DNA, 245 bp, Homo Sapiens
ataagccactgtgtcaggccccatgtatgttaatagtgaatgtttggcttttcatttgttactttcagctattaaaggatacctattacagacacaggaatttacatttttcaaagtcatttttgacacatcagtgctgcatctacttttctccttttagcacatttgatattgatacttcagagaaacttttttaactacccttaaaatcttgtcaatgaccattaactgccaatcatcacctc

SEQ ID NO: 301118 - DNA, 138 bp, Homo Sapiens
cacttttggatactcacactgtgactaaaatgacttcagcattttgttggccaccacagtgaagaactattccctgaaagttaatcagttgcctgagagacttttctgctactgaggggaaagaaaggaaagctttat

SEQ ID NO: 301119 - DNA, 569 bp, Homo Sapiens
tgtgctttaaaacgtgcatgaaccaccttgaaacatctagaatggatagatttttctgtcctcaccaccctccaccaaaatataacagaaacaatatttttttgcacttgtaacccttgacccctttcctgatttttcacatcatccttcactctggacaaaggaacacatgtgtccctggcaagcagaggtactgagtgaggtgatgagtgtttcaagtggaagccattcctagtctctgtcttcaacaagcccgatggcgtagtccctttcctctagaactttgtcctgttaagctcgctgacggcacacctgctcatcacaggtttaactggcatgttaagtgttgaactaaaaagacagactgcttcaactcctgcttacacgtggctttcctgttcctctcatattcagagaaacggatgtgaaaagcatagaggtgtgcacagagaaagacatgaatctttatttttcactgccaacttcaaggaaaaatttttctacagtttgcatgaaggatttttttaagaaaatatgtactcatggtgataaaccaaaatgtattgtac

SEQ ID NO: 301120 - DNA, 528 bp, Homo Sapiens
ttgtaaacttcttgcagaattgggtgagatgtgtgttaaaactgacaaacctggctgaaagcttagggcgtcatcctcttgtgtctcctttagcctgagtttggttatgtcaagcttaccgtaagttttcttaggatttatttattcttggtgcctaaaagaataaattgaaagtactttctgttctttggcacattttgcccagcggatgcaacttctatcctcagtccagttcatatatctcaggcagtgatccattttgtatcagccagtttcccttgttagggccgctagacccggctggcagccaagagcagcactctccccaccttcagcagaacttctcagctcatgtgtgtgtttttaaaagcagtaggcagcttccatcagcaatggaagtgtcccccactccagtggtggaggtgcagtcgctggacctgaggaagtggggaagcattacaaaccctcctgcagtaagaatggcagagttgggaaggatcttctctcgcaggctgttgacccaactcc

SEQ ID NO: 301121 - DNA, 478 bp, Homo Sapiens
tagggaagataatttttaaaacatttatgagtattttgctggatgacaacagttttgtaaggatctaaaattagtttgttcaaatatctgataagccatttcaattaggcatctgttttgcattttaaaaacttttagattgtgttttctcattcggttttttgtactttaagaaggaaattatttagagcgccattgtctgttctatctttgacgcacatctgtggtacggctttctggggttttgatcatagcatggaagtatttacccagtgcagttttggaaactctaactttggaaagaggtttttagaggaattattgccaaatgaatatgtaaatatatcagaagcagagttttcaaaatcttaggaaaaaactttcagatctgttaggattaagtaatatattctattttctctcttattacaatgtgaaatgcctgagaagcaatagtttataatgtattaattatgtt

SEQ ID NO: 301122 - DNA, 548 bp, Homo Sapiens
  misc_feature (439)..(439): n is a, c, g, or t
atagaatgtgacaatgattctttagcagggactgctgaggcttctggttcctttttaagatctgcagtgaaagaagatgagaaacatggatatgcccttcttttggtccccctcttcctttatttgatctctacttccttctataaatatattagggctacattgtccctttgtatttcaaacaaggcaaaaagaggttgtaattacactttactgcaatcctcagtttctccagggaacaggaatgcaaaggctttgaaggcctctctatttgctgacatggtcagctgggtgccatgggccaagtccttctgttgccctcctctgtcaccaagtaagctaggtcctttctgaggctcaggtttgctgtgatgatgatcacttttaggcagaaggttagaggcctcatgagtgctatatggactttattaggctttanatttgatggggaataagggatgtgatttgtcttttgggaactcatctttgattcatcattgtctcttggtatcttggaatttccatgtcattacagtctacagaatgaa

SEQ ID NO: 301123 - DNA, 319 bp, Homo Sapiens
taaatattgacaccaggcaatgaagcagaaatagagtatgtgtccctttatgcgtgggtaacttaagcttctgtcatgtgggaagggggaccgaatcttccctgggaggaaggctccaaattctcactacttctgtgttacttgaagggggaagcataaggaacccagtttgaaggcaacattgtgtgccatgaatctgcttattaatcaacatgccttgttaatgtcctctgccctgaacagcccttactcagttctcatttggaaagttattttttggggttacatcctgtttgtttcagaatttaaaaccctccat

SEQ ID NO: 301124 - DNA, 301 bp, Homo Sapiens
acatacatctgctcttaaaaaaggagcaactagcagcttagtgatccagtcaggtttgggcttttattcgatttccgttcctttggtagcgggggtgggttaatgggagactacagttggccatgttcacacaatgtctgaaggccacttattttgagaaatgtgatctcaaagccgcctcttcaacaaagttcaatgtttgtaacagactaaagacacctgcaggccatccctcaaatcctgcgccagtgagcctaggttcagtgacctgaaatcatcatcgaacccaactgtcagtttc

SEQ ID NO: 301125 - DNA, 438 bp, Homo Sapiens
tattacgagtatctagtacagaataaggtgtaacttctcattgagtaatcttaggttttacagatatgtaaagctgaagcaactctaaagagtagacacttcagaacaggaaggttctggtcaatgttgagagtagacactttcactgaaggttctggtgaaatgtgggtaactaattgcttgaaatctataatttgctatatagttaactattaagttaaaatgtcatttaccatgccttttacactaaaagctttaacttttctgagaaaataatattttaaatgttcaattatttcttctgaggaaagctacttctagcattctttgtcatgatgtgcttgtgtgcagtaagcagagcattttcagccacttacctctacaatgttcctgtttttcaatttctgatttagattataaaaggcaaatgattaattt

SEQ ID NO: 301126 - DNA, 542 bp, Homo Sapiens
aaaacaaggaactggctgcctggcgacagggagcgggccaggctgagtgtgaggtcaggcctcggctggaatctcacggacttgaaaggacagagacgtttcctgagatgtctgcggcagaatgtgggaggcttcagcctgaggaaagttcaagttggagagaaaggttgccagacctttgagtgacccacactgcttataacttctagaaggttcttttagggaaacctgcttagaatgaaaccctgaaacgtcctttgctgcctccttaacaacttgcattagagagtttcttcagccaaaaggcgaatgtctgttgagtggaaaggagaggacggagtcgatgttgtcccctgtgagatgtcatgtctcaggcagtatgctggacattcccgagacgccagctctgctcaggtgacttgtgtgccctgcccttgtaggcctcgaattactcatcgtgaaattgaggtcaagccactcactcacagacagggctgtggtaacaataaaatgaaaggtgcttagcacattgaaaataactc

SEQ ID NO: 301127 - DNA, 606 bp, Homo Sapiens
  misc_feature (472)..(472): n is a, c, g, or t
tatttgcttgctttctgctgtcattccagctctctcagtttttattttccccatagcctcactttgaatattgactcctaaataaaagtggtcaaactctcgatcactagagggtgatgtggcaaatgccatcccatcaacagattgacatgatcttttttccaaagggcatgtcaacttttttatcatgacaagattttgtccaaagctagactttgatgggagcaggcaagaagtaacatttcctgtgtccctactatgtgtcagacatcttctgtaagtccccacactatcctggcaagaaaagcatgattatcccagttctatagaagagaaagtagggtcaaagaggctaaggaactagcctgggatcacagatttttaaccgtagtctgtctccaggatcacccgcaggagtaactcagctcaggaagcagctgctgacgtgcccagcaactcctcaccccagctntctggcttggttactccattagtccccaccagcaccacttcctcccagctcttaaagattctattcccaagtccatttctttcacatctagaaacttaagcttctttccttccgttacttccagtgctggctga

SEQ ID NO: 301128 - DNA, 396 bp, Homo Sapiens
aatccttcctaacctcaaagtcataaagatattcttgtattgtgtcttctaaaaattctgtaattttgtctttacatttaactctttaatccacttaaagttgatttttgtgtataatgtaaagccgggaacccattttcattttttaacattggataaccaatattctatcaccacttgatggaaaagtatatctttcccccactgatctatagtgtcagctcatcataaattgaaattccataaacgtatgggctttctcttattttcctgtgatttatttatctcgctataataagctttaacagctcttggtttccaaatatttcactttaatgatttttggcctttcttgctctgttgcccttataatataaattctggaatcctcttacc

SEQ ID NO: 301129 - DNA, 560 bp, Homo Sapiens
tggaatgtgctgtaacatactttgcacccctggcctcccttcctgtctcctataataatggagctgtgttttcaagtttggcaggatggcttctgttggaaatttgcccttttaagttaggaagactgacccccatcttactgctctctttcgaagctagtctaatggaacaagtagactcaggacaacttggactaaatgcactgtaaaccacaatggaaaaactgcagtgaggtattcccagtagaaatcttggaattccttcaagtatattgagattttgttagaaattgaattgccagtgtaatccatcttccttttgagaaaacattcagataaagagctgaggcctagcagcattaactgttagaacatcccttaaatcaataagctacaaatctggccgcacattcctgccgcgcctggtggtgtgctcaagtggctttaggctgaagcagcatgactgatagcacatcctcaaccaggcacatgcctggcgatgcagattcctgtgtttaccgtaagcattgccttgttccattctacagaatgcaattata

SEQ ID NO: 301130 - DNA, 560 bp, Homo Sapiens
agaaatcatcagcaggaaagtgaagctctttccttggttacagataagacttggtttacactattggccagtatctgctaaacatatgaagacttaactattcagtgttgcctaggcattcgcctgcacaacattttgaggttagaacatagaatattttcagaaatactgttgtagtttgtgagtgttgttcattagttacacattagctatagagtggatgcatgaagccccatgacaccagtaaacttctcttaccagtaggtaaaccaaacaccattctgtcattagcagccctcttaaatgttgcctctccgtatcctgttgcatttttgtgtgcattgtgtttctactgatctctcttaggtttttacggaatcaaaggaaactaatttttccttaatagcaagaaagatgaagaggtaaagggcattgaagcagaaatgtatagtttggggtacgattagaaaactcgtaaggaaaacagaagtcctaatttcaaactgactgctcttcgttaagtgctcttaaggagagtctagtaacagtaacactttctg

SEQ ID NO: 301131 - DNA, 298 bp, Homo Sapiens
  misc_feature (232)..(232): n is a, c, g, or t
cttggttccgggcggggccgcgctcccggggcgcgggtggaggagcttggaaccgcagatcgggcgtgggcttgcggactgcagcttcccgagccgctgtcgccccggaggggcggcaagcgggcggccgcgggccgtttccttgcctcttcctctgccccgcttcggccgcctcccgcctctcagggtcggggttgtctgtccccttcgctgtcacatcctccgcacccancgcttggaaggtgctccatcacggtgacagacaggtgccaagcaagctggcgtctgggaggaactt

SEQ ID NO: 301132 - DNA, 437 bp, Homo Sapiens
taatatttctgtctgaggtgggggtgctttcttaaggttattagtagaaatggtgtttggagttgtttagtttctgccatgggtataagtgagttgtctcttaaactgactttgcacactggaaaaataaaatgaaaggcaggcctggctgagagaccagagcttctgtgccctttgatgtatcatttgagccctttggactaagaaaatgaacttcaacttccccgtcctctgcttcacaatttagttatatctagcccttctgccaaagagagtagtgtgtccttctgcctttttgctctatattctctcaagactcctgaaagctttttctagtatttctcccttctcttcggctcttcagattccttttacccactgtttctttccctggcctgctagtgggctcttttccccactcacctcctctctgcctt

SEQ ID NO: 301133 - DNA, 337 bp, Homo Sapiens
ggggctctgcaggcgctgaccagtttcccggaggcggcggccgcggacccagcacggtcaccgtcgccgctgccgagaagagccgtcgggtcgcgatgggtggacaggccttccgggggagcgtcgcccggcacataccctgacagtcccgaccgcagacgccagggatgggacaggctcccggggagcatctcctgttcctcctccctgaccggccttcttaggcgctggggaggggccggactccggagaagcgtccactcggccaccctccccggcaggcccgacttcagacgccgcgcgccgggacagagcgcccggggagggtccccaacgc

SEQ ID NO: 301134 - DNA, 116 bp, Homo Sapiens
attttaactactcaaaaactactgtttacgtattttactttgacttctttctgggttcttgcataggcttcaaggagggaggatatggatgtgagcttattgtacaaatgccctgg

SEQ ID NO: 301135 - DNA, 361 bp, Homo Sapiens
taaccagcgcgagtgggggtctctctttcctcaacccttattgccggggtggagttgaggaggagcggcctgcgggcctcttagcttcctgacacccaggggtgcgatgctattttgtaggaatcggcgacaccgccagagcctcgctttcaaattgctgtttccaaactaatgttgttggtgattctctcctttgtgctcttagagttaattgtagtccacatgttggcaaccagagactcgtaagattaataatatttttagaaaaaactactgtttatggtcacttagattgtcataagtgtttttttctttcggttcacacaagatttgttgagggattactatgactcagacacgg

SEQ ID NO: 301136 - DNA, 268 bp, Homo Sapiens
gattgcatcttaactgccttgcttgcagtttcttttcacagtataggagttgtcatcatgacttccagttaccttctgggaccggttgtcaaatgatgtggctagagacggaggctcactcagattgttgctgcaccacaatggaaatgccagtatgaagccgctgatgttaggaaggctccaggttgtgtttttccatagacaacaaatcaaatcatttccaaccgtggggagggcgcgtatatacatacttcaagacacctgtgca

SEQ ID NO: 301137 - DNA, 375 bp, Homo Sapiens
ttgatttccctaatttgatgctgtgatttggtttcctcaggatgtgaactgtagaacattccagttactggccttgaatggttctgggaatataagaatccctgtctgtcttttcaaatagttttcatggaaccttgtcctgtttgaacttggctgaaaatggaagtaaagatgccctcttgggggcccagagatgacagatgtggctccccctgctgcccccaccccttctccagactgtgggcggctccccttcctgctttagaatccctcagatggaggaggcagtacagtagtcactgtgccatcgtgtctggcactgtgccggcgtggtctgcaggatcccacttatgaactctccagattgggagctgt

SEQ ID NO: 301138 - DNA, 345 bp, Homo Sapiens
tattattatttctcagtattgttttatagcatcacaccaaagtacagttcagtaaaagcagtctctacctgtctagcttgatagaggtagatttttagagaatccaaggcaatgagtaggtaatgttcatctttcaagcagttctcgagctcaagattacacccctattctttattgtcagttacatgtaatgctttatgctttactgtcagacaacccagtgtggggttaacatcttagttgaggagcctgccttggtcacataaccaaatggaaaagtaccccacttcccctgtgaggtaagccaaacgagtatccaaacgcagagtaaagattttccttagg

SEQ ID NO: 301139 - DNA, 100 bp, Homo Sapiens
ctgtgtgtctgtgtgatttcagggtgcagcctagcttacccctccatgttctgtgacctggccatgaaatcttcaacatctagtgttttaaagaagatag

SEQ ID NO: 301140 - DNA, 566 bp, Homo Sapiens
ttattatctagtagaattccagtaggtctgcttagacacatattcagtgaagattgtattgtgtgtgatattatcctatctttaataaagtcctactactgaaaaacagggatttgcaatgaaaatcatagctaaataggcaggtttagaaagttcaaaatattggaagtgctagaaggctgcaacttgtaaaattgtactccccaagttcagtaggatagtagagaagtcgtgctaagttgatttcattgaaatgtcacgtctcacatcctgtggtccaaaggtactagtttgttttgtggaataattttctgttcacttgctgataagaaatttagcagtcagaagtaatttttaattaataacctttctttttaaaagttgctttatggtttacaagtaatactgatgcaaaaaggatttgttaacctaaattaagtagcacgcactttgtttacatgcttcagttattgtgggggttggtcccttctcacgaacccaggacctgtgcttggggaacattttgccatcatgctgttctcttgtaccaaggatcagtgaaagtg

SEQ ID NO: 301141 - DNA, 430 bp, Homo Sapiens
ttggaagaatggcattttattacagtatagttaagagattggctaaggcagtaaataaaacttagaaatgctcaaatttattgtaaattgcttttataatcattgatatataaagcatgctactgctaatcaattagttttatgtattaagacctatcagcatgtcttttttttagtatctggttgacttaaacatgatgttctctgtaccatttaacattttcaagacatattctccccaagcaaattctgttggaaccaagtgtttccagttctagaagtttacttctagagtcttcatatgaaatttacagttgggctttcatagggttttaatttgcactgaatccttccttctgaaagatgacttatgtttaaagtataatgtagcagtgcttttgtcttacaattaaactcttacagcactcat

SEQ ID NO: 301142 - DNA, 296 bp, Homo Sapiens
  misc_feature (149)..(251): n is a, c, g, or t
ctttttgtactgtattgtcttggtataacagtaataataatagttataaaatcaggtgtttcccctcatcctttatttcctggaacagattatataaaattgatgtgtttgggaagaaaagtgtcttttcctctctcttaggtcctcannnnnnnnnnnnnnnnnnnnnnnnnnnnnnnnnnnnnnnnnnnnnnnnnnnnnnnnnnnnnnnnnnnnnnnnnnnnnnnnnnnnnnnnnnnnnnnnnnnnnnngggaaaggaacctgaagaaagaggtaaatctgtgtgtgggttgtc

SEQ ID NO: 301143 - DNA, 600 bp, Homo Sapiens
tgaaaatgctaagtttgtgtgtgaagcacagccttattttccttttctgtcattgttgattgttttccttaacactttgacaaaaggaccagtggaccaatctgacaaagccattctggttcctttccttgagtgtactgagaatagttttaaagctatgcagaaaagggagctgttattcacactgcccttattttgttgtagaactatggagttaaaagaaaatgtgattccgaactctaccaatgtattcctaggctgtgagtactttcccggcccaaagtgtgaaaatatgtaaagaagctttgttatgctgctattgatctgccatgatttctatttattcttttatggcatgtaatggtgtttagtaatattttaatgtagattttgatttatttcagcaatagtaattttaagatattctttgaatgaaagtgtcttcgtttctatgatacaggtcattttgtagtatttaaccaattaagatgcactgcttacttttctgagcactatttaatgatggggtaaaaacccaattggctcaaccagctagcataaggattagctgtgaataatgctgacagatatgatggttcc

SEQ ID NO: 301144 - DNA, 323 bp, Homo Sapiens
aagcgatccttgaatgatttctaagcagttccttgggacataaagaaaaatcttttaactttttactttgtttcccaaatgttgcacagttttgcaacacattgaccttctggtttcgaacggttacaattttagattgtggtttgccaaagtcaagttgcttaatttttacaaggccacaaaaagcgcaattatgccctgcagtttaaaatggaaaacgtgttggaagataagaaaacttagtttccaactggaatggagccagcaagtttcttttcttctttgcaaattctattgtgtcattaaagttcgatggaagtatc

SEQ ID NO: 301145 - DNA, 608 bp, Homo Sapiens
aaaagtcgcgaggtttcctgggccaagaggcaacctgaggcggcatccagcaccatgaatccactgataccagttcctgccagtcaggcctgaaaccttggcccctggaagcagccagcaagcccttcggggtcttcgtctttgcacggctgagccatcccacatctggagcagagtcattcaggtgacaagtgacggtggtctccaccaagacctgaaaaatggcatctggacaaggaccaggtcccccgaaggtgggctgcgatgagtccccgtccccttctgaacagcaggttgcccaggacacagaggaggtctttcgaagctacgttttttacctccaccagcaggaacaggagacccagggggcggccgcccctgccaaccccgagatggacaacttgcccctggaacccaacagcatcttgggtcaggtgggtcggcagcttgctctcatcggagatgatattaaccggcgctacgacacagagttccagaatttactagaacagcttcagcccacagccgggaatgcctacgaactcttcaccaagatcgcctccagcctatttaagagtggcatcagctggggccgcgtggtggctctc

SEQ ID NO: 301146 - DNA, 634 bp, Homo Sapiens
ctttaactgagaagagagacttccctgatgtagtctagcactgactccttccttgggtctctgacagactcagctcgtggtagtgctatttgtctctgggggaggtctgtggaagaagggaggaaggggcattggcagggctgcgtatgttggtagtaggattcaagcccagcttctgtagagatgcctgaccttggcaaactctgggggagtggcaagtcccactgtgcccactgggtggcagtagtgcttcagatgagttgtatggactaggggttgctgggcctttctccaggtaattagccatctgtcctactccagagttgacctttggactccacagaagcacttacatgtgggcccctcaccttaactatgggggcaggagtgtgtgtcccatgactgaggctctggagctggagacagtgaagttgatcctggaataaatcagaggcaggctacagtcccaaaccctgctaggacctctagtcaagcagacaagttctttcctcactccatgctgcaggggcacaggcccagggtctggcaacaaacaggagcagctgtggtcactggggcctggagcctgctggacatgacatcatgcgggcatgcccctactgtccctctgtgc

SEQ ID NO: 301147 - DNA, 311 bp, Homo Sapiens
caaccgctcccctgctcgcatgctgggctgcaggctctcggctgcagcgttgggctggtgtgcattggtgctacacacagttcacggtatcctcaaccacccaaatgtaagcaatctggtttccacctgaaccttcctagtattggatctacgatccggcttacaacatgtggcaggtatgggcctctctttgctgactgctggagttgtccaatgccccgagcacgcccttttttcatcccctgtctgatgacctggtgaactatgtcatcaaacggaataccacatggcttgccgggctcaacttctac

SEQ ID NO: 301148 - DNA, 361 bp, Homo Sapiens
taagtgctccacggaagtcagacgtaaaaatttccaaatcttttttaaaagggacctctaagatgctctctcaacattttagacgtggtaggaagcgtgagatttggagtcagggacccgttacaggaggcggctctgcctagcactcttcatgtgctcatgggacagtccccgcccccccgagaacctgacagattccgaattgtattgaattatcacagagattcagggagatggggaaagcactgtgttgattaccatacagatgtctatgatgaccactactggggcgtgttccagaagttcatttgacaattgattttttggaaacctctaatgagttttcacatagtatctatgt

SEQ ID NO: 301149 - DNA, 572 bp, Homo Sapiens
cagtgctgcctttgctccgcaccatgaaccacacttctcaagccttcatcaccgctgccagtggaggacagcccccaaactacgaaagaatcaaggaagaatatgaggtggctgagatgggggcaccgcacggatcggcttctgtcagaactactgtgatcaacatgcccagagaggtgtcggtgcctgaccatgtggtctggtccctgttcaatacactcttcatgaacttctgctgcctgggcttcatagcctatgcctactccgtgaagtctagggatcggaagatggtgggtgatgtgactggagcccaggcctacgcctccactgctaagtgcctgaacatcagcaccttggtcctcagcatcctgatggttgttatcaccattgttagtgtcatcatcattgttcttaacgctcaaaaccttcacacttaatagaggattccgacttccggtcctgaagtgcttcaccctccgcagctgcgtccctccttgcccctccctacacgcaggtgtaacactcatttatctatccacagtggattcaataaagtgcacttgataaccacc

SEQ ID NO: 301150 - DNA, 191 bp, Homo Sapiens
ttgtaattaattccttatcatcatcattataaaaagcttgatttttttatttgatctaaaaaagcattattccaaagaattttttcaagtagaaatgggagttagttataccagtgttgtttttaactaataaggctattttagaattcagccttgcctgtaaggtctttgagaagggagaggagtaggcc

SEQ ID NO: 301151 - DNA, 645 bp, Homo Sapiens
tctaactgcgcatgtcatctggaaggaaaccacaaaaaactcaatctgagacttgtcaccaatgtgctgcctgagtcaaagggtttccctggctcacctccatagatggcgagggtagaaggcaagacctgtcctgggtggtctaggcagaaggcccaggtttagggcatggcaggtgggtggtcaaggaggtgaggtggggtcctggtgctgatgcaggggcagttgccgagggcttggcctcagaacaaggcaggagtccagccatgaggatgactcttgctgagtcactgagctgggcgaggcattcagaccccctgactgggcccagctggggcggcagatggtggagaggcctcagctgtggggggtgttggggagattatccactgatgaaccaaatggaggctgttcccagagcctgcttccaaccttgcacggccttctagagttcaaatctttcctgggggggcctcagagccctgtccatacctccgctcacagccccagcccttcctcttctcccatctggtttcctggccaggtttcggccctgcggagaaccctccaagggagcagtggaaaaagcttcacttggcagtaaagcccctacttgctgttccatccctgcagctggggtgaaat

SEQ ID NO: 301152 - DNA, 143 bp, Homo Sapiens
atttcgtgctggagaggaccagcctctataacgatctggaggattctgcctagcgatacatagccttccactctccggggccgcattacaattacctcctccgcttgtaaatggccttcgttccggcctatgactggtcccag

SEQ ID NO: 301153 - DNA, 532 bp, Homo Sapiens
tatattaactggttgaaattttcatttgaatctcattttgttggttacatttatcgtagtagttctgttgtaggctggagagaaatcttacccttgagctgagctggatgtattgtgactctcagctgggtatggctatgaagaaaaatgtgccatcactgcatttctaataggctggaatcccctttgctcttttcaataaatcacatgtgaatgtggaagaaatattaaacaaataggacattggaatggagtccaagagagtaaactattgcttgatatgatgatcaaatatcactgatggatttgcctttgaaactttgaaaagaatgattatgggcagtcttatgcatattaaattgaactgcacctaggagtcatcatgttcaactgacaatcttctggaagatcagtattttgggtgccaattatatacttcaacagcactcacagcataaagagttagtagcaactatacttacggcattaactaaaaccagctccaacatgctaagagggatttgggatccct

SEQ ID NO: 301154 - DNA, 659 bp, Homo Sapiens
  misc_feature (282)..(401): n is a, c, g, or t
  misc_feature (506)..(565): n is a, c, g, or t
ctaagtgaaatggtttgaatcacggggttttgttcttgtaacagcctgtccccttctgccaagtagtcagtgacttcctgtaaccaatcaagaattttgcagccagtaattcatgggaaaatgaggtttcctgagatagacatgtgatttgggagtggaagggccctggagtggaaaggtctggaagcctaacttctggtcctcacctggtcttcaacaggaggcgtgacctttggaagtctgctccttaggatctttagcagaaccttgagttgcagatannnnnnnnnnnnnnnnnnnnnnnnnnnnnnnnnnnnnnnnnnnnnnnnnnnnnnnnnnnnnnnnnnnnnnnnnnnnnnnnnnnnnnnnnnnnnnnnnnnnnnnnnnnnnnnnnnnnnnnngaatgaaaatatagtatttgagggatgagaatatacccacgtatgtggagagctggcttcctagctgctggttctgcaaggctctctgggacacaagcatgtttnnnnnnnnnnnnnnnnnnnnnnnnnnnnnnnnnnnnnnnnnnnnnnnnnnnnnnnnnnnntatattgtacctctatcagacactcccagaacctgaagtgaggaggcacaatgaacagctcccctaagtttttgctactttttaaaattctgat

SEQ ID NO: 301155 - DNA, 623 bp, Homo Sapiens
ttgtatttatataagctaaaaacatttatttttgttgaatcgaaacaattccatgtagcaatcttttttctgttcacggtgtttgtgatagaaccttaaattccgcaagcatcagttttttgaaaaaatgggaattgaccggatagttacaggcaaagattataaatagctacaacatcatttaacttttataaacatgccttctctctattgaagacatctgatatttttgctggaaagttggatctatcctcagtaactctgccatgaattcctgtttcctggttccagaaaaggaaaagattacatttctgatcataaagaatgtcttgcatatgggaaatttttcaaaataaggggggtattatttatgtggcatgggaaaacttttgccatggctgtttgtcttagtggcatcttttgatgacattggatcagatatatgtagatgctgatatatgggacacatgtttaggttttggtgcagttgcacaaaactgtgttagtttatatgttactgtgttgcctttatttattctctccaaagtgtctctttatatttgttttacaatctgtgaaagagtataccataatacagaagtattttcatagtctttacctct

SEQ ID NO: 301156 - DNA, 374 bp, Homo Sapiens
tgacttatgggaggccctctcatgcccgatgccagcgctagagcgcaggccgttcctggacatggaggcccaggccaggcctcctctgggatggcctccactgcatgttgggtgtacaggctgtggagacggaaggcagtttgggagccccagggctgtgcctgagacctgtcccaccctccccagatcccctgggcagggcatctggggccaattcattgtctgcttttcatcactggagcacaaagccactgacctgccttgcacatcctacagggctttaaatggccgcaaaagtgacttcctgcggggcactcaacgcttccctagcatgcctcaaatgaagtccttgctggtgtgaggtgcatgctctg

SEQ ID NO: 301157 - DNA, 358 bp, Homo Sapiens
  misc_feature (278)..(278): n is a, c, g, or t
aatatctcattgtcgcttgtccttctggtatggttatgaaggccctgatcagtgtgggcctcatcagtggacctagtcatctgggacttggtcagtgaggcctatttattggggggtgtggtcagcaggggtctgcttacagagggtctcattaaggggatctagtagtggggtcttggtgagtggggacctagtggcagccacttgtttggtgtctggtcagtgtaaaactaagctgcaagactttgtcaatggagacctggtcagctggggcttantggtggccttgtcagcatgggccgggtcactggtgaccagctcaaggggtgctattcattggaggcctggtccatgggac

SEQ ID NO: 301158 - DNA, 352 bp, Homo Sapiens
gaacagagtgaacaggagagaggagggggccagggcattccaggtggggaaaggcagcaggtggcccggtggtaccacctcttttggcgagggctttggaccttacccggtgtgatgggaagtcctggaagtgtgttaagcaggggagtctttttgatcagattttctagaaaacgacagtgggctgctgtggacctcagagaggcatgtgtgatagtgtgtttcgggctcttcccacgaaactcggctctgcacagtgagacctcatttcctggttctgtttgatgagtgagcgaatgcacatggcaggcggtcatgtcccttgggcctgtgaagtgagggagggtccctg

SEQ ID NO: 301159 - DNA, 578 bp, Homo Sapiens
  misc_feature (418)..(427): n is a, c, g, or t
ttgtttcgtaatctgtctcaatgactataatgtaaaattaaagaagtaaccatgcttctcaagggggaattaaaagtgtttattgaattttactcaggctaattgtttggtcagaaattcctaaggccacagctttggggggttcgtgtagatgtacatggtgggtgggttataaatattgggacttaaggcagcttgttctatgtatttatctttgctcttgggtgacttagggaatgattttatttgatttaaccttctttctgtttgccccgagaatactcgccagtggcgcttgcagttgtagcatttaccccaagataactttgcctacgaaatatttcgcttttattattttcacatcattctagtatatggactttggaaacaaaagacattgttctatttatagcattcnnnnnnnnnnagtagcggtatttccatttacaaaatatagtaactcttgattactgaaaatgtcaaatcctagaaaacgtagcatgcctatacatgatgttaacatcattctcgaacagttgttggccgaagattcatttgatgaatccaatttttttgaa

SEQ ID NO: 301160 - DNA, 259 bp, Homo Sapiens
ggtattttaaatttggcaatgaatatgaaattacttttgacttacagattgattatattattactttgaaaatgcattaatttcttagaaaagtttggagcctctatctttttttgagttaatacttaaattctcattacttatattaatagcctgtactaagtgaaaatattatttatgcaagtaaacaagtcactataagcttttaagacttttctttaattttacatcttgtcatcaaagtttaaattttttacct

SEQ ID NO: 301161 - DNA, 482 bp, Homo Sapiens
ttgttatttaacatctttcatagcacagcaaacatcttttcagaaattttcagttaaagcctttgaattacttatctttgatttaatttacagccagcattttgccacgttctaaataatatttagctcaactgattcatacgtattaatgaccattctagcaaaggcctacaagtggtgtgggaatcagggaaaggctgcctctttggtatctcaactggtattgattattgctatcaactatttggggagaaaaaatcaaaatgaagccctgtcaaattttagaagtactatctttggtccttcaaacactttgtgatgacaccttaagaaaaataaagttgaagttcaggtcttgccattgccattacagacaaattaagagacttggtttacctgggaacaaatttacttgaatattcagtacctgaaactatgccaaaccaaagagcagctgcagtacattcgtctattttaaatga

SEQ ID NO: 301162 - DNA, 492 bp, Homo Sapiens
tctttgctgaggcccaagctgaggtcaaaaactacctctagccatctggtgctttatttttattgattagaagtctctgataagactgatttgaatgtgatttaggaatatcacgttctaaatggtcagtttgcctattccattatagaaatgacactacgggaaaattcatcatcacagaccacagcagaagtgttctttagttaaagctctacctagtcatccagaaagccagtaagtaaaccaaataaaaatagttcactgggctcagagtggcaagttttgcatgcaaagatcgtgacaattgtaaccctaacaataaatccaatactgttctcgactctcttgtgtgtccagtgctgctgcagtccttggaaggcttttaaactgttcagagcttgctggttatcttcagccaagccagagagtgggagtgcagtgcattttagtgtaaccatgcggaactggtcgctccttgattttgtgccgtat

SEQ ID NO: 301163 - DNA, 445 bp, Homo Sapiens
ctctgctctgcttaaaatccttctacagagtttccattggcctttagaataaaatctccaacttcctcttgggaccctcttccccattctcatttcgtcacgtggttccttggtgttccccaaacatacccagctctttcctgcctgaaggctttgtggcaggtggtttctcagccttgaaagttgtctgcccccactctgattcatgactactcatctgtcctctaacctcaatcaaaccatgttgtcacatcctctcatggcactctctacacctttggcgcagatgtcactttttaaatcatgggctctgtctctggctatactgcagccacagcttcccggcccaggaccatgggtttgttgcttgaaaatactggcctgcaggtacaaagccatattacaggtgacttaaacatgccaactacagtactaaggacccagt

SEQ ID NO: 301164 - DNA, 557 bp, Homo Sapiens
ttttaacagagatagtttttccgtttctccattgtgttaatcagagcgcagacttacattctcagtcatttatcttttctggtggagaataaaaagtcacttatagttaaagatcagaaaattatcacaccaaatccattacatatgttagaatcaataatttactcaaaaatcagcttttataggtatgttggcaccttatccaagaacttatccctgttccagtacccctgtgcttcattcagtatcagtaaccctgcaatgatttttacaaatatctttttctagtgggttttttacttagaggaaagaactttgtaatagctcttaatgtttatatataagagaagacagaatggaaaatgttttttgaagtcaaatattgcatgatgtaaagaaaaaactttaaacttaaatgagtaggttgtcctgaattacactggtaactctctacttctttattaaagaagttatagtcagatgcctttgttacctgatttcagtgtacattgtttttatgtggttttctgataatgtcctgtcagaattgtattggt

SEQ ID NO: 301165 - DNA, 575 bp, Homo Sapiens
  misc_feature (481)..(481): n is a, c, g, or t
aatctctttgaggcttctacaggagaacgccgtgcgtttgagcttgaacctgataagcctggcagaagcctgatgaacccagaatgagtgagatgtggtaagttgtgctttaggttagggcgtcatctaactgttgggccagaaaatttaaaggggagaagtgcatcctaaagggagttgcagtttcctcggttctggtaggactacaagtcccaatatgcaccgctcccccgggcgacctgagtgtctcttgagtaaatgtgacccttgaaacgtctacgttagcagcttaatggtttctccagccttgcgcgtgtttccaagtccctaaacgggatggtttttgaaaggctcgaacacttgacaagtaggaaagtggtattttcttagcctaagttatcttaacacgtgatttgaaatagtgctggtaataacaacacaccagccctgcattgagcgtttgttttggaaaagaacctangaattccagaatgatcagagtcacagctacaaactgagattcaactctcattgtattttgacacaagttttgtattataattgacaaacatctg

SEQ ID NO: 301166 - DNA, 433 bp, Homo Sapiens
ctcttacagtgcatgtggtcctggcttatcctcactctgctccttaagcctccatggggtcccaggcataagccttctctcagttccctcagtgccactcagacctgggctgccaagatacagatggtatatgtgaattacatacaaataactatatgcaaaatcatttttccctggtgtgtcactgtgccagagtgcttagattaggagtgctttctagctccacccccatactggtcctgtaatgctaatctctcccaggacacctgggcttctgcaatttgagctctcctcctcttagagggagcttccccaagttggcagaggtggttgagggagcagacagacacacaggcttcctacctgcagcttcactttgctctagtctcttctccacttacaaccagagtagtttttctaaaatgcaaattgg

SEQ ID NO: 301167 - DNA, 673 bp, Homo Sapiens
ttaagcaatgttatccacaccctacaccatacccacaaaaatttcataaaggaaaataaaccagtgtttttcccactggcctcactctagttgttgcttatttgtattctgtacacttaagggttatctggaaagcagtgtcttttctcctgtaaagtaaggtgacaggcaccacagcctgcagcctacagccttcactccacagctccaagcagattcacctttcgcatacctggagccacagctcccttccaacaggcatggcagtaggaccctctctggcagtgaaaactgcccctttgtctgagtgccatgaagggtgtgtgtaggaatccaggtgcatttggtttgggtaccagcggatacaccagtgctacttggattccaccagttggcactggatgcccagttgcttggaatgcagctactctgaaggaagatacacccttatttgggattgtgttgtaagatcaaaatctacaacattctaggagatgcaataccattttgaatgtgattaccaggccaagtaggtggtgacaggacccctcttctttatgacaaaggaggaatggagcaagccattggtatgctttcactgtactgcactgactgtcaatatgtattgacaagtacattggtatgctttcactgtactacagactgtcaatac

SEQ ID NO: 301168 - DNA, 656 bp, Homo Sapiens
tcgattgtatagagctccgaccaagaaaatatttttctggggaaaagtattttatcattaacattgtttaaaattgccagagcatgatgaaaatttaagcagacaaagttggtttttctgtttttaaattttctacagagaatacaccttttttatagcctgcactcagtgtggacaattctcattacccaactttgctacatcattattgttttcacaaatttgtcattcagataaatagtatcataactgattgttcaaaaataaaggcatgtatgtatgttatgtaaacagtcattttgccatgcctaaatgtttctatctctagaattgtgaaaacattacgactgtcaatacgttgttggtttcctgaattacactgctgccacttgactatataactggctagtttttgaaatgttttaaattttggattcagggaacacatgtgcaggtttgttacctgggtatattgcatgatgctcaagtttggagtatagatggtcccatcacccagatagtgagcatagtacccaataggtagtttttcagcacataacctcctcctttactctccccctctagtagtccccagtgtctgttgttctcatctttatgtatatttgttttcaatgtttagctcctacttacgagtg

SEQ ID NO: 301169 - DNA, 550 bp, Homo Sapiens
taatttcacattcaaaaaactgagatcagaggttaagtatatcttatcacataagcttggaaatggcagggcaggaatttgaacttaggtgcttctgactcaaatccatactcttacagtagactatctctctgttgcacatggtgaggatctttatgttcattgtggagggaaaagggagcccaagtctagagattgagtataaagtttgggccaaaagcaggagtagagtctgctggaagactcgctagcagccttagcattggcaccacctccttactaaaaccacatcttgcttcctggcagagcctagtactgttatagttggcagagcattacagggagcttggaagaacttccccggtaccttccaattttccctatttggtcagttcagacttgcgttagtgcaataacctcctaaccaatctcttggcccctatgcttgctttacccccagtctgttcttcgcgttgcacttagaacaacctttccgaagaacagaccagatcttgtcattcctgtgctttagctctttcaagggtttcct

SEQ ID NO: 301170 - DNA, 574 bp, Homo Sapiens
catttgatgcaatttatgtgccagatgcttggtcaggactgaggatgtgtagtggacaagccaggattgctgcagtgatgtgctcaccattggagagaggaatgactgtcaacaaatcactacaggcccatatgttaagttctttaatagtacggtgactggaactacgggacggaacccaaaatgcagtcacccaaacgcatcatgtccattttgatccctacagcaattaagccttgctttcacagccgctgaagcagaccaacagatggttgtttaattgtttataaaaccaaacattaactactgggcttggcaacgtatctcttctcctgaagcctctcaaagcagatatcagacaacactctggaagatgctgagaaacatcaaaagatcaaaggtcgaatcttggaattcagatctgtcattgacctgccttataacttctgtcaaactgcaatgtggtgagattgttcacatgtttcacagcagtgttgcatggaatgactaatggccttcagttggttcctgtgtagatggtaaaatggaaagctgttcacaaaacccctttcta

SEQ ID NO: 301171 - DNA, 554 bp, Homo Sapiens
  misc_feature (371)..(439): n is a, c, g, or t
ggatatttagcatctcatgctacatggtgaacagaccactgataaagaattcctttttttgaggaaatgttttccactgcaatggaaagaaccttggattggaggaggtggccctgggttcaaagtctcgctctaccagagccggggtggcgggggaccatgcacatggagaccatggcctctccctcataggtcattaagatcaaatgagatttgctctgtgaaaatgacataatacatattaattatcttcgttttcccccacctacatttaattgaagagatgaaaggtagccatagaatagtggcattaactacattgcagagcacaacgggaagcattttgctctatcacacactggccgatcagnnnnnnnnnnnnnnnnnnnnnnnnnnnnnnnnnnnnnnnnnnnnnnnnnnnnnnnnnnnnnnnnnnnnnctgaaggtgcaggctcacgtctggagctcctgtaatcgctccgtgtcgcaggtgatcagtgattatctgaggctggtggtgcaggcggtaagaattatttacgaagacagttata

SEQ ID NO: 301172 - DNA, 153 bp, Homo Sapiens
gttaaaacccggggattctttaccttggggggggattcaaaaaccttgccttcccccttttttggggggtgggaaaatcccaacccaaaaaaggggggggccttaaaccggaaaggaccggccccttttttgggggggcccggcccccacccc

SEQ ID NO: 301173 - DNA, 335 bp, Homo Sapiens
tattttatcctcacagatatcaaggggcaactgtactggtttttagtatggaaactctgcccacaaaccatgtccttgtgacatttacgtacacatgatagaataaaacatgctcctcattcaaacaccagaagcaccatggccattttagggaagatgtctctgcccccttgttccaggaatattttattctatctcactcttggttttggttctccttggtgattctagaaggtgaatgcctgtgccaaccatgagatatcacagtaaatatatcaaagagagttcacttcacgatgagttatgtgcttcctgaaccctacaccatgcatgat

SEQ ID NO: 301174 - DNA, 502 bp, Homo Sapiens
  misc_feature (173)..(173): n is a, c, g, or t
aaaaaatgtgcacaaactatttgttgcagccgtgataatattcgtagtaaagagccaaaggtgctgcgtggctgggtctgcatcaggcctgggcctccgactgcacggctccaactacacagttgtttatggagaccagtcccggcctcctctgctgagagtaaaatcggtgngaaaggtaaggcctaagggtttcttttgtaaacctgagctctgaggctgatggaccagttttgggctggcctgccctcctcaatacagcagaaacgcttggtaataaaagtggactcaataatttaccttagtgttttgacaaagaatgcattgtctgaattatactaggtagtatattccatcaatcagtcaacaagtgtttattaaacacctctgggcttccctggcttttgctatttggtgagaaacccaactcagtaacctaatacctgcctttgtgtgtgtgtacaaaaataaatgatgcaaaattgtaagtttcaaagacttg

SEQ ID NO: 301175 - DNA, 581 bp, Homo Sapiens
ggggctgctgtgaccggagatacacacggctttaagtaactgagagcctaaagaaagtaacccagggagtccggtccagttttaatatttgtggatttgttgtcacacacattgtttagtcctgaaactaaaacctattttataaatagtagggttaattcctcgaaacaatttctttattaataaatgtcctgtgggtttagaaatatcaggtaaatatttgaatacagaatgatgattgcaattactgttacaagcgtgaaacacaaacttcagatcaaatctagagttgcttcatttaatgcatgctagcaacagccttaactttggattcagttatttgaaacacttttccggcatctttccctttctaatgttgtggggtggaaaccggatggcaaatcactgtgagccggatacctcagcacagtccaccttgtgtgtgacttcacaaatgggggacttcacaaatggggtaactgaatgttattactttcaaattttgacatggagcattatgatcaaggaaatggagctgccttatacattaaacccgtgatttaatcctattgacattttca

SEQ ID NO: 301176 - DNA, 338 bp, Homo Sapiens
aggacactgagacccacagaagtgaatgccttgcctggggctgcacattggcaaagttgctccccaccgggcccagggaaggaagctggctggctgcaggaggggcgtcgttctgcagctgcccaaatgcagccatgatgcatttgttttaaactagctttattttcagggggtgatgtttacctgaccttatccccaaattctttggcacctcacagtggaccccatgtgtacatccccatccctcccaggccactactgactttgtatcttgtgactcttcaaaggactggtgagaatggcactttgtacagaagacacacctgaaatgggagggg

SEQ ID NO: 301177 - DNA, 546 bp, Homo Sapiens
agtagctgggactataggcacatgtctttttctgtagagaagagatcttattaggttgcccaagctagtctcgaactcccggcctcaagcaatcctcatgcctgggcctgccaaagtgttgggattacaggtgtgagccaccactcccagcctagacatttcgtataaattgaatcctatcataatgtgaccttttatgattgacttctttaattgagcataatattttcaagattcttcatattgtagcccctactcatgtgttattccttttcatggctgaattacatctcattatctggatattccacattttatttatccatttatcaataaatggatatttgggatatttctccttttgggccattacagcttgctttctatatttttttataccctataggtagttgtttttttgccttcctgtttggcatgtatgtatagtttgtatgtatatgatatttatgtattatttatacttttgtaagtattcagaggaatttttagccttgttgctgataacatgtcccatgttttattgca

SEQ ID NO: 301178 - DNA, 664 bp, Homo Sapiens
caacagagtgtacccatatttatatttttataaaatacctataagactgtgaatctcttgtgctaatggctgagttaattgaaggatcgttttgcccctttttagcctcccagagcttcgaggactcaattcgaacccgaaatcctgccgtgggggaggggttgcgtcgagacctgggcccggggaggttctcctgcgtcactttctgtcctgaaaggcgcccttcctggtttctgtggctccaattttctatgcagccccacaccccttgttgttttgatcctgagaaataaaagggaggctgaattattcaaatttaaatgaggtttccccttcatggaagtgctgctgacccttcgtgcagaaatggggagcacttgaggacacaggtgggtggaggccctttgtgcgtggctggtcgtattcgggcagccctccgtcgctttttataaaactttgtgtgagaagaatatattgataatgtcagtgaaacaagcagacattgaaatggaggcacagattactccacaaggagttcttctgtatattttttctagatgcaaatacctttttaattatgttaattaatgttaagactttctaggcttatatcgaagctgtgtgtgggtcacggggtgatcactgctaactggataaagtttgt

SEQ ID NO: 301179 - DNA, 488 bp, Homo Sapiens
cttattttctctgaacgatcctgattccagtcatcttgttgaataccctagttctaataattgactcttgcttttctagagaaatatttccaaatgatgctagttttgtctcttcctttcaaagttgtataccacttctttttcttgtcattttgcattgcctgggacctccagaataatgtttcatgaagtagcatgtatccatatctggttcttgactttttcatcattataattgttttctatgggttacttatcagtttaagaatgcttaattcctagatgaactaagagtgtttattacatgttgagatttatggtatgctttttcttcctcaagataatgcattttttgtattatctgttaatgtgataggttatccatttgtgtattttcaatcattgaacaacccttgatttttttggataaactctatttggtcattatgcatcattctataaaccctgctgaatttttcatttgccaa

SEQ ID NO: 301180 - DNA, 349 bp, Homo Sapiens
ttttgcaaaataaatttttctttaataacattctagtacaaaattgattaaaatctcttgtttataaaggtttgaaaggggcctaaggggacccacacacaaactttcaaaaacatttcaaaattaatagcttttgatttttttaatttggcttaataaggatgataaaatttgttcccccttaaaaacccaagaaacatgaagcaaaatttgtttaaaatcctcttgggcccttgaggggcccaaaaaggacctaaaattttcagggggtttttgagggttcttttccctccctaaaaaaaccttttaaacgggtttaaaggaaccaaatcctacaaaatcctggaaa

SEQ ID NO: 301181 - DNA, 107 bp, Homo Sapiens
cttacttagggaagtaagtttctaaaggcagtggtgttgctggccaaattacatgaaccaccatatcccctcatgctaacaaaactatgttagagaatttgttctca

SEQ ID NO: 301182 - DNA, 537 bp, Homo Sapiens
aagaggattgtaggttttattgactaagaagataaagggatgcaaattagttatacaggttttaattccagacaacagaatagtggctattaacaataaaatcagtaagtattctggacatgtttaacttgaatattcaggtaggggattttattggaaatacggatctagagctagtggaagaagttatatttaggagtcatccacaaagaggcttgagaaacaaatgaaaatgtattgagaagtgcatagagaacaatgttaagggggctgtggggaaaaaacaacatttggaagataactgaaggaaatcatagaggaaaaatagtacaatctaatttttctccctaactgaaagcaaaaccacttttaatactaagaatttattatgatctctccatgatactaccgttttttcaatcccaacaatcatcatcacatcccagagccatctcatgacaagagctttctaaatactaattgcctgaacactgaagaaaattaatatctgatactaaggtgtaacttatttctctg

SEQ ID NO: 301183 - DNA, 201 bp, Homo Sapiens
ccccgctccaccattttccctgcagaaattttttcaacctcaaaacatctttggcgttgttctggctgaccactctggtgccttccataacaaattttaccaaattttttacaacactgctgaaaacattaatgtgatctttcccaaatggctgacccctaaaaaggacctgaactttgtaacaaacactgccaaggccct

SEQ ID NO: 301184 - DNA, 156 bp, Homo Sapiens
gactactacacccagtacatccggccctgcctgaaccccctgccccccgactccaaaatttctgggaaggggaaaaaccacccttctttttttacactgctgctcacctcctgaaaaagggtgtctgggggaaatttttttatcttcccccctctc

SEQ ID NO: 301185 - DNA, 131 bp, Homo Sapiens
gatgattttaaccccttatgtataaataacccaagggaagtacgcagtcatatggctaattcgctaactcctatctatggaagggaaaattttaaaaaatccccccaggtaagttaaaaattcaaacccca

SEQ ID NO: 301186 - DNA, 182 bp, Homo Sapiens
acctgggattctgtcctcagggataattctttctgttgaaagtctccagagtgtgggatctaattattgatcaagttcataatatggtttctgccctcctgaaacatatggcctacaaattatctatttttatgtttattactttaaaaatgatatattaaaaaattaaactagagtgatga

SEQ ID NO: 301187 - DNA, 279 bp, Homo Sapiens
caaatcctgattagttaagtgcatacattatgaaacttacagaataaaacttattatacatctctttcttaaattaatatctttacacattttcaactggctccccaagtctgataaggaaggattaaaagaaaaatttatgtttttagttgggtggccaaggagtttcctttgtaatgttgaaagacttccgctttctgaatttcgctggttctctaaggtaaaagagttaaatagtccccttgttcaccaaggaaagtgatccaaactatatatcta

SEQ ID NO: 301188 - DNA, 413 bp, Homo Sapiens
  misc_feature (72)..(85): n is a, c, g, or t
cattcactcaggaacaaatgtcaagaaggtagcactcataaatctaacaaggcagatgaactcttttctacnnnnnnnnnnnnnngtattttcacctggaatgggcttttttctgtgaatataatcacttggatgatttgccaaaatcaaactatttttctagtattatttttgtattgatttgtgtggatcaggttaaatgtgactaatgcttttctttctttgaaaggtatccttacaattccatgatgttcttaaagatctggccactggtcaaacagtacctttctgaagtactgaccttctgagttgtcctttctttcttgagccaacattttgtacttcaaattcttttttctcttgggggcctaccttcaaccaagtaaaatactgtgattaaaagaagagagagt

SEQ ID NO: 301189 - DNA, 268 bp, Homo Sapiens
  misc_feature (16)..(16): n is a, c, g, or t
  misc_feature (31)..(31): n is a, c, g, or t
  misc_feature (40)..(40): n is a, c, g, or t
  misc_feature (134)..(134): n is a, c, g, or t
  misc_feature (208)..(208): n is a, c, g, or t
  misc_feature (212)..(212): n is a, c, g, or t
agagtgagattaaaantgaaaggctagacanacactttanttcttaaaaaatgctgggattaggaatcatacctgggcttcagttccagcaccattgctttgtggagccatacccatggctaagtaactatctngacatctctgtttcttcatccatgatgaaggtctcatggttcctgccttcttcaaatgtttccctgactataangtgntatggcataatttaaaatgctttgggaaactgtacgttgttctcatagcataacat

SEQ ID NO: 301190 - DNA, 300 bp, Homo Sapiens
  misc_feature (77)..(179): n is a, c, g, or t
  misc_feature (240)..(240): n is a, c, g, or t
  misc_feature (287)..(287): n is a, c, g, or t
attgtattaagctggtaaaatcttggtataagacaaagaaagtacaagataggaacattactgataatcttactttnnnnnnnnnnnnnnnnnnnnnnnnnnnnnnnnnnnnnnnnnnnnnnnnnnnnnnnnnnnnnnnnnnnnnnnnnnnnnnnnnnnnnnnnnnnnnnnnnnnnnnntcctgctatataagaaaattaattccacatgagtttgtcagtcatagcttcatcactatgnagccttatggtgttgtgccatagtaagtatacaatagcacctatgangtgttcttgcctt

SEQ ID NO: 301191 - DNA, 277 bp, Homo Sapiens
  misc_feature (31)..(31): n is a, c, g, or t
  misc_feature (43)..(79): n is a, c, g, or t
  misc_feature (90)..(90): n is a, c, g, or t
  misc_feature (138)..(138): n is a, c, g, or t
  misc_feature (188)..(188): n is a, c, g, or t
  misc_feature (199)..(199): n is a, c, g, or t
ctttgccacgcccattcctagactgcaaganggagcgccccannnnnnnnnnnnnnnnnnnnnnnnnnnnnnnnnnnnngcacgaatccngggaaaggagtccccgttcttttcctcagggaggaagctaagaaaggntttattaagtcctgcaattagggtaggaggagagtggaatttaatatgcncttggtgtttnaaagacccaaaggagaatcctcaaaagaaaatgttttggaagagctccaagaaacctccaaagaaatatagcaaattt

SEQ ID NO: 301192 - DNA, 354 bp, Homo Sapiens
  misc_feature (171)..(171): n is a, c, g, or t
  misc_feature (252)..(252): n is a, c, g, or t
  misc_feature (275)..(275): n is a, c, g, or t
  misc_feature (329)..(329): n is a, c, g, or t
ggactattggatgcctatgacattactataaatatcaataatattacttcttcctatgatattactgtaaatctatatatttggactattagaaatgaaacactaagaggttgttttaaattctcagaagcctgatttgtaattttacctaggaagaagcccaatctactntagcatgaatgccttcaagtggagttaatattctctatcaaatacgagctttgaatcttaccaggtaattaaaaaatactngtataacattcgataattctttngcaaatagcaagtgaaagattgaccagggtgacatttgcatttttagggcaagngttaaccttattgttttgttccata

SEQ ID NO: 301193 - DNA, 302 bp, Homo Sapiens
  misc_feature (32)..(32): n is a, c, g, or t
  misc_feature (51)..(51): n is a, c, g, or t
  misc_feature (144)..(144): n is a, c, g, or t
  misc_feature (195)..(195): n is a, c, g, or t
  misc_feature (228)..(228): n is a, c, g, or t
  misc_feature (270)..(270): n is a, c, g, or t
  misc_feature (272)..(272): n is a, c, g, or t
gatataatgtgatatgcctgggtgcctacaanttcttgatatactattttncaaatagcaagtgataaatagcaaacaaagatgagcagtgcctatcttggctttcttcctcaatggtggttctttgttttgggcatctttctncttactctgttttgaataacatatttcatattaaacacttttataaaattnccttattggataataagaaaatacaaaaaaggncaaatacaataaaaaaggaattttaatagttacataatattngnctatgtcatagcttatagtatatcaaaatt

SEQ ID NO: 301194 - DNA, 427 bp, Homo Sapiens
  misc_feature (52)..(52): n is a, c, g, or t
  misc_feature (112)..(122): n is a, c, g, or t
  misc_feature (352)..(352): n is a, c, g, or t
  misc_feature (383)..(383): n is a, c, g, or t
cccaaacgcctcattcaatttaattccatatacttagcatattaggcatctngtcaatatttcctttctgaggtctatttttaaaatttgaatgcattctgcatgtgtaggnnnnnnnnnnncttaaatgatgagatctactgcaacagagagccagaattagctctgtgcctaggagaaaaggaaagcacagagggaaagaatatttctcacattctcagaaggtgtatgcaagagccagcccttggcacaattatttatacagtgccactatatctatctgcgtgcaccttcccctccatttggggagcataggcatccaatattctcctttgggttttcttagtttctntcaccattaacccttctactcagggccctgnattcccagtctttcctcgtttcctactttccccataaaaaactt

SEQ ID NO: 301195 - DNA, 293 bp, Homo Sapiens
  misc_feature (174)..(174): n is a, c, g, or t
ctggagccaggaattatggcgaacctgctccctcccgtcctcccttggcgcacagatccctggcgccgccgctcttaaggtcgcctctcgcgtgtcgacctcatcgtcggaacggcgcttcctgaagctttatataagcacggctctgaatccgctcgtcgggattaaatcctncgctggcgcgctcctgccagtttctggcctccatttgctcttcctgaggctccctccagagacctttcccttagcctcagtgcaatgccttccgggcggtcctcagaccaggacacagg

SEQ ID NO: 301196 - DNA, 108 bp, Homo Sapiens
attaagtttgatggcaaataagaaaaactcaaactggcagtagctttccataaggtggggtttattactcttatgaagtctatggaagtggaggtagtccatcccagg

SEQ ID NO: 301197 - DNA, 515 bp, Homo Sapiens
  misc_feature (445)..(445): n is a, c, g, or t
  misc_feature (460)..(460): n is a, c, g, or t
actccccacagctttttgttcatgctgcttgcatggatggtgacccactctctctggtcccaggcccaaggtgccattttgggagtttaaaatggggctgtggcccaccctcagcctgaggtcagactgacgcagctgtagtcaacaccaagcccaaaagggacagggagaccaggccatcctacacaaatctaggagaatacctactgctctgcagtaggctgctgtgagagtgagacatgcaaatttacactttctacagcttcttgcccacactatttgcctgggcggtcctccaccctccctgatcttaggcccaaggagtcacttttgagagtataataatgagcttctccccacactcagcctgagttcaggttgaagcaactgcagccaccacacagccaaggaggggcaggagagtcaggctctcctccagaccctnctcctagggcaatanccaataccctttttaggctgctgcaagaccaagatttgagcaggctacaattccc

SEQ ID NO: 301198 - DNA, 497 bp, Homo Sapiens
  misc_feature (457)..(457): n is a, c, g, or t
gaggaggagagtagctgaagccaaatttctcctgggtagtgagacttacagccagagacagctttgtgacctgaaacccggtctgcatgtatcatttctgggtgctctagtctgttcccttggtgagttagggaacagtgtcccaccagctctgaggagcaagagaaaggtggaacccactcctctaatctaactcttggtttggtttgcccctaagggagggtgaagtgcagcccactaaagctcctgttagcacaataaaaatgcaagcatggcaccagccactgacagcagctccaccgaagcccagggaatggatgtagagacaaggttatctcttaccccttgccatgtgtcctcaatgcactgttgtggacttagcagcagctactcccttaagggcccagggagcatgggcagaaagagactgcttcttgggcttctccagcagctccanccccaacgaaggcaaacacacactggagaagggtgctttt

SEQ ID NO: 301199 - DNA, 386 bp, Homo Sapiens
  misc_feature (305)..(305): n is a, c, g, or t
  misc_feature (354)..(354): n is a, c, g, or t
gtaagaattacatcttgcagcaattagcctttgccacaatggtgtattacaaacaacttcaaaattcagtgactgaaaaaaattattttgtttctccagatgtttgagtcagctgggcaggttttgcttcacattgcaggtctgcaggtctgggtcttcctcacatgtctttcatcctttttggtcccattgagttattcagggtacattcctctcatggtgatggcagaggcacaccaaatggcaagcccaaccacgcaagcacttttcaaactgctttttgcatcacatctgctaacattctnttagccaaagcaaaacacatagtccagcccaaaattaagaggctgaganggacattccatctttagttgcagaaaatgcaa

SEQ ID NO: 301200 - DNA, 502 bp, Homo Sapiens
  misc_feature (251)..(251): n is a, c, g, or t
caaaaataaaaagtcttctcagtgtctgattttctaatagagtgccagattttctactttgcatgttatgaaagttgttttaggtgatcaaaggcttataaagaacaggatgagattattgatgataagacggtaggacccagagccataattatgcatctctcagaatagatacagtagacataatacccttgcctatataaaagccttgaaaaaggcttaactgaaattcaacagctcaactgcctggnttttatttaataagcaggtggaaaaatgacacattctataaatgccggtctttcctctggcactctggccatttgctatatgggccttgtgtgctgagtacagacagagaagagtgctatacatagactcaacaatgtggctgctaatgagtgcctgagttgccaaaagcagaggctaaagctgaaccctgataatgcaccatgagtgtatttaaccagccatctgggagcaggctgattgcactggtccc

SEQ ID NO: 301201 - DNA, 489 bp, Homo Sapiens
  misc_feature (25)..(25): n is a, c, g, or t
  misc_feature (340)..(340): n is a, c, g, or t
  misc_feature (435)..(435): n is a, c, g, or t
gtttaataatgtctctaaatttgtnctgggcctaaggcagagttttggagttttctcctaatgtcagccactgattgggtgataagtttatcctttaaaataagttggccttcaacggaatctggagttaaggagctgtgctttcttagggccttccttagcctttctagaaaagcagaggggttttcctcctttccctgtgtaattgtggatagcactgagtagttcataggctttttcctagtcttcctcaactcatctaaaatgcaagtttgcaaatgcctgcagctccaatctccatgatgtgagtcagtatccccagtgagggtttacactgggnactgcttgttgccctgtggggaatttttgcctctcctccagggtcattcaatcatttagctggctaaggtaccacagatccccaaattgccaggnggcaggtaaagctgcttctttttcagtaggacttaagggctgatcaagaagcaa

SEQ ID NO: 301202 - DNA, 218 bp, Homo Sapiens
  misc_feature (113)..(113): n is a, c, g, or t
  misc_feature (129)..(129): n is a, c, g, or t
  misc_feature (142)..(142): n is a, c, g, or t
  misc_feature (195)..(195): n is a, c, g, or t
ttataaagtaaaactgttatagtaagctaagtataattgattactgaagaaataaatttctttttataaatttagagtagcctaagtgaacaatgtttgtaaagtctacagtntgtacagtgatgtccnaggccttcacatntactcaccactcactcacccagagcaactgtcagtcctggaagctcttgtatntgccctatacaggtatgccacgt

SEQ ID NO: 301203 - DNA, 362 bp, Homo Sapiens
  misc_feature (268)..(268): n is a, c, g, or t
attaaatgagacaagcgtgcaatgttcttagtgctgtggcgggggtacagtcagcactcagtgattccagccgactggaactgactgtaatccagccttgctgcttggccacttgctctgctttcagacagggtgatctgtgggttctgaggcttgtgggctacactagatgggctgcttccatgccagactaatacagttcccgaaacatccaggttacctcccggggtgtagactccccatctgccccagtgagctgtgcccaggnccctcttcttgcccctcttacctgaattggctgttggagcttccaggcttgggaagctcaagccagggctgggttggttggtgtagccatagga

SEQ ID NO: 301204 - DNA, 199 bp, Homo Sapiens
gggcactatgtgacaaaggtctagtgcgattggttggagagaaattttacagtacctcgtaaaacttatagaggtcttatgctttattctaagggtgacaggaagcccctccaattttctctacaaacatcacaaggaaaagtgaggaagaattgtcttacagtgtcacttgatactttgcttttaaataaaggcagct

SEQ ID NO: 301205 - DNA, 391 bp, Homo Sapiens
  misc_feature (193)..(193): n is a, c, g, or t
  misc_feature (247)..(247): n is a, c, g, or t
gaaggtggtggttgtttttcattctgcatgtacctatactaatttttttaaatctctccaggtctactgacctgaagttttaagatagtattagccatgattagctgtatttttaaaatcctattaatatatatctagtgggttacttttctaaataaaggaatagaaacaatattctgaggcttggaacagnaaaaagcaccacagagcctatttctaattctagtcccccaaataccatattgantcagttatatcagtaatatttggatgctcatattcaaccaatgctacatgttacaacctcagaagaacttgtatattaagagtgtacttttcagcccattaaggtgaagccacagtatgatttaggttttgatcctcacctaaa

SEQ ID NO: 301206 - DNA, 380 bp, Homo Sapiens
  misc_feature (271)..(271): n is a, c, g, or t
  misc_feature (331)..(331): n is a, c, g, or t
  misc_feature (341)..(341): n is a, c, g, or t
gttagatttttctacaccaaacagatggaagacgtacaactgtgcagtatggtatctcctgcccccctgtggacgccgacggagttacctgtggagaaccaaaacaatactggacaggagcatgcttacaggcactttcaaagttgagcaagggatagtggcatctattaacataattttaagaaatcagagagtcatgtctaaggtatgtgtatcatttggcaacaaaacatccataaatggagagatctgtccacccagagatacaggnccaaaagcaaatagaattatcctgttattatctcaaatcggtgctggtattgttttaaanttattatttnacaataatctagggagagaagattctcttaaataagtag

SEQ ID NO: 301207 - DNA, 142 bp, Homo Sapiens
  misc_feature (73)..(73): n is a, c, g, or t
cagatctgcacctatatttagagaccattaacttctttagtactggggtgcagggcaaagggactcacacaangtcatgaattatagagttagaaggatcctttgggttcatctctcatactttttgaaaaaagaaactagg

SEQ ID NO: 301208 - DNA, 499 bp, Homo Sapiens
  misc_feature (299)..(299): n is a, c, g, or t
  misc_feature (317)..(317): n is a, c, g, or t
  misc_feature (325)..(325): n is a, c, g, or t
  misc_feature (353)..(353): n is a, c, g, or t
  misc_feature (372)..(372): n is a, c, g, or t
  misc_feature (380)..(380): n is a, c, g, or t
  misc_feature (408)..(408): n is a, c, g, or t
gagttttgaaatgattggtatcagtactttgattttagtaaactttatattgggcaatcagaaaacaagatttccaggcttgatagaattctgattttatatctataaactacaaatatggaaatccctgatcttgagctcagagtatgtatatgattgttaacatttgaaaggatggaatttttattagaaaatatgcatcatattttgtgcaagatattctggctgtcttttttaacagattgcttcttagagcagtttttcttaaggaacttattacacacattcttatgtttctngaataatttaaagcattntagaaatnattttgggtaatatcagctataataganctatataggagagtttatncttatgangtgcagtgtaaaagttatttgagctggnggaattaggtaaccttgaaatcaaaaaaaggtaagcacgttaggagaggaaagtatcaaataggttgctcttctcctaacaagtagactgg

SEQ ID NO: 301209 - DNA, 343 bp, Homo Sapiens
  misc_feature (132)..(132): n is a, c, g, or t
  misc_feature (203)..(203): n is a, c, g, or t
  misc_feature (219)..(219): n is a, c, g, or t
  misc_feature (289)..(289): n is a, c, g, or t
cactaataaaacctagttgagttcccaaaagatttggaccaaatttccaattcagatattattagagatcatcaaaactcaaatctctttactggtttacaccaaatcacccaagcttccagcctaaaaccnacatgctcacatggttccacagtgctgtttatgtacaataaccagttctcaaaatggtaatcctgttagangccagaaccctcagcntctagcatgtgtgcttttcacagagataagtctcaaagtttggggttggtgaggagcccagtatacaggngttccacattaagtcataattggctttgtgttggacagtgtatgtcagctggtg

SEQ ID NO: 301210 - DNA, 298 bp, Homo Sapiens
aagaattttcttcttatgcagaaagaaatagatgggttgcaggtagtatttagggtacttctgaaacatgaacatagagagatgacatcttaatgatttcacattttaattttagcatcttttccacaatatgataaaatgcatatgtttttaacccaaatgattaatttgctttaaaactgattaattatctagaggaaggtttagaaacgattgacattttgggctgggtaattctttgttgtgaggggctgtcctgggtattgtaggatattcatcagcatccctggcctctgct

SEQ ID NO: 301211 - DNA, 180 bp, Homo Sapiens
  misc_feature (79)..(79): n is a, c, g, or t
aatacataaaacccagctggaatctgtcatgctttgtccgcatcacttcaataatttcagagttgctgctacacttgantgaatggatgactgacattgaaatagagcagaaatttgagtagagacgttaaattgagatatgacataaaaatggtcttcatacatatgaatgagtattag

SEQ ID NO: 301212 - DNA, 155 bp, Homo Sapiens
  misc_feature (11)..(11): n is a, c, g, or t
ggaggcatgancaaatcaaggccattatggaattcaatttgcccaaaaggcatagagaatgaatatagaagtatgagatagggtaactgtttgagatggtcatatacagtcctcagatccattttagccttaaaatagaaggcagttttgctagg

SEQ ID NO: 301213 - DNA, 374 bp, Homo Sapiens
  misc_feature (73)..(73): n is a, c, g, or t
  misc_feature (310)..(310): n is a, c, g, or t
gttcatctgtgtatccgcagtcttagcagtgtgggtattcagtgaatgcatgtggaatgaacaaaggaatgangtgaatgtgagaaacagagtaaggtacccccttctgtaactggggttgtttgtgtttataacttcttaaaaattttgcattaatcagggccactccacttatgaatgaaattgggtgtaattgaggtatagaacgtgggaacataggtgtatgtgtgataagagaccaggactggaggaggggctagagccaagggaagttgcaaaaggcccaaagtcgaaaatagcaggaaccaantagaaagagcacccttttttcccaatgccacttccctcccatgactttgaatttcctgcaattt

SEQ ID NO: 301214 - DNA, 443 bp, Homo Sapiens
  misc_feature (160)..(160): n is a, c, g, or t
  misc_feature (234)..(234): n is a, c, g, or t
  misc_feature (267)..(267): n is a, c, g, or t
catctttttataaagaatttatggtggtatctcctctttaccccataatcccctacaattgggcttctttcccactacttttctgattcccctgaaataatgtagttgttgaaccggttgtatcgtaatgtttattccagttctttttcttccttgaccntgagacagtggcatgatgtcataaaagcagtcatctcaccattgcttttactggtggtgtgtacaaatattgangcatttgaaagagagcaggagtaaatacatgangatgatggtgttcctatctggtggcctggtttcattttctcgctgtggcatatagaatgtggagtcatttgctcagagtgaaggggcaggagtgggtaagggagcttgaaagagagtggagatttgaaataacctttgtgggtaatggaccagggactccccagaaactcagaaga

SEQ ID NO: 301215 - DNA, 470 bp, Homo Sapiens
  misc_feature (230)..(231): n is a, c, g, or t
  misc_feature (234)..(237): n is a, c, g, or t
taaagagagtttaaaaaataaaacttgatttatcaatattgtttaatgttcgtggttacaattgatggttgaattaataaacggttcttagaaaatttaagactactaaaaccgattatatgtgcatttttttcatgttttagtgtgaaatacggagaaggtgccaaatgaaaaagcatcacaatgccaatcttgggatttatttaccaggccttttctgacgccaatanntcnnnntagtcacattttcgagcgcatattccatagcagttactttacctacatcatcttgtttagttcccacagcagtggcaacaggaaggtgatattatctctgttatatgaatgggaaggctgaaagagaagctaagtaatgtatttaagttacagaaatagtaagtggaaaacctggattttgaaattcaattctgactccaaagtatagatgggaaagcgtgaccagtgatccc

SEQ ID NO: 301216 - DNA, 422 bp, Homo Sapiens
  misc_feature (192)..(192): n is a, c, g, or t
taaaatcctcactaagacttttgtgaaaaataaatcagaaagagaaagactgaattctgcaaaaccagtcagaaggctgtagcagaaatgtatacaatatttatactgggagtctgggagatggtagtctggaagacaggggtggcagtggggctgaagaaatgtaactggatttgagctgggtttagaganaaaaaatggacaggatttagtaaatgcagagtcaaagcaagagttaaagatgacacccaattctgactatataacaaagagaataaattgattggaatagggataaaaaagtaccagcagaaattctaaggaaaataaaatcaattgggtttgaatgtgttgagtttgagccatcttagagacattcaggtggagatatcaactaagttactgaatatataattctggag

SEQ ID NO: 301217 - DNA, 600 bp, Homo Sapiens
  misc_feature (122)..(455): n is a, c, g, or t
  misc_feature (562)..(562): n is a, c, g, or t
  misc_feature (569)..(569): n is a, c, g, or t
tacatatatatcactgcaaggaaatatatatcactgcaatgatgaagacttacggaatgttttcttaaagcagaactagtcatcaaagccatagtcttcagcaccatcattattaacagcannnnnnnnnnnnnnnnnnnnnnnnnnnnnnnnnnnnnnnnnnnnnnnnnnnnnnnnnnnnnnnnnnnnnnnnnnnnnnnnnnnnnnnnnnnnnnnnnnnnnnnnnnnnnnnnnnnnnnnnnnnnnnnnnnnnnnnnnnnnnnnnnnnnnnnnnnnnnnnnnnnnnnnnnnnnnnnnnnnnnnnnnnnnnnnnnnnnnnnnnnnnnnnnnnnnnnnnnnnnnnnnnnnnnnnnnnnnnnnnnnnnnnnnnnnnnnnnnnnnnnnnnnnnnnnnnnnnnnnnnnnnnnnnnnnnnnnnnnnnnnnnnnnnnnnnnnnnnnnnnnnnnnnnnnnnnntgtgatgatgtgtgcacacaatatacagtggacaccattctggcactgtcgataagagaaataaaacaagccctgctcctaattttcctactgggtcaaaggaattnccagagnaggcattctatggtgttaccaggtcagttcc

SEQ ID NO: 301218 - DNA, 323 bp, Homo Sapiens
  misc_feature (103)..(103): n is a, c, g, or t
  misc_feature (207)..(207): n is a, c, g, or t
  misc_feature (274)..(274): n is a, c, g, or t
ctgtagcctgaattgcaattgtaccctgctcattggggcctaaacctctggaaaacctcttccttcccagagccatgccattgctgcaccctaacacccaggntgagtcagcaacatgcctgatcctgggcctgagatactgggaagtgcctcagaatcacagtacttggccttgtgggagagctgcatcacccatacctaaaagantaaacctggacctacaccacaggtgtcctggcagttcaacaagacactgagccccagaccccagctncacagccactctgagcacctgttccctgtaacacagtactgattggctg

SEQ ID NO: 301219 - DNA, 496 bp, Homo Sapiens
  misc_feature (26)..(26): n is a, c, g, or t
  misc_feature (75)..(75): n is a, c, g, or t
  misc_feature (270)..(270): n is a, c, g, or t
gaagaggttgtatgtgtgaacctggntctgggccctaagaactgaaatatttggcacttgggcttgttaaaaatnattcttcctttattgagcataacatgaggggtcacattcaactttcagaaaagaggactcaggctccaattctatgttctgtttctatcctttaggggtagtttttcaacctcagaaaacattttctgagtttaggttgtattttgcttccttgaaatttgttttagttcagacatttcttagagaatttttgtngtaacaggatagagttggacttttcctgctaagaccctaatgataaggttgagtgtacagtcaaccttttatgttttaaggcataaattgaggactagactctgcacctgcttggggcttattaagaagtaaagaggctctgctgttcctaatcatcccatcagcaccaactttatcattctctctcctctcctccctcccagaagcagaccagagactaggggtg

SEQ ID NO: 301220 - DNA, 199 bp, Homo Sapiens
  misc_feature (22)..(22): n is a, c, g, or t
ccaacacttgtgggaccgcagnacggtgccgggagcaaggttgaggctgcagcagaggctctgggtctgggaatgggtcctgcctggccatgcaagggtggaggtggtgcagttgatggccttggggactgccacttttgctcccacagctgctcctgccattaccactcatgcctctctactgcagctggtgtgatgg

SEQ ID NO: 301221 - DNA, 298 bp, Homo Sapiens
  misc_feature (137)..(137): n is a, c, g, or t
  misc_feature (196)..(196): n is a, c, g, or t
  misc_feature (236)..(236): n is a, c, g, or t
tgtgcccggcccaagcatttcatcttgcccagggtgaagagggctatccaattaattccacttcttgctagatgtggcattatatccagtatgggaaccagaattgccagagtcacagaagcctccttgaccagctntcaacagacatagccaacaacattgatgccacaactaaaaccttaatagctgtgcaagnacaaattgactcgtcagcagccatagtcctcccaaatcgncaaggagtacatacgttaatggcagcacagggaagatttgtttagccttagatgaaaaatgt

SEQ ID NO: 301222 - DNA, 147 bp, Homo Sapiens
ctactatttcctagtgtcaaggatcaaggtggctgtcaacttctaggctagtatttatttgtaccacattgtaggtcatctacaggatactattcatctttaagaaactagtgtgacagtgtgtggccttagaagtagagcttaagg

SEQ ID NO: 301223 - DNA, 491 bp, Homo Sapiens
caagcccctaacgatgctggatgtgctggccacactcaccagtgctgcctcctctgagactgtcagctttatatctgcttctttttatcaatacgggcaaataattctctagacatttatcattttaaactgtcacagtccagtgcctttcccgaggaccacaatcaatactgatctcggtttgaatacttttctgacaaggttcctatttgtagattcacaagtagaactaatgtgtgttaaagctattcagtttggcattttgcagctccattgacacattaaatataggcgttcaccacgacggattaaccttacaactattaagtaataaaaatcccacatacatatttattagctgaacatcctattccggcatgatgccttccccgacggaggtctttccatgatgggaaaccagagaaggtggaggtgctgctggagagatgagctcactctttgcagagaatgtcaggagggatgtgggatct

SEQ ID NO: 301224 - DNA, 499 bp, Homo Sapiens
  misc_feature (35)..(35): n is a, c, g, or t
  misc_feature (51)..(51): n is a, c, g, or t
  misc_feature (199)..(225): n is a, c, g, or t
aacaaggcttggttgtaaaactatgcaagagtgtngttcagctctcctganctaattgggtagtaagtatgcaccaattgctgttctgccctgaatatgacatgaatagaaaaaaccctttagtagcaaatggatattttagcacatagcagaaaattaattttgtttctcagttagctcatatatatctgagtatgtnnnnnnnnnnnnnnnnnnnnnnnnnnnattttctgactatggctaattcctgaaagcatgctgtacttacaaaggatgcttttgctctgtaggaattcaccaaggtaaaattttcaaagcatatgaagaggattgttgaaattaattaggaggtgaggggaatcttgggatatctacttcttctagcctctgagctatggcttggaaccttggtcagccttattaaggacttccttagtttataagtgtatctcccatgggatcacaaatgctttcttgtttgatttagttccatttgaag

SEQ ID NO: 301225 - DNA, 239 bp, Homo Sapiens
  misc_feature (37)..(37): n is a, c, g, or t
  misc_feature (126)..(126): n is a, c, g, or t
  misc_feature (147)..(147): n is a, c, g, or t
  misc_feature (174)..(174): n is a, c, g, or t
  misc_feature (182)..(182): n is a, c, g, or t
  misc_feature (212)..(212): n is a, c, g, or t
ctgaggttgacctcaggagatgatgagggctccagangatgatgtttgcagaatcctcagcacgttgcaggcagctcagagcctgcccaagagatggatgatgccctttctagcccagagttccanttccagttgatacccccaggntggcattgatgcccacatcacacacgnatcctctntgggtgggatcacaccagagcactattaanttgtgggaaattcacagtccccatcct

SEQ ID NO: 301226 - DNA, 508 bp, Homo Sapiens
gtccagactgcgctggcataggtgtaaccttcagaagccaagccttcatcagtgtgcacaggtgatgggaaacagattttcagccaggtgagctttgctacacaaacgtgtggaattgtagcaggctgtttctccctaacaatcacacagatgggcctgcatgacagtcacacagacaggcctgcacagcactccagttacacagacaaatttccacagcactgccttaacactgagcaaataattaaacctagggaaatcggtgcccagacatcaaagctagaaatataaacatatggtcagtaggagacgtgcataggcttctccctatcctggagcaagtcaaaataacggagacagtctcacattcctagtgccaggacctgtcttgggttgtcgaaatctgagacagtcaaggtaacagaggcagttgtttgaatagatttattggaaagtctaagcagctcttcagacccaagctgtacatgagataaggttgggattatca

SEQ ID NO: 301227 - DNA, 401 bp, Homo Sapiens
ccacctaaagatttctccatacataatgaactctaacttaccggcatgtaaacagacctgacctactcttgtgccaatctctgagtttcagccaatcacaggcagccaactgtttaatccctgttcaaataaggtaaatgccaagctgtaaccaacccagctgtttctgtacctcacttccattttctgtacatcattttcctttttatgtccataaatcttgtctatgtggcagctccagagaatctctggacctattttgattcaggggctgctcaacttatgaatcactgttcaattaaactccatcgatttaatttgtctaaagttgttcttttaacaccagaataatgtatatcataatctccctcactctaatcatgtggagattcagatttttt

SEQ ID NO: 301228 - DNA, 248 bp, Homo Sapiens
gccctgccccacctttgagaggtctccagtgtcttcttttcaaggttgcttttcagacctcataatgttgagagaggtgtcacaaggagaattcccaacccctgagcaaatgggcaaagttgcaagtacccagcagagctgctcaaatattgctgcaaccagaaatccttcataattgagtgggaagcttctagtaaccaggaacaaaaagctgaggaattattacaggtttcttgaaaattattgga

SEQ ID NO: 301229 - DNA, 356 bp, Homo Sapiens
  misc_feature (113)..(113): n is a, c, g, or t
  misc_feature (187)..(187): n is a, c, g, or t
  misc_feature (314)..(314): n is a, c, g, or t
  misc_feature (338)..(338): n is a, c, g, or t
tgtgcatctgggattgagaacatcttccttggagcccccttcccccaaggatcagctcaggtcccacggtttctggaagcctgcctgctttgcttggcgagtttgcccttggntcccagtcactgcctgagcagcatcttcagcatttgtcctgtgctgtctgctctgagggtcattgccgcatgtntggttttttcctctctcactgaccagtgtccagctccccgagggctcgggtcttggatttggccatctgcagaggccagactttgacacacattggagctcagtaaatactttgatggttgcgtatntgttgattaccctctcttctttcngccttctcctttcccatg

SEQ ID NO: 301230 - DNA, 342 bp, Homo Sapiens
gatcctaaggcaataaaagaataaggagatttggaaaaccattgtctgtaatctctgaagaaaagtggacattaggggagtcagttgaaaagcaaagctatcaccattttctaaagaggaaaaaggtgaacctcacaaactatagaccaaaaaaataggacatcgagagaaagaatatgaagctagcataggttcacaaagaatgagtcaaatcaaacaacatgcattttttatttataaagcatgacttgttcattgtcaattcatgttagcttaatcattaggcattaatgccatcactgcaatgcatatgtcagcaataaataatcaaggcccggcttc

SEQ ID NO: 301231 - DNA, 167 bp, Homo Sapiens
  misc_feature (145)..(145): n is a, c, g, or t
gatcctagcatatgttaaattcaaattaatgtaaaacagattaacaacaacaaagaaactgtctatttgagtgaagtcatgctttctattataatttggcttaggttatccatcaaatgcacacttatactgttatctgattgtntataataaagaatactgtactt

SEQ ID NO: 301232 - DNA, 377 bp, Homo Sapiens
  misc_feature (47)..(47): n is a, c, g, or t
  misc_feature (67)..(67): n is a, c, g, or t
  misc_feature (70)..(70): n is a, c, g, or t
  misc_feature (81)..(81): n is a, c, g, or t
  misc_feature (97)..(97): n is a, c, g, or t
  misc_feature (112)..(112): n is a, c, g, or t
  misc_feature (127)..(127): n is a, c, g, or t
  misc_feature (142)..(142): n is a, c, g, or t
  misc_feature (146)..(146): n is a, c, g, or t
  misc_feature (152)..(152): n is a, c, g, or t
  misc_feature (179)..(179): n is a, c, g, or t
  misc_feature (183)..(187): n is a, c, g, or t
  misc_feature (195)..(195): n is a, c, g, or t
  misc_feature (227)..(227): n is a, c, g, or t
  misc_feature (229)..(229): n is a, c, g, or t
  misc_feature (231)..(232): n is a, c, g, or t
  misc_feature (243)..(243): n is a, c, g, or t
  misc_feature (282)..(282): n is a, c, g, or t
  misc_feature (289)..(289): n is a, c, g, or t
  misc_feature (329)..(329): n is a, c, g, or t
gatcctaggaagagagaacagagtggctcacaagccccaacacagtnagcagcagatgacaggcacnctnagaccacactntaggccacccatgggnccaaaagggaacagntgcctcagccatccnaacagagtcgtcagngggnccccanggcatattcatggcaagtaccgctctncatnnnnnagcagtgnttcccaaagtgtgctctgtcagctgctttgantncnnttcattagcgnatgttttattttggtgtgacggttggcctcctaacacgncttcctnaggtggttaagcggaaaggctttcttctgttcttcaagtnaccacagttgagagcacgtggctagctgctaggccttcattctttctt

SEQ ID NO: 301233 - DNA, 322 bp, Homo Sapiens
  misc_feature (94)..(94): n is a, c, g, or t
  misc_feature (162)..(162): n is a, c, g, or t
  misc_feature (296)..(296): n is a, c, g, or t
  misc_feature (306)..(306): n is a, c, g, or t
gatctcagcttttggtttcccatgataccatctctaggggtagcagctggctataataactaatgtctggattatcctaactcttctgtttgtnctttcaggtatttaacaatgttgtgactaattggcttccattatttccctagagtaggttctgttatnaccctggaatatgtttgtaatagagtgggctattacaatcatctaggataaagataatcgtggcttggaataagggtggtagcaatggaagtgatgagaagtcattagatgcagaatatattttatagatggantgtgataaantaaaaaataaactggg

SEQ ID NO: 301234 - DNA, 383 bp, Homo Sapiens
  misc_feature (31)..(31): n is a, c, g, or t
  misc_feature (270)..(270): n is a, c, g, or t
  misc_feature (297)..(297): n is a, c, g, or t
  misc_feature (305)..(305): n is a, c, g, or t
ggagcaggccttgctgagtgaagacactggnactagctgggtcctggggtgacttggaggctttgggcctaaaagggcagcctgaacctggagtcttatctcccccaggagccgaaagcacttttcttgatttcccccaggaaatcaagcgctgcttctcagctcctgtggttttagtatttatatatctgtatcttctttgtagaaatttatttatttttgaataagaatacctgcctggacaaaatttaaaaggacgggagggcgaantgcaagggaaggcctctcctatgccgncccagagnagcactgtaccaatttcatgtgattccttaactctgtttaaggaagctctgaaactgtcatttcctttgcagattgtt

SEQ ID NO: 301235 - DNA, 257 bp, Homo Sapiens
  misc_feature (32)..(32): n is a, c, g, or t
  misc_feature (60)..(60): n is a, c, g, or t
  misc_feature (63)..(63): n is a, c, g, or t
  misc_feature (73)..(73): n is a, c, g, or t
  misc_feature (85)..(85): n is a, c, g, or t
  misc_feature (117)..(119): n is a, c, g, or t
  misc_feature (145)..(145): n is a, c, g, or t
  misc_feature (183)..(183): n is a, c, g, or t
  misc_feature (197)..(198): n is a, c, g, or t
  misc_feature (208)..(208): n is a, c, g, or t
  misc_feature (215)..(215): n is a, c, g, or t
  misc_feature (217)..(217): n is a, c, g, or t
ggtctcaccttcatttccgtaaagggcaccgngaactcgaagcccttccagtggtaccanctnactccctggnaaaggggttgtnaagagagagtcaaagccggatgtcccatctcnnnttcccgttccccttaaggaggtagtnccagcactcaaccaacctccccgaagagttccttcctnaccctccggttgannggattgaggnttaattntnagctggcctttccagcaataaatcaacttcagttcctctg

SEQ ID NO: 301236 - DNA, 218 bp, Homo Sapiens
  misc_feature (60)..(60): n is a, c, g, or t
  misc_feature (71)..(71): n is a, c, g, or t
cggcccttccacatcggtccaccgcactcgtgggcgcccgcattggtgctgacataattncctgacctctnacccgtattgtctcgcgattaaagagctgcgcctggatccctcagcagtgaggagacctgaagaccagaggaaacacagcaagggctcaccagagaagacagggcaaggtgagggggatctcctagcagaggaaacaacatgcgcca

SEQ ID NO: 301237 - DNA, 176 bp, Homo Sapiens
  misc_feature (44)..(44): n is a, c, g, or t
  misc_feature (54)..(54): n is a, c, g, or t
  misc_feature (85)..(85): n is a, c, g, or t
  misc_feature (113)..(113): n is a, c, g, or t
aatgttccgtgttttcttaagtagcatgtatgacatttataatnttaaaaaatnttttaaaatatgtgtatgatacatattttcnattgtcttagggcaggcttttgaaaatntcagcctgtagccaaatgcaagattttctccatcctttaataaaaagcacactgagaaatcct

SEQ ID NO: 301238 - DNA, 138 bp, Homo Sapiens
  misc_feature (91)..(91): n is a, c, g, or t
gatccagtgacattgtgagtgaagacgcaaacaggttttgactcctgcatggccgatgaccttttctgtaggcttaccagaaaagtacatncaacagttctttgaggtttaactagagcagcaaataaagcaaaagtt

SEQ ID NO: 301239 - DNA, 320 bp, Homo Sapiens
  misc_feature (37)..(37): n is a, c, g, or t
  misc_feature (44)..(44): n is a, c, g, or t
  misc_feature (57)..(57): n is a, c, g, or t
  misc_feature (61)..(61): n is a, c, g, or t
  misc_feature (69)..(69): n is a, c, g, or t
  misc_feature (89)..(89): n is a, c, g, or t
  misc_feature (127)..(127): n is a, c, g, or t
  misc_feature (202)..(202): n is a, c, g, or t
  misc_feature (204)..(208): n is a, c, g, or t
  misc_feature (225)..(225): n is a, c, g, or t
ttcaaacacaacagactgcagaagttaaatgcgtatnttctctnaagaaccaacgtnaaantttaacgngaatttctataattaatggnattcctagcatgctataaaagagcatccccgcttccangtttctaaagatttcttgaccatcattttgaaaagatttatttaaactagctaaagacaacagacaggatagctntnnnnntaatattcatcagaggnaaaaaatactcctcattcttcagtactttcaaatggctttttccagtgtgctccttcttagcaattagtattttctgcgtatttaaaggcagggg

SEQ ID NO: 301240 - DNA, 136 bp, Homo Sapiens
acgattttccctatttactgtaggaattacttccaggtagttggatctatcgatctctttccttcttttgacattctgtgatcttcttcctggaaactcagactctcccttggttaaccgtttttcacacaacccc

SEQ ID NO: 301241 - DNA, 275 bp, Homo Sapiens
  misc_feature (14)..(14): n is a, c, g, or t
  misc_feature (27)..(27): n is a, c, g, or t
  misc_feature (110)..(110): n is a, c, g, or t
  misc_feature (114)..(114): n is a, c, g, or t
  misc_feature (168)..(168): n is a, c, g, or t
  misc_feature (172)..(172): n is a, c, g, or t
  misc_feature (215)..(215): n is a, c, g, or t
gatccctacccttnccgttggtctctntcgctgactcgaggcacctaacatccattcacacccaacacaggccagcgacttctggggctcagccacagacatggtttgtnactnttgagcttctgttcctagagaatcctagaggcttgattggcccaggctgctgtntgtnctggaggcaaagaatccctacctcctaggggtgaaaggaaatnaaaatggaaagttcttgtagcgcaaggcctgacatgggtagctgctcaataaatgctagt

SEQ ID NO: 301242 - DNA, 405 bp, Homo Sapiens
  misc_feature (337)..(337): n is a, c, g, or t
gggaatcaggagggtgatcaaagtgcttaaaatggaacaactgtccataaaatgaacaacctccatgaaataaatttctgtaacattttggtcattttataaatttttttctgggtgggggtgctgaaaccatcaggcttctggctgcaatagtaaattacggaggagagtaaatccctactggttcgtctcttttacagttcacacccagaaattaattttaaaagatccaacccaaccccctatccaaagaatcagactcactcctgccctttgaaccttctgaaggttgaggaggaagacctccgtggccccaggtcaggcgctgcagcctctnaaggggagggcaagagcctctgaatgaccagattaagtgtgaatggaagaagacctgtgattaagttt

SEQ ID NO: 301243 - DNA, 401 bp, Homo Sapiens
  misc_feature (262)..(262): n is a, c, g, or t
ggaagcatcagaaagatgtctcccacctagacaaaaattgcactgggagaatctgtcttatgtaactattttggaactctggagtgtattgaaggcttgcaattcccagaaagaaggcttagacagtaaattgtagctaatttcagtccatttcagctcttacctcagtagcaatgtggcaggcagtgcgcccagcaatgcagcaggcagctgtgcacatggtcctgaagcagctttcacacagttggaaggagccagggtnggcaaaaacaaccctgtcttcaaatatcagcaatctgtgtcgaatccctaattgctgctctgaccgcaaaggtgcagacaaagaggtgggcagccattattgttgtacctctccccattgttgcaggcccctgcccctc

SEQ ID NO: 301244 - DNA, 248 bp, Homo Sapiens
  misc_feature (56)..(56): n is a, c, g, or t
  misc_feature (158)..(158): n is a, c, g, or t
  misc_feature (205)..(205): n is a, c, g, or t
gagttttgaaggttcaaaatcagcccaggataaccatggagctttggttgaaagtntaagcactcacagggcattatggctccagggtcagggcatgcattgggttggaaaagatagaagttcctttcctgaagcagttcaacactagccacttcctnagtgggggagaggtgtgcagccatttatacctctctggagttccttngtggctgtggtttttagttacctcagtggcaaaacatgctggt

SEQ ID NO: 301245 - DNA, 371 bp, Homo Sapiens
  misc_feature (229)..(229): n is a, c, g, or t
  misc_feature (239)..(239): n is a, c, g, or t
  misc_feature (319)..(319): n is a, c, g, or t
gagcagagtcacgttttccagcggggaagggtgtaaactcagcgacggccgcccaagcacccacgggtccctcgcaggaccagagtcacgttttccagcggggaagggtgtaaactcagcgacggctgcccgagcacccacgggtccctcgcaggaccagagtcatgttttccagcggggaagggtgtaaactcagcgacggccgcccgagcacccacgggtccctcgncaggaccggncgccacggtttagacagggctctgcggaggactcacccctctgccccttaggaacctggccaatgggacagtcacggggngaggccttccacagcctttccaaggacacctgaggccacctaataggctcga

SEQ ID NO: 301246 - DNA, 341 bp, Homo Sapiens
  misc_feature (19)..(19): n is a, c, g, or t
  misc_feature (35)..(35): n is a, c, g, or t
  misc_feature (115)..(115): n is a, c, g, or t
  misc_feature (161)..(161): n is a, c, g, or t
  misc_feature (172)..(172): n is a, c, g, or t
  misc_feature (255)..(255): n is a, c, g, or t
  misc_feature (270)..(270): n is a, c, g, or t
  misc_feature (293)..(293): n is a, c, g, or t
ctgagaatgccaaccgctnctcccatgggagactngatgaaagggcttatctcttgcctcaagcctagtgagtgggatttcagagaaaccagtggcagagcttgatatgtgagcncagtgctgatagggacaaaaggtgagagaactgctgaaggagattnggtcagcagantagagagctatgattggaaatatactgtggtctgtcaacagagggccaggggtgtatctttcccatgatcaagacatgaactntagaagagagggttngtatggcgctgctgtagatcctnccaagagggcttttgggagtggttaagaggcttcagcagagggacgct

SEQ ID NO: 301247 - DNA, 121 bp, Homo Sapiens
  misc_feature (47)..(47): n is a, c, g, or t
  misc_feature (70)..(70): n is a, c, g, or t
atttttactagtctaggcatggagttgggggctattagcagtaaganggcctcatggataagtgattttngaggtgaatgtattgtgctgtggtcctaaactgctgtgaggtgaacaacgt

SEQ ID NO: 301248 - DNA, 250 bp, Homo Sapiens
  misc_feature (36)..(36): n is a, c, g, or t
  misc_feature (46)..(46): n is a, c, g, or t
  misc_feature (58)..(58): n is a, c, g, or t
  misc_feature (78)..(78): n is a, c, g, or t
  misc_feature (156)..(156): n is a, c, g, or t
  misc_feature (207)..(207): n is a, c, g, or t
ggaagagattgtattctggaagtcaatttgcagtcngttgtttggnagacggtttttngtataagtaatcatacctgnttgttaatggtctccagccataataaactgtatacctgagcactgtttaggagaaagaaaattccaaatggaaattcntactgtaactcctactgtggccgagaagggttgggtaagtgaaacttattnactaggtgtctactgaagaagagatagtcattgttaaaaaaag

SEQ ID NO: 301249 - DNA, 513 bp, Homo Sapiens
cattaacacccctaaacatctttgcagaaaattcaaaaacatggccttccggaaatatttgctgctagacaaatgtaaaagccctaaagtgcctataccaaggggaaatgagaacagtcaacatcctcatgtccctccagaaagtgtcatcagcttcaggcccacgggcacccagctacctgcaagccaccttcgcaccaagctgcgggctctgaaatgcactcagcggaagatgaccctgagtcctgtgcagcaagacagcagttaactttatccccagaacttcctgcatgaaactagctaagataaagagccaactcgagtcctcagaacacactgtgagggcaccaggctgtgtagaccacccactcggtgccaacttcacccccacttccgttgagggcaggcatgtttattggaagtgtaacacgtttttggttgggggacattgagtgcttttgagtgattttcattagagtataaggtatcttggattaaagcatttagttaaat

SEQ ID NO: 301250 - DNA, 456 bp, Homo Sapiens
  misc_feature (43)..(43): n is a, c, g, or t
  misc_feature (390)..(390): n is a, c, g, or t
acacatagtaaggtgagatttgcacaacagaatatagtaaagntttgtgcctgattctttttgcattctctttgaatcatttttagcctttattctaagtccccagttacggttatccttctcccaacaagattgtttctcttcaccacggatattctgatgaggctctctgcttaaccatctagacctcctgaacactctgtttgtcctgataacctgatttatgctcaaatgatgctcttccacagcagggcttcctgctttgcccaaagaacattcaatttctgaagccatttagggctgtttcctcacccagtatctatgtgaaaccttagagggaagcctattctttccaagaagagaaccctgctgggttctaccctcaatctntaaatccactggggtaactgggattagctcagattagcaactggggttagctcagctactccagag

SEQ ID NO: 301251 - DNA, 395 bp, Homo Sapiens
  misc_feature (332)..(332): n is a, c, g, or t
ccatcagctcctttattcactctgctactgttttcgtcactgtttcactgttcattaacacctccaggagagggtgagctgagtcaggacacctttgtggaattcaatcatttaagttatcaggacttatgaaatacatggatttaaaagaaggagaacatagatatgaaagatattgtttagagtcggcctcaggagtttaaagataccaattatttatgctatctattcctgtcatgccatctataatagagtccctaagtgtctccattccacttcattattgttagccaactttgagtataaactcccaaaaatatcatattattttngtggtttcattaatagaaaattcagtttcagaaggtgcaaaagtcatgaaacccatctaagca

SEQ ID NO: 301252 - DNA, 102 bp, Homo Sapiens
  misc_feature (20)..(20): n is a, c, g, or t
acatatgctagatgtaagtnctttgtcagatacatggtatgcaaattatttctcccagtctgtaattcattttttcaacctctttacagggtctttctaagt

SEQ ID NO: 301253 - DNA, 297 bp, Homo Sapiens
  misc_feature (267)..(267): n is a, c, g, or t
caccaaaaggactgggaaacaccggcagatgcacagacaatgcatccctgattttaccaatagacttgactcccaacaatgcatactcttgaaggcaatccacaggttgaataaaccaagtccatgagcgctgggtctggaatctttctacaatcagggtcagaaggagggtgactgaaattaaaatattagcttggttctttgaaatcagagtcaggctgaaaaagtcccaatcttagttcaaaacctgtcctgcatgacttaagncctcctagggctgcacaaagtataatggaa

SEQ ID NO: 301254 - DNA, 433 bp, Homo Sapiens
  misc_feature (375)..(375): n is a, c, g, or t
  misc_feature (390)..(390): n is a, c, g, or t
  misc_feature (418)..(418): n is a, c, g, or t
acttgaaggagtaattgacattcatgggcaaaagaagtgtacgttgtgtcagtgccacatcacatgcagaagcatggaccccgctgagacacaatcttgctgctaggtggagggaagtagctgttgacaatcagagagaaaagcctgttctgagtataagatgtaagtggaacctgccagccgctttcaagcagccccatcctgagcacccagatgcaaccccactacccctctggctattcctgatgtcttcctttgtctacaaagtcaaaagaactcagcattccacaccagcagcctcatgatccaggcctgcctcacgcgccaggttcacgagagccgcctctaacccacccccaaaacaacaaaaggatncggttttgggcttgncaacttcagtgcctgggacaagccgggntcgtgcccggcgcct

SEQ ID NO: 301255 - DNA, 367 bp, Homo Sapiens
  misc_feature (190)..(190): n is a, c, g, or t
  misc_feature (283)..(283): n is a, c, g, or t
  misc_feature (347)..(347): n is a, c, g, or t
ctgggacgttccaggtaaagtgaaatatatgaagaccctggttataaatcacagaaaaatcttagttaataatttaacatagactgtaagatatagtatttcactctttaaaaatgtcttaagcatgcactaactgttttatggtgtgctagttctttgttagtgtgtacaaacatgaatctaatacacnggtctcagcttacaaataggagataaaagataggcatgtgcagcatggtttggctctttaagatgctgcttctggcccggtaagatgtatcanggcagccagaaaaacttataattctcagaaccaagcgttcaatgctcttttgtcacttcctggntttgctcccaccttcctctt

SEQ ID NO: 301256 - DNA, 354 bp, Homo Sapiens
  misc_feature (60)..(63): n is a, c, g, or t
  misc_feature (67)..(68): n is a, c, g, or t
  misc_feature (174)..(174): n is a, c, g, or t
  misc_feature (313)..(313): n is a, c, g, or t
  misc_feature (322)..(322): n is a, c, g, or t
tagagattcatccaaatgtttcatgtgtcaacggtatgcttctttttattgctcagtagnnnnctgnnctatggatgtaccacagttggtttaaatattcattgttgaagggcatctgggctgatgccaatttttgactattacaaataaagctttagaaacattcatgtacangcttttgtgtgaacgtaagttttcattgtgaaataaatgcccaggagtgcagttgctgggttgaataatagtcccatgtttgatttgttaagaaatggccacccttttttccagaatggctgtgccacttcacatccancaccgaaanggatcctggcaacgtgggcagtgtttccaaga

SEQ ID NO: 301257 - DNA, 349 bp, Homo Sapiens
  misc_feature (269)..(269): n is a, c, g, or t
ctgcttgtgtgaactatctgccaggcttcaccagaccaggcttcgagtctcaaacgcaggatggtgttcctgatccctctccaccgtgaacggatgcttcaacaacaccttaccctgagtctctaaagcgcttcagaagaggagggaaaaccaacccgggagacaaatgtttatggtttggctgaagcaggcggtgttttaacactaacatcctgctgcctcttccttaaattaattggcttcagactccaggcccacacaggttagantttgcaaggaataacagacaaggaggctccccggaacctgcagcacccatgccatgctgcattgaaccacccagcagctt

SEQ ID NO: 301258 - DNA, 193 bp, Homo Sapiens
  misc_feature (22)..(22): n is a, c, g, or t
  misc_feature (87)..(87): n is a, c, g, or t
  misc_feature (104)..(104): n is a, c, g, or t
  misc_feature (170)..(170): n is a, c, g, or t
  misc_feature (174)..(174): n is a, c, g, or t
atgaattttgtgtttagacttnggtcctatccccaagacatctcattacagatatgcaaatattccaaaatgtgaaaaaatccaaanttcaaaacacttctggncccaagcatttcagataagggatattcaacttgtgtaataacagtagctaacgtgtatgggcatcnacgntattccacgagctactcta

SEQ ID NO: 301259 - DNA, 197 bp, Homo Sapiens
  misc_feature (125)..(125): n is a, c, g, or t
caaaaagtcaaatgctatagctggactaactggtactagaattgcaaagttataatcatgttaaaagactaactttagattttttatttgcaatgacaacataatacaaagtcagtagctcttgnttttcttgctatattatatccagtgactactgacgctaatgtggaacatttcctgctagttattcattgatt

SEQ ID NO: 301260 - DNA, 376 bp, Homo Sapiens
  misc_feature (21)..(21): n is a, c, g, or t
  misc_feature (341)..(341): n is a, c, g, or t
tgattcccattttataaatgngcaattggaagcttagaatcaccaaataattttcccaacatagcaaagaatccagctctggctgactccacactcacagcaactacaccacttcgcttctgccgaagcaatcctacttgcactcctccttttggattgctgagaagcatcactatctaattaccataaagccccctcctctccatgcctgctatctttgtcctggtttgagacctctttatccctcccatccctaccttcagtctatcctgcacaggactgacaaagtcatcttccagaatcacaagcatgactacatcagtattctacttaaaatcctncagtaagtattctctctaccagtcgagatgctcga

SEQ ID NO: 301261 - DNA, 369 bp, Homo Sapiens
ggtgaggattcacggcttcagggccaagggcaggcaggtcttggtggttgttcttggccttaactcaacctaatcttgcctactctctagcaagattttgtgtcctggaaggaaagggcatgatgatgctcagtagtgttattgcttcctaagtgatccaagtcacctcagcctgttgggttgagggaatccaagtcccctaaccctttcctttaattaatgaaaagaatatcccctccaggcttccctatctcacatgctgtggccaatccagtgatctgacaatccagtgagatttccatgaattctgggggcttacaatatcatagtttctgttcctcttacttcctgcttccattgacatctaag

SEQ ID NO: 301262 - DNA, 474 bp, Homo Sapiens
  misc_feature (196)..(196): n is a, c, g, or t
  misc_feature (266)..(266): n is a, c, g, or t
  misc_feature (380)..(380): n is a, c, g, or t
ctttataataatgtcaaataagcatacctgatatcagacaccctacaattgtgtactttctttttcctgggatatgtttagctcctttacaagaagatgaaagtgaaccaacttttataggaaaaaaatctgaaaacctaacaacctgccccttcaaagaaataatcaaagtaacatttttggttcaatatatttncccaaagaaatctgacaatatgatgcttacacagttttcttggcatttttttcaatgttcattatttgantgatgctgttaagaagccaaccaaggaaacacacacaatttataaaacttgcataaaggaaatgtgtgctaatgtgacttgagaactccagggaagatctgcttcctcttaggnaaactgtactgtgttctctttcattcatgtgttcaattattgaactaacatttggggaaaataggttagtctggctggagatgatgttttgtgg

SEQ ID NO: 301263 - DNA, 210 bp, Homo Sapiens
  misc_feature (19)..(19): n is a, c, g, or t
  misc_feature (175)..(175): n is a, c, g, or t
ccctactgaaaatgcatgntaagcactaaggccacaagagcttactctgttgagggtgaagttaaaacgcacgtttctcttagaccggtgatataatagaaggtcggttcttttttatctctacgtgattattttgagtgaaaaatttaaagctctttcacataccattggcttntcttctggagaaaggaacagcatatatagaggatg

SEQ ID NO: 301264 - DNA, 324 bp, Homo Sapiens
  misc_feature (208)..(208): n is a, c, g, or t
  misc_feature (288)..(288): n is a, c, g, or t
  misc_feature (300)..(300): n is a, c, g, or t
acctcctccctggggagagccacggtcagagcggcctcctcccaggacgaatgttgggctttggggctcagtgagagggatgtgcccaagggagggaaccgtatagggtgccaggaaacccttcagagcgcatgtccttatgagctggagacgaagctgagcaaagtgtccacacacacgtgcaccctcgcacacgcatacacatatnggcagccccacgcggcggctacccccacggtgcacgctcacactctgtgtgtgaaggcgcacctggggtctaggccacanaggccggccggntgcctgcagacaaaaggtggccgt

SEQ ID NO: 301265 - DNA, 146 bp, Homo Sapiens
  misc_feature (16)..(16): n is a, c, g, or t
  misc_feature (48)..(48): n is a, c, g, or t
ggcttgaacccctctntcaccctcagccccaaagcagccgctcaagtnctttcctcaagccctgggccagcacataaagggctgcctcactcttaggtgtcttaggtcacgggcttctcaggagctcagaagtgatcacctctggt

SEQ ID NO: 301266 - DNA, 249 bp, Homo Sapiens
  misc_feature (34)..(34): n is a, c, g, or t
  misc_feature (61)..(61): n is a, c, g, or t
  misc_feature (74)..(74): n is a, c, g, or t
  misc_feature (166)..(166): n is a, c, g, or t
tttagctcccctggaatgatttatttcacatcangccttcttaactctttggctgcagagnggaagtgcctgcntctttctctgcagagttgcctagggctggccaggtgaacagacacgctccctcctccccatcgtgccagccaggacacggtgtgtgcttatnatgcagggagttagaatactagccttttcatcacaacagtcataaatcctcacatagggaaatacagataatatacaagtagg

SEQ ID NO: 301267 - DNA, 424 bp, Homo Sapiens
  misc_feature (97)..(228): n is a, c, g, or t
  misc_feature (230)..(230): n is a, c, g, or t
  misc_feature (358)..(358): n is a, c, g, or t
agggagaaaagggaggacatgagatcagagggtgagggcatgtggaaggacattctccacatgagatggagagaattgcagggtttggggtgggaannnnnnnnnnnnnnnnnnnnnnnnnnnnnnnnnnnnnnnnnnnnnnnnnnnnnnnnnnnnnnnnnnnnnnnnnnnnnnnnnnnnnnnnnnnnnnnnnnnnnnnnnnnnnnnnnnnnnnnnnnnnnnnnnnnntnttttcctcccctccccagcaattaccgggcccacagtgtctgtgggtgtcaaggttaagaaccctggtttcaagctcatggtgactaggtctgacttttgtgttaataggttcacgttggctatgttngggacaactttagaagaggaaaggcagaagcagaggcacccttgatcccaggtgagaaataatggt

SEQ ID NO: 301268 - DNA, 163 bp, Homo Sapiens
cgggattgttgcctagtcggtctggagccagccgcttggcagcagaaatcagtcggtaatcacattgccacagcggctcctgggctgcgtgccaggcagtctgcatgaaaagtctccccagatcctcctccaaattaccttgagaaatctataaacgcggtac

SEQ ID NO: 301269 - DNA, 449 bp, Homo Sapiens
  misc_feature (67)..(67): n is a, c, g, or t
  misc_feature (141)..(141): n is a, c, g, or t
  misc_feature (327)..(327): n is a, c, g, or t
gccagtgaccgcccataatttctgaaaaatggcatctgaaaaatcacaggactaaataataactganttgttcaatttacattttaagtaaattattcccaaactttgatattaaagatgtttattcatttcaagccagtngggacatactgatcattacacattgcaatttcattcagcaccgcaaagaggaaccacccctgtctatgaaatgtacccttttctctggtgacattggcccatccttatgagcataataaaatcgcagaatcaaagcgctgcaagagatcttaaaaccacctaagtctaccactgagagcccaagantcttggaaggacttcacagctggcctcatgccttcactttatatctcagggcattttctctcatttgtaaagggacttgtccttgatcaaattggtaatgtcagccatgggaggagaaatca

SEQ ID NO: 301270 - DNA, 166 bp, Homo Sapiens
  misc_feature (51)..(51): n is a, c, g, or t
ctgggtggtgataacaagcagagcctcagaaattctgtaagggcccaagantgcaacacagaacattcagcaccaaatgttgctaaatgtttcaactactttgaaaaatttaactgttccaaagcacgtctgtgactatgtatgactaaatgtgacatttataaaa

SEQ ID NO: 301271 - DNA, 142 bp, Homo Sapiens
  misc_feature (27)..(28): n is a, c, g, or t
tcctctatcaaaggtgattccacccgnntcatccacccagaccactgccagttttggtggtgagggagactgagtgaagacggtctgcttgtcaccagtcaaaggccaaccaggagaggcctaaagactagtttggaaggtg

SEQ ID NO: 301272 - DNA, 409 bp, Homo Sapiens
  misc_feature (45)..(45): n is a, c, g, or t
  misc_feature (177)..(177): n is a, c, g, or t
  misc_feature (362)..(362): n is a, c, g, or t
  misc_feature (385)..(385): n is a, c, g, or t
aaccaatctaagtccactttcaaatgacacaatgccatttaaggngtagtgtgactactgtataaaaacaaaatagtcataattctttcctcctgtcttatgtgttattgctgtcatttgtttcacttattcataagcttatgcatatttacatgtatatgcttatgtatatatatncacctaagtatgcataattaaatactttgctgccattattattttgaacaaactcttatctattacatcaagaataaggaaaaataggaagtttttgttttacctttagttactcattctctgacattcttcctttacgtagtttctgaaactatatcattttccttctttctgatacatttctntttttattaattgcaaggcagtnctgccaaccaattctctcaatttt

SEQ ID NO: 301273 - DNA, 214 bp, Homo Sapiens
tggaaagtgaggctgtggggaaaataccagaaagggagagtcacgaaaacagagccaacagtttgtatacaaactctgtccaaatccttcattgacttctgaagtccacaagtactcatgctccaaagagctgaattatggacaaaataattgaacaggtatttcagttgcagggagggtttggagtctgaggtgagccaagttaactgcttgc

SEQ ID NO: 301274 - DNA, 463 bp, Homo Sapiens
  misc_feature (63)..(63): n is a, c, g, or t
  misc_feature (298)..(298): n is a, c, g, or t
  misc_feature (325)..(325): n is a, c, g, or t
  misc_feature (350)..(350): n is a, c, g, or t
  misc_feature (360)..(360): n is a, c, g, or t
  misc_feature (418)..(418): n is a, c, g, or t
gaaattctccttcattggtaaacaggcagtcttggagagacactgatgtgactcacgcttgtnttcatattcaccacaattatggttggcagaacagacagacttattaggcaattagaaggaaataaatccaacttcagattgatctaccaaaatactcagtctctaagacttgtgctagatatagtggaactagtgatgagaaaaagtgtgatttctttattgaagagccatcattgagttatcctaggtctccttcgagaaacttgtcaaaatgatccccggttagccttttgantttccataccaatggagacatattgtngccttctagttccttaaaacaaaantgtgataggntaatttttaaaaaggattccatatggctatgaacttattaaaaatacataaatatctnggttatgaaatactagagtgccttttaaaattgattcagttgatg

SEQ ID NO: 301275 - DNA, 233 bp, Homo Sapiens
  misc_feature (67)..(67): n is a, c, g, or t
  misc_feature (105)..(105): n is a, c, g, or t
tcaatactcaagagtcagctgatcatgtccttagatgcaccagaaatgatggtaaagcttgggagtncggatacctttgattctaattattagcgaatgcctcanctcagcatcactgggctatatggggcctaaagcagggcagagccaatcaagaacactcaaagacagacagatgcagaactgggaatggacgtgtagggacgggaagctggagaaagatgggagcatga

SEQ ID NO: 301276 - DNA, 245 bp, Homo Sapiens
  misc_feature (136)..(136): n is a, c, g, or t
  misc_feature (161)..(161): n is a, c, g, or t
  misc_feature (184)..(184): n is a, c, g, or t
  misc_feature (234)..(234): n is a, c, g, or t
gggtgactgcagcagggaggaggagtacgattactacacacataacagcttattgcctctcatgcgttcaagcacagctctatgccattcattacaacagacagccagggcaaactgccatagagctcactccagnaaaggcccggtcttgagtgcagagnctaaatcttctcacttacatgtnttcctaatgtttccttacttcatcttcccatatcgagaataacttggggngaagcaaaaca

SEQ ID NO: 301277 - DNA, 351 bp, Homo Sapiens
ttcccattcagaggacttataactattctagaagagctctcagctcctgcctctgctgctcccatcactgggtctctcaggttataagcctctgccgttcgactttgtggactccttttcccaagctcctctcctctgctcttctctctgatatcacacagatgtgtgcagagatgggcaggctggcgtgggctcctgcgcatgcacacaagctcctctgcaaaacctcccaactgcagctccacctccatggcgtcagggggtgttgagtgtagtctggaggactctccccctctactccagaagacaaagcagctgtccctagggctggggctcaaacacaagcttgtc

SEQ ID NO: 301278 - DNA, 363 bp, Homo Sapiens
  misc_feature (103)..(103): n is a, c, g, or t
  misc_feature (264)..(264): n is a, c, g, or t
  misc_feature (289)..(289): n is a, c, g, or t
gttgtgggtggcaatcagaggctcgtggatgacactaaggaagccgtgcatcttttctaagaaggataaaggaaaagaaagttcagagtacttcatgatattnttgttttggtagaggaaaaattggaaaatccacatatgaggcaatgggttctattttacattgtaataaaatgaatgctttgaactgtgcttctgttttctcatttttagattttttatctcctcacatcttcaaatctgtgagcatttgccaagattctnccttagtcgtacatatgggctcccngcattgcacaacacttatccttaaaagttacatgcaatttatccccttcctggcatggtcagacttcccttctc

SEQ ID NO: 301279 - DNA, 215 bp, Homo Sapiens
  misc_feature (23)..(23): n is a, c, g, or t
  misc_feature (75)..(75): n is a, c, g, or t
  misc_feature (77)..(77): n is a, c, g, or t
  misc_feature (118)..(118): n is a, c, g, or t
  misc_feature (125)..(125): n is a, c, g, or t
  misc_feature (139)..(139): n is a, c, g, or t
tggctcggcactctgtgccgttntgcaaagacacagaaactcgcttgtttccataaggaaagcccagtggcagtncnaggaggggtgccttcagcccctcctgccaccccaacctggngacaggncagagcctagccgntcccacctcccctccaccagcagggtctgctcatgtcctgctgaagctaaaatgcagctgctcgggggtgaaagct

SEQ ID NO: 301280 - DNA, 315 bp, Homo Sapiens
  misc_feature (230)..(230): n is a, c, g, or t
  misc_feature (245)..(245): n is a, c, g, or t
  misc_feature (272)..(272): n is a, c, g, or t
attttttatctaggcatgattcctgtttgtcctcattctcttggtcccttcagtcttttaggtcagttcactacttgccttttccttttctaaaataagtagtgtagcagaggtcaatgctccaaaacattcaaactgttaccaattactttactttggagtgagtaaacatctataccacagtgactagataaagaatgggcttaatctttccttgccatcccttaccncagtcaacacaagtngttgaaaaatgactgatgaaaaagcanggctgagaatgaagctaggtccttcataggaaccacgatgtag

SEQ ID NO: 301281 - DNA, 266 bp, Homo Sapiens
gcacgagcccaacctttcattgaactctacctttcctcatcttccaaatatacaaaactaaaagtggttatgttttatataaaggatgtattccttaacatttttcataatttaaaactcccataattcaagtatcatgctgatagataatggaagcttgtttgtttactggctaaagaggtggtaccaccatctccaaaatcatcttcaagatccagagtgttgcttggcagtggcatacacagttcattatatccttgaccttt

SEQ ID NO: 301282 - DNA, 166 bp, Homo Sapiens
ggaaagggaagttagagctagaaatgtttcctatcctgctagatgggagaccattgcaaggcttcatggactcagagtttggactcatgtgctcattgcaggatggtgatccttctacttgtaatgtcaaatcatgtggaatagaaaagtacctcctgacacaaag

SEQ ID NO: 301283 - DNA, 382 bp, Homo Sapiens
  misc_feature (240)..(240): n is a, c, g, or t
  misc_feature (318)..(318): n is a, c, g, or t
tgaaattcaaactcagttccccactccccaaggactctcgatagctcactccctcctgttctgctctctagctccagagagaagtgaggcagaaagatgctggacttaaagtcagaagacccctgactgtgtccaagttcaaggctcagtttgccttaatttcttcatcagcaatatgggcttcctaacttctgtcccacctatagcttataactctcagttgctctgaggactggaatnagatatcccatgtgaaagttcctacaaaccacaataggttatacaaatgtgaccgagtcattgtgatttttatcaggncttaaacatttagcatcttgtattgttctatctttgtctcactgatctggagtctctagatcca

SEQ ID NO: 301284 - DNA, 457 bp, Homo Sapiens
  misc_feature (139)..(139): n is a, c, g, or t
  misc_feature (295)..(295): n is a, c, g, or t
  misc_feature (395)..(395): n is a, c, g, or t
  misc_feature (428)..(428): n is a, c, g, or t
cgccttcctcctttttgcatttcgataaagttcaaaatggattcctatagtccattctgcattgctctaaaggaatactaaaggccgggtaatttataaagaagtttatttggctcacagttttgcaggctgtacaagnggcacggtgccagcatctgcttctggtcagggcctcaggaaacttccactcatggtggaaggtggaggggggccggcatgtcacatggtgagagagaaagcaggagagtgaggggaggaagtgccagtctcttcaaataaccagctctcacatganttaatagagtgagaactcactcatgaccatgggcagggcattaagccattcatgagagatccatgtctgtgacacaaacacctcccactggctcaatctncagcattggggtcacatttcaacatgggatttnggggggacaaacatccaaactgtatcact

SEQ ID NO: 301285 - DNA, 467 bp, Homo Sapiens
  misc_feature (65)..(65): n is a, c, g, or t
  misc_feature (142)..(142): n is a, c, g, or t
  misc_feature (377)..(377): n is a, c, g, or t
  misc_feature (399)..(399): n is a, c, g, or t
  misc_feature (405)..(405): n is a, c, g, or t
ccgagctggaggtgagccccacagcctgcagagcagccctggactcgtgagccccatcgcaccantccggtgggacttcagagatgtggaatccagcctcctctagtattgcagagctgggggatgggagctgcggattctnacaccacagctgccttatatatgccagatgggctggggcaagacacacccctttctatgaaatgagcagtcagtccaaatagatgagctaaagaaaggctgtgggagggtcccagctctagcctgaggctacagactggcttccagggtactcaagcagctgcctctgggggaggggtcccaggtatgagaggcagggctcagaatctaggccaagcctccacaggacccccctntggagagctcggagcagtcttngggggnagggtcagcaggcagcaagtgcactaggagcatattttacaaggcacccaatatttgcatct

SEQ ID NO: 301286 - DNA, 406 bp, Homo Sapiens
  misc_feature (25)..(25): n is a, c, g, or t
  misc_feature (38)..(38): n is a, c, g, or t
  misc_feature (95)..(95): n is a, c, g, or t
  misc_feature (311)..(311): n is a, c, g, or t
  misc_feature (341)..(341): n is a, c, g, or t
  misc_feature (348)..(348): n is a, c, g, or t
gccgtcggcttccccaagaaaattnaaagcggaagctnggttctaggcagatgaatgctcccaacccagaagggctgggggttgttggaaagccnttaagactcacacctgagtcttaagtccagcagccacgctaatcgtttttaactggctgaagggtgcccgatattttcctccaattctaaggaaggataggacagaatagcaagcaaaagtggtcaaatattactcacggctttagaggtcccttcttggtcgccaaaatgttaccgggggggtccttgctcccagagctcccaagatggtggctngctgcttccaaaatggcggtgggccacttncaagatngtggcaagcctcgggttctctgattttgggttcttggcctcacgggattacaaggaat

SEQ ID NO: 301287 - DNA, 266 bp, Homo Sapiens
  misc_feature (197)..(197): n is a, c, g, or t
  misc_feature (228)..(228): n is a, c, g, or t
cccaactctggctatgggcctttccccccagtagcactggacaggttccacaggttccagctggacctgcccccaagcacaggtcctggccatggggaggatgatacgggggaagggtaaagtggacaaagaactgggcagggggaagaatatcgggacactggtcttctgtctgccacggacactctaggtgactnagggtaagtcatgtctcctcttatcagcctnagttttcccctttattgtaaaaaagtggagccattgta

SEQ ID NO: 301288 - DNA, 363 bp, Homo Sapiens
ggatcatgaggtcagggaatcaatcgtttttaggcagaaaaaaagaggacaatcaattaaaacccaagatggaaccattcccctggaattctagcttctggctctgcctatgaattggaccgttcaccaaaaatgaaatttttacaacagagatgagcctttcatttgctcctagttgaagctgcaaatcccttgtgccaagtattttgctggtgtcaattaaggcaggcttctcagattgccacagggaaatcacgataatatcatactctcttcagaaataacatttaggatttttgttagggaaacaatcaaataaagccctgacaaaattgtttctaggggaaaacatgcctgtaaggg

SEQ ID NO: 301289 - DNA, 328 bp, Homo Sapiens
  misc_feature (60)..(60): n is a, c, g, or t
  misc_feature (253)..(253): n is a, c, g, or t
  misc_feature (314)..(314): n is a, c, g, or t
gagagaactaaggggcaccaccctcgtggggaaagcaagagatgcaaaactccgcaactnctgactctggaatggtgaaaggatttgtgccactcagacgcctcccgggtttgccacagccactcgaaggtgggagcaactgagaccacaggcgttggacaccgtggcaggaaacatagggcaccttctgagaagggaccctgacgtgagagctctgaacaccccatgccccatgcccacccagcacagtttnggaggacaggacccgctgggccagcactctgagatgacagagctggagaccagtgtccctntgcccttccgccca

SEQ ID NO: 301290 - DNA, 452 bp, Homo Sapiens
  misc_feature (27)..(27): n is a, c, g, or t
  misc_feature (49)..(49): n is a, c, g, or t
  misc_feature (196)..(196): n is a, c, g, or t
  misc_feature (332)..(332): n is a, c, g, or t
  misc_feature (365)..(365): n is a, c, g, or t
  misc_feature (367)..(367): n is a, c, g, or t
  misc_feature (394)..(394): n is a, c, g, or t
ctcatcctggccctcctcttcccagtnccaggtgccaagcacctggcgngtcagtcccccactgagtggtgtcttcatagaagtggagattccttttctgtttctctttcttgttgttcgtagttgattttagaaatgacacgggggctagagctttccccctgccctctttatcaggaactctttttagcttttnctgtaactttttaacaaattgctgatgttatttgcaaaaaacagatgatacagaattgtgtgaagcagaaacttcttctcccaactcagtcacctcttttcagggtgacctcggaggcaaaagtggtatgtatttnccattcttttctctatgcttataaatatatttnangaattcagtccatttattatttatatnggtatatctggtaaagcgaaatacagtttcttacttttaataatcatattgttgcaca

SEQ ID NO: 301291 - DNA, 539 bp, Homo Sapiens
tgaagatgtgtcaggagaggaaattgtccagcttcgcaatggaccattttccttgggcttttggatactgctttttcatttaaatcagtgcctgggtgtgggcttagatttttcaggggcttcataggctacatagttgcagttgcctttagagacataaagaggaacaaaaagctctgtgcttgaataacagtctgttttgaccaggaaaaaaggcacagatggaggaaaaccctgaaggtacagcagggatcccaaggcccaaggcagggagagaatcttctccgcctccttgagtcctcagacctgcaggcttctggtgctcccacttagatgcctcgctgtctttttatttcattccagaaagaattccatatattatatttgacccttccgccaatcctatgaagtcggacagctacctgattttacagatgaggggaagggggctgagcagggctgccagaactgggaaccaggaggccatgatgccagagtaacaactggggaggctgagcccacacgtgcccatttggttt

SEQ ID NO: 301292 - DNA, 528 bp, Homo Sapiens
ttcaaaatgcaatcatgcccttccaacagtccccaaaagtcttaactcattctagcattaactcaaaagtccaagtccaaagtctcatttgagacaaggcaaatcccttccacttatgagcctgtaaaatcaaaagcacattagttacttcctagatacaatggcagtacaggcattgggtaaatacatccattgcaaatggaagaaattgtccaaatcaaaggggctacaagcctcatgcaagtccaaaatccagtagagcagttattaaaccttaaagttccaaaatgatctccttcgactttatgtctcacattcatgtcatgctgatgccagaggttgactcctacagccttgggcacttccaaccttgtggctttgtagggtacagccccccttcctggctgctttcacaggctggcactgtctgaggcttttacaggtacaaggtgcaagctgttggtggatctaccattctggtgtttggaggacagtggccctcttctcacagatctactaggcagtgcc

SEQ ID NO: 301293 - DNA, 534 bp, Homo Sapiens
  misc_feature (314)..(314): n is a, c, g, or t
  misc_feature (473)..(473): n is a, c, g, or t
  misc_feature (497)..(497): n is a, c, g, or t
gggaaccccacttatttttaggcttcagctcagacgctacttccttcagaagtccctttctggcacactaccttcctcatgtggcttatttgttcctcttgcaccagatcactccgcagcttttgagtttgtatatggcaacaatgaacaaggtataatcctcgctgtagataaactcatcatatttgtttttctccatggagtgaaaatgttttaagctcatataatgactatggtcagggaaaaagccacacaaataattaggatatgttgtgacagtgcacaaatagaaacacacataatgtgcttgagancatgataaatgccggttttacctttccttccctcacctgaccaagcttagcgagacgtgtggcatcttcctcatctttgctcttcagtgccaggtatggaataggtccattatggacaggtgccttattgaactgagcagagccacgaatgtcaggctnggagtgtggtcgctggagtcaggncttggtttacatcctggttctgcttcttaaccactct

SEQ ID NO: 301294 - DNA, 326 bp, Homo Sapiens
cggcaccagggaagccaatagtgtaactctcagtctgaaggcctaaaaaccaaagcagctgctggtgcaagttccagagtccaaaggccagataacctggagtccaaaggcaggagaagaagggggtgtcccagttccaggagagagagaaaattcaccttccctctaccttattctattcaggttgcccacattgagggcagatcttccccactcaattcactgactcacataccaatctccagaaataatgctttaccagctattcaggtatctcttaatccagccaagttgacacctaaagttaaccatcaggtcatcctttg

SEQ ID NO: 301295 - DNA, 357 bp, Homo Sapiens
gtgaggctagtagatataaagaactgtgacagacctgagatgtcaacctatttgcaagccaacaaattagctcgttggcagatgctgacaaaagatagcagcttcctggatcagagccaaaagactttactccagcacggcaggcagccttaagtttcatgtttacatcatttctacttgtaccccaagacccacgggcttgcttcatagatgaggaaccacaatcttttattataatgggctgcaagtgaacctactcaatttctctcttggagggaggcattatcttttatgatactggagagtaagcacacctgagccctgttctggaaggagacactatctctatgttccagg

SEQ ID NO: 301296 - DNA, 268 bp, Homo Sapiens
  misc_feature (167)..(167): n is a, c, g, or t
  misc_feature (186)..(186): n is a, c, g, or t
  misc_feature (193)..(193): n is a, c, g, or t
  misc_feature (223)..(223): n is a, c, g, or t
  misc_feature (233)..(233): n is a, c, g, or t
  misc_feature (248)..(248): n is a, c, g, or t
ggagaagaacagagggaaaaggcaaagactagatggagagcagccactgctttaacacacagaatgctttcataaagacaacatggattccactcagagaaacctccttcaaccactacatttacagctacccttcgtctcctttcaaatatgaggaaaataatttnctgagaaataatgtatctngattttntaatcagaaggtaggccaaggatgattcanctatataganggaaaaacctcaagnaaacacactgctatatctaa

SEQ ID NO: 301297 - DNA, 260 bp, Homo Sapiens
  misc_feature (38)..(38): n is a, c, g, or t
  misc_feature (47)..(47): n is a, c, g, or t
  misc_feature (158)..(158): n is a, c, g, or t
aaaaactaaagttgagacaaacataatggtagtatttnacagttttnttagcaagcctgccaatctgtagaagctcattacagaaatgttaattatgaaacacctttgataaaacgtgaaatagaaaatgtcatattttgacatgattttctattgtnataggcattttagaatataggtagtttacttgtttattttgttggtaaatccctacatctgtgttttgatacttatttcctctggtcatccctgttcttttt

SEQ ID NO: 301298 - DNA, 875 bp, Homo Sapiens
gccttcagctgctgggcggtccaccccttcggagcccccagctcaggtttttagccttgctgggccttcagctgctgggcggtccaccccttcggagcccccagctcaggtttttagccttgctgggccttcagctgctgggcggtccaccccttcggagcccccagctcaggtttttagccttgctgggccttcagctgctgggcggtccaccccttcggagcccccagctcaggtttttagccttgctgggccttcagctgctgggcggtccaccccttcggagcccccagctcaggtttttagccttgctgggccttcagctgctgggcagtccaccccttcggagcccccagctcaggtttttagccttgctgggcggtccacccctttggagccctcacaaccttggcctgcagccagtgacggtcgttagtacctgggagctcaccctaggtacacgtggcctcatctgggcgcaagcaactctctgtgtacgtagaagccactggggaaaccgcaaagggatcaggccgttggcgactgaggggagctggagggtctttgtggtccatgtttcgctccatctcctccctgaggaagggtgtggggaggctctgttctggcctgggcggtgccagcctgagatggccccagctggtttctgcagtcggctgaagtccattcggggaaacttcacgagactcctcaggggagctggatgccactttctagagatgggcgccgcgtatccatgaccccatgatgccctggtgctcggaggggtccgggaaacccggtttttgacccccccttttgagggtaaaaaggggggcgcacggggcaagaacgcccattaaaaaactctctgggga

SEQ ID NO: 301299 - DNA, 886 bp, Homo Sapiens
  misc_feature (132)..(346): n is a, c, g, or t
  misc_feature (455)..(474): n is a, c, g, or t
  misc_feature (843)..(843): n is a, c, g, or t
tacctagtgaaccccacttaaagaataaggagcatttgaatctcttggaaaaggccatgaagaataaagcagtcaaaaagaagtcctccatgttggtgccaaggacttgcgaggggaaataaaaatgttatnnnnnnnnnnnnnnnnnnnnnnnnnnnnnnnnnnnnnnnnnnnnnnnnnnnnnnnnnnnnnnnnnnnnnnnnnnnnnnnnnnnnnnnnnnnnnnnnnnnnnnnnnnnnnnnnnnnnnnnnnnnnnnnnnnnnnnnnnnnnnnnnnnnnnnnnnnnnnnnnnnnnnnnnnnnnnnnnnnnnnnnnnnnnnnnnnnnnnnnnnnnnnnnnnnnnnnntgttactcatcctctctgaaagcaaaaaggaaaccctaacagctctgaactctggttttatttttcttgctgtatttgggtgaacattgtatgattaggcataatgttnnnnnnnnnnnnnnnnnnnnggtagaaatgcaatcaccagtaaagaggtacgaaaaagctagcctctctcagagaccggggaggcagagtactactagaggaagtgaagttctgatggaatcatgcctgtcaaatgaggtcttgaagcggatgcccaaataaaagagtatattttatctaaatcttaagtgggtaacattttatgcagtttaaatgaatggaatattttcctcttgtttagttgtatctgtttgtatttttctttgatgaatgattggtcatgaggcctcttgccacactccagaaatacgtgtgcggctgcttttagaaactatggtgtctgggtcacttattttctctaaaattatctcattggcctgggcaacagnctttctcctggaaacttggccctaacaccatatggtacatggg

SEQ ID NO: 301300 - DNA, 762 bp, Homo Sapiens
  misc_feature (65)..(172): n is a, c, g, or t
  misc_feature (197)..(226): n is a, c, g, or t
  misc_feature (253)..(281): n is a, c, g, or t
  misc_feature (299)..(503): n is a, c, g, or t
ataaaatcttgtcatatttgcatgtaatctactcacatcctccaatatacttatttattattatnnnnnnnnnnnnnnnnnnnnnnnnnnnnnnnnnnnnnnnnnnnnnnnnnnnnnnnnnnnnnnnnnnnnnnnnnnnnnnnnnnnnnnnnnnnnnnnnnnnnnnnnnnnnggccaaaactagggtccatataccnnnnnnnnnnnnnnnnnnnnnnnnnnnnnnccccctgaggcagtcttgctgtgtcannnnnnnnnnnnnnnnnnnnnnnnnnnnnactgcagcatcaagctcnnnnnnnnnnnnnnnnnnnnnnnnnnnnnnnnnnnnnnnnnnnnnnnnnnnnnnnnnnnnnnnnnnnnnnnnnnnnnnnnnnnnnnnnnnnnnnnnnnnnnnnnnnnnnnnnnnnnnnnnnnnnnnnnnnnnnnnnnnnnnnnnnnnnnnnnnnnnnnnnnnnnnnnnnnnnnnnnnnnnnnnnnnnnnnnnnnnnnnnnnnnnnaccatggttggccatagagctttttttatcccctgatttcctgtccgtgtcattatgttttcctttttcactcagaaccatgatttcctgactgcaatggtctgtgaacatttttccccttacaataaatataatacatactcaccagataaaaatgtaaatactgatgaggaaaaattgtaactaacattttcggggctcttgtgggttagggactttatactaactcattgaagacagacagtagcctgaaagaaag

SEQ ID NO: 301301 - DNA, 896 bp, Homo Sapiens
  misc_feature (204)..(213): n is a, c, g, or t
  misc_feature (754)..(754): n is a, c, g, or t
  misc_feature (780)..(780): n is a, c, g, or t
  misc_feature (835)..(835): n is a, c, g, or t
tttgatattttgatagggattgcactgaattgtaaattattttgagtagaatggtcactttaggaatattaattcttctgatccatgagcatgggatgtctttccatttgtgtcctcttaagttttctcatcagtgttttgtagttttccttgtaagagctctttcacctctttggttatatttattcctaggtattttgttannnnnnnnnnggtagctatgtaaatgggattactttcttgatttcttttacagctagttcattatttacgtatagacatgctactgatttctgtacgttgattttatatcctgcaattttactaaatttgtttatcagttttaacagttttttggtgaagtctttaggtttttctacatacaaaatcatgttgtcggcaaagaggtacaatctgacttcctctttttccaatttggatgccttttatttctttctctttcctgattgctctggctagtcaatcattccatatttagcaaaattgatatgaaggtcgaaagaatcatggaggaagtaattaaccatattatccagagtttgctgtacttggaactgataaaactgaaagtatccagtaagtacagactaaatgtaatcataaacttcccttttattgcataagactttcaaacatgctgtggttgcttttaaacacaagtaggttgggctgtaattgtgtaagaagcaacaagtaaatggtttgcacaagcacttttagaaaggttaagacnactggaccacatggttggtgcccaangacatttttaattcatatcctgggtgacaagtgagcattgaaaacccaagactcngtaaatggagaagaatttgaagcacacaggacaccctggagcacagaagattagaaaattg

SEQ ID NO: 301302 - DNA, 652 bp, Homo Sapiens
  misc_feature (89)..(116): n is a, c, g, or t
  misc_feature (132)..(443): n is a, c, g, or t
  misc_feature (450)..(485): n is a, c, g, or t
agttgttccctctgcatgtattttgcatatctaatgttcctgtttttattaattattttactatagtgcagactctggatatcctttgnnnnnnnnnnnnnnnnnnnnnnnnnnnnggagacagggtctcannnnnnnnnnnnnnnnnnnnnnnnnnnnnnnnnnnnnnnnnnnnnnnnnnnnnnnnnnnnnnnnnnnnnnnnnnnnnnnnnnnnnnnnnnnnnnnnnnnnnnnnnnnnnnnnnnnnnnnnnnnnnnnnnnnnnnnnnnnnnnnnnnnnnnnnnnnnnnnnnnnnnnnnnnnnnnnnnnnnnnnnnnnnnnnnnnnnnnnnnnnnnnnnnnnnnnnnnnnnnnnnnnnnnnnnnnnnnnnnnnnnnnnnnnnnnnnnnnnnnnnnnnnnnnnnnnnnnnnnnnnnnnnnnnnnnnnnnnnnnnnnnnnnnnnnggtctcnnnnnnnnnnnnnnnnnnnnnnnnnnnnnnnnnnnncttggggtaatttatgtccagcttaagtacctgaacagtttccggaaatgtatattttttttctgagaggcaaaggatgtaaacagcttctaagtagctttaatgtttctgtacagaaataaggttacgactggattacatatttgttaataagcgaaactctatac

SEQ ID NO: 301303 - DNA, 941 bp, Homo Sapiens
tcattttccagatagataaaatgaggcttggagaggggaggtctgtgggctggatgcacttctctgtactcttggaccaaagaaagagtcctaccatacataccatggtatacttaccatggtgtaagtaccatggtgcagggtgttggggcttctccctgacttaggaggccacatgtacctggaaggtctatttccactggggtcaaatcactcaaaccctttgactttccctccaacctccagcccccagccaatatcctatctggagaattgtagactgggagaacatctgcttggtccatgtcacaagcagttgtaaagaacactgaggcactgggttgagtgtgagaaccacttctgtggggaggggtgtgccatattgtgttggggtgtctcatctccttagctttggccaggtgatctagcacagcaaggtgggtgcagggatttaaatgtctagggcttttcccgccctggtgacactcttactgaggacatttgctttagaattgacgccccttgaaagaaaggagaatagtagatttcatgctatacagtataaatacagtcattagttgggggaggagggcagtgagcacagtggtccctgcagatgatcccacagcccttggactggattctgaaccctgcaccgccagccttcaccacccctctcctcacagggctctgtggtatatgactgcttccaggctgccctatggagtgaggtactaatctgggcctatactctgatcaagggacaaaaaggaactcaaccacacacagcagctgacatgccctgaccatggctcaacgtgtcaatagaatggtgacaacgggccatccggggatctaaatggctcttgaaggaaaacgaatttaggcctcccccctggaatggaattcacgaaccgggggaccgccacaaaacccgggcg

SEQ ID NO: 301304 - DNA, 435 bp, Homo Sapiens
ttacaatgtaaagagttgtataagggcaacttgctgttgcctttttagggaatttctattgttttccagatttaaggcagaatgaaacataactagccagttattgaaaattgatttatttatggattttcagaatttcctttgccatattttcccattttatgatctccagcattgtttgcacattgttttcattactgcactttgttataattcgatcatttataccatccatattctttcttttcctacagattgggatatctgtagtccgaatttttaactggaatcaaaaccggatgttgggggtcaccgctttgtattattgggacctcgggagttacctaaattcaaaatcgccccccccaaaagtcaggatcaacctaataaaaacggcttgtacaggcgtaaaagatgtcatcgcggggaaaaaaa

SEQ ID NO: 301305 - DNA, 1140 bp, Homo Sapiens
caaaaatgagtttcttaggattcaattgcccacagtacctaagccatccctgaggcttcgcaagggaaagaagtgactaatcataggctgatctttttctcacttttttcctcacataaaataagtttttttatgataaagtccttggagttgctgtgcctatttttcatgtgtagtatcttatttttatttctcagtctagtcaactctgctgaatgtgtatataaggtgtcattcatagaatttccacaggcttaaggcctaaccattgatggccaggggctttctagaactgaaacaacttcacagatttttgggggtcatgattacccatttttaagatttggttatatatgtgaataatcagtacaaaaagtaactgattttaatacaaaccaatgatatattttaaatgttattgtacagaatgtcacttaacttttaaatttttttctgcttgctgccagtataacatgcatacaatattttctccatagtcacgatcatctttgatataacaaaacttattttaattctagcatctacagcttgtttaaatgcaccgtctttatgaatgatgaaactgctaacagtaggttctttaaagacacttgttaggaacgtggaaaggaaagaagatagaacctctttgggtgccaggcgtggcctttttggtcattgtagaatatataaaacaagtgggaaagacttcctggccaagaacattatacaagatgttcacctgggggggaactttgattttcctaaacacaggggataaactaaggaaaaaacaatttgggccgtttttcctgggaaaacataacccagctcttaaaagggggattctttttttcactcggccacctatctaataaagatttgcccacaaccctgtttttttaggtggaccgccctaagaaataaaagtggggctaaactttctccggtttcactactcaaagaaggaaaaccctcccggggaagagggtcagtcctctgagagtcaagcaaaaaactggcctccacgaaaatttttttgttcctatttcccacaaacaaataattcggcttgtgagacccctctttaaaaaacgacgcgtcattgtacttgttttggaggcagccccacttgtcggc

SEQ ID NO: 301306 - DNA, 477 bp, Homo Sapiens
  misc_feature (314)..(335): n is a, c, g, or t
tcagtcgtcttgcagagtaacagaaatgttatgcattgaatcaactagggtgtacttggagttgattccgctgggaggggcaggggagaggatgtttctaaaataatgtgcattgtactttccttttgtagacttaagtctaatgaatgagaagcacttaataggaccacaaggggatccttgttccatgcttagatctagcatgcagataaagtaagccccttcccacattcctccatgggaaggtaacttaatttctctccttgtcttgtttctttctttcctgacttgtatctcccagagcctgcagtacnnnnnnnnnnnnnnnnnnnnnncccttgagacagggtcttgctctcttatccaggctgtagtgcagtagtactatcatgctccctgtagccttgaactcctgggctcaagtgatcctcccatctcaactagctgacactacaaacacctgttagcatgcctggc

SEQ ID NO: 301307 - DNA, 976 bp, Homo Sapiens
  misc_feature (422)..(590): n is a, c, g, or t
cgggatggagatgagaaacgctgaggtgccctggtaccttgtggaggcgaaagcaggccagaggggacacgggggacagcagagagggcggcaagggagacacctgggtttctgtcttgagcacgcaggtggctggggtgctatgtcctgagaggcgtaagtggagggcagagtttggccttggacatatagaggtcacagtggccagtgggacaaaccaggggacgggcctgtggcacctgggaccctggccccagccctgccgcgcgctgaccccgccccgggcagctgctggagctcttctgccagaccaagggctgttgtgtttgcagcttgtgcaccatgagtgagggtcacctcctcaagtgggtgctgccgccaggagcaggagggggccggaccccccgcagcctggccaccannnnnnnnnnnnnnnnnnnnnnnnnnnnnnnnnnnnnnnnnnnnnnnnnnnnnnnnnnnnnnnnnnnnnnnnnnnnnnnnnnnnnnnnnnnnnnnnnnnnnnnnnnnnnnnnnnnnnnnnnnnnnnnnnnnnnnnnnnnnnnnnnnnnnnnnnnnnnnnnnnnnnnnnncctctggtggctgacgctggaccatggcctgtacccccggaggcggcaccttgtctgttacccttcccaagcctccttgagccggggcagcttgaacacccacaaagccttgggcactcatttcgcgcctaggaaggaagaacaaacggttcccttcccggggaccttccatcccccgactgggcgcaaccgccccgttcccatcgcccaccccctcgaaacccttcctcaaacccgcaccgctgtttcccccgctctacctccttgcccccctatttcttccccatccttatcccaaccccgcgctggtaaccccctttgcgcccccccctctctttatgacaccgaactctctgagtacctatatcctcccatctgctgaactc

SEQ ID NO: 301308 - DNA, 556 bp, Homo Sapiens
  misc_feature (249)..(249): n is a, c, g, or t
  misc_feature (259)..(259): n is a, c, g, or t
  misc_feature (456)..(512): n is a, c, g, or t
ggccacccatgctgatataatgttaataataactttatatttgggtactgaatgctgatccctatagttaatgtggtggattgactagtattgctggctccgtggtagccaggatggatgcccttttgttttttagcagttctctaggggaactagcctattgttttctgtaaacagcacatatcatgaagcggcctctttgggaaatttgatgtatcgtctgtgtactgtatgattgatgtgactcantgattggtgntcttcctttggctgctaggcctcctgccttggggggtactttgaaccagatacctccctcttctggctccaggcccgaattccccgccaaccaatccggggcaaccccgggggcctccctgaaaaaccagccaaggtttcaaacgcttccaaaaggggcaaagggttcccttttggtaaaccccactccatttggannnnnnnnnnnnnnnnnnnnnnnnnnnnnnnnnnnnnnnnnnnnnnnnnnnnnnnnntaaaagggggaccaggggggcggggaaataaaaagttttttggt

SEQ ID NO: 301309 - DNA, 111 bp, Homo Sapiens
agggggtcccacccactcattttaagacccgacctggcagacaatggcggcttttgcgcgattaaaagccgcgcaaacgccgggtaaaaattattgggatagcccgcttgt

SEQ ID NO: 301310 - DNA, 344 bp, Homo Sapiens
  misc_feature (218)..(229): n is a, c, g, or t
tgcattgatagcacaatgtattaatatagattgtattttaatttgggacaattagtgggaaagggctgaactgtcccttaactcagtaattgattattattattccattttactgattcaaagtgaaattattaactctagtcaaagagctagatagtaacgaagccaagattgtaactcagccctgtcaaatcccagaaccagtgcctttatatgcnnnnnnnnnnnnctgtttctagttgcaagctaaccactcccagcagtcatacctttaacccatagttatgaccttgccaaccatacccaatgtgagtcttgccactagaaccagtgcctttatatgc

SEQ ID NO: 301311 - DNA, 102 bp, Homo Sapiens
ccggaagaacccccgagggagaaacgcctcccccgcccatctgggagtcgcagaacacacccaccggtggaaagcggcggaagagcacggagcggcccgccc

SEQ ID NO: 301312 - DNA, 493 bp, Homo Sapiens
gagtttcaaacacggaaaggaacatcccaaatgtttattgtatccattctttctcctaaatgaaaatgtccctgaacctgtttttctctgtcaacttagtcaaacctaattaggccactgggtgtgccgtgtgtggttgcacaggctgtgcgatgcactattccagaggacagcatcacagaggctatgacatgaatgcagcttccgcccctgggagtaggaaactgggtggccctaccttcacagcacctttatctagaaaacttctttcttttctgatataagtcttatgagaaggcaaggcttaaaagctggtattgcttctgcccatctatatcaataatgcagaaggcatgggccagtaccctgatacctggacatataattctaaaaccacacagtgggagataggacatgggcatcaatgccagggtccagaccttcagttgaggaagcgggattaaccaaaccttggattcagcaggcatcaata

SEQ ID NO: 301313 - DNA, 129 bp, Homo Sapiens
gttagcatccttgaaagcagaaaaatagcaatgtaaatgtcaagatgcttctgcctttaaccaagaataaagaaagcaatccactaaaagtacttttcaaacacataagctcccaaaactttgcttttg

SEQ ID NO: 301314 - DNA, 301 bp, Homo Sapiens
  misc_feature (76)..(103): n is a, c, g, or t
aactagcagagacctcccatactgttcatttgattctagggtttgttgccaatttcttttcaatcatcatcacatnnnnnnnnnnnnnnnnnnnnnnnnnnnngcctcccagtgccacctcagcataaattgagcaacagctctccccatctctgccttacataataaactacaagctaattaaactgtgaatgaatgtgataacttgttacccttaaagatattcacagagatagatgaacttcattttggaagctggaaggtaaaattcccctccctgggaacccctacaggagtcggc

SEQ ID NO: 301315 - DNA, 208 bp, Homo Sapiens
gaatccgcggtctgctgttccgattcctaactaacacggaggttataagtaggggcttggtgacaaaatatgttgcgtgaaattcatgggaaactgcgtcctatgttgttcctaggaagattgtaatggtgagggtggttattatcaacacgcatgtcgattccgcttttaaaaatcgggccaaggcgcccgtgacgttatttatgtt

SEQ ID NO: 301316 - DNA, 250 bp, Homo Sapiens
cccattggagtatttgggtcccaaatagggagaaagttggcattaggaataggaatggtgggaaaaataaaacggatgccacctggcccatgaagggaaaaggggagcccactgggtgacctcccacccagggcaaaaagaggagggctgccgctaggagtcaataaagcgattggcttaatgggcgaaaaaatatgcctgggtgggtggatatatggaggaaggggaatattgccaggatgagggtgga

SEQ ID NO: 301317 - DNA, 303 bp, Homo Sapiens
tttacctctagcattcctcatagtccttgctgacgagggcagctgtgatatagaaaaataacatccctttatggctatctttgccaaaatagcttctcactctgcaggcccagtctgatccaaacctcagaatctcctggactaacaacaactcaggccattgtgatttagaagtatctcagtactagagaagacaccaggatggccaggagacaatggcagcattagaaggccctagttgaacagaatatataatttcatttaacagctgctgaagctcattacgctggcatgaatgattct

SEQ ID NO: 301318 - DNA, 137 bp, Homo Sapiens
agtccttgacttaaaagctaaagatcagaaactattgtcatcttccattcttactcctcaggttgactcataaacctagaatccccccctgccaaatatatgcacccacaatatagccgagaatgctatgaaccttc

SEQ ID NO: 301319 - DNA, 161 bp, Homo Sapiens
gctggtgctgggacagctgtcctgagagcgtgaggaaagggtcacaccctaaggacagtggagcagaacacaggaaggaccctgggcctttgctgacgcagaacgcgggaaggaccctgggcctttgctgacataccagccccagactacttaaattcagc

SEQ ID NO: 301320 - DNA, 299 bp, Homo Sapiens
ttggataatgtgatgcctccaggtttgttctttttgcttggtctttctttggctatgagagctcttttttggttcctcatgaaatttaggattgttttttctagttctttgaagaattatgataatatattgatgggaattagattgaatttggagattgcttttgcaatatagtcatttttacaatattctacccatccacaagcatagggtgtgtttccatttgtttgtgtaatctgtgatttctttcagcagtgttttgtagttttccttgtagaggtctttcatgttcttggtat

SEQ ID NO: 301321 - DNA, 125 bp, Homo Sapiens
ggacgcgtgggttaaaatgacatgatattcatcagagaagggtttagaaattaacagccacagttaattttcatcttttgggaggtttcaggcctataaatgagaatttgacctagagtctcttg

SEQ ID NO: 301322 - DNA, 494 bp, Homo Sapiens
ccacgcgtccgagcaaatctcagacctgtatgagatgacttttgtaatttgagtctttttttctttgtcactgtagctaaaagtttgtcaattttattgatcatttcaaacaaatccaacttttggatttattaatttttctgttatttttctattcatttacgtatgttcttcattctttccttctgcttcctttggttttagtttgctcctctctacactttcttaaggtgaaaagttagattattgaattgagatctctttttttaatgtgggcattcatagcaccacttttgttgcctcctataaattttggtatattgtatttttgttttcattcatctgagtttcctagttgccctcgtgatttcttctttgaaccgttggttatttaggagtttgttaatttccatatactggtgaattttctgaatttatttctgtattgatttgtaatttcattccaagtgatcagaggacatagtttgtataat

SEQ ID NO: 301323 - DNA, 473 bp, Homo Sapiens
  misc_feature (72)..(83): n is a, c, g, or t
  misc_feature (303)..(318): n is a, c, g, or t
agaaattggtgttgtaactacttttgaagatagaatacttgttatattaatttggttttattattcttgccnnnnnnnnnnnngtagaaaatcatggctttctttttcttattctttgagggacagggtctcactctattgcacaggctagagtgcagatcacagctcactgcagcattgaacgcctgaactcaagcagtccttccacctgaggttcctgaagcgcttgtgactttttatttcttcatcctttccttctctctctctccctccattctgtccttcttttattcacttgattcnnnnnnnnnnnnnnnngacttttaagttcaggggtacatgtgcaggtttgttacataggtaaacttgtcatggagatgagttttagagattattttatcacccaggtattaagcctactaaccattagtgatttttcctgatcttctcccctcccaccttcacctttagct

SEQ ID NO: 301324 - DNA, 209 bp, Homo Sapiens
  misc_feature (83)..(137): n is a, c, g, or t
gcgtggtccctactcttaaactatggccttgtagcaactcatctgaataccgaagatggttggtgctccatgacctctgttannnnnnnnnnnnnnnnnnnnnnnnnnnnnnnnnnnnnnnnnnnnnnnnnnnnnnngtgtatgtgtgcagtggtgtgattgtagctcactgaagcatctacttcttgggctcaagctctcctgagctc

SEQ ID NO: 301325 - DNA, 365 bp, Homo Sapiens
aataatcttgtttacctctccttcagacgctccaggggccctctgtagcatccaaaagttaggggtcaggaaagacaaccttgaaactcaagtttgattttgggaagactgttaaatatgttagaggttcaaagcacttgatattgtgaagtagaattccagattactgtaagtcattttatttagtcaaaatgatgactcaataattttttaaaagacaaaaaccattcattattgtttactatttttcttaaagagcaaagtcagtgccttaattaaaaccttgttgtgcttttatttcaatgctcaatttatggaaaatccatatgatacctttttgagggttagttcaatatgttcacaca

SEQ ID NO: 301326 - DNA, 206 bp, Homo Sapiens
tcttcaaaagattctaattatacccctgaaactctgagaggtttagggtgtctgctgagacagagaagagagaaaacccttaagcaactcctctcaactgtctttgggggttgatgtcttggtcaataactgtctattgaactcctacttctccaaaactataaatgatgtataaaaataaagtccaaatggcacacaccatccta

SEQ ID NO: 301327 - DNA, 133 bp, Homo Sapiens
tgagattatcatccactgggtgtagaagctgcccccgcagacgctcggcaagtgtcttgatattatcatctgctgagggtcgatctgaagggtggaagggagttaaccaacgctcggaaggtgtcttgagatt

SEQ ID NO: 301328 - DNA, 140 bp, Homo Sapiens
gagatgaattcctaaaaatgtagggttaagatggtaagtggcagctcagttggcagaaaaaactttgctaccttttttagcagcctgaaagaagagtgggcatcccagatatttacatccaaacttgttctctctgttgc

SEQ ID NO: 301329 - DNA, 103 bp, Homo Sapiens
ggcttttcatcctcttttgggactgacttctttcacttaatataatgttttcaaggtttattcatgttgtaacatgtatcagttctttattatttttatgact

SEQ ID NO: 301330 - DNA, 236 bp, Homo Sapiens
aaggggaggtaggtaggtatagcttgcttagtacgatcaatgtgtggaggaatggagtgggttttgtatgtacaaacagacagtcaatttatacgtacgtagatatagggaggagtgagattgatgtggattggattaatcgtagcgtaggaataaatgttaatgaaggtgggtgatgctatcaatgatgggatggataagcaagcgatttttgttaattcatccatcaaggccca

SEQ ID NO: 301331 - DNA, 322 bp, Homo Sapiens
ccccctacgttattctctttggatccatctctccctgcacttcttgtgatgaggggttctaattctatagagggcagagcagaatgggtgacatggggtctctttgattcctgctcttagtattgtctctatgttatgcttgactaaagagaaccaaaatagatctgggttatttgtccagcccaaggctgagtagctgtcaaactacctcaagacaataacccaaaggagcatcaaacctgagctttgtcagcacctgtacctgccaacaaccaagacaaaagacaccatcaatgcatattaacagagggcagggtaaggc

SEQ ID NO: 301332 - DNA, 129 bp, Homo Sapiens
gacaaagttctcattatgttgcccaggatggtctcaagctcctgagcttaaatgagcctcccacttcagtcttccaaagtgctggaattacagatgtgagccactgtgcctggcccagattggaaaatt

SEQ ID NO: 301333 - DNA, 214 bp, Homo Sapiens
  misc_feature (65)..(65): n is a, c, g, or t
  misc_feature (68)..(107): n is a, c, g, or t
ggagagaacaaattatatttcttgggtataaaagaaatacccggggggggtccctactccttcantannnnnnnnnnnnnnnnnnnnnnnnnnnnnnnnnnnnnnnncaaaaaccccttccagggggggttaccgtttttgattcccaccaacaaaggcaggggggtttagtgaccccgcctccttgctcaccccttgtattttttgtattttc

SEQ ID NO: 301334 - DNA, 885 bp, Homo Sapiens
  misc_feature (314)..(333): n is a, c, g, or t
aagtggacaagtaggcctgggatttgtagagtgaaattctacaatgatggggacagagatgaggatcaccagtgtcccctttagcatgttctgtgccccacaggtgtcggggcatgcaatattatagtccttggacaaaatgagtctcaagtacagccccccaggccacaccaaggccacaagtagccttctgtccctctgggcttggtgggcctgctccaggatccctctagacttctcatcccgcctttcccaacttcaacttcagctctgttccttctgcattccaccccaactctatcccccttccttgnnnnnnnnnnnnnnnnnnnnaatctctgaagccagggaggacagttcaagttgactgcctgagtgtcccaggcttcaccgtagctgctcatctgcaaccctttgtcctaccccagctttgagcctcagtttgtcagactgaagacctggactcaaaagttccaatacgtgtccccctggggggttgcccagttacccgccagaccactcgagggttaaatggcactggtgaccccagagtgcaacgtgcatggcagcccagctccgctcttcatgggctctggaggaggctctccggctcagataggctcctcggacaggctcagtgctgctgacaccctggggcgtgagaaaagcccgcggggggagttactcacagaaagagggagactaaaaaatagccccagggagacgggcccatttcgaatctcctttcgggccctgccagctccctcgactctggcctcggagagggctgtgggccggaagggtcccatacttagggctgtgcagtgtccttcgataaacccaacagaatcctttatctacacagtggatcattgaccctggacc

SEQ ID NO: 301335 - DNA, 802 bp, Homo Sapiens
ccccccaggccacccgggcggtacagctttctctcccgccccggccagccccagcgggattgtagaattcggctccctagtgcacgtgggcctccttatctacacaggctgggctgggagccggcagatcagtctgactagcaccccaactagaaggcggctgctgagaaggcccaggccgcacgtctgtgccaaacaagtcatagcaaagtgcagacggggaggacacgagacggggcggggaaatggctgagtgctcagaagccacggagcccccccagccctcctgagtaatagaggagggaaggggcttctagcagggtagtactgactggcggggaagggacaggagggctgcaaggcaacgtcgctagggacagctcatcaggcagcagtatcaagggccatgttggccgcagttgtaactcgttagtaggagacggtgacatgctggtgctgtatgatggtactgaacctggccaaggttgaacttgttcacaggtctcgttcttacctagtaggaagatctctcgcaggcgtcatggctcggacactacagcatgaatggaagcacaccagctgaggaccgaatcttactgcacagccggactgcgagggcatttgcgtgcatattggacattcctagttcaagcacgctacagggtgccgggttctacgctttgtcgctcccaagcattcactgcaaaaggtagtccgggatggtgttgagagctctcttcatccaagcgacatccagtgttgctcctggattcgagctccaatcgttgcgagacactaactc

SEQ ID NO: 301336 - DNA, 1334 bp, Homo Sapiens
ccaatgaagcaaacccaagtggtaatggactgttacattatggaccgtatgtatcgcataatacaatgtatcctttaaaaataatgtagatattttctcattcttgttgattttccaatcaatatgtactgactataaaacatccaaatatattaactttaaaaagtaaaatgtattttttctttgtttagtgaagggaaaaaagtataaattacagaacaatatgtttagtgatgctaccatttgtcgggggggtggggaaactaaaatttaagtatataatacattacctatatgtttacatagaaaattcctggtaccgaatggatacaaaactaacctgatataaagaggttactttctagcggctggagaatcatcaggataaattcggaggcacaaatgtcactcgacgggaacgttaacttttatcaccagaatactcgttttactacagtctttcgaactttggtaccaagatgtcacaatataggataacacatcctaactcttcttctcaacgttaacttttaacaaacactctaacatcccatatgtacatataacatcacttacaacactacaagagatatcatcgacactatctagcataaaccactttgtctcttatacccatacttccccattctttacgtcgacaagaaacaattatactttatccatattacaaaataaatcctactccataatcaacaatcattttctttacaacatctaccaagtgacacataactcctccaatagtctaacattcaaacgtagcaacactcagagggaaaaactccaattctctttcaataaatcacttcaaccatctacatataacatcgccttatcaacaccaacactacccactaataggcgctcagataagtcaccagtgctcatcctcaatgcaaagcaatttctgcgatccctataccactcctaacgaaagatactacagccattctcttacggtataaagagtccagaagaactactaaaccagacagcactttccgtacgcacacatatcaacagcgccataagcgacatcaacccgagaaaggtgacattcacaagcggccaaacaggagtgaacaatccccccagagccccaagccgatactatacgggacaccagaagtacctcaaacagagtaacacacgcgctccgaggaaaatacaaacccgtacaccgggcggcacaagcaagcgcacctatcaacaagaaacccaccaggatcacacaggcggcaccacaccacagcatgaaggaagagaaacaacatccacgcgtgagcacaagctccaacagaaaggcaaaatcc

SEQ ID NO: 301337 - DNA, 922 bp, Homo Sapiens
agtgctctcctcaaagtgctgggcattgacaggcgatgagcctaccgcgtcccaggaccatctattctactatgcgtaccatctcgagcatctgtgtgtgaggtggagggcgtgccgatcttccatctttgacctcgagcagagagggacgatagctctacgcccagaagcaggagaatactaaccgaatgcgccacatggtgcttggatttatgctacatcaggtgctgcgtggtcagccacaagactaggctcgtcgacctttggcatggcaacatcatggtgacacatatgaaccaactgtgtctcacgaacttgtgtggggaatgactttgtcaatggaaggtctctatatgcgcgaggactttgagcccatgggggaatctattgacctctttcgggtgagcgctatggtgggaaagggcaggctttatagtcgaaagaggagacgacaggcaggcacgagccccacctttaaagggagcgtgaaggggagattaattcacatgtagcagagagcccccttcgaaacccccaagggtaaccaaccagcggtttatgttcaaccaatagaatggagtaaagaaatcccacctatccaatatcccatattctgctatccgacagcgcgggctgtccatggacctcctcgcaaacgcggcgccggtttatccccaagtggcgctaacgacagtacaacgggtttcgcacttctccttgaggagaacgatactaacaacaaggtggtgatccacctgccaaaggcaggggtggtgttaatccatcgagaggtaatcgaggagggaaaaccagcttggacttcatatagggaagggcgcacacgggacacactatgcatagagaaaccgcacgagtgggcacagtagtaaacgtctcgtcctgtggacgggaagaaaaccaa

SEQ ID NO: 301338 - DNA, 813 bp, Homo Sapiens
cattcctccgggcccagtatgtaagccagagaacttcagttggaagatcacggtgggaaaagtataggggttggggtggaggggcagacgtgcctcacactttaatttgatgtaagtggctccatggaggaaaagataatgatcattcattgttgattaggcactactaatgcagactgaatcacatggactcagttctccaacaatatcgtgttgaaagcccacactaggctaggtgctgtgtgtgcagttcagtagacaggcagatagtggttcctgaagatttcaggcttccagtgtagcagggatattagatgtttaaaaaatacataagggaatgcacgactccattgtccagagattgcttagggaaagcctccctgatgaggggactatttaatgtagagagtgaaggtggggttggctgggcggggggcagagaggtaggagtaggtaggaaaatcagcggtgagaggtacgtgtgacttctaccattcattgatgctatctataagcaggaagagcacctttgatcgtctctgataaatgaaacgtgatcatgctgatgctaagacaaggcagctggtgcaataatactaagggggaacctgactagggagaagtggggcccaataggccgagtatgcatcttgggcgctattagttccgctaaatccaattgcgattgaccccatttcccacctagtagttggcactcaacgactgggtataacaacgtccattggcaggtggtaaagcacagaaccctgaaccataactgcgcgtgcaccaatgagatgcttcaatctacca

SEQ ID NO: 301339 - DNA, 860 bp, Homo Sapiens
tgattttatcccagacctcggaagtaattgtggcaggttaactcagctagcactctgcagggtggggcaccggttccccccgcgccggctgacgccaagcctctccactattctcttccacaaggggagctcccaggaccaaagtggggtaagcaggttcagcctacttgcgccttgaagtaaacgatcttgcacttacaaacgtgcctgatgtcactccttctcacatgggaccgactgatgtatgatggcagggacacaatgggttcgcctgggctgagaccagccctgtgccagccagggtgagggaggctcgacaccctagtggtaatgacgagagcgtcatggacgatagagagaatgcggaggacacaaccaagagaaacacgggaccaaacgtagccatatcgtccagttgccattgtcaagtgacggggttggctgcaaggttgcctaggaccccaagatacaagccccgtggggcgaaaagggccgcttaggtatgctattgagctccacacggggacgtactatgtcactacacatagtgagacaatgcgccctgctatgcttaccctatctctcttcgtagcaaaccttccttaaagatccaccgtaccaccgagggacctatcgagtgggctcgaaaaacgcgggaagactggccgcggtgggacacctgtatggagcaagcgggggcgctggcacacttccaaaagctggaaagtgcgcggccgagtcccactcgaagggggatgcatgacaggaagcggggaacaggccctgccggaccggggaaaggcgcgcagagcaacgagaagacctgggaaaaggcgagcccaggaccgcgggcaaggcgc

SEQ ID NO: 301340 - DNA, 649 bp, Homo Sapiens
acacgaggcgttgatgagccaccataggtgctaatataatcgtcttaaaccatcgtgatagctgcggagtcatccgtgaaattctcgagaattacctccgtgcattcacagtttatatcataccccaggggaaaataccagcataatgtgctcctagagtatactaatagggccttgtgcagaagtgttaaagagcgcatttataaggagcttctcacacagtgatgaccctaccccaacgtatcatcagatagggaataaccacatttatacacagggaactcataaggcgacatatacatacatacaaatccaatatgatgagacgaagggtgcccctttgacgaatccacagcgtggatacatgctaataagataaaagcaccagtgtaaggggggcgacaaccaaaaaggtaagagattccccggtataacgcactacgaggcgggatacaactatccatacccaacaaagaaagggcataaaagtggtcaccatcgagaacacgtggaaggatattaccccgaacaaacaaactagctggtgagagaagcacacacatcgagggtggaaaacacactatagccaggtcggacgacaccgaacagaggaccacgtgtccccatcgacaacagagatcacacgccc

SEQ ID NO: 301341 - DNA, 1524 bp, Homo Sapiens
  misc_feature (535)..(535): n is a, c, g, or t
  misc_feature (754)..(762): n is a, c, g, or t
  misc_feature (972)..(981): n is a, c, g, or t
cccagtcttaaacctttttttaatttgtctcccagggagggggccaggatatggagggaagggtgttaaggagcaaaaggcagttatatttggggggggatatccaaccattttcccctagtaaaaaaggggcaacttgtgtattgtggtccaagctcgtttaaaaacacaagggggtttgcgtgagacatgttgaccctcggggggagattacacagtggcgatagtgcgccctcttaaaacacgtgtgcgccccagtcagtttccagactcgccattatctcgctcaaagtgtgctcgcagccacaagcctttagtgaccaggcgcctattgtagaaagacagtctctcgagggggtgtgcccctcctctctgtgtgtgacaccccgggaagagagtgctccgacccccatagtgtggctgtaaagacacctcttgagaggtatatcgccccagtgtgtacaccccgaggagacgtcctcgtctcgagacactcaatgagtggtcccccgaatataaatgtggcacccgcagntgtgcggtgtataaaatgtgtcatacacgcgcgtggggagaaaaaacacctctttgtgtgtattccatcacattttgtctcccgagggaaaaactatgtgagtgtgaaagataaaattactgccgggtgggggagtaaaaagctcacaatttccacacgagggaggtgcacgtgtgaaatgttaacccccacataaatattaaagcggcgtttgaaccnnnnnnnnncttgcgcggctgattgatcaatatattcgcccgcgagagattactttcacatctcaggagcggtagtccacccacaagactgtctgaacacaagacttatattattaaaaaagaagggccgttgtacatgtttactacaacagaaatgtggcactaaaaaagacgggctctcccaatctaatattaaagcggcacccgcttttatccacnnnnnnnnnntgaacaacacctcggggtggactcacccaccttgtggagaagaacagctctcaaactctaatattcaacccatcgagcggggaggtgatcctccgttaagaccaataccacagaaagcgaggtgtcgtctctccccccccaatctgatgggcgccttttcatacagagacgatcaactagatgtgataaatctcacgccacaagaaacgcaaaaacacccgtgtcggtgtgctctccattctgccaaaaaaggctgtcctcctttgtagcaaccaaataatattctcaccaaaaatttttgtctcgcccgtatgtaaatgaatacccccccttttctcgccccccaagcagtgtaagaatccgtcgagtagaaacatcgtgtgtccatcgatagaggggaccgctctcattcgaggatgggatccccccccgaaaaagtttctaacacagggatacaaaggcgctctatcatgagagatgcgtgaacaacaacagctcttgttctaaacatgattccttcccaaaataagtgtttttgccctc

SEQ ID NO: 301342 - DNA, 953 bp, Homo Sapiens
gactacatgacagccagagatgtgggcggaacgtgcctggactgtcctcaatgatgctgctgagacttatccggtctatggccaatccgagacattgcttgtagggaggacgtacatattctggagaaagaacgtgagaaccatgctcatcgctgtgtagcacactgcatgctgcgctggcgtgcggtccatcaaacgtcatcggtgggtgacgcaatgagaagtgaactagatttgacgcatgcttcatgaccaggaaccacttgaagcgcatctcatcgcgcaatgccactaacagatgggatagccaggtatggcataggtgattgacagagcgcgctggagttggataggtggagccattcgatcggacagacagttggttagccacagccggcgttaacgcttggggcaaggacagcaccagggggcctatctttaatcgcgggcaggcggcaatgcgtgtcgctggtcgcaggtccactttctgttacacctttgggccactgaccgaccaatccacgttgtatcaacctaaccctattagcataatcaacgaggagtattaggaaattatcacacccaaacggggacaccacaaatatctatgggcgggaaacacaaggccggttgtcaaactcaccccgatccccgttggacaacgcggggccattacaccagttcatagaagaagggtgttcccttcggcaccggaaccacaaacgaaaaccccctaagaggggaccccacagccaatgacacagaagctcgcacaaggcggcggacacggccacgggcgacaccccattccccgaggcccgatttggactcgggcttatggacaaccatagcggcacacggacacggacaaccgcttgcggtcgcgccacaaagggagataactccaatcgactcccatcaaccgcgcaccacagcaacagggcggggcaact

SEQ ID NO: 301343 - DNA, 1196 bp, Homo Sapiens
gaaagaagacaaagaagaatgttgcaggttccctggatgaggatgatgatactaggagaaagcatgaagctctaccaagatgaagacaagcaacaaaagatgatggtactctcgattcacgctaagtcgagacaggccctgcattgtgcgcaggctccagacaagattcagtacatcgatacggtagggtagcttgcttgtaatctgagttgtgctaacgatcattgagggacaaggaactccacgactactggtgcgcgtgagcgtgagcatacaagcgaaacttgtgtcactgagacaccgtccgatacaagtcagtcgcgagttagtgaaaccaatgaaacattctctgtgttcgtcagagcgtgttcacccaggactactccttgtgaatagctaactttagcgatcgtccaaggccccgataaagcgatactcccttgggaactctcttgtggtttggtgcgtaagaagtccgtgggtcacacatcgtgggtttgctcactgaaggactcgaggggtgacaagttacagcgccaaaatttaccatgaaaagtcagagataggtccacagacacttttcacccgtgccagacagattagcgagaaacttagacaccaccaagtgactctggactgcaagaaagagacaacttaatggacttctgaggagggcgtacatttctgttggtccgaccgctatgtgttctaccccaacggagtgaacacggagaatcccaactcagaggatacctatgaaaaacgttcgccgatgccacaggaagcgggacacaaacaggcgaggaacggtacggtggaccttatctcctccatatcggatgggtcggcttcgacaagaccaggttctgtctgctatctccccaatagggaggtggctaacagatagtctcccgctcccaagtgggacttacaaaaattgaggccggggcgttgtcgaccacacgggacaatgtatcgccaccagcggaggacgaaggggacgcgaaggacaaaccctagggcatccacggcctgtcggccaagaaaggaactcacagtggtttgaacacctctagggacgagaaaaggtggggagctctggtcaggtatccccggcaccaactcaggacggtggtgacaaatggatcgagggacgaaaaggagacgcggatgtgggaactctgagggggattggg

SEQ ID NO: 301344 - DNA, 1156 bp, Homo Sapiens
  misc_feature (196)..(196): n is a, c, g, or t
cccagctcaaccttttttaagggtctcccagggaaggggcggccaggaatgggggggaagggtttgaaggaagcgaagaaggcagatcatatttaggggtgtgggtatccaccattttacccatatgaaaagaggggaaaaagtgggtacattggtgtccaatcctatttaagaaaaacacagaggtgttgtgtgngaaatgtgagcacactgcgggaggtggaaataagcacgtgtgggtatatgtaggcctctctataaaaaactgtgtggcgccccagagaacacgtttatgggactcctatttactactgagataaaaggtgcgttaaccgacacaagcattatattcgccgaggcactgtgtgaaagaagtattcaaggggggtcggccctcctttgtggaccccccgcggtagagagtgatcgagccccacatgttgtctataaaacaaccttatagtgaaggatgccccagagtgagacaccagaagtgaagcgactccctttcgagaaatcacaatgaggttcccccagaatagtgtggaaacaagttgggggggactacacctgtatacagtgtggaccaaaacacatatgcggacactatcacagtctatcccgccgaggaacaccgtggcggtagaagtgaacaaatccgcggggggaggagagacattaccaacaattccccgagcgggtgacgacggaaagataccgcccgcccccacaacgacagggccgagaggaacaaaaaaagaggaagcaggggagaaacaatcggcgacccccgagagaaaaacttacaaaataaccaacgaacagacacgcccacaaaggaggaaaaaaaggatacatcaacaggcagagggcgagggacgtgaataaacaaacattgccgccaaaaaaaggaccgccaaaaccaagaaagggaccgccctaaccacggggatgctcccacacctgtgggctcccacgcgtgtgaacaaacactccactcatacgctacgagggtgtccctatagaacatacaaagggaggctctactacccaaatgaggcacttttcagaaagcaaagacaataaaatagatcacacaaacagaagcaaaaaaatgttgatgtctcttcgtggaacgaacgctctcattttatca

SEQ ID NO: 301345 - DNA, 1575 bp, Homo Sapiens
gctgcagctgcttggcgattatagtgagacttccgttcgtgatcggatgaccagggcgtacacctccaagcaaccatgtgcaaacggcgacggctgtcagctaggtagttgactcttgtgcacctaccatactcgttgctgtaggagcttgattgtcctagctacgcgaacacgatcctgagactaatttgccaactgatcgaggggaaaaatgctgaaacccaatccaaaggctatgctcagccgttctaccgagaaccaactcgaacctgggtccgactcaggtggacttgccggctaacagggaaattcaaatgtcttgactatattggtataaccccctcaagcgcaaaagcaagcaaggatgtccttgtgcagtggacgcgaatagcgttccgttggaatggcgcgtacggcaacgcaatctttcgcaatggcacttgacgtcgctctcgttcaccacgctcctagaattaatggaagagcgactatgtgcgccccttcctaatgcgatggggttgtacaatttgaagtcgaccttgagacaatgcgcgcgccctaaagaggattcctccacacgaatatgcaacaatttagcaacaatggggtacgcaaagttaacttctaaaaataacgggctatttctttagctgcaccgagcgaatgcgcaaagggctagctcctggtaaccgtcatttcgagctcctaccttaggagtccattaagaagatacgtgaaaaaggggcaaaaaactccgggagcaagcgaccaaaggcagcgttaaacttcttccagggagggccaacaacgtaaccctatgtgttatttacaccccaaaagtaggtcctattgctcgtgggtgcggatccaatgcttggactcctagagagagctcccacagttacgacttgaaacgttgggaggcctttcctttcccagaggaaacgggttacccatgttggccgtaaggtctcacataccacgcaatttgaccattctggggacatacccttccaccttggtaggcacgtatggtcggacttccttccacacacggttgcggtttaaccgattatatcacgaggacaacttactgaattggtacacgtccgcgaatcgtccggagaacgctttggcctaatggcgttgagaacgtttatatcctaggcgttctgaactggggacttttgggaggcaatcaagatgacaacaggggccatttgcccgacgtcacattgccaataggaaggctaatgaccagcatgtctgcggcccttccacaagtgtccctgtgagagcagtgaaaatctgcctgtgcgagagattatggtcggacaggtgattaccccccaatatatgtccggttactcagctttgttttgggaggacgtatttgcacgtgccaaaagagttcaactgatggcccggacggccatatggaacgtaaacacccttgggtgcccctcacaagatgggtgtggcctaaaagcaaattcgatatgacgaaggccatgtggcaccagtgcaaccaatgcagggcatcaatggtgagtctgtatcccgaactgtgcctaa

SEQ ID NO: 301346 - DNA, 1096 bp, Homo Sapiens
  misc_feature (595)..(595): n is a, c, g, or t
ggtcagtagtccctgtgttgtcttcgtttggatctctccgcgtctggggctaacggcgccgctcgcgcctctgctcgctgctccctgctgacgcctgctgctctcctgatgcaacagagaacttgctagcttcccgagctacccatgcgcacataccgaataatctcaaatcgattggacacactcaggagcgcgaaaatcaaagcgatcgtggtcgtggagcatcagctgcgtccgctaatcgggcgccatgtttggcaacgcgtgccatccgttcgcggtagctagattgacgtccacataggcgacgtctagtttgcaccatccggtatagcaaagatcgtcatgtgggacacacagcatgacaacgagccggaggaatgaaccagtgcagacgatacgggaacacgccacagactgtcttgcctgtaccatggtaggacgatcccgcgcatggaacccccctgtacctaagagaggcgttggtcgaatcccatgcgtttccccattagtggcatgagctgcctcaagccaagcacaagggtcggtgcatggaagtcgcgaggctggttcccacgtatgcccccacgcaaangcgttggaatgccacagtacaccaccttggaggcccgcgttggtttagatagcgagaccgaatacaaaaagcgtttaatcaagcccatgtggaggcgcttgagtttctcccgcgcttggactagccgtggacacatacatttcgcgacaggaacgcacataatgcgaaaccaccaattcgtgggtggagtttgattggcgcgcccttgttccattggacaaggcaagacgtagctcgtcgactcgactctaaggcggccactgtcacacgtgccatcggacggcaggtccaaaggacaccctttcggcaacgataagatacgtcgcacttgcttgcggattggcctcggcaaacgcaaatgcgggcggggcaaagcaacccagcgcaacacccctttcaaacgggccaccttccggaccccatatcctcgttggcgacaagcaacttggtcccacaatgggcttcctataggtgcccccggaataaaatggcccaaggata

SEQ ID NO: 301347 - DNA, 1199 bp, Homo Sapiens
  misc_feature (138)..(138): n is a, c, g, or t
  misc_feature (214)..(214): n is a, c, g, or t
gggacggtactagcttggaccggcgtggtgcgaataccctactatccgcgcctgtgtgaaaggtcactaagagccgattaggacatacttcgacacaccttggacgtccagtatgatagtttgtcaccgtcgaaggcntacagagtgtacaagataattatatccgacgtcatagatagtaagctaaaggaacgaatgacgcttctcactcgcntctgtgcgggtactgtcatgtctaggctaggagaatcatcctctccgaggagcgacaaggcttcatgtcgtaaggatgcactgcgtaagcccgaggacaggatcgtaattctaatctacaaggacatgaacacaaggacgcatcgagcctcaactgcttgaagtggctaacggacgaaaaaagtcaggatggtgtgcacatggatatgtttttggtggtgacgcaggcgcagtacagaaaagcctgaccctgtaggcctcgaggtggacttaagacttggcggtccgcttgcaaaaggactaaggaagattcctatgaggtaacccatatgtatgccccaggtgcctcgctccctaccaaaggacaaagcacccggtcctttacgaattgcacctcacgtgtagatggggaacctttgttaacgacatggttcctaatggtacgcggaaaccaagcacctgggaggattccatggtgctttccccctttgggaagtaggctaatccttaccggagtagaggaccataggacctcgttttgggggagagaggcaaggaacgtattctggaaccagtctctccacaccagaggctccattttattggctcaatgcggttgaatagaccagggggcaaggaacggctccctcgataaggtgattaagtagaataggatccggttttccgcaccaccggcggtcacaaatctccaaggccaacgaccgaattacgcccgcttaatgacccacaaattccacgttttccgccgatgagattccccacctgagatgggagctctttgtacaaatcctatctctaatactcaagcttccttacttcctggacaaaattttgtgcgcacctccaaaagtgtcgtttaattttcaccccccaaggaaagtttagggttaaccgccaacatgagaaaaggtgtgtatggagaggtgaagttgaaacgatttatccccccgtttgcacaatccgag

SEQ ID NO: 301348 - DNA, 715 bp, Homo Sapiens
ggtgagggaaacgtatgcggtgtcgtcggtgccgttctgcgtaatattctgcggcctgacgctcgggacctatgtgcagacgaataccctcgcgaatacccttgcgttggcagtcggcatctgttcaacatggtgctgaagttaatgaccccggagaagccgcgagaggaagagctgtcgcgtaacgtacggcacgttcgttcgttgcatgactctgcgcggtgaacctgactaagaaataacacaaccggtaggcctcgttccgtctaatttcgctgcacattctctcgagaagtgtagcgggcgcatcacgcattgggcacagacgctactgttctacgcgtaacttgggcagcaacgttcctgcataggatttaggcaatgagttatgcgagaagaaaaggtggaccaagatgctcttcttactagaacaagcggtgaagaatggaccctgttgcacagttcacatcgcctaaggggttgaataaggaaggagtggatcgaatggcccggtggcacacagatgacgttccttaggaatgtggacaacctattcttgaactattcgttactctggtgaaacggcgttctagaatgctagttccgcacccaggaagactctagaaaggattgaacccatttcttgggactctagtaccagtacgggagtctagcatgtacaaggaacactatggcgttgacagggttggtctgc

SEQ ID NO: 301349 - DNA, 340 bp, Homo Sapiens
  misc_feature (133)..(193): n is a, c, g, or t
gcgccggcgcccccacccaccgcagcggacgcggccggcgggggccctccctctctcgctcacaacgggagcagggaggcgggaaacagacggcacgaagaccacgcagaagaagtagtagtagcaaaagacnnnnnnnnnnnnnnnnnnnnnnnnnnnnnnnnnnnnnnnnnnnnnnnnnnnnnnnnnnnnnccaagacagacgaagaagaccacaacatcgaaaacccacccgacgacgaacacgaagatagagagtcgtcgaacaccaccagaactgaggagaagccggcgagagagggacaagaacacgaaacgacagaaggacaaagagacggcc

SEQ ID NO: 301350 - DNA, 1052 bp, Homo Sapiens
ccaattcccattaattttgggctctgtggggcgatgtcatcttttcaatatgacaaaaacagcagcaagttcaaccaatacaaatagaaatctctcaaatgtaggatagaccaaaaccaaggtgtgtgaggggggaagcaaccagcaaacggaagacattgagcatgtggcacaacacagatggaggagggttcccctatcctccctcgtggggaacgtgactcaacaccacgtgagtgttggccagtataatacaccattcccagagtctcacgggcggtgtacatctctttttctgtggaacttaagaaacaaggttggggcatataacgacaacgcacggttcccatggcagcgcctcacgagcgactcacagtgcttgtctccattctatctcctccatcatcagacaaacacccctctatgacatcctctcctttcctcgtgcactccagtgtggcaaaacgggaccgcttgtacctagcaggatatcagcacaccagctctcgcgcaatcgctctcttgtattctcccatcaatcacacccacccatcatgctcacacacacttacccatcttatcacccttactttctcccacccatcatatactattactcaacacttcctcctaaaaacacctgccgcaacactcattaccattcgtactacatcactcaactactcacacctttcaactctctatcaaataccttcaccacacactgaaaccaaccttcctttctacacatatacacactcaacatataatccctgaatatatactactccttgtgctacatctctcactataattcactacaccatactttatccattacacctacactacactcctacacattatccacctcctaactccactctccctcctcaactatacatacaacaatgcatcctatcaaatactcctctcatatttcaataatttctatttatcatactcacttcatctacacacaacttatcaccaacaattctaccaactatatccacacttctaccactacctatacatactcatcctcacac

SEQ ID NO: 301351 - DNA, 750 bp, Homo Sapiens
  misc_feature (221)..(234): n is a, c, g, or t
  misc_feature (245)..(542): n is a, c, g, or t
cttctgcaaaaactgttattttattgacaaaaaatattgtacaaaataggtttactttattaaatatttagtgctttactactatgtataaagtacttgtggaagaattcatatgtttttacagatggagaaacttgatgtggtttaataacatttcctgtgtttgctctttacatggggttggcgggggcgaggagtaggaggaaggggaagtgcttttnnnnnnnnnnnnnngtttcaacatnnnnnnnnnnnnnnnnnnnnnnnnnnnnnnnnnnnnnnnnnnnnnnnnnnnnnnnnnnnnnnnnnnnnnnnnnnnnnnnnnnnnnnnnnnnnnnnnnnnnnnnnnnnnnnnnnnnnnnnnnnnnnnnnnnnnnnnnnnnnnnnnnnnnnnnnnnnnnnnnnnnnnnnnnnnnnnnnnnnnnnnnnnnnnnnnnnnnnnnnnnnnnnnnnnnnnnnnnnnnnnnnnnnnnnnnnnnnnnnnnnnnnnnnnnnnnnnnnnnnnnnnnnnnnnnnnnnnnnnnnnnnnnnnnnnnnnnnnnccaccaccccaccacacaacacccccgagccctcaacgcccggcccgcggccacaacccgcgcacgcaacggcgccacggcccacacccgctccccggaccccaacttcccgtgcccaaccgggcccacaactccccgggcccccccaagccggagccgcactaactccgcaaacaccccggttaaccccgcctatgaacccgcacag

SEQ ID NO: 301352 - DNA, 256 bp, Homo Sapiens
attggggggaggggacctgggtgggaaaataattggaatccttagggggcaggtttctccccataactgtttcctggggggaaaaggaaataagctcctccgaagaactggaagggtttaataagggggggtttccccctatttgcctggggatcccccatgctctccttgtgccagggcgggccagggtaaaagtgggcccttttgtggccatcccccccaacaactatggtaaggtcctcccccgaccgcagtg

SEQ ID NO: 301353 - DNA, 805 bp, Homo Sapiens
  misc_feature (575)..(575): n is a, c, g, or t
gggtggcggtcggtcggcggctaaggaggggaggcacctgcatctggggcgcggcgaatcctcgcgtgcgccaggccgcctggggtagtcgccgagactgcgccggccagcggggccgaaacctaatcaggagctgagctttgatggcggcttctggagggacaaagaaggcgcagagcggtgggaggaggctgcgagaacctagctcccgccccagccgacgtgcgagacaaaggccccggcgcggggctcttcggaaggccgggaggttcctgtgacaatgcgagtctgcgccccacgctcccgcaccgtgatgccgaggccaaatggctagagtgggcccaggcatcagcatttctgtttggcagccgggcagttgtggtgcacgttttgaggaactactaaagcctgcctgtgatgaaaaaggcaaaagctgacttcaccaaaattactcccagggagacttctgcatttggctggaaggacatttgagtaaaccgctgaggctggtggttgaaacataatcctctaagggagatcggttccgataccctgagttagggacgcttgcctgngcagagctaaggggagaatgatcaaaagccaagctctgtccccgtcagcacgtcaccctccctcactgtaatccctgactgttttctctaaatgaagaattatttagagaatataaattagaagggccgccacgtcagaattgcctgagtgggagcagtctttccagcctcgaaaaatgtttaaacaatatgcagatgacctagcacaaataaagaatgctagcaaccgc

SEQ ID NO: 301354 - DNA, 245 bp, Homo Sapiens
tcatgagctggtttcctggacccccagctttccttggtaacaaaagtgggtaaaaatctggccgggtctccccttattaggggaagtcgttatttaatttttcgataaagccagggttcaccctggcatgtaatgaaatcgggctggcaggtaccccgggggattgtaaccccgccccttaatgaaaccgggggtcttttcttttttggggaaacccaaaagggattccttcctggaaaaatccc

SEQ ID NO: 301355 - DNA, 1046 bp, Homo Sapiens
  misc_feature (46)..(114): n is a, c, g, or t
  misc_feature (166)..(176): n is a, c, g, or t
  misc_feature (187)..(195): n is a, c, g, or t
  misc_feature (280)..(288): n is a, c, g, or t
  misc_feature (298)..(327): n is a, c, g, or t
  misc_feature (354)..(368): n is a, c, g, or t
  misc_feature (428)..(440): n is a, c, g, or t
  misc_feature (702)..(713): n is a, c, g, or t
  misc_feature (769)..(822): n is a, c, g, or t
cctgggtggcgaattcggcacgagggagagagaactagtctcgagnnnnnnnnnnnnnnnnnnnnnnnnnnnnnnnnnnnnnnnnnnnnnnnnnnnnnnnnnnnnnnnnnnnnnccgggggtgggctttttattgacccaaacccccaaaggcccctggggaaatnnnnnnnnnnncccgggacggnnnnnnnnntgaggcaaagggaaaaccccttggaacccaacgggggggactggctaaccttggcacaaaaacaccccaccaggcccgggaaaannnnnnnnncaaaaaaaannnnnnnnnnnnnnnnnnnnnnnnnnnnnnttgggggggcccaaacatccaaagggnnnnnnnnnnnnnnnttcaaaggccaaaaaccggggaggggcagggaaaaacgtccctccccccaaaaaccttcnnnnnnnnnnnnncaaacctttttaacaaaggctgaaatgcaagtcggggggccaaaaaaacgaaacttcccaatttcccccttcggggggcccaagggtcccacacccccttgccctaattccccttcccgggcccggaaaccaaaaggaccttgcccacatttttcttccccggaatcggtttcagggcatccccccccttcccaaagggccaaactgaatcaatgggggcgcttgatggggccccctggttgaacaaacccagaaggggggnnnnnnnnnnnntgaccctgattgacctttggttgggccaaaagaaccccctggtccagggggaaaannnnnnnnnnnnnnnnnnnnnnnnnnnnnnnnnnnnnnnnnnnnnnnnnnnnnnaaggggaggccctttcctggcccccaagcaaacatgggtgaaaaaaccccccgggccaattttttcccgaaaggcttggcaaagaaggggcccacaaaattgggaaactcccccttccccaaaattgtttttttgggactgggggcccccaaggaaaaccccccttcagtgtctcaccccgcgtgaccccaaagggggaacccaaaaaaagtggcaaatctctt

SEQ ID NO: 301356 - DNA, 874 bp, Homo Sapiens
  misc_feature (595)..(595): n is a, c, g, or t
  misc_feature (773)..(824): n is a, c, g, or t
gtctggcatagatccatgttccctagcccctggcacaggtgcctctgactggaggaggccccacctgtggcccgggagctgctctgggggttgataaagggcagcattattgggtcctgggaaggagcgggcgtgaggccagctgaggcatggtgacccctgggaaggagcgggcgtgaggccagctgaggcatggtgacccctgggaaggagcgggcgtgaggccagctgaggcatggcgacccctgggaaggagcgggcgtgaggccagctgaggcatggtgacccctgggaaggagcgggcgtgaggccagctgaggcatggtgacccctgggtacgggggacttgggggccgcaccttggtttgcccagggcccctcctgcaccacgggccacatgcggaggacggcgtgggataggctccctgggtccacagcttctgcccgtgtatggggaaccctccttggtcagggctgcaggctctgggcagatggggcaggaaccctgaggctcccgcgccctcccatggcctctgatgtgggacactggagcgaggcacgattctgaaggactccatggatctgggaggatgangcccaccctcggctggtggccaaagccgtcctttgcgggcccgctgcttcacggacactcttcgggccgggctgtcgggccccatcctgcgggggcaaaccccctgaacctcggccggccctggagcctttcccccactttgaccttccaaaaggctcccccgcctctggcccaccannnnnnnnnnnnnnnnnnnnnnnnnnnnnnnnnnnnnnnnnnnnnnnnnnnngaaccacaccatctatttcccccgcgcttcctgcccccaccacatacgac

SEQ ID NO: 301357 - DNA, 475 bp, Homo Sapiens
  misc_feature (60)..(100): n is a, c, g, or t
gaaacaaaccccgcaccctttccgccacatgggaccccccgaaacccaaaaggctgcctnnnnnnnnnnnnnnnnnnnnnnnnnnnnnnnnnnnnnnnnnttgcagggcattttttatgtcccggccgccgcggagaaaataaggggacatgaaccccgcgcccaatgggccccctaatcctggatctccctgacccccacaccctttccttgtggcacgaaaggcgcggggaggaacattgcccgagggccttactattaaaacaggcgacgcgggctcatttaaaactcccgccacaataagacgccaggggcgcccatacaactgacgtcttcaacggcggatatgggggggcgtgggcacaggcgcgccaggggggagaattctataaataccacccggcctgtaatagtgcaagagcgtggacacttccttttacattattgagaggcaaacaccacttaaccgtgtctt

SEQ ID NO: 301358 - DNA, 316 bp, Homo Sapiens
taactcaaaataatcctcgccccgctatcctcaatactcccatactattcttccgtcccctcgcgccgtaacaccctcgcgctactcaagaactaacattaatcatccaacactttatccatcgcccctttttttcccgccctctcgcgaccccttattagcccaccacttattaccccccgctctttctaatcaccacccacacttctctccccccctttcgccatacaccgccccatattactcttacccccgcgccttctatgactactacaccgtcgccctcacgccctcctcccctgcgattaatacgccc

SEQ ID NO: 301359 - DNA, 587 bp, Homo Sapiens
tcaatttgtaccattccttgccccaccctgccgaacttattgaaagagcatcgctttcctcacttttctcctctaacagaaaagcacttagatgaagctacagggagccagaattcttttgacttggtgggtaccggaggattggaagaatctagattgagtattccttggcctttggggagcttgctctatgcaaagtcacccaggaaatgatactccccccactgtgaaacactagctagagatgatagacaaaaagcacatttgttgtaatctccctttgacgggattcaggttgggatagatgtcgaagcagctgcttctaggtagtcaacgaagatgtcaactagtaaatgacaacagacaaggatgagcacagcagagctgtaagattctagatatcaaaaagagcaagcagtctgttgtactcaccatcgcatcctcagcagctgcccagtgcccggtttttaacttagtgctcagtgttatggtgtcagggtttgaatccccaatttctggatactaacctgggggctaactcttccttcaccctcctcctggaagccctggtaaaagggatttaattc

SEQ ID NO: 301360 - DNA, 150 bp, Homo Sapiens
cccaagtggcctgattcaacaagaagcatctcagacaccaccacctaggctgtcagccattgcccggggctacccggggcgggtttcatccctggggccaaggttttcctgggaggaatgaaaaaccccgggtaaagaacaggaaggggt

SEQ ID NO: 301361 - DNA, 786 bp, Homo Sapiens
  misc_feature (46)..(111): n is a, c, g, or t
  misc_feature (116)..(130): n is a, c, g, or t
  misc_feature (184)..(192): n is a, c, g, or t
  misc_feature (258)..(267): n is a, c, g, or t
  misc_feature (292)..(306): n is a, c, g, or t
  misc_feature (391)..(408): n is a, c, g, or t
  misc_feature (581)..(592): n is a, c, g, or t
  misc_feature (706)..(736): n is a, c, g, or t
ggcctgggtggcgaattcggcacgagggagagaactagtctcgagnnnnnnnnnnnnnnnnnnnnnnnnnnnnnnnnnnnnnnnnnnnnnnnnnnnnnnnnnnnnnnnnnnaaagnnnnnnnnnnnnnnncctttatttacaaccctgggagtcccccgggagtacccaaaacacccaatgggnnnnnnnnnaaaatgaaccttttaaggaaaaaccatgggggcccctgggcgcgcgccccccctcaggggcctatnnnnnnnnnnatcaaagggaacttgtcggccaaannnnnnnnnnnnnnnttgttggccaacctgttgcagggtgcttccaaacgggggtcggctgggaacttcccctcccggggctggattttttccccctccnnnnnnnnnnnnnnnnnnttcacggtttcttctgggggaaaaacctttaaaaaccctttcccggccaacaaaatgaacctttctttggggggcccctggcaacctctgatgctggccccaaaagggcacccccaccgtttgtattggccctccccccagggaacggaccccctttaaaccgcccaaaaaannnnnnnnnnnntggaaagttcccccccgacttgtcgggaaacccccaccgcccctttaaacaagggaggtggaaataaccctttcccgcgcgagcgtcaacaagggcggacctggactccataannnnnnnnnnnnnnnnnnnnnnnnnnnnnnngaagattggcccacacccaatattccccccaagggtgtgggccaaaccat

SEQ ID NO: 301362 - DNA, 1425 bp, Homo Sapiens
  misc_feature (355)..(410): n is a, c, g, or t
  misc_feature (412)..(412): n is a, c, g, or t
  misc_feature (538)..(538): n is a, c, g, or t
  misc_feature (574)..(574): n is a, c, g, or t
  misc_feature (655)..(655): n is a, c, g, or t
  misc_feature (671)..(671): n is a, c, g, or t
  misc_feature (748)..(748): n is a, c, g, or t
  misc_feature (753)..(753): n is a, c, g, or t
  misc_feature (763)..(763): n is a, c, g, or t
  misc_feature (772)..(772): n is a, c, g, or t
  misc_feature (774)..(774): n is a, c, g, or t
  misc_feature (786)..(786): n is a, c, g, or t
  misc_feature (832)..(832): n is a, c, g, or t
  misc_feature (844)..(844): n is a, c, g, or t
  misc_feature (851)..(851): n is a, c, g, or t
  misc_feature (856)..(856): n is a, c, g, or t
  misc_feature (864)..(864): n is a, c, g, or t
  misc_feature (871)..(871): n is a, c, g, or t
  misc_feature (873)..(873): n is a, c, g, or t
  misc_feature (875)..(875): n is a, c, g, or t
  misc_feature (878)..(878): n is a, c, g, or t
  misc_feature (886)..(886): n is a, c, g, or t
  misc_feature (889)..(889): n is a, c, g, or t
  misc_feature (905)..(905): n is a, c, g, or t
  misc_feature (910)..(910): n is a, c, g, or t
  misc_feature (927)..(927): n is a, c, g, or t
  misc_feature (956)..(956): n is a, c, g, or t
  misc_feature (968)..(969): n is a, c, g, or t
  misc_feature (982)..(982): n is a, c, g, or t
  misc_feature (984)..(984): n is a, c, g, or t
  misc_feature (1007)..(1007): n is a, c, g, or t
  misc_feature (1016)..(1016): n is a, c, g, or t
  misc_feature (1065)..(1065): n is a, c, g, or t
  misc_feature (1070)..(1070): n is a, c, g, or t
  misc_feature (1077)..(1077): n is a, c, g, or t
  misc_feature (1084)..(1084): n is a, c, g, or t
  misc_feature (1087)..(1087): n is a, c, g, or t
  misc_feature (1101)..(1102): n is a, c, g, or t
  misc_feature (1117)..(1118): n is a, c, g, or t
  misc_feature (1127)..(1127): n is a, c, g, or t
  misc_feature (1132)..(1132): n is a, c, g, or t
  misc_feature (1163)..(1163): n is a, c, g, or t
  misc_feature (1170)..(1170): n is a, c, g, or t
  misc_feature (1181)..(1181): n is a, c, g, or t
  misc_feature (1185)..(1186): n is a, c, g, or t
  misc_feature (1197)..(1197): n is a, c, g, or t
  misc_feature (1201)..(1201): n is a, c, g, or t
  misc_feature (1204)..(1204): n is a, c, g, or t
  misc_feature (1207)..(1207): n is a, c, g, or t
  misc_feature (1237)..(1237): n is a, c, g, or t
  misc_feature (1255)..(1255): n is a, c, g, or t
  misc_feature (1263)..(1263): n is a, c, g, or t
  misc_feature (1266)..(1266): n is a, c, g, or t
  misc_feature (1269)..(1269): n is a, c, g, or t
  misc_feature (1272)..(1272): n is a, c, g, or t
  misc_feature (1279)..(1280): n is a, c, g, or t
  misc_feature (1286)..(1286): n is a, c, g, or t
  misc_feature (1305)..(1305): n is a, c, g, or t
  misc_feature (1309)..(1309): n is a, c, g, or t
  misc_feature (1333)..(1333): n is a, c, g, or t
  misc_feature (1358)..(1358): n is a, c, g, or t
  misc_feature (1363)..(1363): n is a, c, g, or t
  misc_feature (1365)..(1365): n is a, c, g, or t
  misc_feature (1377)..(1377): n is a, c, g, or t
  misc_feature (1414)..(1414): n is a, c, g, or t
cggtgtgcgcccagtgtgcctggccttcgaaatcggtcttcgagaccgcgccgtgcacaggggcaggacgtcagccaaaccgcgaccgtgcatgtgcccggccccccgatggaccccccggtattgctagcagaactcacccaattaatcaccttcataccgccaccccgggttcctcccccattactccgcgcgccgaccccgtccaccgccagctacgtccccccacctcccagtacgttatcacccgtccgcacagcggcgcgcaccggcggagcaccacccccacccctgttttcgcgcccgtaccccgcgtgcccacaaccgtcgggagtcccgatgccactcttctctnnnnnnnnnnnnnnnnnnnnnnnnnnnnnnnnnnnnnnnnnnnnnnnnnnnnnnnntntaggcccggggtgccgcgaaccctgcacacgctagcgtcgcagtgtgcctgactactgcggacgcggtcgcggatcgcgcactctcactgacgcactgctcttcatggacgttatcgaccgcgtcntcgtatatacacacacgaccctcgcacaaccagccnctcgacgcgctctagctcggtgcgtgatctggtattacacgtcgtgctcgatctgctgagccacgaacgcaccgcgccgcnccgagcttgtcttatngtgttagcgcacacgccgacgctggccgcgagtagtagacagcctctgtatcaagactgactatcccacatcgactncaacnctgagtcganttgccacgncncagcgtccgacnggatctccagagtgtgtcacgcagcgcgtggatacgcgcatgcgcnctactgcgggtngtatacnggatntgtattgnagatgcngngnatnactaccgncgngccacgagctcaactngagcngttggtgctttgcgtcngtcaccacgcagcgctcgactgctgcgcntcgtcatcgatnntgatgactgacgnancatgatctacatcgtgccgtgtngtctctgcngcagattcccatcgtgcaccgactgcactacagcatgattcgatcgcgncagcngctccgnacgtganctntcgtatcgacgccnngtagctgacgtaccnntgatgtacntgctntagtacgcctactggtcggcgacggctccantcatacnagcacttcatnagtnntgtcgatcganctanganttnctgccgtccgcagcgtgtcatgcgtatgcntccgtacgcccgcgcatnctccagtnctnccnacntgactgnntagcgnccccgatctacttacggtncatnacgtccgtcgacgtagtaccacgncacccagcgacgctgatccgatctncagangntccgtcatctanacttacgtagtgtcgatcacgaccccgatccgccgcnctaccgatacg

SEQ ID NO: 301363 - DNA, 1236 bp, Homo Sapiens
  misc_feature (113)..(123): n is a, c, g, or t
  misc_feature (125)..(386): n is a, c, g, or t
  misc_feature (933)..(943): n is a, c, g, or t
cttcgacacaccgcccgtctcgcaccacctctcataaataagtccaaagactagagtggtgaattcgggacgaggcttattccccatgtccctatacttcgtgtgcttttccnnnnnnnnnnngnnnnnnnnnnnnnnnnnnnnnnnnnnnnnnnnnnnnnnnnnnnnnnnnnnnnnnnnnnnnnnnnnnnnnnnnnnnnnnnnnnnnnnnnnnnnnnnnnnnnnnnnnnnnnnnnnnnnnnnnnnnnnnnnnnnnnnnnnnnnnnnnnnnnnnnnnnnnnnnnnnnnnnnnnnnnnnnnnnnnnnnnnnnnnnnnnnnnnnnnnnnnnnnnnnnnnnnnnnnnnnnnnnnnnnnnnnnnnnnnnnnnnnnnnnnnnnnnnnnnnntgagccactccgcccggcttatttttctttatgtcccttgctccctattaggttctgccgaccagtgatttgcttcccccgccgacgccgctggggaagctttaaaaaataaaaagacgccccccacacagcattctgactttacactcgccttgaattcaccctgtgccttggaccccaaccccagggattccatatcctccaacaacacctcccccagctgtcccacaatacaatttcccaccattatttgccacccctacgccaacccccacattttttcaattcctctccttgcggctaaccgccaccacctggataaaaacattttcccccctttgccctcttctttaacatttccccacccgtagaagggcaatttccaaaaaccttacctccggggcccatacgtgaatatggcccaaaatcttggtccttggcaaccaaaattttacaaaaagattttgggcctaaagcgaggctcgtccataaaatatccggttgttttttcgggggacacccaccactcacactggcttcttataannnnnnnnnnngccacacttccaattggttgtggtggttgcctgccccctccgcggcgaatcccttatggaccaccccatattttttctcccccctctcgatcattgagcacaataccccctacgtcctcccagcgacactcctctatggacccggccaagcacctccatataaccaactcgccactgtgtccacatattcccacttgtgtgtgttactccaccctaataaaatcactgtgataaacacgacaagcctctctctttgtgcgacgcacaccaggagttttgtttacatccccccc

SEQ ID NO: 301364 - DNA, 354 bp, Homo Sapiens
  misc_feature (89)..(104): n is a, c, g, or t
gccgctctgcatggcccccgacatcaccctctggtccccctcttcccccttccccgtggtggctgtgtagattctctcctttgtcgtgnnnnnnnnnnnnnnnntgggtcgctcacttcttgctctgcgtgtgttctgctcccctgatcgtttcatctctgtacaggttgctgatttgttgttctctctgctggggacccgcgcatcttcctttgagtgtgtcctgctctccacctccccctcgctctgtgttctaggccctcctgctgacttctctctgccaggactgcccatctccatggtgtctgacccctgtctctctatcaccagcctcacctgcccttcccttggtgt

SEQ ID NO: 301365 - DNA, 621 bp, Homo Sapiens
  misc_feature (20)..(20): n is a, c, g, or t
  misc_feature (23)..(23): n is a, c, g, or t
  misc_feature (34)..(34): n is a, c, g, or t
  misc_feature (42)..(42): n is a, c, g, or t
  misc_feature (73)..(73): n is a, c, g, or t
  misc_feature (129)..(129): n is a, c, g, or t
  misc_feature (131)..(131): n is a, c, g, or t
  misc_feature (136)..(136): n is a, c, g, or t
  misc_feature (138)..(138): n is a, c, g, or t
  misc_feature (140)..(140): n is a, c, g, or t
  misc_feature (142)..(142): n is a, c, g, or t
  misc_feature (152)..(152): n is a, c, g, or t
  misc_feature (155)..(155): n is a, c, g, or t
  misc_feature (260)..(260): n is a, c, g, or t
tgggggtggggcggaaattntcnggggcacgaangggcatantaggacatatagaggctagcatagtggcgtngagtgtctgtacgttgcagacctcttcgagaacatattggatccctcggagggggntntccangngnangtccgcacanaantggagtaggctgacatgatgactagcaacagcggtgacagactgaggtagagcatcgaccacataagaaactagacaccacacacgatccatacagtctgcagcnccacataagcctagccagagatggaactcctgtgcgactatatagggtagtacccaagaggtcatagaacagggagatacagtggtatcctcgcgtatttgcgcatacgtatgggtagcgtaccgcatgaacgtcgtccgcctctctgtcatgggcagctagaagactcgcactgactgagagtaccgcatgagtatcatgtcaccagtgatatcttaaacactatacactcgcgctagtggtactgaaagagcattgacatggtacacatgcgtataggccatggaaccctatctacaaaccatcctgctcattgaacttcgccttctgaatatcagatgcaagggatgacggcggaacg

SEQ ID NO: 301366 - DNA, 1084 bp, Homo Sapiens
  misc_feature (49)..(111): n is a, c, g, or t
  misc_feature (116)..(130): n is a, c, g, or t
  misc_feature (237)..(245): n is a, c, g, or t
  misc_feature (520)..(528): n is a, c, g, or t
  misc_feature (579)..(638): n is a, c, g, or t
  misc_feature (673)..(761): n is a, c, g, or t
ggcctgggtggcgaatccggcacgagggagagaactagtctcgagtccnnnnnnnnnnnnnnnnnnnnnnnnnnnnnnnnnnnnnnnnnnnnnnnnnnnnnnnnnnnnnnngaagnnnnnnnnnnnnnnncctttttttacaaccctggggggcccgcgggagtacaaaaaacaccccatggggccccccccaaaaagaaccttttaaagcaaaaacaggggggctcctggccgcgnnnnnnnnntcagggccctatccgcacccccatcaaaaggaacttgttggccgaacccccctgcacccccttgttggccaccctgttggagggtgcttccaaacggccggtggctggggacttcccttcccggggggggatttttctcccccccaaaaaggccaaaaagaactccccggcttcctctgggggaaaaacccttaaaaaccccttacagggcaacaaaaagaacccggctttgggggtccgttcgcaaccccttatacccggcccataggggacannnnnnnnnttggaatggccccttccccatggagcctgccccctcccattacccgccaannnnnnnnnnnnnnnnnnnnnnnnnnnnnnnnnnnnnnnnnnnnnnnnnnnnnnnnnnnnattcccgaagcggccctcacccgcttttcctacgnnnnnnnnnnnnnnnnnnnnnnnnnnnnnnnnnnnnnnnnnnnnnnnnnnnnnnnnnnnnnnnnnnnnnnnnnnnnnnnnnnnnnnnnnattatacattcccgcattttctaccccgatttccgcatccgaccctgacggacggcaaacacgccaaccgggcgcacaccaggtcagcggccgcaacaagatgcgcaaacaagggacccacagcgcgccaaatcgcctatctagtcgccccccgtctcttcacacttgccacccaccctcgacccgtttcctgtcaccactataccgcggccaactgtgtacaaacgacacagatggtcgcaccaaacggcagcgccgcacaacgatcacgatctctgccctgcacccggtctggacacttgtagacgccggacagcgagacg

SEQ ID NO: 301367 - DNA, 676 bp, Homo Sapiens
  misc_feature (292)..(348): n is a, c, g, or t
  misc_feature (382)..(397): n is a, c, g, or t
  misc_feature (444)..(444): n is a, c, g, or t
ggagcctcgccgctcgcagctcccagactgcctccacgaaccggcgcggccgcccccactcgacgcaggacccgtccgccggactcccggggtgcgtgcacctcgggttgcgcgcccccgcagttcccaaagtccaccaattccctctcggccgcgcggtcctttaacactgtttgcccctgtcccagagccaccacagcgctcgaggcaactccaagtccgccgtaattgacaaagccggcacttactgtgtacgccaaaaccaacgaaccggcaaaaccgttcgcctttnnnnnnnnnnnnnnnnnnnnnnnnnnnnnnnnnnnnnnnnnnnnnnnnnnnnnnnnnatgcaccataggcaccgcctcacccgggaggcgnnnnnnnnnnnnnnnnacgggattggaccaccctccttttaataccagtgcccgccggttggnggagaccctgtcaacatttgcaccccccttctcctccttcctgcgacccgtattctccctctgaccacaacccccaatattgacaacctgtcataccaggaccgataatccctgtcgaaaccccccagtctaccactgtggaatgccgcgcgcacccctcaccttcgcgcgccacacgcgcgccaagaggatggctctacctattccagccccccctcttcatcaacatcac

SEQ ID NO: 301368 - DNA, 380 bp, Homo Sapiens
  misc_feature (295)..(339): n is a, c, g, or t
gtacccccctgcaactggtacccccacaacctccaagtacaaccactaaaataactggccccaatcccctttaaaggacgctccgagggaatcataggggcggggcgcgcggaaaaaaccaggccataattgaaacacgggaccacggggccaaataagcgcgcgtgccccccggcaaccaatttatttcccgcctggcctttatcgcccgggattattccctcctggccgcctttgaacccccgactcgccccccccgggacaaacgattatcgccgttatctccccgcatatnnnnnnnnnnnnnnnnnnnnnnnnnnnnnnnnnnnnnnnnnnnnnatagagatacgcccccgcccgcgccgtatcctgtgtcgccc

SEQ ID NO: 301369 - DNA, 995 bp, Homo Sapiens
  misc_feature (46)..(114): n is a, c, g, or t
  misc_feature (126)..(134): n is a, c, g, or t
  misc_feature (166)..(177): n is a, c, g, or t
  misc_feature (280)..(298): n is a, c, g, or t
  misc_feature (428)..(440): n is a, c, g, or t
  misc_feature (589)..(597): n is a, c, g, or t
ggcctgggtggaaattcggacgagggagagagaactagtctcgagnnnnnnnnnnnnnnnnnnnnnnnnnnnnnnnnnnnnnnnnnnnnnnnnnnnnnnnnnnnnnnnnnnnnnccggggttgggnnnnnnnnngacccaaacccccaaaggcatttttgtaaatnnnnnnnnnnnncagggacggaagaaaaaatgaggcaaaggtgaaaccccttggaacccaacgggggggattggttaactttggcaaaaaaccaccccaccagccccgggaaaannnnnnnnnnnnnnnnnnnccggcctccctttaaccccccctgtccctttgggggggcccaaaattccaaatggccctttccccccctcttcaaaggtcaaaaaccggggaggggcagggaaaacctttcttccccaaaaaaaccttcnnnnnnnnnnnnncaaacctttttaacaaaggttgaaatgcaattttgggggccaaaaaaaagaattttcccaatttcccccttcgggggtcccaagggtctcaaacccatttgccctatttctccttttctggccctgaaaccaaaaggactttgcccaannnnnnnnncccctgaatttgtttaagggaatcacccactttttcaaagggccaaattgactcaatgggggggtttaattgtgcccctgtttgtccaaaacccagaagggggccccccacccccttgacccctgtttgacccttgtgttggccaaaaggaacccccctgggttcaagggaaaaaaatcccccttaggtggggaaaccccctttttcccgggtcccaaccccctcccaatttcccccccggggagggccacttttttgtgtcccccaacgaaacctgtggttggtaaaaaacaccccccgggccaaatttttccccaaaacccctgtcaatgctattgggtccccaatatggaatcaccccactcctcccccaaaaaaacttttcttggcccctcttc

SEQ ID NO: 301370 - DNA, 1096 bp, Homo Sapiens
cccgctctcctcctccccgccacccttgccacccccgccccccggtcttagtgcagcaccgcctgcggtggcgaattcggcacgaggaacaaatttatattgggttcatagtggcatcatgcacacagactcctgcgagttcccctaagttcttagaggactgctttaccttttgatctgagagttgcaaagttccgtaaagaatggccctgtggataagcgctaagtcaagagacagcgattggacagaatttgtgaaggaattcgccgccagatcacgaaagaccccctaagcccccgctcactggcagcgttcctggtcggccgtgactgcactgtggacatgcccatcctgaaggatctggccaccgtggccttctatgatgcagtccacgcaggaaatccacgagaaagttctaaacagagccgtgggccccatgatgcaccacacaatcacctcaccagggaggttctggcaaatttcaagtccttgacagtgatcgtgggggtgggcagtggctatgacaacgtggacatcaaggctgccagcgagctcggaattgctgtgtgaaacatcccgtccgcagccgcggaagagacagcccaattccaccaactggcacattctcaacatgtaccgggaggaacacatgggctctaccaagcaactgtggggaaggcacacccggggtttcacagtcatgggagccatattcttgccaaaggcgggcccttccgaggaggttgggccccggcattttgtttgggaaaagaatgtcttggggcccctcccttcgggcttaagggttccgcaacggcagccaaggcttttttgccaagtttcccagcccaccagacccttttttgggattcccagccgtttcatggttttttaatttaacacccttaccttttccaagggaatggggcaatcgaaaccacacccccctgggggccatgtcaacaagggttattacacccccctgccaaggaatttggcttgtccttccccaagcggacctggccatcccccctttgccacctggcaacttcccccacaggaaaccttaagacgcccccccctttaattcactga

SEQ ID NO: 301371 - DNA, 1054 bp, Homo Sapiens
ggcctgggtggcgtggctatcagaagctctagaacccagaatattcctccaaagatctcgaagcacttacactctcataaaaaggatgtgttgtgacattgagaaatggagactgaggctcagagaaggatagggctgaccctggatccctagtaaagccaagtcaggcacgagggcaatgtgctcccaggagagaagactcagagctacatcatctttaagggttgggctaaacttagaagagcatggagatccaggtatgccatggaataggccaatgatgcagcaagagaattgaaggttagactacaggcaggacttcctagagatcaggtttattccactggctgtgcactcccattccaggcccactgtttatcccccatcttccctgccctctcagcatctgccttcatacctgtccctgcactttcctaagcctgagatgatgggaaatttcctacttttcccagatcctcccacctccctgccatcataacccccatctcccccactgtgtctggatatcattccctagggtcagagttgggagaggagtggcacaaccagatgcttagggcctctctctgacctttcgagggaggaggttcttgatggggccagattagaggggcggagaccagctccagacattgggggtgcttgggaggactgttctggggcctggaggggggaccattggggcaggagcagccagtggccaccgggtgctgggaaaaactggtttgccatgcatctgaacctgtggccaggccctgggccctgggccccctttctgggggccctcccttcccttatcttctggggctggaaactcggaccttgctccacaaaacctggccttcccattttcttctggaagggccgccccaaaaaaacccacataagattgggaatatattttgtggggggccaacaaccccgggaacccaccccctttcacaccccttgattggaacattgggacaagacgaggggaaaaaaggggccctcagggcgcccatagggggaccttacatggcctgcttggaaa

SEQ ID NO: 301372 - DNA, 955 bp, Homo Sapiens
  misc_feature (42)..(119): n is a, c, g, or t
  misc_feature (262)..(317): n is a, c, g, or t
  misc_feature (659)..(670): n is a, c, g, or t
gtctttcagtccctgtttttcagccccgtctccctctcggtnnnnnnnnnnnnnnnnnnnnnnnnnnnnnnnnnnnnnnnnnnnnnnnnnnnnnnnnnnnnnnnnnnnnnnnnnnnnnngcagccccgccgcttgaagctcccagcctgcctctccgaaccggagccgccgcccgaactcatcgcaggaccggcccgcccggctcccggggcgcgccctctcccggcccagggtccttacgggttcgcaaggatctccgttnnnnnnnnnnnnnnnnnnnnnnnnnnnnnnnnnnnnnnnnnnnnnnnnnnnnnnnngccgaggcaggtaatcccatgctttttttcgggagggggtacatgcccccttgccccgtggaaatcgcgcatcccagccgctttatcgcgccgtaacggactatccgcgccggtcccgcgccgctaaactacattccccgcgctctttctattatatcgccgccgcccgagcgacccggataacgttgattccgtgtcgcgccgcgcctctcttactttatttcccccgcacatcgattcgcccggctgttaaccgcccgccgcgaccttgacccgtccgccgccacaactcttgccgccgttggaacctgagcccgccaccccgtttcacacttatttcgnnnnnnnnnnnnggcataatacccccccatttcggaccggcccgcgcattcgcccgccccgccccgccttacacttgttacgcacgggcccactggtcgcccgccgacctcccttttataaatcagggaacggcacgcagagggctgtgttagttatatgtattagcgccgcggagagcgcgcaggatttctcaccattgacacaacacatacataggtcgcctgcaccctcgccgccctgttcaccaccagcaatttgttcgcggcgacccaccttaccgccccacctaccgcacc

SEQ ID NO: 301373 - DNA, 797 bp, Homo Sapiens
  misc_feature (259)..(267): n is a, c, g, or t
  misc_feature (293)..(301): n is a, c, g, or t
gggggaaccattgcaatggccttattactactttatatttggggagggctttaaagttgacaaagtttttaattaatcctcacactattaccttggggggttgaaaaacaaatttcaggagggtgaaagggaaaacaccaaaaaggaagttcttgcaatatttcaacaaaaaaatgaaaaattggattaaattccaggtctacctttttgggaacaaagaactgttctggtgaaaaacaattttctacaggcgctctcnnnnnnnnnactcagaacaaaaaacccgtctcccnnnnnnnnncggtggccccccccaccaaggccaataaaaaattaccacaaagggaatcggggaacaaccaaaaagacctaaagccggggggccgtacacaaaaaaagacacggggggtccaacgcgatgagaccacagccgcgtccacccaccctaaaacaaaaagacccgacgcacaaggacagaagaggaaatcatagcccaagcccacccgcccaacacatatgaagtcaaacagagcaacccgacaaacagatacgaaccaaatctaatgcacaccgatgccacaaacgggatccaccacttagcccggcccacgctacacctccgcccgtacaaaacacgcagacccccacccggggggctttaagcacacctcacgtgttaacacacgcccgccaagcgaagataggataactcaccaagtgacgcacacgtgaagcgcaacatgatagacactatcaccaaacgtccgacacctcaatcccccgtgcaacgctcagaa

SEQ ID NO: 301374 - DNA, 976 bp, Homo Sapiens
ggcctgggtggcgaattcggacgaggacatgctgggaagtggtggaggtagaattcaaacccggagcgcaggcgttgtctgcacctcggagaggcaccgctcttcctgaaatgctcctccctggttatctatgaggctgaagtcctcacctctttcaggtctttgctgaattagaaccttctccataaggcaaggctgatgctgagcaccccactgaaaattttcctctctcccaagaccctcttctcagtccctctacttggctcatttcaggtgtctagcacgtcatgccctttaatacattttgcaagtatttctccacgagtgtgagaaagtggttttctttggtgggggttgatttttcatggcacataaagggcagcagggtttctttgggtcctgtctggaggcctgaaggtcacgctgggcttctggggagcgggtccccttcctgcagcctccctctccacttgcgtgtttctcactcctctctctccctgggaagtgttgcttgataaagatgcagcttttaattaatgtaactgttcaagattacagccggtcatcagctttctaaccagtgcctcacagctctgctggaagagccttgctcccgtgatggttgatttgccattctctgtcccagcccagagaagctcccctcactgtcaacgtgccatctgtcaggtgcatggtataaagctgtcatcatgatcagctcattcacgcaccagctttagctttgaaggactggcggccccgggcgtttgaaaacctgctgaaaccctccacccagaacatctggatgttccaggtctccgggggggcccttggccggctggggtaaacccgaaccaggtggggccaccggacaaggcaacccaatggcttgcggaactccgccaatccaaaaaacccccgggttttagaaacaaagtgacccactcggtctcgggcttccctggacacccacacc

SEQ ID NO: 301375 - DNA, 496 bp, Homo Sapiens
  misc_feature (41)..(42): n is a, c, g, or t
taaaggtaagcggaggggcctgggggtggggcgatattcgnngcacgagggctatagaccttgagcgtagctgtgcgtcggtgtgtactgcgaccttcgaactatgaccctcgaggcttcaggtagcgcccaactgataggcgactagtgcctgcacgcgtgcgatgggtggatgcccataaactgccccacacgtctcgtctgcacccactacctatgcggaggaatctgtcgacttatggttagtcccaaaggtatagacagggagatacagtggtatcctcgcgtatttgcgcatacgtattggtagcgtagcgcatgacacgtgtctcgcatctctgtatgcagctagaatcgcactactgaggtacgcatagtatcatgtaccgtgtatcttcaattacctccggagggtctgaaggcttgcatgtaccatctatggcctagaaaattctagaacaacacgctatgaaacacccttttggatatcaagctg

SEQ ID NO: 301376 - DNA, 230 bp, Homo Sapiens
  misc_feature (134)..(166): n is a, c, g, or t
gggaggggcaaaaaccccatcaattccccgaaaccattttgtgggggactttttgaaaaaaactgggcaccctattcccccaaggggggtgggaactattgggcccagggcaggggagaactattttcgccaannnnnnnnnnnnnnnnnnnnnnnnnnnnnnnnnaagaatatctaccctatccggccaaaggggggcctcggttccccgcgggaaagacctttctgaa

SEQ ID NO: 301377 - DNA, 1312 bp, Homo Sapiens
  misc_feature (77)..(464): n is a, c, g, or t
  misc_feature (575)..(584): n is a, c, g, or t
  misc_feature (737)..(746): n is a, c, g, or t
  misc_feature (769)..(781): n is a, c, g, or t
  misc_feature (1012)..(1012): n is a, c, g, or t
  misc_feature (1111)..(1111): n is a, c, g, or t
  misc_feature (1208)..(1208): n is a, c, g, or t
cccctcccctcgctttttccctcccccgggacactccacacactctctcgaggcctgtgtggagaattcggcacgannnnnnnnnnnnnnnnnnnnnnnnnnnnnnnnnnnnnnnnnnnnnnnnnnnnnnnnnnnnnnnnnnnnnnnnnnnnnnnnnnnnnnnnnnnnnnnnnnnnnnnnnnnnnnnnnnnnnnnnnnnnnnnnnnnnnnnnnnnnnnnnnnnnnnnnnnnnnnnnnnnnnnnnnnnnnnnnnnnnnnnnnnnnnnnnnnnnnnnnnnnnnnnnnnnnnnnnnnnnnnnnnnnnnnnnnnnnnnnnnnnnnnnnnnnnnnnnnnnnnnnnnnnnnnnnnnnnnnnnnnnnnnnnnnnnnnnnnnnnnnnnnnnnnnnnnnnnnnnnnnnnnnnnnnnnnnnnnnnnnnnnnnnnnnnnnnnnnnnnnnnnnnnnnnnnnnnnnnnnnnnnnnnnccccaagcggcctgatttcccccgacgccatcccataatccatcccctatgtttgtatttcgcttcctttgtgccacccgtaccccgcctctcccctctctgggcttaagnnnnnnnnnnttgtggatgcactcagtactctttgcactgccccctaccgtctcgccctttgccccaccccgacaaccttttctgtgtttccgcgcgcccccccacacgggcgtgattgtgcctctttgtctttctccccgcaatatccctgccccccccgcnnnnnnnnnnctccgtccccgccttattttatnnnnnnnnnnnnnattttcttttaacccacccgtttgtcgcccccgccgtttattggcccacacacgccggcgatcattggtgttagacgcatccccccgcccgcgtggtgttcctttccacgttattacccacacattctcgtttatacgcccgacccgcccccgacccgattatctctttcataccactctccgcgcgccctcgtgtattcactcgacgcgcacctataagcgcaccctcgntactctcgcttgtgggcggcacacagtaaaacacttctttctatagagtcgttctctcccgcgcgactccacgaatgttcaccccccacgcaccttatncataggtgtggacaaggactctagatactatagccacccacgcgccccccaccgtgtactactcccacatatcgctctatgtaaatcgcgcgtgtcntcttcccttataggcccatacacaagaaacgcccgcgcaaacatatttctgtatcgctgtctttctacacaccccaaccatatgctaaccgcatgcacaacgac

SEQ ID NO: 301378 - DNA, 481 bp, Homo Sapiens
  misc_feature (96)..(317): n is a, c, g, or t
  misc_feature (321)..(371): n is a, c, g, or t
agtgggcctgattcagcaggaaagcatcttcagaacacccaaccactattgctgtcaaccagtggccccgggggctaacaaggggtgggttccatnnnnnnnnnnnnnnnnnnnnnnnnnnnnnnnnnnnnnnnnnnnnnnnnnnnnnnnnnnnnnnnnnnnnnnnnnnnnnnnnnnnnnnnnnnnnnnnnnnnnnnnnnnnnnnnnnnnnnnnnnnnnnnnnnnnnnnnnnnnnnnnnnnnnnnnnnnnnnnnnnnnnnnnnnnnnnnnnnnnnnnnnnnnnnnnnnnnnnnnnnnnnnnnnnnnnnnnnnnnnnnaacnnnnnnnnnnnnnnnnnnnnnnnnnnnnnnnnnnnnnnnnnnnnnnnnnnncccttaatgggggcgcgccccatttttgggtggcgccccccccggggaagaaaatgttaaagaaccccccaaaaaaccctgtggggggccaaagccccctcataaaaact

SEQ ID NO: 301379 - DNA, 859 bp, Homo Sapiens
  misc_feature (697)..(735): n is a, c, g, or t
cggacgaggcttccttcttctcccctgctctgtcttgtgactttttggtgaacacacaacttggagccagaaggagactgtgtggtctgtggtggcggcagggtgctgctggcggctagggcaattccccttgcctccctgggcctccacctttctaagggcaactttctgcgcatcatagaggaggtggatgttttcaggagccagggaagggaagagtggctccaggacgtttgtggggctggcccacagcaccagaaagtgtccaggacctgggtttctggcaacttctgtgtctttggccagcctgacacatgggccatggtggtaacttgagggttgtactcaacacatggtgaactgagtcattttcaggtttagggttaagcagcctggtggacacgtcatacttcatctttagaagatagagtggccctcttcagccttggagacacatataatagtgttctaatgcttaataatacttttcagacttgaaagtacaacataaaattaacttgatggtcagagagtcagagcagcccaggcctgtcttggggattaagtaggctccaggactttaaggatggccagaagagatttaggatctcagagagctttggcaatttcatcccttaataaagtgaagtgggagggaaagaggtgatgtcttgtctctatctccaaaaatcttgcnnnnnnnnnnnnnnnnnnnnnnnnnnnnnnnnnnnnnnngccacacccctggccctttcttctctgctggggattatttaagccctgcccctgggtctttcctggccggtgcccggctgggggcaattgtctgggaaaaaccaaattcccagatgggcagaaa

SEQ ID NO: 301380 - DNA, 915 bp, Homo Sapiens
  misc_feature (752)..(752): n is a, c, g, or t
  misc_feature (835)..(835): n is a, c, g, or t
aggtcccatcccggactggactggatgagcaccaataaataagaaaacacagctggcagctgactgtgaagggtctggacagggtgccgaagtgaagcgtaatgagctggatagtgaggacctcactacagagggacatctatctacacacagcctgaagggtgagaaagatggatccttgccctgagccagaagtgcacaccccagagagagcagctcctgcagaggtcctgtggggcaggcatggtctggaggctggaagcccaagatcagggtgccagtgctggcatggtcgggttctggtgagggccctcttccaggtcacagacagctgtcttctcattgcatcctcacatgacagaaaagaagtgcacaagctctctggccccctcttacaggcgctaatcccattcacaagggtcctaccgtcatgacctcattacctcccaaagaccccacctccaaataccaccacattgccattaagcttcaacatatgaatttaagggggaaacaaacatccagtccattgcagattgtcctgataatatgtgtgcccagggcattgcccccacagcaaagagagacattggaaggcaaaccaatgtcaggtttcctaatgtgcacggagtcatccctggaagagtgagtccggtgatcttaccagctaattgcattgagctaccccaccttggggatctaccctgccaaggaggacagaacaccactgggctttgacacccatctctcancaatgatgggaagaatggctggaaattttacctgctctggtaggctctggctaagttcctcttccctgggatggactttcctnttttaattgccccccaatacctgggattattaaaaatctcctttaaaattttctttaaaatacatttaaaggaccttttt

SEQ ID NO: 301381 - DNA, 241 bp, Homo Sapiens
ttgccaagtggtgagaaccatccaccaagccggggaagactaatcacctaatcgcccaattgggcctgatttcagcacgaaagcctcctccaaacaccaacccacctatgcttgtcacaaagtttgccccgggcctaccaagggctgggttttcatcccctggggctaaggcttttctgtggaggatgaaacaaccacccgggataaaaagggaagggccgccctggcttaaccggggtac

SEQ ID NO: 301382 - DNA, 702 bp, Homo Sapiens; identical to SEQ ID NO: 231380
  misc_feature (50)..(308): n is a, c, g, or t
  misc_feature (313)..(470): n is a, c, g, or t
  misc_feature (478)..(516): n is a, c, g, or t
  misc_feature (535)..(653): n is a, c, g, or t

SEQ ID NO: 301383 - DNA, 1068 bp, Homo Sapiens
  misc_feature (407)..(463): n is a, c, g, or t
  misc_feature (823)..(832): n is a, c, g, or t
agtcgacggtaccggactatgcccgggaattcggccattacggccggggctttttttggggacagcaatgtgctgcgtgcactatcaccactctccagtaaccacgttatcaactggttatcaagggcccatgtctgtggcaagaacgctatgctgggcattgactaacgctgctttagctttcatgaaacactgtggaccctccagctgactgtgcgtcctgctctgctttcagattgccgacagtttgaacgaataagactttctgctcaaaggatccccggccctggcataccgacattaaatatttactaaggaaatgaataacccgaagaaagaatagaagaaaggaaagaacgaacgaaatagatgtttatcttatttgaagttaataccatattaaaacnnnnnnnnnnnnnnnnnnnnnnnnnnnnnnnnnnnnnnnnnnnnnnnnnnnnnnnnnttaccaccttatcccgtgccggcccgctctcgggcctctcataaaagcctttccctaaacccattcctttctgggcgccggcgtggcgccatctagggtcaacgtggacacattgggcttattacgcttggctctccataagggaagatccctcgggtacacggaaatatagtgcctgtgaaacttcctacacccaaacataaaaaaaaccgcccccgggcgggcaaaatccggaaacgtttttttgcaactaactttcttaaatgggaagtctcccccaacgcctcatttaccttgggacttatatcaaaaccgccgagcttccaaaggcgagccttccaaatatcacaatttaaccgnnnnnnnnnntttgcgccactctcctccccaaataaccctgtgtgcgcatattctcctatcacgcgccctttttttgccgcaacaatggcaatatcccccctcaaccaaaggcgtgtgcttacacgaaaccctgagaatactcgcccaaccggtgccatcccgccaacctttgtggcgtgccctcttgtgcgcctcaaatattcctcctcgcctcccgcgggggtataaaaatatgggggggcgcc

SEQ ID NO: 301384 - DNA, 981 bp, Homo Sapiens; identical to SEQ ID NO: 231384
  misc_feature (701)..(741): n is a, c, g, or t
  misc_feature (790)..(839): n is a, c, g, or t
  misc_feature (928)..(928): n is a, c, g, or t

SEQ ID NO: 301385 - DNA, 727 bp, Homo Sapiens; identical to SEQ ID NO: 231385
  misc_feature (118)..(133): n is a, c, g, or t
  misc_feature (163)..(167): n is a, c, g, or t
  misc_feature (202)..(202): n is a, c, g, or t
  misc_feature (233)..(241): n is a, c, g, or t
  misc_feature (247)..(266): n is a, c, g, or t
  misc_feature (273)..(273): n is a, c, g, or t
  misc_feature (281)..(285): n is a, c, g, or t
  misc_feature (298)..(299): n is a, c, g, or t
  misc_feature (303)..(306): n is a, c, g, or t
  misc_feature (310)..(322): n is a, c, g, or t
  misc_feature (328)..(338): n is a, c, g, or t
  misc_feature (344)..(345): n is a, c, g, or t
  misc_feature (347)..(348): n is a, c, g, or t
  misc_feature (350)..(351): n is a, c, g, or t
  misc_feature (369)..(369): n is a, c, g, or t
  misc_feature (409)..(411): n is a, c, g, or t
  misc_feature (444)..(444): n is a, c, g, or t
  misc_feature (450)..(450): n is a, c, g, or t
  misc_feature (477)..(489): n is a, c, g, or t
  misc_feature (493)..(493): n is a, c, g, or t
  misc_feature (496)..(496): n is a, c, g, or t
  misc_feature (528)..(528): n is a, c, g, or t
  misc_feature (531)..(542): n is a, c, g, or t
  misc_feature (556)..(556): n is a, c, g, or t
  misc_feature (585)..(659): n is a, c, g, or t

SEQ ID NO: 301386 - DNA, 829 bp, Homo Sapiens
  misc_feature (457)..(466): n is a, c, g, or t
  misc_feature (748)..(749): n is a, c, g, or t
  misc_feature (751)..(751): n is a, c, g, or t
  misc_feature (753)..(753): n is a, c, g, or t
  misc_feature (755)..(756): n is a, c, g, or t
  misc_feature (758)..(760): n is a, c, g, or t
  misc_feature (771)..(771): n is a, c, g, or t
  misc_feature (773)..(774): n is a, c, g, or t
ggtgttgatgatgaaagtttacaggtggatcagagtatgctggaactcagtgtgcataaaatttcagtcagtgaatatcactgaacgtcatatactacttggtatgtgactttggtttgtgttaagaaagcttgtatataatattttttgccatagtaagtgagaaattgtccttaatcatgcctgtttgatggtactaggaaagaaaggggtagagattaattcttgcacagtataagcaacagtgcaacaaactatgccatttaccttttacctcttacttgaaggcagaatcgcaaaacgtttgaaatggcttttctaaactactctactctggtgagagctcatttaccacaagaagccttataaaaaagtatattttgtaataaccccgtagatactgtacctaacaaaacatgactcgtattagctctataaaatatttgtggcttaggannnnnnnnnnacatatatctttttataactttccaggaactaagcacattatctgataattgttgtaaatttttttgtcagtgctttagttcaggatgggcaataaattatttctaaaggaggtctacaagtggaaagaatggtttgattttataaaatgagttgctagttcattacagctttttacttttgtacatattttgcaaaacatttgcctcttgctatttatatttggctttgtaaaaattactggacattttataaaacattttggaaaacaatttccgaacgnngncncnntnnnaaccccacaancnntccccttgttcgggccggccttcgggccccctccaagaaagctttttcttaagaa

SEQ ID NO: 301387 - DNA, 289 bp, Homo Sapiens
  misc_feature (138)..(156): n is a, c, g, or t
gaggttcatatgtctatgcaagttatgaatcaagttaactgataaatagaaaatgttccattgctgattttatcaaataaaactccatagtaacctagatcagagtcaaacagagaattcagattcctctgagcttgnnnnnnnnnnnnnnnnnnngagacggggtctcgaaacatatgtctatacaaattatcagccaagttaactgataaatagaaaatgttccatttgctgactttatcaaataaaacttcgaatgtcggacgcctcggccctcaaaaaaccttgt

SEQ ID NO: 301388 - DNA, 883 bp, Homo Sapiens; identical to SEQ ID NO: 231389
  misc_feature (130)..(243): n is a, c, g, or t
  misc_feature (247)..(283): n is a, c, g, or t
  misc_feature (487)..(495): n is a, c, g, or t
  misc_feature (643)..(684): n is a, c, g, or t
  misc_feature (807)..(807): n is a, c, g, or t

SEQ ID NO: 301389 - DNA, 177 bp, Homo Sapiens
ctagattgatattcttaagcaataaaagtttactggttgtcctatttgccatattattgaaacttggaaaggataatttgaaacaaggtttgaagttaactgaaatatggagattgaatttatactcaattcttgtgaaaagtcttgcttaataagtatgattaaactttgcttcgc

SEQ ID NO: 301390 - DNA, 208 bp, Homo Sapiens
ggggaacaagttttttctccacttttccctccactcctaggttcaggtcaacatgagggtgaccatcgccagggtcagtgcatttggtaggagaccagggaccgtttctgggaatgtcaggaatcttgtctttcaaatgctcacttcacttcacagcccctgcgagtgccctgaacctttgcaaggtatgttctaagaaagggaacaa

SEQ ID NO: 301391 - DNA, 314 bp, Homo Sapiens
  misc_feature (186)..(214): n is a, c, g, or t
gggtatgtatgaaagtatgtgtgtatttgtttgtaaaaggatgccaatgttttacctgatatcttagtgacacttcagttatctatgcattctttagatctgtgattcggtaaacaggcagccatgttcacgatgccttctatgtcttaccatatttttaattaacctgttaaatacagcttaaannnnnnnnnnnnnnnnnnnnnnnnnnnnnctgaaatatactgcattattgtgttaatgtattatctttcctggatattatctcccagtgtatccagatctaagtaatctcagtgaactatacattgcct

SEQ ID NO: 301392 - DNA, 1114 bp, Homo Sapiens; identical to SEQ ID NO: 231395
  misc_feature (362)..(362): n is a, c, g, or t
  misc_feature (729)..(729): n is a, c, g, or t
  misc_feature (810)..(810): n is a, c, g, or t

SEQ ID NO: 301393 - DNA, 878 bp, Homo Sapiens
  misc_feature (751)..(751): n is a, c, g, or t
ggagggcgttcggggaggagtgggaagtggggaaagccaggctaaagaatgagggttatagctttagcaatgttgatgagccacatttcccacacagatctgtagcatttgctgttgacctcttttgagatgaactctcccataggccctgccaggcagcactgagacatggaggaaattcagacaaaaaatggctcaccctgatagggaaggagcgactatattttaaattaaacttgctttttccaacactgtgaggtttctgtaatatttagcttttatttggaagcgatagcgtatggcattttttatgctgtttggtttatattgtctactgcaggcttctttgtataagctttgcctgggctcaccctctcctggacactgttttacagtgtcaccgctgtccatggctgcagaggctctgatgtgaagctgtactctcaagatccacgcttttagactccgcatgattaggtcgtgcctttctgtggccaatagaaaagccccttaactcgggcgaggcgcccggcggtcgaccgcgctacctgtcggcccgcctccgccccttcaaaaagctttccccgaacaatttcgtctggggcaacccgcgcccacagaggtaaacggccaccggggtccatagctggccttcctcagcgcgaacccgtggctccttgacctcggcgccttgggcatcttctcccctcgttacaaaagaaccccctcgctgggtcacacgctacccctntccccggaccaaacgtccgcccacagtgcggcgcttccggaagcgggccctccttgcttgggacctccctgtacgcacaccgcggcggtcccccgccaggcgcacgaaatcttcgcttatcaatttt

SEQ ID NO: 301394 - DNA, 212 bp, Homo Sapiens
  misc_feature (159)..(167): n is a, c, g, or t
ggggtggtggaatttcagttgcttttttttgcgaggttaataggtcgaaaattttacttttgtttgatgactagtggtttgaatttttcgctgcctgttatattgcttgtatactttgcctgtttgtgtcactgtccttttggattggagtcatactgnnnnnnnnngtttattttaacttatctgtataaaacattgtattcaaaactaat

SEQ ID NO: 301395 - DNA, 919 bp, Homo Sapiens; identical to SEQ ID NO: 231402
  misc_feature (183)..(183): n is a, c, g, or t

SEQ ID NO: 301396 - DNA, 1092 bp, Homo Sapiens; identical to SEQ ID NO: 231405
  misc_feature (60)..(242): n is a, c, g, or t
  misc_feature (554)..(554): n is a, c, g, or t
  misc_feature (667)..(667): n is a, c, g, or t
  misc_feature (692)..(692): n is a, c, g, or t
  misc_feature (849)..(849): n is a, c, g, or t
  misc_feature (880)..(880): n is a, c, g, or t

SEQ ID NO: 301397 - DNA, 741 bp, Homo Sapiens
  misc_feature (142)..(166): n is a, c, g, or t
  misc_feature (181)..(410): n is a, c, g, or t
  misc_feature (572)..(572): n is a, c, g, or t
  misc_feature (655)..(655): n is a, c, g, or t
ggagttttcatttttttctatccattttaaagtgttggatctgtgggtgaagtgaaatttatttctaatatgtaagcaggtttaatttttatgtagtgtttaattgttctgtgatgaatgggccattacaaaatgagtctannnnnnnnnnnnnnnnnnnnnnnnngagactgagtcttgnnnnnnnnnnnnnnnnnnnnnnnnnnnnnnnnnnnnnnnnnnnnnnnnnnnnnnnnnnnnnnnnnnnnnnnnnnnnnnnnnnnnnnnnnnnnnnnnnnnnnnnnnnnnnnnnnnnnnnnnnnnnnnnnnnnnnnnnnnnnnnnnnnnnnnnnnnnnnnnnnnnnnnnnnnnnnnnnnnnnnnnnnnnnnnnnnnnnnnnnnnnnnnnnnnnnnnnnnnnnnnnnnnnnnngagtgagccactgcgaccggcccatgagtctttattaatagagatttcttactggtgttatgtggcagattctgcatattcctcacccatcatatgtattccactttcctttattatggggaaaactactctttttggcatgatacaatgttgactccattntctttgctaataaggacttggtatcaatttatcagtatgtaaagtttaccatagagtattgtctcatgtgaatcattcccatntttttgctctttactctttgtcgttatttctgagtattaatttggatgggtcatttttgacttaaaggataagccctgtgaatatg

SEQ ID NO: 301398 - DNA, 883 bp, Homo Sapiens; identical to SEQ ID NO: 231406
  misc_feature (342)..(494): n is a, c, g, or t

SEQ ID NO: 301399 - DNA, 507 bp, Homo Sapiens; identical to SEQ ID NO: 231410
  misc_feature (231)..(244): n is a, c, g, or t
  misc_feature (341)..(369): n is a, c, g, or t

SEQ ID NO: 301400 - DNA, 340 bp, Homo Sapiens
ggctccaagatgcttttcatatagagtggaatatcccaggataactgcttctgtgtcagtcgcatttgacgcataactgcacaaatgaacagtgtatactcttggttgtgcattaacttacatgtataatttttggcatctgtgttcacaaatgcatgtgttagcaaatcacctttatttataagtgacaataattgaagttaaggatataaagaaacctgcatttgtagtccagcgttttcatttggtccataacacaatgtatggaaatgtgaaagacaattttgtacatttgtttgttactaactcagatcattaaaatgaaaacaattttttcgaa

SEQ ID NO: 301401 - DNA, 746 bp, Homo Sapiens; identical to SEQ ID NO: 231413
  misc_feature (91)..(273): n is a, c, g, or t
  misc_feature (481)..(564): n is a, c, g, or t
  misc_feature (574)..(575): n is a, c, g, or t
  misc_feature (661)..(661): n is a, c, g, or t
  misc_feature (667)..(672): n is a, c, g, or t
  misc_feature (687)..(702): n is a, c, g, or t

SEQ ID NO: 301402 - DNA, 1313 bp, Homo Sapiens; identical to SEQ ID NO: 231416
  misc_feature (136)..(177): n is a, c, g, or t
  misc_feature (768)..(768): n is a, c, g, or t
  misc_feature (1220)..(1220): n is a, c, g, or t
  misc_feature (1225)..(1225): n is a, c, g, or t
  misc_feature (1296)..(1296): n is a, c, g, or t

SEQ ID NO: 301403 - DNA, 610 bp, Homo Sapiens
  misc_feature (126)..(154): n is a, c, g, or t
  misc_feature (595)..(595): n is a, c, g, or t
gggttcaatgaaaaaatcttgactatatttcaaatcacacttgctcttacagaagtaaagactgacatgcttccattcagacttgggtttgttttcacatggtgagaatactttgttttccttttnnnnnnnnnnnnnnnnnnnnnnnnnnnnncaaacacgtgagctccaatgaatgcacacagcaatttattttggttaggttcatttgcttgtcattctttttccttaaaatgaatgatgccagggattcagacaacatatttcaagctgtagatggccttaagcttgtaactcacttcaaagtctacaaggatagagagaaatttgagaaaccaaacacatttaagttgtgtctacatatacaaactggttttgggagaactagtgatgaaactaagttaagcaattatttaggatgggattatcaacagttaatttcttactactgatcttgctgaattcaactcctccttctccaaattctgtaaagccctttctgccagttgacaattccattttctaggatttgaagcaagtcttcgtaaaaactaagactatatttccacaaaggcaaaaaatggacatagacgantcctaaaaacatgtt

SEQ ID NO: 301404 - DNA, 550 bp, Homo Sapiens
ggtattgaatggaatgtacagagttcaaatatacttcctcacgtacacagtttcccctattattaacctcttttattagtttagtacctctgttacagttattaactgtagttcatacttcacaacagggctcattttttagtaccttttatgggttttgacaagtgtgtaatgacatgtatctaccattacactatcatacagagtagtttcattgtcctcaaaatgccctgtgctttaattcattctcctttcctccctcctctgaatcactgatgtttttaccctctccatagttttgcttttgccaaactgtcatatagttggaatcacacagcatataacttttcagattgtcttctttcacttaataatatgcacttaggtttcctccatgtctaaatgtggcttaatagcgcatttctttttatcgctgaatatttttcattgtatggatgtaccacagttttgttcatccattcacctattgaaagacatcttggttgcttacaagttttggcaattgtgaataaagctgctataaacattc

SEQ ID NO: 301405 - DNA, 443 bp, Homo Sapiens
gggggaagggaaagcaccgtaattgtgggatctttgcattgaaacttagtgcttccctgtcacagtagaaagtcatactgggcagaaatctgctggtgcccacacagaaagtatttagaccagctatgccagaggcaaatcatccatcccagtgtttggaacctgagttctggcaagtcttgccaccatgggctaaagtgctatgggtcctaaataaatttgaaagtcagtctaggcttcaagaactgcaattactggacaagtcctggtgctgtgttgggctcagagccagtggacttggggggcaggagacctagtgagacaccggccaaggcagccaagggaatgcctgtgccatcctcctccaaacacaagcagtgcagctggcagctctgggagagacttctttcttctgcttgaaaagaggggagaaaagaggaaaa

SEQ ID NO: 301406 - DNA, 867 bp, Homo Sapiens
  misc_feature (614)..(668): n is a, c, g, or t
  misc_feature (688)..(712): n is a, c, g, or t
ggaagattttcaacatgcaagagggagctttttgaaactagaaaatctactttctttctaaagacacatcttctaaacatttaggaaaactaatgtcaccctatataacaaagagagtttctctgaaagaaaataatgtttattcaggaatagggtattgctgtaggcatacatgtgccataggaaacgatgtgcatattcatgaaggtaaaggcagacaaagggttttaaaggaaaattggggaagattacgtaattgttttgaaatgattatccttggctatagcgatcagtaacaagagtccaaggttggactggacaggtgtccctgcagaagtattaatatttcctgcataaggtcgcaatggcctttatgcaaggttgtggcttttgtagttctttgtgattgttttgctatcaggcatacaagtgtgagagttctctgttcatagctttccttggctctatttgtcagcattttttaaacatgactacattttgattctgaccactattacactaattttatattagaatgaaccatagaagtttccagggcgatttgctcctcttttcccccgtcttcctgccccgccccgccaataccgaacaannnnnnnnnnnnnnnnnnnnnnnnnnnnnnnnnnnnnnnnnnnnnnnnnnnnnnngttcgtttgggagccgcggnnnnnnnnnnnnnnnnnnnnnnnnngggtcaaatgcggggtttccccgaagacaaatatcggccccctcccatagcgcccccggtatctctcccccacctacccaacacggcccgcccggcgggcaaccccaggaggtggctccggaaacacaactgacgagaggggtggtcttgtaggc

SEQ ID NO: 301407 - DNA, 435 bp, Homo Sapiens
ggttcttctgtatacaaggagaaagtattctctctcaaacagtaaactcccttttatcacagagcaggctccaggctcaaagccctagatggagataaagtattttgaggagggaggagagtgtatttcttcatttacacaaagatactcatatggagctgggggcagttcttccccaaaaggaaacattgaactcaaagttccatgtaagcaaggactgtggctgtcatgtctaccattgtatatcccagcacctagcactggacctagtataaattttgtgctaaattaatatttattgactgcatggatgaactctctattttatttatggttcttccaatttattgctatctgttttccattacttgccttctcttaccctgaaattatgcatctggaatgaagtattttaataaaattattgatgaacat

SEQ ID NO: 301408 - DNA, 300 bp, Homo Sapiens
ggttccagcgctgagggtttttttcctccatgccactgtctccggatgttgtttatgtgtttttcctctgtgaattcttaatttatgagttacgagataattgggttcagccgatgccggtgtggttacaacttcatttcaggtgatgcctctgactggatgggttcaataaaatgttcctgaaagagatccctcgtgctgctgcattgtaaaaagcgccagtgtcagttaaacgtgagcgtgagtaaaggctcggtaactggcgcataatagaggcaacaatagacttgtattggctac

SEQ ID NO: 301409 - DNA, 323 bp, Homo Sapiens
  misc_feature (292)..(292): n is a, c, g, or t
gggtttcaaaatttctaagtggtatgttttacattattgttagttgtattgcattttgatctgagaatggtttctagaatttctacttttcaaaatttaccaaaatattctttgtagcttaataattatttaattttgtccactgtccatgaaacttgaaaagaaggtgtactgtttgttttcagggtaagaaatttatatgttcatattttctatgtccttatttattttttgattatttgttcagaaaatgtgttagaatatttccaataaaactgtttctcatggaagntacctaagagatcctgataaatgaatcttgt

SEQ ID NO: 301410 - DNA, 537 bp, Homo Sapiens
gctactgaatatgattatttctaaaatgtgaacaaaatgaccaactataaaacaacatttgaacagattgcagtaagtcttgatagaaagtcacatgaacttttaacttgtaaacagggcatattagctactgggttctccaaagcatgtaatgaccagaactgcaaagggtggtgctgaactgagataggtggatagttcaggtgtactgcatggatagttcaagtgaagaaatcagtaattcactaactcaggaacaatgccattagtccagggagaggtatgtttggcaggaaggccagagattcctccctttttgtttcattcatttaacattttaatttaaccagcatctgtatgtgatagcctgatagtttaatttggaaatgaaagctaaagtgaagctgttagaaacaaacataaatcatatcactttccagatagaagacaaaaatcatatttatgatagataagtatgaccttaactccttctaatgttttgctttataatgtaagaagtgacaacatgccaaaaaa

SEQ ID NO: 301411 - DNA, 592 bp, Homo Sapiens
  misc_feature (171)..(231): n is a, c, g, or t
  misc_feature (312)..(497): n is a, c, g, or t
ggtacttattgtcagtctgttctagcttcctgtttcatcatggttaaattttggaagcttacatgtgtccaaaaatctatccatttcttctaggcctttcaatttgttggcatgtagttgttcataatagtctccaatgatcatttgtagttctatggtatcagttgtaannnnnnnnnnnnnnnnnnnnnnnnnnnnnnnnnnnnnnnnnnnnnnnnnnnnnnnnnnnnnagagatggggtctcactgtcgttctggagtgtagtggttcaatcatctctcactgcagccttgaacccctaggctcaaagnnnnnnnnnnnnnnnnnnnnnnnnnnnnnnnnnnnnnnnnnnnnnnnnnnnnnnnnnnnnnnnnnnnnnnnnnnnnnnnnnnnnnnnnnnnnnnnnnnnnnnnnnnnnnnnnnnnnnnnnnnnnnnnnnnnnnnnnnnnnnnnnnnnnnnnnnnnnnnnnnnnnnnnnnnnnnnnnnnnnnnnnnnaatatgcccagtctcttttctttcttagttactctagaaaatggcttgttgattttgttatttcaaaaaataaatgttttattttgttatgaaaa

SEQ ID NO: 301412 - DNA, 556 bp, Homo Sapiens
ggggagaagggaggagttattcaggcctccgccagcttcaagggcctggggatggtctttcacctccctctttctgatctctttttcatgctcctccttgctccaaagaaaagccggatggcaaaagagcccagaacctattggaactgacaaaatcaagtcacggcgcctacaaagatgaggggcagattctggctgccttttaatttcgtccttcacctgatatctgtgccagagaatgataaaaatcataataaaggaaataatggaagaggagacttatgttactggggacatctaacataattattttcctgattcagtggcatggttcagtcttccaggagttctgctacagagaagagagtaacccccatccatcatggccaaagcacccagtcaggctccgctctggatccagcccgacaaatgcaacccttgaatatggtttgtgcaagcaaactggatgacgaccgaagaaaccctgtcgcttctgagaagacacccaatccaagaatgtgagttctggaaatgtcattaaatgtcagttatatgc

SEQ ID NO: 301413 - DNA, 1282 bp, Homo Sapiens; identical to SEQ ID NO: 231427
  misc_feature (704)..(704): n is a, c, g, or t
  misc_feature (882)..(882): n is a, c, g, or t
  misc_feature (995)..(995): n is a, c, g, or t
  misc_feature (1005)..(1005): n is a, c, g, or t
  misc_feature (1023)..(1023): n is a, c, g, or t
  misc_feature (1035)..(1035): n is a, c, g, or t
  misc_feature (1140)..(1140): n is a, c, g, or t

SEQ ID NO: 301414 - DNA, 187 bp, Homo Sapiens
atggtgctagcatatataagactgaaacaccaaagtcctccgtggaagttaatgaatttctggttatgagttggattcttcagcggagtatttgagccatgccttgaggcacatacttcaagttgctgcatccagttttaaactccagattgagctttacatattaaatgtgcacatttgttttcac

SEQ ID NO: 301415 - DNA, 792 bp, Homo Sapiens
  misc_feature (395)..(491): n is a, c, g, or t
gggataaggccatctgtattagtccattctcacactgctagaaggacatgcctgagactgggtaatttataaagaaaaagaagttgaatggactcagtctcacatgcctggggaggcctcacaatcatggtggacagcaaaggaggagaaaaggcacatcttatatggcagcaggcaagagagcttgcacaggggaactcccttttataaaaccattagctcttctgagacatactcactatggacaagaacagcatgggaaaacccacccccatgattcaattacctcccatcaggtccctcccgtgacaggtggagattatgggagctataattcaagatgagattttgggtggggacagagccaaaccatatcacccacctaaggtctctgnnnnnnnnnnnnnnnnnnnnnnnnnnnnnnnnnnnnnnnnnnnnnnnnnnnnnnnnnnnnnnnnnnnnnnnnnnnnnnnnnnnnnnnnnnnnnnnnnaggaccagtcctgggcaacctggaacaaaaccttgtctcccgcgaaaaattaacatttacccaggctgtggttggtgcccatctggttagtccccagcttactgggggagggctgaaaatgaaaaaaattgttttggaacccccggaaggtcaaaatttggcacggaaccctgggatgggggccccccggcatttccgggggtgggctggaccaaaaccaaggacctccgtttcttccaaaaacttacaaaacctttgtaatatcccaaccactgtggccgggccgcgcgctcggagcctt

SEQ ID NO: 301416 - DNA, 232 bp, Homo Sapiens
gggtatgtcatcagtccaaatacctagctaactcactttctgatttagaggccttaactttttgaccaggaacgttttcaaagcaattgcttattctcatagactcaacaaagttattcttcattctttctaaatgaagatgtctcccatgaacctataaaatattttcatagagttatgtcagtaagactgtaagctatctcagaagttataaggtgacccactccgtctc

SEQ ID NO: 301417 - DNA, 768 bp, Homo Sapiens; identical to SEQ ID NO: 231432
  misc_feature (130)..(166): n is a, c, g, or t
  misc_feature (631)..(631): n is a, c, g, or t

SEQ ID NO: 301418 - DNA, 247 bp, Homo Sapiens
cttgttgcatgccttctaaacagcctaccctgccaagtgccatgattactgtgaccacatcttcagaaccagaaaacaggatacctggccctaagcatgcactcatggagcagaagagttttaaatctggaatgccacagaagacagaagataacatgcttactacacttgtaaagcaacatgcagccagccatttccagtgcaaattatctcattgcatagtgtgacaactaaaggtcataaccgt

SEQ ID NO: 301419 - DNA, 246 bp, Homo Sapiens
gggctactgcggctgcgcaagctcgacgcgcgcactcttgtctgcttacgagggctcctcccttcagctttggtccctcggggcgtctgggcagcctacgctttccggataaaaatggcagaatgaaagaattatgagtggaactagagaataggaaagacatgaaccaacgcccaaaatgagaaagaaggacatataaagaaaaagacaaatacaagtgaaaaaaatagactaatggattaacaa

SEQ ID NO: 301420 - DNA, 818 bp, Homo Sapiens
  misc_feature (612)..(613): n is a, c, g, or t
  misc_feature (615)..(615): n is a, c, g, or t
  misc_feature (636)..(636): n is a, c, g, or t
  misc_feature (716)..(716): n is a, c, g, or t
ggggctggctgtttacgtgaggccagccttgcaggtggggcagagaggaggaaattttgttgtaagaactgggacaaagttggcttctggaactcccaaagaaaatatttttctggcaaggggaatgcaaggcaaggcttctctgatgtgtaactgatagcctcagaaggtgtaaggttaaataatgatctcatcagtataacaggagctggacagtattaatcagtggtccaattcaaaataaagccacactgctataagcaaagtaatgaaggcttattgtgacctggggctccttaatgacacagatttgattcccacttaatgggcaactgaataatgcagctgatagcacagaccagtggggaaggcagaccagaggggtacaggaggctgcctggggtgaggcatctaaaggctgttatcacatgtcacatcatcagaccttgaatttgctattaaacagcaaataagcaaatatgccacttacagaagacctttccaaacttcaaggcatctactaaaattatatttatctctctttgatataccaatcacgccactctaaactatttatgcagaaactaatctacatattaaaattgtgccttnncnccgacccccaccaaaacaaangaaaacatgttcggccgccctcggcccctcgagaaagcctttcttaaacccatttcgttttgggcgcggcggcgcgccantaaggtaaaggggaaccattgggccttagccttggtttcccttagggaagaacccctgggtccatggacactaaggggccttgggaattttcttcaccccac

SEQ ID NO: 301421 - DNA, 318 bp, Homo Sapiens
ttctccaggtctgtttaaatgtcatttcttcctaaagctttcctggctaattcgattcttcttctcaaatgtatcttggggggtgaaaggtctgagaagagggaggggcatagagatcaaggaagcttccaacagaggtgcatcaccaatgcccttctcccaggtccgaggtcatacccctggctcgaggggaggcggcttccgatgcctggtccatgctggggtatcaagttccagccctctcaccccagtttgggacaattctgtaggaccgcctctctggcagagcttgctgagggagtaagctgaggcctttgt

SEQ ID NO: 301422 - DNA, 292 bp, Homo Sapiens; identical to SEQ ID NO: 231436
  misc_feature (114)..(173): n is a, c, g, or t

SEQ ID NO: 301423 - DNA, 276 bp, Homo Sapiens
tcactaaagataaggagacagatatggagagagtcacacaactagagggcgcctaaccagtggcaagaactcttctttggcagagttatgagagcttcagctgacgtcaaaacacctggctctgggctggaatgaattacccaagaatttggttggctttagctgaagtgcagaggaagctggcaaggtcctggctaactccttcctcaaatatgtactgagtaccttcagtatggcattgttgctggcactgaaaacacaaaaatgaatgtcaca

SEQ ID NO: 301424 - DNA, 310 bp, Homo Sapiens
ggggcgggggcacggtcccccgcgagggaggtgggcgtgagctttctattttgcgttgtagaagaagtgagatgtagtaagctaattaacagactttctagcagttctttttgtgatgtctctttgttaatctgagtctatctattttcggcaataaggtaaggacgacagtgttttgagtgtcctccttttctataagtgctttttttctgttgaaagaggtgatattataaggttttttgaaattgtgaattctagaaaagaaatgttgtaaatacgattccattaactacctagaggctgttcattt

SEQ ID NO: 301425 - DNA, 856 bp, Homo Sapiens
  misc_feature (358)..(376): n is a, c, g, or t
  misc_feature (378)..(588): n is a, c, g, or t
  misc_feature (590)..(595): n is a, c, g, or t
  misc_feature (597)..(608): n is a, c, g, or t
  misc_feature (610)..(611): n is a, c, g, or t
  misc_feature (613)..(613): n is a, c, g, or t
  misc_feature (615)..(634): n is a, c, g, or t
  misc_feature (636)..(639): n is a, c, g, or t
  misc_feature (641)..(645): n is a, c, g, or t
  misc_feature (648)..(653): n is a, c, g, or t
  misc_feature (655)..(657): n is a, c, g, or t
  misc_feature (659)..(664): n is a, c, g, or t
  misc_feature (666)..(670): n is a, c, g, or t
  misc_feature (672)..(674): n is a, c, g, or t
  misc_feature (676)..(679): n is a, c, g, or t
  misc_feature (682)..(687): n is a, c, g, or t
  misc_feature (689)..(703): n is a, c, g, or t
  misc_feature (705)..(707): n is a, c, g, or t
  misc_feature (710)..(711): n is a, c, g, or t
  misc_feature (728)..(730): n is a, c, g, or t
  misc_feature (733)..(733): n is a, c, g, or t
  misc_feature (735)..(738): n is a, c, g, or t
  misc_feature (741)..(742): n is a, c, g, or t
  misc_feature (747)..(748): n is a, c, g, or t
ggcgaacaatgctagcttgactattgcttgtacaaaccgttttttgcccaagtcggactattttcttaggttaaattccttggtgcagaagtgcgagggctgtatttaggcccctaaaggggtggtaccaaatcgccctcccccaccagcataagagggggccggcgacacccttgcccaagctggattttgcagacctggtaggcgtgagatagtatttcactgtagcttgtgtttcctgtaagtatagtcgaacgtcgtgatgttcctgttacatctatgttacgttgatcattgttaccactgacagtcgtttcgagattggaaaatatgtttattataaacgtttgactattcnnnnnnnnnnnnnnnnnnncnnnnnnnnnnnnnnnnnnnnnnnnnnnnnnnnnnnnnnnnnnnnnnnnnnnnnnnnnnnnnnnnnnnnnnnnnnnnnnnnnnnnnnnnnnnnnnnnnnnnnnnnnnnnnnnnnnnnnnnnnnnnnnnnnnnnnnnnnnnnnnnnnnnnnnnnnnnnnnnnnnnnnnnnnnnnnnnnnnnnnnnnnnnnnnnnnnnnnnnnnnnnnnnnnnncnnnnnnannnnnnnnnnnntnntntnnnnnnnnnnnnnnnnnnnngnnnngnnnnnagnnnnnngnnntnnnnnnannnnncnnncnnnnagnnnnnncnnnnnnnnnnnnnnntnnncgnncctccccccgcccttcnnnccncnnnnagnnttgcnnaaaatatgtctgaaagcacccaagcccccaacaccacagaacggtgaacaagccgcagacaaatagtcggtgtctaccctcctacaccaagaagtgtctcccccccca

SEQ ID NO: 301426 - DNA, 479 bp, Homo Sapiens
  misc_feature (129)..(185): n is a, c, g, or t
gggaagctgtttccttgaagacattgctttcagtcaccatacatgtctaaataatttagcttatcattcattctatgtaggaatgagataagaaaggatatgatggcaggaaaagaaatgctattcatnnnnnnnnnnnnnnnnnnnnnnnnnnnnnnnnnnnnnnnnnnnnnnnnnnnnnnnnnaaagcactaatttattgcagtctttattttagaaaaatgtgaagcatttttttctcccctaaaatgaatatatttagatgacaagtctttagtgctggtagaggaactaattgattttgtactatagtaggaaagtgtttatatgtttcaccagaaataaaatatgtagggtttgtatgtaatcttctgtgtttatcctatgttgatttaccttaaatttgcaacatacatatccacataaatattcatgactttcttatatttcattaaaatgttttatggcttcttaaaatc

SEQ ID NO: 301427 - DNA, 442 bp, Homo Sapiens
  misc_feature (298)..(306): n is a, c, g, or t
gggatatttccgagattgggcacatttaagacagtaaacgggaaaggtggtgaagatgctataagaagatgctgtatcttgagaattgaaaaatgagaatctgacatggtttgaaaaatcatgaagggtatatataaaggatgcatgtgtaggagccattaaaattcataacagtatgtgccccttcagcgttttaatcttatgaagtggttaagagataagtcttcggagtgggacaaaaggatttgaatttaggttctgtggattattatgggtccttgataaattctcaaagccnnnnnnnnngttcatctctaaaataggaatataggattacctaccacattgactcgtaaggactatatgagaccatgtatatagaatgtttaacatagtaccaggctttacaaagaactcaataaatgtttaccattatggaaaa

SEQ ID NO: 301428 - DNA, 427 bp, Homo Sapiens; identical to SEQ ID NO: 32812

SEQ ID NO: 301429 - DNA, 445 bp, Homo Sapiens; identical to SEQ ID NO: 32813

SEQ ID NO: 301430 - DNA, 829 bp, Homo Sapiens; identical to SEQ ID NO: 231446
  misc_feature (50)..(268): n is a, c, g, or t
  misc_feature (270)..(362): n is a, c, g, or t
  misc_feature (417)..(493): n is a, c, g, or t
  misc_feature (526)..(585): n is a, c, g, or t
  misc_feature (767)..(767): n is a, c, g, or t
  misc_feature (802)..(802): n is a, c, g, or t

SEQ ID NO: 301431 - DNA, 295 bp, Homo Sapiens; identical to SEQ ID NO: 231447
  misc_feature (49)..(183): n is a, c, g, or t
  misc_feature (187)..(211): n is a, c, g, or t
  misc_feature (213)..(215): n is a, c, g, or t

SEQ ID NO: 301432 - DNA, 523 bp, Homo Sapiens; identical to SEQ ID NO: 32814

SEQ ID NO: 301433 - DNA, 687 bp, Homo Sapiens; identical to SEQ ID NO: 231450
  misc_feature (48)..(149): n is a, c, g, or t
  misc_feature (193)..(223): n is a, c, g, or t
  misc_feature (243)..(255): n is a, c, g, or t
  misc_feature (268)..(329): n is a, c, g, or t

SEQ ID NO: 301434 - DNA, 946 bp, Homo Sapiens; identical to SEQ ID NO: 231451
  misc_feature (107)..(129): n is a, c, g, or t
  misc_feature (133)..(417): n is a, c, g, or t

SEQ ID NO: 301435 - DNA, 800 bp, Homo Sapiens
  misc_feature (184)..(421): n is a, c, g, or t
  misc_feature (744)..(744): n is a, c, g, or t
gggagtgcttgtggctcagtggccacaggctagagagatctggaaaccctcccagcagctgcccagctatattcatccagaggcgggtttttgtttctctctcttccctcactgctgctggccccaaccatattcttgattacttatgaaggacaggctttgaaatttgacatctgtatccatnnnnnnnnnnnnnnnnnnnnnnnnnnnnnnnnnnnnnnnnnnnnnnnnnnnnnnnnnnnnnnnnnnnnnnnnnnnnnnnnnnnnnnnnnnnnnnnnnnnnnnnnnnnnnnnnnnnnnnnnnnnnnnnnnnnnnnnnnnnnnnnnnnnnnnnnnnnnnnnnnnnnnnnnnnnnnnnnnnnnnnnnnnnnnnnnnnnnnnnnnnnnnnnnnnnnnnnnnnnnnnnnnnnnnnnnnnnnnntgagccaccgcgccctgccacaagagggtaaggaaactgaaatatgacaaggttaaatgattcagatgaggggccggaaagcacgcctcccgagacccattcctggaagcgggtctttaaagctgctctcagtttaaaatcaaccaaatgctcagatatcagatgcggaaactgaggcacagggaatttgaacaacttgctcaaggtcataaagctagaaggaggcacagcccagcatgggcttggtgtgacctcaaagcctatgttctcgccactgctctaaactggttattctggtggcttgtcataatgattggaagacnatgtatataaatcaccgagggtaggactcagcttggaatatgtccctccatacatt

SEQ ID NO: 301436 - DNA, 611 bp, Homo Sapiens; identical to SEQ ID NO: 32820

SEQ ID NO: 301437 - DNA, 428 bp, Homo Sapiens; identical to SEQ ID NO: 32821

SEQ ID NO: 301438 - DNA, 416 bp, Homo Sapiens
ggggggaagaaagcttgcatttagatgccatgttccagttggaaaagtcctttcagatgcatcagtgcctggctgtaacttcacagtgactctgggcagagcccagggttcctatctctgttgtccaaatgggcagactgaggctggcccaaggtcatccacagctgctgatgagacccgaggcccttgatgtggacctgctggcccacagggcagtgtgcttgtcacgtggtggaatttcagattgcgttgcatggaacagagctcccacaagctggccgagggatgctggggagaacgcactcagggcaccagggctcctacgccactcagccagagctgctcttctcttacctgctttataggttaaaagcttttgacagaaactatcataaaggtttaaaaactgctgaccc

SEQ ID NO: 301439 - DNA, 662 bp, Homo Sapiens; identical to SEQ ID NO: 231456
  misc_feature (119)..(212): n is a, c, g, or t
  misc_feature (216)..(216): n is a, c, g, or t
  misc_feature (219)..(219): n is a, c, g, or t
  misc_feature (222)..(222): n is a, c, g, or t
  misc_feature (238)..(238): n is a, c, g, or t
  misc_feature (259)..(259): n is a, c, g, or t
  misc_feature (349)..(357): n is a, c, g, or t

SEQ ID NO: 301440 - DNA, 178 bp, Homo Sapiens
gggacactgagtaaggtaactttcctggagaggcaagctgagggagcagtgtatcatagggctgaaaacaagggtaatgagtggaaatctggataccaaagagccaggcagtcagcttcctgccccacccagctctcaagccctggactggatattggctgattcttcttgagatata

SEQ ID NO: 301441 - DNA, 606 bp, Homo Sapiens; identical to SEQ ID NO: 32823

SEQ ID NO: 301442 - DNA, 531 bp, Homo Sapiens
  misc_feature (474)..(475): n is a, c, g, or t
gggtaagaaaagagacatggccatttctaaactatataaggtgagtgtgtctattcccagcagatataaaggaaaaaggaaacttttttgattcccaccttcccagcctcacctagccatcttccagcctcaaatatagagatgttagtgcaaggtcctgggctctaggtgatcatttcataagtcctttacagataaagaaaaagtagtgtttgtatgtttgtttttaagtaaccccaaaacaaatttatattgtattcagcaaaattggaattcaggtgtttaattttagaacatgaagtgcctgctgttttaagcattgacttgtataaaaagaattgcatgtctccagtaagcttatgggttttctcatttttaggtatatggcttttaatcatgtaaagtgaaacattagttttcttgcattttattacaggttctttgttgcaataaagatgctgctgaaataaaaannaaactgcccgccaatacttgcgcaaagatcgacgatgtcacgcacaggtgtggacc

SEQ ID NO: 301443 - DNA, 128 bp, Homo Sapiens
gggtatcatctgaggaaattaagtaccttcttagccctctcagtcataaatttgaacaaattttaatacacttccctcatgcccttctatataaaacttaataccattagttccccattcttgacatt

SEQ ID NO: 301444 - DNA, 279 bp, Homo Sapiens
ggggattagttcattacaaaggcacttgtcaaaacatatttattaaaaagaggagccagagttggaaatcatcttgaccattaaaaaaatagcaactgataccttgtttaacaagtaagacagtttctgctttttggaattgaattggtttttaagtggtaatgtaccaggtctgtttatataggtcagtgttgcccaggttgtattgttttgctgtttttacttttttatatataaagaactaaaattacgagagaataaattcgtggatataatcta

SEQ ID NO: 301445 - DNA, 942 bp, Homo Sapiens
  misc_feature (524)..(524): n is a, c, g, or t
  misc_feature (554)..(555): n is a, c, g, or t
  misc_feature (557)..(557): n is a, c, g, or t
gggggctgccctgagagcttcatgttggagctgaagttcaaggttcacttcctttgggtttgtacttgacccttcttcatgtgtctctcccgttccctctaaaacaagtgtgtttcccctcatttttgaggctgtcaatggtgtgagagccaggatcatcacggggcctgaggttttactccagaaaagcagaggagtggcaaccttggcttggggtttggcagcccaggaaaggcagggaggagagctcaaagccggtttcatgtttcacccaaggtctaattgtgggagaggacaaatccagatccccctgtttgacagaattagttcacaaatgtcctcttggcaaaaacatgtgaccccctaaccatggataattgaacttaattcccaagaaagaacttctggtaagggcaggaacaaataggaaaatcctctcctttccgggtatggggccgaaaccctcttttgccccctcattaccatagtccccctggtccgtcccgcccttcgcggccctgccngagaaaccttttctcaaaacaaagggcccnncnggccggccggggggcccccgcgcagggaaaggctgaaccatcggcagcgaaggtctggtttcccctaaggggaaattccttggcccgataaccacctatgacacttgggagaattccccccacctgatatacaaaaatatagtgcgcgggggtcgggtgccacggcgagccaagcgtgtctgacgagccaaattgtcgacgaagcctacgagaatttgttgggagttccttcgttcccggccgagacctcataatttcaccctctatgctcccccaccagatatacggagcgcgccagtgtaattatactaaaattagtcgtcatctcccaggaatgtccaagttataactcatggattgtagtgcggcgcgctgcgcctgtctt

SEQ ID NO: 301446 - DNA, 461 bp, Homo Sapiens
  misc_feature (169)..(210): n is a, c, g, or t
ggcagatctactgacagcaatgagaaatcaatgacagttgacaggaagagaggacgcatacaacaggcaaaagaggaatgcccagcagtcttggtccttgcggtgcaatactggccttgaggccaagtcagcaggggattcgtagtcactaacttctaactgaggcagnnnnnnnnnnnnnnnnnnnnnnnnnnnnnnnnnnnnnnnnnngaggcagtgtagcaagaggcagatttttggtgccaaatagatttgaatcctggttctgcttcttcctttgtagagtatgatattggttctttcctcccaaagctattataaagactaaatatgtacacaaatctttgggatgtctgacatataaatgcttaacaataggtatttgctggtattattacaaatgaatttgcttatttttgagccacttctatgtctgtccattaaaccaaaatgtgttctgc

SEQ ID NO: 301447 - DNA, 342 bp, Homo Sapiens; identical to SEQ ID NO: 231464
  misc_feature (45)..(103): n is a, c, g, or t
  misc_feature (141)..(190): n is a, c, g, or t
  misc_feature (223)..(233): n is a, c, g, or t

SEQ ID NO: 301448 - DNA, 589 bp, Homo Sapiens; identical to SEQ ID NO: 231468
  misc_feature (96)..(223): n is a, c, g, or t
  misc_feature (262)..(272): n is a, c, g, or t

SEQ ID NO: 301449 - DNA, 381 bp, Homo Sapiens; identical to SEQ ID NO: 231469
  misc_feature (81)..(142): n is a, c, g, or t

SEQ ID NO: 301450 - DNA, 750 bp, Homo Sapiens; identical to SEQ ID NO: 231476
  misc_feature (145)..(153): n is a, c, g, or t
  misc_feature (267)..(277): n is a, c, g, or t
  misc_feature (346)..(360): n is a, c, g, or t
  misc_feature (716)..(716): n is a, c, g, or t

SEQ ID NO: 301451 - DNA, 645 bp, Homo Sapiens
  misc_feature (399)..(412): n is a, c, g, or t
gggctgacagcctagggaaggactgaagtgtcacagcctcgtgcctaacaatgttctaagctggtttttctttagttttataattcaaaagcttttctctgctgatgaaagctccagtgggcacagcgttgtgtttatctttaatcccaacctgaaatagtgatagatgagctgttcagaggcatgcttgcacacctacatgctgcacggttccctggctatttttaatttggtttgtacagagtgtgaggttgtgctaggcaaaaccctacagtgctgcctgatattttgggtgggagagtgcctatactttgggagaagaaaaggattaaggaatacagttttataaaccattgttctgacagggagacttaattatctgaccatttattgatttannnnnnnnnnnnnnctcaagaggctgtgtaaactgaggctgtttatttaaactaagtcttgactgaatatatttaaagtccctttaggctttctgaatacctatagtagattcaagatctagtggcctagtaactacaagttaccaatccataagaaaatcctcggttagttgctgtatattttgatacagtagatatgtcacgggggagggtcgtttggctgcgcgaaattacaattggcctttcc

SEQ ID NO: 301452 - DNA, 136 bp, Homo Sapiens
gggaattgtcacggtagctgtcccatggtggccaaaataacgagtgattgtctaaattcacatcacttttgtgtactttccaaatattttcttcaagcagcacacatttctttcaaataaaaattacgcaacgatg

SEQ ID NO: 301453 - DNA, 582 bp, Homo Sapiens
gggagaagcagcttcgccagacagccgcaacgtacatgttgactgcccgaggcggaagtcgatcggcagagcggaagggggacctgcagaggaccttccgacaggttggtcagaccatgcccatggttcctcctctcgacttcactatgaatgccgcatctgtgaatgaatgcagtttctgctcttgcttttggatagaagtgattgcaaatcttatcaaaataatgaaaaaaattacttttcaattccttttcaacccttttgagtctgaggggcagctgtacattaaatgaaaccatatgtatcataatttcatttttccatcaaaagagctttaaaggaaattcccctttttctccatgttttcaatattttttgttccttttgttaaaatcagattaatctcatgaaacatctgaagcatttaagtcaatttaagagctgagaaaatatcatgctgctagttctgaaacgatctgaagtgtgaatcaggtgatcaccaaataggggaacaactgaaaaatgtgaatgaaagaagtatgtacctatactatagtgtcaaatattgtactgtaagcttta

SEQ ID NO: 301454 - DNA, 104 bp, Homo Sapiens
gggcacacattctcagcagcaaaactgggctttccactacctgaggctgtctcttaaatacaaacaattctccactcataaacagtgccttttcaagcaattgt

SEQ ID NO: 301455 - DNA, 838 bp, Homo Sapiens
  misc_feature (446)..(578): n is a, c, g, or t
gggagacccaaggcaactcagctgtgattgagatagacattgagtcttttgggagacagaagggagggagagtgccagtcaaaagggtttcgtgaaggttgcatctgactgggacagttaggcctctgtgtaccactttaaaaggtgttgacttttctagtaaatatcctccatgtcaaagtctatctcaagatctgttccaggacaaccccgcctgcaacagggcccatttatgttccagccagcacggtgatcctgagtctgggaggatgcccacagactgcttttgtgagcagcatgccttcagtggccagtccccaagcccctcaactccatgtggagcaaggaccaaccaccccatggagaagaggaacccgcctgcaaggcgagccaagaagggacctttggaaccagccacactggactctgtagggggctggatggcnnnnnnnnnnnnnnnnnnnnnnnnnnnnnnnnnnnnnnnnnnnnnnnnnnnnnnnnnnnnnnnnnnnnnnnnnnnnnnnnnnnnnnnnnnnnnnnnnnnnnnnnnnnnnnnnnnnnnnnnnnnnnnnnnnnnnctcactcccctgcgcaagtgaccttacaagagtaaggtacgggttgggcggggcggccccccacccggtcactccccccacccttggcgagggccaacgccacgcaacacacccttgatggtcccatacgtcccacgcactggtgtccgcgcctcccgccaggtgaacaccccagcccccctcctggatataacccgcctcgtcttcactttattctccccgctggtggtgtagactggcccgccctctatctcctatac

SEQ ID NO: 301456 - DNA, 925 bp, Homo Sapiens; identical to SEQ ID NO: 231482
  misc_feature (86)..(95): n is a, c, g, or t
  misc_feature (142)..(202): n is a, c, g, or t
  misc_feature (308)..(308): n is a, c, g, or t
  misc_feature (374)..(383): n is a, c, g, or t
  misc_feature (849)..(849): n is a, c, g, or t

SEQ ID NO: 301457 - DNA, 213 bp, Homo Sapiens
gggaggcactcactcctcacgtttggtctgttgccatttccggcttggttggaatagggtaggagccttttggcagggagcacattctcagtaatgcagagtgcactcacctgggttctagcttcaacacttaggatttgcttgatattttgtattctctgaggcactgcctgtatttgtttctgctatcacagtccagagtcaagcttcatt

SEQ ID NO: 301458 - DNA, 289 bp, Homo Sapiens
ggtggagctgagccctagagaggcagaaaagagtgttggattaaagagaaagatgatataaaatgacttcttgaagaagaatggatcagctcctgtaggcaaggtaattgagcagagaaaagagcaagcttgctgagtgattcttgggtctttgctatggttggaagccatcgctggtgttggtatttgcaatggttttgtgatttttctccccccagctctagagggagagatagggttatataacagggtttttcccgcctccctaggaagaaggatagggttgatt

SEQ ID NO: 301459 - DNA, 337 bp, Homo Sapiens
  misc_feature (62)..(124): n is a, c, g, or t
caagtaaataatgttaaaagaaaaatcagtcagtatagttggtcatattaataaaagaaaannnnnnnnnnnnnnnnnnnnnnnnnnnnnnnnnnnnnnnnnnnnnnnnnnnnnnnnnnnnnnngaaagtaaaaaaggagaaacttttaagcaaacaaggaataaaagattactctcccaatctgataaaaggcatctgttaaaaatctatagctaacatcacacttaatgcattccccctaatattggggacaaggatagggatcaagtgcaaggaatcacactctcatcactacattcaacattatactgaagttcatagctagtctgataaggc

SEQ ID NO: 301460 - DNA, 497 bp, Homo Sapiens
ggatttgtttctagtttgaaatcccacatctgatagctgagagtaggcaaatacaacatttacctaatgtcattcactaacatggaagagttgtgaaaattctagagtgctgtaaatccttggcatacactatgacaaacaacttcattactctcccaccaggagctgctctcctgcacttagaaataatgtcacaagtagttttctaatgtacaatgcagacaaatgtactgctctctgaatacttgaagaaatggtattatacatacatagaaacttattagttataccttttcacaatcttattacgatgttgccgttaaaagggaaaaaagacacaggcaatgaatggtgggatagtaagaggacttagagtgtatgaatgagttgattttacttttttggaatttgattaagttgacagtaggcactgattggatgattaaacataagttaatctccactgtgataaaaacttaaataataaacatgattta

SEQ ID NO: 301461 - DNA, 927 bp, Homo Sapiens; identical to SEQ ID NO: 93778
  misc_feature (884)..(884): n is a, c, g, or t

SEQ ID NO: 301462 - DNA, 357 bp, Homo Sapiens; identical to SEQ ID NO: 32829

SEQ ID NO: 301463 - DNA, 773 bp, Homo Sapiens
  misc_feature (214)..(229): n is a, c, g, or t
  misc_feature (490)..(658): n is a, c, g, or t
  misc_feature (755)..(755): n is a, c, g, or t
ggcagcgtgatgcgacgaagaacctgtctgaaagagttaaggattttggggaagaagagtgagaaaagatactcatagaaatgttattttttgactaaatcttatgggttaatatcgaacggtattgaaactatattaacaatagcagccataccattaaatagttcttcttgaaaaggttggatggacttttgcttaagaaatgcttgaatgnnnnnnnnnnnnnnnncttagaaaataaatgtctttaagtctgtgtatataattcacaaaacaattgtaaatcaagggaattgactctgcctaacaaaggtacaatgacataacagaactagaacaagataaatggcctcatttattgaaacaatgtgcaaatgtctgtccttgttcttgggaagtttcttttatttactatgcttctcaataaaaataaatttgttgtgagaactcagagtgcttactttacagtactcttaaaaattcatatagnnnnnnnnnnnnnnnnnnnnnnnnnnnnnnnnnnnnnnnnnnnnnnnnnnnnnnnnnnnnnnnnnnnnnnnnnnnnnnnnnnnnnnnnnnnnnnnnnnnnnnnnnnnnnnnnnnnnnnnnnnnnnnnnnnnnnnnnnnnnnnnnnnnnnnnnnnnnnnnnnnnnnnnnnggcgcagtacagctccccggagtagctggtagtccctagccaggagggcctggggtcccagcctacctaggggaaaatttggaaggcagggagaaantcactttaggccccccgc

SEQ ID NO: 301464 - DNA, 571 bp, Homo Sapiens
  misc_feature (405)..(405): n is a, c, g, or t
ggtgccaaacagagaaagaaagcgtttaagctcttcagggcagagatgttgcttgttttccccaccattttgtgtcttcagcacccaaatactaaatgagcattctaggcagaggccagtatttgtaaaggctaggatgtgtgaaacgatatggtctggtgggagcagtgtatcagtcagtatactggtgggcattgaagctgggcacatcagcagaggcaaggcttgagattgtgagaagccattgctcctgtggttctccctcatccccctacactccaaggtgtgcaaggatgcatccaagacccttgggtgaggggaaaacatggagctggggggatgcctgggcctttctaggacacctagtcccctttcatctgcaacttgggtctgtcaaaaaagtancagggtctctgagaaagctgcaccagtggactccaaaggcttgaggtgggaaagaatggccttgagcccaagaaattttgagggctgcaatggagcttgtggatccagggccattgcccctccaagtctggggtggacaaaaggggaaacccctggtccccttttt

SEQ ID NO: 301465 - DNA, 448 bp, Homo Sapiens; identical to SEQ ID NO: 32834

SEQ ID NO: 301466 - DNA, 302 bp, Homo Sapiens
gggctcgttttcttagatatgaatgagctggaaaagcagtagaggcttagaagggtgagtggttgtcaggggtgagtgattgtcagaggccatctttgcaccctgtggagagaagtgatctcagaagaaagttaaggagatcaggggaatggaggagggcgatggatgggaccctgatgactgaacattgcgtccatctgcccttaaacctggatgcatctagatggttaagtgagtcacaataaccccctcccccactctttaccaaaaccagtgtgagctggggtgtctgccacacctga

SEQ ID NO: 301467 - DNA, 182 bp, Homo Sapiens
gggtaaataaaagagttcccatctccatatcttagggtttaggagacctaactgggatttagcaacataaataaatgtcagtaaagaagagtaattcatagtaagggctctgggagtagattctagctgtactatttccaattgtataaagtgctttgcatttgaattattaatattttaag

SEQ ID NO: 301468 - DNA, 421 bp, Homo Sapiens; identical to SEQ ID NO: 32837

SEQ ID NO: 301469 - DNA, 1010 bp, Homo Sapiens; identical to SEQ ID NO: 231500
  misc_feature (724)..(724): n is a, c, g, or t

SEQ ID NO: 301470 - DNA, 168 bp, Homo Sapiens; identical to SEQ ID NO: 231501

SEQ ID NO: 301471 - DNA, 317 bp, Homo Sapiens
ggatggcagactgattgggagtggatattgatagcattataaaagtcagttattagagggatacttctttaacctgactgaagaactgatctaatggctttagtacagtgcatgattatgtgcgatgttttgagacagagtagtacatttgtgaatgaaattttatggcttttttttcacttagtaggaaccattgtgtgtggaaaagtgagaaaatggctttctgctgtagggtctggcattcattgtagatgtaagcttatttttctgtgagcaaatcttattcaataaaatactactctttatactaaaaaacc

SEQ ID NO: 301472 - DNA, 426 bp, Homo Sapiens; identical to SEQ ID NO: 947

SEQ ID NO: 301473 - DNA, 523 bp, Homo Sapiens; identical to SEQ ID NO: 231505
  misc_feature (122)..(179): n is a, c, g, or t
  misc_feature (354)..(354): n is a, c, g, or t
  misc_feature (377)..(449): n is a, c, g, or t

SEQ ID NO: 301474 - DNA, 800 bp, Homo Sapiens
  misc_feature (449)..(485): n is a, c, g, or t
  misc_feature (493)..(493): n is a, c, g, or t
  misc_feature (514)..(575): n is a, c, g, or t
  misc_feature (644)..(644): n is a, c, g, or t
  misc_feature (659)..(673): n is a, c, g, or t
ggcacttcataaattgtataagcacattaaatagcgttctagtcctgaaaaagtccaagattcttagaaaattgtgcatatttttattatgacagatgtttgaagataattccccagaatggatttgatactttagatttcaattttgtggcttttgtctattattctgtactctgccatcagcatatggaaagcttcatttactcatcatgacttgtgccatataaaaattgatatttcggaatagtctaaaggactttttgtacttgaatttaatcatgttgtttctaatattcttaaaagcttgaagactaaagcatatcctttcaacaaagcatagtaaggtaataagaaagtgtagtttgtacaagtgttaaaaaaataaagtagacaatgttacagtgggacttattatttcaagtttacattttctccatgtaattttttannnnnnnnnnnnnnnnnnnnnnnnnnnnnnnnnnnnncccaaccncaacccataaacctcaacatnnnnnnnnnnnnnnnnnnnnnnnnnnnnnnnnnnnnnnnnnnnnnnnnnnnnnnnnnnnnnntcctctcacccacccatcttcccctcctactctcacccggggggattcacctagcgcttgcagcgattntttttctgggggcgnnnnnnnnnnnnnnnaaaaaattttacaaaaaccttttgtggcgggggcggccgcccctagtaaagaagaaaaccgggctcaaaccgtgtttcaacaaaaaaaccccgggaagagaaaagcaggggggggatctctccccac

SEQ ID NO: 301475 - DNA, 529 bp, Homo Sapiens; identical to SEQ ID NO: 32840

SEQ ID NO: 301476 - DNA, 293 bp, Homo Sapiens
  misc_feature (126)..(155): n is a, c, g, or t
ggattatggggaattgtaccaaaacaagaaccatataaatgatgcctagggacaagaaagaggaacaattctatagcgcacaataaaggaaacctaagaatgggagttacaaatagtaaagaagcnnnnnnnnnnnnnnnnnnnnnnnnnnnnnnatgtaagttttcccacatgatggggccttgttttgcatgttgatgaagaactacacaaagaaaactaatatagttaaaagtcagcttgccttcccgtagtagaagcaggttcttggaagttacaatttaaggtaccta

SEQ ID NO: 301477 - DNA, 610 bp, Homo Sapiens; identical to SEQ ID NO: 32842

SEQ ID NO: 301478 - DNA, 969 bp, Homo Sapiens; identical to SEQ ID NO: 231514
  misc_feature (48)..(277): n is a, c, g, or t

SEQ ID NO: 301479 - DNA, 973 bp, Homo Sapiens; identical to SEQ ID NO: 231515
  misc_feature (50)..(219): n is a, c, g, or t
  misc_feature (238)..(321): n is a, c, g, or t

SEQ ID NO: 301480 - DNA, 966 bp, Homo Sapiens; identical to SEQ ID NO: 231516
  misc_feature (50)..(134): n is a, c, g, or t
  misc_feature (136)..(157): n is a, c, g, or t
  misc_feature (224)..(319): n is a, c, g, or t
  misc_feature (487)..(617): n is a, c, g, or t

SEQ ID NO: 301481 - DNA, 801 bp, Homo Sapiens; identical to SEQ ID NO: 32843

SEQ ID NO: 301482 - DNA, 793 bp, Homo Sapiens
  misc_feature (429)..(616): n is a, c, g, or t
gggtcatgtggagaggaggacacttccaggccttgggaattatttattgatgggattcccttgagcctgctcccatctgtgaagagagaccgaggatgtggcctgctaagcccagaatagccagggtctgcaccagtatatcaaaaagctgctgagtggagacagaaaactctgtaactgtcaatggggtatgcagagtacagcagcccctcaggggaggtcccagaacctcccaggtgtccatgcagctggtatgtgtgctctacggagaaaacacagatagcttgtgcagaaatgggctgtttgggggccctgagctgctcctcatgccctacgaagtctgaccccagaattgggagtgactgtctggtgtggcagaagggactgagaggcaaggggctctggcacctctgatggttaaattaagcnnnnnnnnnnnnnnnnnnnnnnnnnnnnnnnnnnnnnnnnnnnnnnnnnnnnnnnnnnnnnnnnnnnnnnnnnnnnnnnnnnnnnnnnnnnnnnnnnnnnnnnnnnnnnnnnnnnnnnnnnnnnnnnnnnnnnnnnnnnnnnnnnnnnnnnnnnnnnnnnnnnnnnnnnnnnnnnnnnnnnnnnnnnnaaaaagctgacctggcctgaatccttcccgggcctttcatcttttcctccccgtaactgggagggctttcctacccctccgaaacattcagaaactcccaaggtttccttaagggtttttcttgggaactccttggagaaccttaacacaccccaggtggtgtttttggccggaggt

SEQ ID NO: 301483 - DNA, 568 bp, Homo Sapiens; identical to SEQ ID NO: 32849

SEQ ID NO: 301484 - DNA, 942 bp, Homo Sapiens; identical to SEQ ID NO: 231519
  misc_feature (44)..(52): n is a, c, g, or t
  misc_feature (73)..(212): n is a, c, g, or t
  misc_feature (290)..(300): n is a, c, g, or t
  misc_feature (471)..(480): n is a, c, g, or t

SEQ ID NO: 301485 - DNA, 1020 bp, Homo Sapiens; identical to SEQ ID NO: 231520
  misc_feature (165)..(165): n is a, c, g, or t
  misc_feature (169)..(169): n is a, c, g, or t
  misc_feature (179)..(179): n is a, c, g, or t
  misc_feature (186)..(186): n is a, c, g, or t
  misc_feature (218)..(305): n is a, c, g, or t
  misc_feature (341)..(353): n is a, c, g, or t
  misc_feature (391)..(391): n is a, c, g, or t
  misc_feature (394)..(414): n is a, c, g, or t
  misc_feature (429)..(429): n is a, c, g, or t
  misc_feature (447)..(447): n is a, c, g, or t
  misc_feature (451)..(488): n is a, c, g, or t
  misc_feature (496)..(496): n is a, c, g, or t
  misc_feature (503)..(503): n is a, c, g, or t
  misc_feature (507)..(507): n is a, c, g, or t
  misc_feature (544)..(544): n is a, c, g, or t
  misc_feature (563)..(563): n is a, c, g, or t
  misc_feature (575)..(577): n is a, c, g, or t
  misc_feature (580)..(580): n is a, c, g, or t
  misc_feature (582)..(582): n is a, c, g, or t
  misc_feature (594)..(594): n is a, c, g, or t
  misc_feature (603)..(603): n is a, c, g, or t
  misc_feature (610)..(700): n is a, c, g, or t
  misc_feature (704)..(704): n is a, c, g, or t
  misc_feature (799)..(800): n is a, c, g, or t
  misc_feature (820)..(820): n is a, c, g, or t
  misc_feature (822)..(824): n is a, c, g, or t
  misc_feature (866)..(866): n is a, c, g, or t
  misc_feature (869)..(870): n is a, c, g, or t
  misc_feature (872)..(872): n is a, c, g, or t
  misc_feature (874)..(874): n is a, c, g, or t
  misc_feature (884)..(884): n is a, c, g, or t
  misc_feature (890)..(890): n is a, c, g, or t
  misc_feature (905)..(905): n is a, c, g, or t
  misc_feature (925)..(925): n is a, c, g, or t
  misc_feature (931)..(931): n is a, c, g, or t
  misc_feature (985)..(985): n is a, c, g, or t
  misc_feature (987)..(988): n is a, c, g, or t

SEQ ID NO: 301486 - DNA, 629 bp, Homo Sapiens; identical to SEQ ID NO: 32852

SEQ ID NO: 301487 - DNA, 801 bp, Homo Sapiens
  misc_feature (298)..(308): n is a, c, g, or t
  misc_feature (565)..(565): n is a, c, g, or t
  misc_feature (670)..(670): n is a, c, g, or t
  misc_feature (716)..(716): n is a, c, g, or t
  misc_feature (763)..(763): n is a, c, g, or t
  misc_feature (769)..(769): n is a, c, g, or t
ggcttactgtgaagaaaatactggtcttagttgtaattaggatacaatggtacagtgtgtaattaaaactagagtaaactgttggaatggctgttttacttaaatattatcaaaactagcataacataagcaaaatagataagtacaacactccatttagtgttttgccagattgttaccagaagtctacagataccaaactttcagttctgagtttgtacaggcaagtcctgtgctgggtaaaaagttatattaatattgttatccacaagagatgtgattatgggttttgattacnnnnnnnnnnnccaaaccctgcttttgaaatatccttgtacttaaaattcatattgctaagacactgtattagaatatttaatattccccagatcctcttaggataaactgtgggaatcctcctatgccatggatatcaaaggtccacattagtttttatttctccagtgatcagaaacattgatatcaatccctattaaattagtggggggaatattaactttatctacagtgtattactgtatattaaactgaaatagtccattanaggatttttttataaatttattttggattaaaaatatcaacaccaataagtttttagaccaagttgtaattttttccaatatagagtcttttgcatcacactgangcatcttgcacagctgcagttaagggtgagaaagaatgctctgtgntgaagacagtgttacccaatggggttccggttttcctttgcacctgntgcagnattctttaatttctggggctggttctcttctg

SEQ ID NO: 301488 - DNA, 819 bp, Homo Sapiens
  misc_feature (270)..(278): n is a, c, g, or t
ggaattttgaaaaaattagaatatatgccaaatattgagtgctgtgactcttcctcataagagatgtgccagattctatgtctaattgcatattctcttcagaggagatgatgcttattttaaacctttttctctataacttttaaaaagtggtgctgagtattcactagagtggcaagtctttgtgctttaatgcactcaatttgtggaaattacttaaatagcaggttatcagatggttctgaatgacaaaggtgttaaatttgggannnnnnnnncaagctttagatatggctggagagtaatgagacagaaggaatgtcttatattgttctgactgctgacaattcctaaagaaaagtgatagaagggtttttaacaaaataagttgcatttattctctttcccagggttactcctttgaagagggcaaaattcagttgggaatataaattctggaatcttcatgaagaaaattagttaacagtatagacatgccctacaaatatcatccacaggcacttcattcaagaacttcaggtgtcagagtgcctggagctctggagcttagacattagagttgattccttggggattggttccaggacacctacttggataccaaagtccacagatgcccaagccccttttataaaatgatgtagtatttgcatattatgtatgcacatcctcccatatactttaaatcatctttagattacttatactgaatagaatgtaaaatagtattcaccattgtgaataccatgtaaatagctttcacaatttgtgaataacatggtaggtacctatgtaaaa

SEQ ID NO: 301489 - DNA, 829 bp, Homo Sapiens; identical to SEQ ID NO: 32855

SEQ ID NO: 301490 - DNA, 779 bp, Homo Sapiens
  misc_feature (724)..(724): n is a, c, g, or t
ggtgtcatcctttagaataatgggaattaaagttgagcagttttccatctctaccaaatccttcaccacaagcagcattctattacagtatgaagaattgtctcatatgttaaaactgtacttttctctaacctttctctcactcctacaaggcccttttctcaaatcatatttctgagagaaatgtatggttctttctcacaggcctgctgatttgtaactgtgccatcgaatagagcaattagatccatcagacctttttcccctcattaggttcagtggaaccattctggttaaaacagcatgaactgaactcagtttacattcatattctatgggcaataccatttggtttttggaactgtttatctgctgttccctatcaagtattaatgtagggatgtcactcaggctgcgttgcactgggctgagttcaactgcgacgctctcactgacgcgtgcttacatgtgcttctcacttccggagcacaggcaggtggctgcggggtcccagctctgaatggatgcccatgatgcaactggggcagcccttgctttttgcttgctctccccacagaaacctttgtccttgcaactttatcctttgtcccgattgggtccccgatacacaaaatgtacaaatgtaaacttgctcattttattaaaattctttagttctttggtctttctggaattttttaaataaaaaatgcccttgatgganggatggttttcactcgcaccatacttagtctaaataagaagtctaggatctacaa

SEQ ID NO: 301491 - DNA, 1049 bp, Homo Sapiens; identical to SEQ ID NO: 231521
  misc_feature (44)..(52): n is a, c, g, or t
  misc_feature (75)..(189): n is a, c, g, or t
  misc_feature (215)..(232): n is a, c, g, or t
  misc_feature (292)..(346): n is a, c, g, or t
  misc_feature (953)..(953): n is a, c, g, or t
  misc_feature (959)..(959): n is a, c, g, or t

SEQ ID NO: 301492 - DNA, 646 bp, Homo Sapiens
ggacaaaagaatgaggcccactctcgaaaaacaagaatggggaaaaagctaattggttacaatgaaggttgctagaggtggaatacattatattaaaactgataagagcaagaatatttatcccgccttttctatataaatgcagcactaggtaaccaaatagtagaaggggaaatttttctttatagaagcagtacagctgaaaaataagtgagggagaaaaaaccagagtatcaacaatttgcaaccactgatgaaataatgcatccaggcatgaaacattaatgtcagctaagcctacaaaattaaagacaaccagacattatgtgcttcttgataaaagaagttaacatcaccttataatgtagtcttacccttactcacctaaaaaagaacctgaagctgaaactctagagccaacttgcaatttataggggacagatgaacatgttaaattataccatgggatacaaaagcaaaattcaaactatgggaaaacgtgaaagacaaataaccttgtttcttaacaataaattatgaagaataaaataacagatagagtgggaacttataggacccaaagaaacataaaagatatatccatcacccacaatgtgcaggaactttatttggatcccgaagtttt

SEQ ID NO: 301493 - DNA, 537 bp, Homo Sapiens; identical to SEQ ID NO: 32856

SEQ ID NO: 301494 - DNA, 755 bp, Homo Sapiens; identical to SEQ ID NO: 32857

SEQ ID NO: 301495 - DNA, 936 bp, Homo Sapiens; identical to SEQ ID NO: 119512
  misc_feature (286)..(294): n is a, c, g, or t
  misc_feature (418)..(545): n is a, c, g, or t
  misc_feature (598)..(619): n is a, c, g, or t
  misc_feature (682)..(723): n is a, c, g, or t
  misc_feature (789)..(797): n is a, c, g, or t
  misc_feature (832)..(832): n is a, c, g, or t
  misc_feature (861)..(861): n is a, c, g, or t

SEQ ID NO: 301496 - DNA, 501 bp, Homo Sapiens
gggtttcgcgtcccgcctctcgcctggctggccgtggggggcctggacgcagtggcctcccgaatctcccaggaccctaatatcgcccgaggatgctgggaggaacgctgagccgacctctccgttaggctgaagattgcacaaaccatgctaatggccagcatggatggagggagcgtgtgagatgtgtggggcagcgtgctgcatctcagccaactccaggaggacatttttaaattctaggtatagagcaataaaagaagaattcaagcaaagggatcaggaagaggattgctactaagaggcagagaaaccaatgaagccttttgccatctcacactggaaagacaaaaagtcatagaggcttgatttttataaggaaagagaagtgagaaactgacctcgatactttgttggacttgcctaaagacatttgctgaattctcgggctgtgctgggatggagattagaggccaaataaaaacctctggtaagtagcga

SEQ ID NO: 301497 - DNA, 796 bp, Homo Sapiens
  misc_feature (190)..(203): n is a, c, g, or t
  misc_feature (509)..(509): n is a, c, g, or t
  misc_feature (540)..(540): n is a, c, g, or t
  misc_feature (727)..(727): n is a, c, g, or t
  misc_feature (750)..(750): n is a, c, g, or t
gggattgggagcaataaaagtggacccagagctaattactgggaattcctacttgaataatgcttcatttctagagccacagcttgtgttaaaagaaccaccttcaccaagcagtccaatgagaacaaactctaggacaaacattctctgccaacagagctaactagatggagaaaaagaaaatgaatgnnnnnnnnnnnnnntggagccacccagttcaagacagtgcaggtggaggagcagtatgtttagaccgcatcgcaggtagaattcagagggactgtaagcgatgcctggaaacgcttgttgaccaacaatgggctcctatagaaccaagggactatcattctcctattgcagaataatttttctagatactttattttattataatgaaagttccttctagtatcttaatgaccttagggaattggtattcatatcctgttagttgagagaagagagtttttccagtgggaacgtgaataaatttaaatgagtcacccctncagtaccaagcaccactgttcccaggtttanatgacaattactattccttcagtgaaccatggccactctgagattgggtgtggggaggagaaaggaatggaatgccagtgaaaccatcttctattgtcatcctcctctggggcctcactcagttgtagtcttgcatctgagaccttggcctctttggaaataaacatttcttgggccctgtctgcangaaaattggaagcctgaccctanaataagctaatatcatccatagaccagaccaaaagaaagcagggaa

SEQ ID NO: 301498 - DNA, 633 bp, Homo Sapiens; identical to SEQ ID NO: 231528
  misc_feature (616)..(616): n is a, c, g, or t

SEQ ID NO: 301499 - DNA, 137 bp, Homo Sapiens
ggggctcggtgacagaaggagcggccagctgggagcagagagtgccacaggggtcagggcccttggctaatgggtcaagcatccccagaactgaaaaagatggacagtctatgaaagcttaaattgatcattttttt

SEQ ID NO: 301500 - DNA, 580 bp, Homo Sapiens; identical to SEQ ID NO: 231530
  misc_feature (88)..(377): n is a, c, g, or t

SEQ ID NO: 301501 - DNA, 165 bp, Homo Sapiens; identical to SEQ ID NO: 231531

SEQ ID NO: 301502 - DNA, 815 bp, Homo Sapiens
  misc_feature (439)..(439): n is a, c, g, or t
ggggagaaggcaaggttaaatatgaccctgccactgttggcagggccttataatgtagtaggggagataagcattcagatagatagtgtcaacacagcatattcagtgtgtggggctattttcagagtcatcctggagcacagaggggggtgtccactccagcagtgaagagcaaggaacgagggcagaggtcaggtggcatgggagagagataccccagaggaagtggtctggaaaagtgccagcccaggctatgtgacttctcaggttcaacatcatggagatgagaaagaccaaatggcacccagggtcctgctgaaatcagaggcataaatctcagctgcaggcatgaggagcaattcaggaacccttgaatagatcctttcagattcttaacgtggcttcattgaacgaagacctctccagggttctgtcctanagtcacctcagaaagctgtgtctctgacatcacaggaaaggggacccagggccagaaatcacttcagcatcattcacctcaatttcacccctgagaattgaggtatcatgaacaaacgttacaagaatgctcaagaatctggctaccaaatagtccatagagatattatcctagattaaataaaattagaaaccatttattaggcacctactctagggcagtcacagtatttccttaaattgggaggaaccttgcctgattggatgagaattggataaaaatttttaaccccatccagggaccttaagaaaataatttgctatcctgcttccagtccaagtcccacagtgacctttccaagaaaatggtgtccagg

SEQ ID NO: 301503 - DNA, 813 bp, Homo Sapiens; identical to SEQ ID NO: 32862

SEQ ID NO: 301504 - DNA, 323 bp, Homo Sapiens; identical to SEQ ID NO: 231533
  misc_feature (54)..(274): n is a, c, g, or t

SEQ ID NO: 301505 - DNA, 877 bp, Homo Sapiens
  misc_feature (479)..(487): n is a, c, g, or t
gggagcatgttgttggtcagggtttcagaatacgcgtgatgtcactgagaatgtttgctcacagtcaataattgtctttgtggatgtgataattttggagatacacttctggtcagaactcaggtgagataatcttgcaatactccaaatgcagatactccagccacccgcaaggttccaggaaaggacaatgtcctgcgagaaaatcaggaggcctccacttcctgggccacttgagaagttcctgggcatgtcactacatgttggttgactcagccatttctcatgctgttttgtttcttgcggtggccacttaaccccaaagaatgaagggaggatccacagtgaaagtgcctgagtttctctatgagaccagatgctgtcgaaaccaaacatcttttcctttgctctatgggaacattttagggtttgttttgcacagctggtttccagactagaagattaacaagttttgggtnnnnnnnnntagaatccagtgggctgtctttttaagggggaaggaagtgtggggcttaaactgaaaggcccttttggaggggagcctattaaaggaaaaaaccaaccctgggggacattccccaagtttttcccttatttccctcccaacctggttaaaataacctcccttcctaaaaaataatttccatggaaggttttaaaatgggggataaataatattggcctttgaaaagcgtcttaaccctttttataaaccttgggaaatgggtaaatttgccagggcgattctccttttatttataagagaaactggggggtccctcctgggggaatacaccccacaaggaaaaaaataggtttggggcgcactgtttcaaaatatcctctaaaaggggga

SEQ ID NO: 301506 - DNA, 756 bp, Homo Sapiens; identical to SEQ ID NO: 231536
  misc_feature (49)..(347): n is a, c, g, or t
  misc_feature (358)..(358): n is a, c, g, or t
  misc_feature (656)..(656): n is a, c, g, or t
  misc_feature (714)..(714): n is a, c, g, or t

SEQ ID NO: 301507 - DNA, 896 bp, Homo Sapiens
  misc_feature (41)..(50): n is a, c, g, or t
  misc_feature (208)..(383): n is a, c, g, or t
ggaactctgaaatgtaatcgcagaaaaaagtgtgtgggggnnnnnnnnnncacttgatttaaccgtaattttgtttgagacattgtttagaatcatatcttaggtgaaatatcctgaattactagttaagttttgctgtttgtatggcagatgtttaataaagcactttcttcccccataaattagatattagaagccaaaaagctannnnnnnnnnnnnnnnnnnnnnnnnnnnnnnnnnnnnnnnnnnnnnnnnnnnnnnnnnnnnnnnnnnnnnnnnnnnnnnnnnnnnnnnnnnnnnnnnnnnnnnnnnnnnnnnnnnnnnnnnnnnnnnnnnnnnnnnnnnnnnnnnnnnnnnnnnnnnnnnnnnnnnnnnnnnnnnnccttttaaaatgcagatccaattatgtgtattagtttaaaacctttcctcaacagcctaagccttagcctccttactaaggagcaaggcatttaaggtccttcctagaacggacccattaccctcccagataagctcatgctactctcctgtacacgcccaccctccaactacttcattttctctaataggcagtcctaccttccatctccatggtgttagcaaatactttgggagaaagaccatatccttccccactaaagtatttccatttttaaacatgccccctgaaagatcaccaccttattttaacagcctttccctgaagtcttccagggaaacattcccctcctctctggtaccttggaatgctgaaccccctttggcatattaccccatcctcccctggttgtttgtttgggcccaggtggccccccctccttccaaaaaaactgggttttatgggggaaaatgggagattccggcgcccttaacttttcccttgggataaaac

SEQ ID NO: 301508 - DNA, 827 bp, Homo Sapiens
  misc_feature (617)..(617): n is a, c, g, or t
  misc_feature (745)..(745): n is a, c, g, or t
ggtgtgtatgtagtcatgtgctgtataataacgttttggtcaaaaacaaaccgtgtatacaacagcagttccatcagattataatactgtattttttactgtaccctttctattgtatgtttgcatgtataaatacttaccattctgttacagccacctactgtattcagaacaataacatgctatgcaggcttgtagccctggtgcagtaggctgtaccatacagccaaggtgtgtaggaggctataccatctaggtttgcaagtacactgtatgatgttcacacagtgacaaaatcacccagtgatgtgtttctcagaatgtacccgtctttaagcaacacaggactgtgctgtaaatgcaaggtaaccatttcagtaattcaacaacgttatagttaaagagttgtaaccttgttatagttaacaaagttaatatatagttatctacaaagtagataaaatgaaatcattaaaaataatccagaggaagcagaaaagggaaaaaggaacaaagaacagataggacaataagaaaaagaatagcaaaatagtagatttaaactcaactatatcgataatcacactagatataaatgtcctaaatacactaattanaatgcaaagaatgtcagattggctaaaaatgcaagagccgactattactggtcaacagaaaaccctttttaaatcctaaagacataagtaggttaaagggtaaaaggatggaaaagcgctaatactantcaaaagaaaattgaattgggtatatcaatatccaagtagaactagagcaaagagtattaccaaggatataaaagaaggctg

SEQ ID NO: 301509 - DNA, 475 bp, Homo Sapiens
  misc_feature (351)..(351): n is a, c, g, or t
  misc_feature (378)..(378): n is a, c, g, or t
gggatgcttgctgagctaagctaacctggccgttttgcaggagttttgcatcatttgaaatttgcctcattttggccatctttaaacttcctagaacaagagcactctgtacttccttggatctccttctggttctgcctgggccttgtcaggctgtggaagaaggatcatgtcatataacacagtgcctgtgatagccttcccacatgtgcccagcatctagcagtggttttgtcctatccagatgttggaggtgggaacgcggctcttctgctggtctcagaccctgatttcagtctctgcttctgacaggactggatttctgtcattgcttactctccctatcctganaaaatctagtgctggctgctgctttgntgggacccctgaaaacagatccccttcattttccccgggggttcccaggggaaaacccctttccccgggggtccaggaagatttatggcccaaaaaa

SEQ ID NO: 301510 - DNA, 806 bp, Homo Sapiens
  misc_feature (601)..(601): n is a, c, g, or t
ggtgcatgatttggagatttggtgtaacaagacccaaatgtgctaattatctgctgtaaatggggacaaaatgtaactaggcctgggcagaactgtctctcctctttgctcctcacctgtcattctgaacctgccctgggcaaagagggttctttttgaggacattgggtagaatgaaggatgagagtcggtgggacatggaatctaagagccagagatgtgccatgttaatttattgtgagtcaggacttatgaagaacctccaggtccaagagttaaagttttgtttttagataaaagttttttaggcacagtgtggcacaccaaactttttgaaggtgctgggtttacctaagtaattcagcaatgtgtatcaaattcctgctgaatgctggcctctgtcctaggtactcagagaaatattaataccaaggcaggaggagatctggcctttgctttttgggacccccagtgttccctgactgtgatatctcccagaaagacacgaagcttagcatcgccttccctgtgccaagccaaccctacagaccatagtgatatagagttcctgctggtaggtctcaccatgcctgtgtcctgngagactgaaagggggttggttctttgatagtgggtgcacatgggagaactttgacttgagcccttcaagggaaaccctgccacctttggttgctcatgaaagtgcttgttaagtcatgccaaagtgccctgcactgccctccccttttcccaaactggtaatccttgaaggttgttcccaacatggaaggttgggaaacccagcc

SEQ ID NO: 301511 - DNA, 801 bp, Homo Sapiens
  misc_feature (466)..(466): n is a, c, g, or t
  misc_feature (570)..(570): n is a, c, g, or t
  misc_feature (593)..(606): n is a, c, g, or t
ggtgggacgcggcaggtgacagccgttctcagcatgttttagaagcttgcctcacagacttccatgcctctccattcagccgatgacttcagggtgtcaaactgttttaatttttcaaacaaatggaacagaagccattgtggttcatcctgattacttgaacgttgcacttggtggaccgtgcctgggagcgctcgcatgccccctggcttcagaagtcatgtcagtgtctctgtagacaaactccactgtacatcttggattaatcttctgattcattgttcattttctcaagactttttgtggaattctctgataaaggaagcttttaggatggtatctatcaggccaccagcaggaattgaaaatgttttcacaaaaatccttttccttagaaataaaagctggtgacagagatggtttccttgtaccgataaaacaaaaccaaatccatattatacatcanaaccttgtgagacattcacttgctcttttgccatatttagatgtgttagtggaatcagaaacctgttttgatatgtgttctccatgaagtaagtctgatttgtncttttatttcatgatgcatgtcnnnnnnnnnnnnnngtcaggataacgtcatatagcatcttggttagtttttccttatctctatgtacatatctatctacttctgactgtagatgggtatatagatagatgccaaagcttcttatggttctgggggtagtatgcatcatttattggggtctctgcctttaaacacatcaaaattcattttagacaaaaaaacttctgcct

SEQ ID NO: 301512 - DNA, 730 bp, Homo Sapiens
  misc_feature (591)..(591): n is a, c, g, or t
gggggggcgctgtgactatgactggatgccgtgttcttcctgcaaggatgtgaggactcagtctcaggcaggtgacaggagtggagcaatgaacgccaagacacagctcctgctctcctggcgcttacactctggcgtgcaggctgcagggatgcagatacggtgacaaaacagtctggtccccaaacttctccttatccctgagaccgccccagccatcctctgctctgtgcccacccacatgactcagaactttgatccctacctccatgtcctgaacaggcagtttcctccacttcagaagtcccctccgccctggaaagctcctactttaccccgtgttccagctcacgaagctttctctggctctccagccaaagttcattgctgccctctccacgcactcctgctctacacagctccgctgcacgcataagtccaagctagtgtgtgtctcccctttatcccagacaagactccctcaggcgctggaccaggtcttaggttaatcctaacgcctccccaagctggggccctgcttggggcgtaccagggtatctgaaaaaaagggctggctggaaacccaaaccnaaggcccggtcaaaatggaagaaaatttaagggttaattaaagggactttcccgggaaaaaagggccttaaacttccaggggaaatgggccccctggaaagggtgggcttcccccccgggaaatttccaacaaagtttt

SEQ ID NO: 301513 - DNA, 671 bp, Homo Sapiens; identical to SEQ ID NO: 231537
  misc_feature (207)..(207): n is a, c, g, or t
  misc_feature (242)..(312): n is a, c, g, or t
  misc_feature (617)..(626): n is a, c, g, or t

SEQ ID NO: 301514 - DNA, 359 bp, Homo Sapiens; identical to SEQ ID NO: 231542
  misc_feature (287)..(287): n is a, c, g, or t

SEQ ID NO: 301515 - DNA, 778 bp, Homo Sapiens
  misc_feature (486)..(486): n is a, c, g, or t
gggaggtaggctgaaatgaggaggattggtaaagttcttaaaaggagcagtcagaccctctagatcccttttctaggtctacatagccaagtgactatctcttcttttacctctgcaaaaggctggaagtttattctctgaacagattgaaccagatgggctctggtctcaagttcatgaggtatatctaaaagtagggatgagacatgttatgctaaaaacaggaattaggtgaaagttgacatactgaagggtaggagtcctatcccccttcccagatatggcatccaggcttgtactctccaggcaggaggttagagattcttccctaggaaaactgaccaacacaaagaggagatttacatatattgacacctggagtccctttacaaatcacttaggtcaccctaaatatataccccacagtcagcaaggccctcctatgagccagagcttctgataattgccatagtgcattattatganacaaatggttcctttgggccaagggcctaaattaaatcctactttagttagacagtgcctcatcatatttcacatcccttaattgtttccccttactttagacagtaatggaaaaatacctgttttaggtcccaagatagatcagaccacagtggagtggatgaatcaaaataagcattactgcccactggggaaaaacatatatctttaatgcagtggcatcatgttttatattaaaaagatagtactcaatttacagatagattggctattggaattcagacaactgtct

SEQ ID NO: 301516 - DNA, 128 bp, Homo Sapiens
ggggagcacctgggggatggctctgtcccgggcgcacttaggcgggctgtgcggagcgctttaccttccacagtgtccggcacacgcatccttttcgacatcatcacttgacctgctgcaatagacaa

SEQ ID NO: 301517 - DNA, 789 bp, Homo Sapiens; identical to SEQ ID NO: 32866

SEQ ID NO: 301518 - DNA, 744 bp, Homo Sapiens
  misc_feature (310)..(342): n is a, c, g, or t
ggatattgtatgtggtcagaggaaagcaagacaagggcaagacttgggcaagtgacaagacgtattagcagtggcagcaacagtgctgggtaaacagttgtaaatctcaaacgctgagccgtgttaacattttacagaatgctttgatccttttcagtaagatacaaagcaagaataaattcacacagcctccttggaggtcagtgtgatttctctgtttctgtggaaaagcactaactagtcacatgctaattcacagtttgatgctcatcaaactggagcagatggttagaggtagggatgacatacnnnnnnnnnnnnnnnnnnnnnnnnnnnnnnnnngaagactggtttccccagaacctgaatggagatcctgcagctaaaagaggtcacccatctctcttttgggtgttctttttagacatccaaatgcagactggatggtgccttcccagaagagcatgttgtgggtcatctctctgtggggataactggggaaggaagcttcctcccaaaggacatgcagccagagtatggttttacagtagaatctaagaatattaataattcgttgaacataaatgaccaaggagctctatttcagtaagaaagttccggggagaaagtttcaaactggtgtaactgccaaagtattaagggggcaagatgcccactaattcccagtggatttaaaaaatactggctaggttttttcctcaagggaacatttccaattctttc

SEQ ID NO: 301519 - DNA, 396 bp, Homo Sapiens
  misc_feature (50)..(80): n is a, c, g, or t
gggttaagagtataaggaagaaaataagtcgtgttaacgcaattgctgcnnnnnnnnnnnnnnnnnnnnnnnnnnnnnnnaaacttgagatcatgtaatgtcaacaagtttattggatttttctcctaatgtagtattagtatttccatgtgttgtaaagagcaagcttttaggtatcatttttaatgcaatataatgttgtaacatcctattgcaatgacagcttgtctttctcccaattttatctgcactattaggtattaagaatatttaatgtggccgggcatgaagggctcctggcctgtaaatccccagccacctttggggaaggcccaaggtggggtggggaaacactttgaaggggcccggggagttttcccaaaaaacccagccttt

SEQ ID NO: 301520 - DNA, 163 bp, Homo Sapiens
gggtctcaagtggggccacgcgctggcctgtctaggggctcattaatggaggttttgtggccagttaggggaggtgatggccctgatgttgctcgggggtcagcgggacaccacatttaaagagggagtcagtttagtataactaagtataacttcacccagg

SEQ ID NO: 301521 - DNA, 295 bp, Homo Sapiens
ggggataacgctttagcgagccgcgaagataggaggcggggaagaagggggacgtgtacctctccctcattcacggtacatttacctgaactcatcaccttcccacccccatcccatcgactctgtgctgtatcctgaaccggctgacagaacaatgatgtagacttgacttgttttcgccaacctggaatgaagcaaagctcttgtgcacccaagatctgctctctgttgtaaatcctgttcagacctggtctaattggtttgaataaataaagaaccggaatctttctcatca

SEQ ID NO: 301522 - DNA, 393 bp, Homo Sapiens
  misc_feature (79)..(79): n is a, c, g, or t
  misc_feature (136)..(136): n is a, c, g, or t
  misc_feature (275)..(275): n is a, c, g, or t
  misc_feature (299)..(299): n is a, c, g, or t
acaggttgggagaagcccccagttaagattcacaatataatctcaagtacggatgaactcccttggccagaactgaggngtgagtgggaagtgggctgaagccacaagcacagaagcagtgtgcccctgcttctanggcaggctgggaggggcatggcctgggcacagtggtttctgtctccatggagaaagcttatggcctggggaagttttgagtcctgatgcagactgcctggaaactagctagctgctgctagtggaacactgcaagtgtngaaacagccttgccaagtgcatangagctaagtaggggcttactgtcaccctgctactcccccactcccatgaaagactctttctgtacaccagaaggcagttgttgcttccttccca

SEQ ID NO: 301523 - DNA, 634 bp, Homo Sapiens; identical to SEQ ID NO: 32871

SEQ ID NO: 301524 - DNA, 721 bp, Homo Sapiens
  misc_feature (58)..(311): n is a, c, g, or t
ttggaggaggaagagtcaatgagagagacgtgatgtgagaaatactcagccagccacnnnnnnnnnnnnnnnnnnnnnnnnnnnnnnnnnnnnnnnnnnnnnnnnnnnnnnnnnnnnnnnnnnnnnnnnnnnnnnnnnnnnnnnnnnnnnnnnnnnnnnnnnnnnnnnnnnnnnnnnnnnnnnnnnnnnnnnnnnnnnnnnnnnnnnnnnnnnnnnnnnnnnnnnnnnnnnnnnnnnnnnnnnnnnnnnnnnnnnnnnnnnnnnnnnnnnnnnnnnnnnnnnnnnnnnnnnnnnnnnnnnnnnnnnnnnnnaattccagcatagcctgctcctgatggtcaccttgtgaagaataatgtactgtttggcattcagatgctttaatggagggctaatttatgacatctggaaaggaaggtaaatttaacaagacaagtttgaaagaaatagctgtaattgacgagtgcatcattacaggttcctcttggccacgctgcccttttttctctgccacacaattttctctgagtggacccttcttgactgtccgagaaagtaattaagtcctttttgagtcagactgacagcaaaagttagcaatcttgttacagtatttaaaactggctacaggaccaaagactttatttggtctttgaaataaaagtaaaatcaccatctctttgtggggtttcttttcacaatgaaggcattgattggcttt

SEQ ID NO: 301525 - DNA, 575 bp, Homo Sapiens; identical to SEQ ID NO: 32872

SEQ ID NO: 301526 - DNA, 568 bp, Homo Sapiens; identical to SEQ ID NO: 231550
  misc_feature (87)..(118): n is a, c, g, or t

SEQ ID NO: 301527 - DNA, 787 bp, Homo Sapiens
  misc_feature (508)..(508): n is a, c, g, or t
  misc_feature (722)..(722): n is a, c, g, or t
ggtggagatatgtgccactcctaaaagcaacagcaatggaggaagaaaatatttgttaagttccagtgtttgtgaaagtatggtaggtagtgcatgttttcactgggtgaattgaaaggactgcaagaccccaatcacatctcctcctagacgattgtcttcctatctattttatctaggcaacaagtttcaagactattatttgtttctttttgattgttagctgttgcacattaaattttaaacatcccaaaaggaatgcaatgccctacttctctctcagttcttatagggctttctatagaagtgtggattcaatgacaggtcaataaaaagatgtctcacaggcaaatgcagactgactgactgaccgtaggatcagattgtgcaagtttggaggagagggataagagggcctgagagttagaagtatatagcagagctgagtacctgcacatgagaaatatatgcatacgtatctgggatgaaaaggagatcctcagtctanaaacgtttagtcttaagtgtctacataaatcaataaaatatgtagagcctgtgctaactaatgttttcacagagactggagggttctctctctttctgagtccccaaccctactatcaatggcactaatgtcatgtattctgtctattaaatttagaaaagaattgttctgttttacctgcatgaaaaaatcatttgctccctgtactgtaagntggcctttgtgtttaacacaaggtatatctttacttggctcaaattggcttttggggttaagaaa

SEQ ID NO: 301528 - DNA, 792 bp, Homo Sapiens
  misc_feature (85)..(109): n is a, c, g, or t
  misc_feature (365)..(379): n is a, c, g, or t
  misc_feature (405)..(454): n is a, c, g, or t
  misc_feature (545)..(648): n is a, c, g, or t
ggggcattggctttcaccacctatgcaattttctacacatctgaaaattaccagtttatctaactccttaaatgttcctctcttnnnnnnnnnnnnnnnnnnnnnnnnnttgctggaagaaacaggaagcatccaggtccaaatgacagcataacagactatgaagaaacagggcttaagtgcccatctagaacaagatggtctagattacaataaggaccccatgggacagaacatcaaaacattcaactttcaagtaaatgtcttggaagtaaacatttaaaatttataggacttcctctggcatgtaggtatgatattagaagagtttcctttgacaaaggacaatgacccaagaagtaggnnnnnnnnnnnnnnnaaataaaggagagacagtctcactcnnnnnnnnnnnnnnnnnnnnnnnnnnnnnnnnnnnnnnnnnnnnnnnnnnttttaactcctgggctcaagcaatccttccaacctcagcattctgagtagctgggatcacaggtgctccccatcacaccctgctaatttannnnnnnnnnnnnnnnnnnnnnnnnnnnnnnnnnnnnnnnnnnnnnnnnnnnnnnnnnnnnnnnnnnnnnnnnnnnnnnnnnnnnnnnnnnnnnnnnnnnnnnngagtgagccactgcctctgccttcaggtagcaattttattagcaaactataagccctaaagtaatagttaaaaattctcactgtggtatttcattactaaccccctggaccttgtacccttcaagcttaccactacaggtactt

SEQ ID NO: 301529 - DNA, 120 bp, Homo Sapiens
ggtatcataacgtgtatagtgtaaaatgtgaatgactttttttgtgaatgaaaatctaaaatctttgtaactttttatatctgcttttgtttcaccaaagaaacctaaaatccttctttt

SEQ ID NO: 301530 - DNA, 788 bp, Homo Sapiens
ggggtcttggcccttcatagagtattaatagtatgaatgagggagggtgacccagtgataaggagtaaggctgtgaaatcttaaccacacagagaatagagcatgaaacaaaagcaacatgaccctgccctcaccaagactacagggagtgatggagcatacaactttgtttcagaatgcaattcagatcttccctttcgcttggcttcttaaaacttcttttgaggatggtaaaatttcgtgttatattaaatttcatcctgtaactgatactctgggatgatgttggccaataactagcaagactttaaataatcaactagtttaggcattgcttagcacgctccagctgacttcacaagtaaaaccatgtgaagaaagaaggttttcaggtaacacagatggaggtgatgatctttctcattttgtggaaaatattaatttctcattttttattcactgacaattagtaaaattccttactctacctaatatgtagacttctgaactatgtaagtaaaactttatagtaactgaaaagtttgggtattgtattttcttggaagaaatgttaacttccctctgttactttttaatgttaaacttttaatgaatttccttcatgtataataatgggcctaatgatcccctccgaaaatatttactggcattttgaatttaatcttgaatcatcacaaacgttgtacatctcttatacccttctgggatggtatttgggggaaaagatcctccttggtggccaccccctttgaaggatggggaacttc

SEQ ID NO: 301531 - DNA, 751 bp, Homo Sapiens; identical to SEQ ID NO: 231556
  misc_feature (63)..(184): n is a, c, g, or t
  misc_feature (197)..(210): n is a, c, g, or t
  misc_feature (341)..(351): n is a, c, g, or t

SEQ ID NO: 301532 - DNA, 426 bp, Homo Sapiens
ggataatagtgtttatattgaaccccaggatgggacattattttttgaccatttacatgaggtctttctctaattaccaaagttaaccttaagagtagttaaaaactcagtgaattttagtcaacattctctgtggagacctggactagtgtttcccaaactttcatgtgcatgtatcaaatcagctgaggatattattaaatggagattcagattcaatagttctggggtggcctctgggattatcagtttctaacaagctcttaggtgttatcaattctcctggtccccagaccatagttagagtaaaagagtatagactgcatttagcttccagattttctctttcaaggaaaggagacagaactgtcattgtaattcttcctgtggtccaggcactctaaacggttccacccgccccccctt

SEQ ID NO: 301533 - DNA, 144 bp, Homo Sapiens; identical to SEQ ID NO: 231558
  misc_feature (74)..(75): n is a, c, g, or t

SEQ ID NO: 301534 - DNA, 761 bp, Homo Sapiens
  misc_feature (597)..(597): n is a, c, g, or t
  misc_feature (697)..(697): n is a, c, g, or t
  misc_feature (741)..(741): n is a, c, g, or t
ggagttgcttcttggcttaagaagctttggggctgagacgatagggttttctagacatgggatcatattatctgcaaatagagacagcttgatttccttgagatgaattttcaaaacccgttttaatgtagcacctgcttggtgcagaagatacttaagagggcctgcttggctaatggtagtatcagggtatgatgcctggggaaggttgggaagcagtttcccagaagaattcagtggatggatggtatggattcctttggtgaactgccgaggtccagggtctggcctttgggcttaggtcctcatatacctaattttatcatcatacaaaaaatagatttatctcttggggtagactcttaataactaagcccgtgaaactcagtaataaaaacagaatgagaattaatgagtaatgtaaccatcacatggaccagactgaacaaatgcaattttcttattacagctaagcttcacaggaagttaataagattgcttggtgaagacaaaatcagaagggtagtcagatttaacaaaagattaatgagaacaagctggtatacctgatatatctgctgcccataaggatgattnttgcaataacataatcaaagtcctttcagttctaatccctggcatctgtgacagctatcaatttattgcctcagtttcaaatctacgcttcattgccccntggtctgtgatactgggactattttgccaagctgggcatgctgntgagctttaatccaataaga

SEQ ID NO: 301535 - DNA, 144 bp, Homo Sapiens
gggggattaaaatgttcactttattcctgaaacccaggctggctgctctaagttgatctggtgccttggtcactcgtggcttctttcttctatgccagctctgtcttctctacacttcctctggaggagtaggccttgacacaa

SEQ ID NO: 301536 - DNA, 793 bp, Homo Sapiens
  misc_feature (355)..(364): n is a, c, g, or t
  misc_feature (477)..(477): n is a, c, g, or t
  misc_feature (546)..(604): n is a, c, g, or t
ggcttgaaccttctattttaatgtgcctttgtagataattcccaacatcttgtgtccttcatttttataatttatctttatcaaacttgtcataaaccccaatactttgatctcttgtagaagagtccgtactcctatccagtccagtgttgtttatcttcaaacttggacttcccctgctcattccattcttatctacttccattgggttcaccagctaattccattctcattctatccacaggctcactcccgtttgtattattaaaacacacgccaataggacataaaaagaagcgagagtactgggctttaccatgagttcaaatctcatttctgccaattcctatgtctnnnnnnnnnngcttcctaatctctttgagcctcacattctctatctagagaatcacttgaccagaatgttcaatgcagataaaaatactagaaggtattttaattcattccaagattccttanaattctgtaattctatgtcctcttgattctgtctatagaaaaacttggaatacataggcagcagagttnnnnnnnnnnnnnnnnnnnnnnnnnnnnnnnnnnnnnnnnnnnnnnnnnnnnnnnnnnntgaagacaagattatataaaagtcatggaaaaaagcaccagactaaaaaatgtattatgggaagtaagcagaaatacttgccctaaatggaaaaccaaactggggaagtcaaataatttgtctctaagacctgccctaaactttgctttgggaaaacttaccgtcctatggccaaagctaagtcagatc

SEQ ID NO: 301537 - DNA, 562 bp, Homo Sapiens
  misc_feature (263)..(391): n is a, c, g, or t
  misc_feature (478)..(478): n is a, c, g, or t
ggatcagcagagtaaggcataggaagacttggtcgggctccgcggcccctctttaccggattggaggctgcgcgggtgaaatcgagctttaaactcccctggcctcggaacaccatttgtagcctctgaaggaggaggacttataagattctgtactaaggcagccgtgggaagggaggagaaccaggtcggcccgcgcgctcccggctgcttttgctctccctttggtttcgaaagcgtcaagtcccaagactttcgctctnnnnnnnnnnnnnnnnnnnnnnnnnnnnnnnnnnnnnnnnnnnnnnnnnnnnnnnnnnnnnnnnnnnnnnnnnnnnnnnnnnnnnnnnnnnnnnnnnnnnnnnnnnnnnnnnnnnnnnnnnnnnnnnnncagaccctgagagcctactgaccacagcagctcctgttaccacggctgccatttctgctctcaatgctactgctcattgatcccagngaggaaaattctggtgcatcacttagtatttatttcaggtatggttaggacatttcagaataaaggatggcttcttctggatgt

SEQ ID NO: 301538 - DNA, 844 bp, Homo Sapiens
  misc_feature (435)..(435): n is a, c, g, or t
  misc_feature (547)..(603): n is a, c, g, or t
ggggcagttggaggcggggtcagtccagaagccttcagataacaccagggtgtagtcctggcgagaaatcttcagttgcttcaggaccttttctagccccacgcgacggctaggtcctccgtgagagaaaactggttcgagaagcatggccaacattcccaatgatccgcagatgtggtttccacctggccggtgccatgacacccacacacatggcgacaaggagaagggagaagaaaacctatttgttgtatatacctggcttttggcacagctgccgggattcacctgtgcaagtttccagcttgcttatctatgcttgcagcttgatttttcaggctactttctgttagaaaagaaatgatttggggggctgctttctattaaaagaaaaaccttaccaaggactcctgtacccctcactatctgccctanataatttcttaacgcctatattattccctttaaataaatttttttgtggggtttgtcttattgttattacgttatgagaattcatttatacattcaagaaatatataattcnnnnnnnnnnnnnnnnnnnnnnnnnnnnnnnnnnnnnnnnnnnnnnnnnnnnnnnnncatagtcaggaaatatattccgtccttttttgggaaatattttctctcagtctatagtttgtcctttcttataacttaccagtatgtttttttagagcagaagggttttacttttaaaaatttattattattatttttgactgataatctttgactaaaacaattactgggggaataagaatgggcactggaaatctggcacattaatttttggatcctttaaccttttaacgggattcct

SEQ ID NO: 301539 - DNA, 814 bp, Homo Sapiens
  misc_feature (703)..(703): n is a, c, g, or t
  misc_feature (713)..(713): n is a, c, g, or t
ggatccaaactttcctttaaagagagtttttcataaagttgctaatgtaaactgatatgggtgttccaaggtccctcggcagggaagatttgctggtgattttcttcactccattttcctttgggtgagcctgcctgggaagggccatgaagtcagaatctccactctgcaaaaggaagaattccaggcagaagaggttctgacagggtgacatttccgtatattctctaggttcggacaagagccaggaagctggaagacagtttatcttaatatccaaaactaagtgggaatttttaaccttttcatgcacctattcatggccctacctggaaggaacttggcagttgggttgagccatcagccttcccagctattcagctctgttgagtagcccagagacaggcgtcacggtcagagattcagaacggtctgtgtcagtgaggcctgactcccaaagatggtagcaatttcccaggcttgcgctgtgctcagtcagcaagatgtggggcactgtcctatgactgaataaatagtaattcccatctttctatcgccagttaaaaataaacaacctaccaagtattattctttaaaactaagcatggatgttgatggctaacttctgcggcatataagctacagatctcaagttacttctctaactgtaagcatgtaaatgactttaactcctttctataangttatgattntaaatttttcagaataagaaattggcattttaataatggatatgtggtgcccccttaaaaagctacaggataacaaaattttttcctcgttccagggtcta

SEQ ID NO: 301540 - DNA, 302 bp, Homo Sapiens; identical to SEQ ID NO: 231561
  misc_feature (107)..(107): n is a, c, g, or t
  misc_feature (143)..(153): n is a, c, g, or t

SEQ ID NO: 301541 - DNA, 762 bp, Homo Sapiens; identical to SEQ ID NO: 32879

SEQ ID NO: 301542 - DNA, 927 bp, Homo Sapiens; identical to SEQ ID NO: 231564
  misc_feature (45)..(92): n is a, c, g, or t
  misc_feature (201)..(238): n is a, c, g, or t
  misc_feature (328)..(391): n is a, c, g, or t
  misc_feature (518)..(608): n is a, c, g, or t
  misc_feature (621)..(675): n is a, c, g, or t

SEQ ID NO: 301543 - DNA, 374 bp, Homo Sapiens
gggttacatagtgaatgctgttttctgtggataagaagctggaattgtgatttcatttaatcgaaagacgcttactttgaggaaacttgtttgaaatgcaaacgcgatttctctgtggagccttcacggaattgctgcttttcactatgattattgctgcataacaggccacttctgtgtgtaggaagtgcgtgtgcaagtccaaagggaattgaggcctgaatgggtgggttatcccaattaacaaatacaaagttttcagtacattttgttttaagccaggtgcacaagttagagttgctttttgggactggcatttatgtatgtgagaatcaaacctgatatcactcttggcagcctgactaaagccattt

SEQ ID NO: 301544 - DNA, 550 bp, Homo Sapiens; identical to SEQ ID NO: 32880

SEQ ID NO: 301545 - DNA, 322 bp, Homo Sapiens; identical to SEQ ID NO: 231567
  misc_feature (76)..(90): n is a, c, g, or t

SEQ ID NO: 301546 - DNA, 761 bp, Homo Sapiens; identical to SEQ ID NO: 32882

SEQ ID NO: 301547 - DNA, 841 bp, Homo Sapiens
  misc_feature (277)..(543): n is a, c, g, or t
ggatacggaatgtgggaaaatcttcacttatttctcaagccttaaagtgtatgtcaggattcccagtggagagaagccatattgatgtaaggaatgtgggaaagcccttgcctgccacttagtccttgataaacattttagaacacaaactggagagaaactatgaattcaaggattgtgggaaaacccttttatgttccacaagctttaatattcatatgcaatgtatgctggagaataacttgatgactataataagtggaatggcctaggtcannnnnnnnnnnnnnnnnnnnnnnnnnnnnnnnnnnnnnnnnnnnnnnnnnnnnnnnnnnnnnnnnnnnnnnnnnnnnnnnnnnnnnnnnnnnnnnnnnnnnnnnnnnnnnnnnnnnnnnnnnnnnnnnnnnnnnnnnnnnnnnnnnnnnnnnnnnnnnnnnnnnnnnnnnnnnnnnnnnnnnnnnnnnnnnnnnnnnnnnnnnnnnnnnnnnnnnnnnnnnnnnnnnnnnnnnnnnnnnnnnnnnnnnnnnnnnnnnnnnnnnnnnntgggaaacatgccttccaccaaactggcccccggtagcaaaacactcacgcgaccactgattctcattctggcccatgtcccctccactcctcaccccaagcccatctattcctgcgcacgccaaactaccgccgggtttccagacaaccgtgttccttcaagaggcgaccccccgaccatcaacctcgtccgcgcccaggtactcacacggaaccgcgtgccgcgtctccactacgcacccttactcgacgcccacgccctcatgcccccatagtcccccccaggaggcatcttctc

SEQ ID NO: 301548 - DNA, 880 bp, Homo Sapiens
  misc_feature (512)..(653): n is a, c, g, or t
  misc_feature (793)..(793): n is a, c, g, or t
ggagaccaggggcagggtctattctgggccagcacgtggagcggaggcagagctggcctcaggcccttgcctgatcctccctccccttattcccttggcagcagacacatgacatagaaatcactggttccaccaaatactgcacagcccagatgctgctggcctgatcagggccaagctgagtcaccactttaggatacgattcttgctttttggactatgaatgcaccctcatcaccccatgctcaacccccaactgaagactgaggttacagcagatccgtggatatcacagggtgatgaggcactaggccacctgctgcctattccctggcacttcattcttctgataatggagtatgagagagaatgggacatgaggtggaccccgatcaggcatgtcatagacaggagggacacatactaccactgggcatggtgccctagataatgacccagagggaggttgtaggtctcgaccctggggtccaagctgatgaggaaaggcaacnnnnnnnnnnnnnnnnnnnnnnnnnnnnnnnnnnnnnnnnnnnnnnnnnnnnnnnnnnnnnnnnnnnnnnnnnnnnnnnnnnnnnnnnnnnnnnnnnnnnnnnnnnnnnnnnnnnnnnnnnnnnnnnnnnnnnnnnnnnnnnatttatttatatttctaagaaaattagccgcggggccagcccacaagcgctcccaccctccctggaatccacagcccccttttggggaaggcccaacggcccaaaggggaatccacccctgcgggtcccagggaatttcnaagaaccaagccctgggacaaaaaatggggtgtgacaaaccccccctcccctgtaacttagaaaaaatttttcgcgaaacttgtggg

SEQ ID NO: 301549 - DNA, 561 bp, Homo Sapiens; identical to SEQ ID NO: 32883

SEQ ID NO: 301550 - DNA, 881 bp, Homo Sapiens
  misc_feature (853)..(853): n is a, c, g, or t
ggaagaaatgtgttaattgaaataaaatgacgaagcttgtttggtgggaatttttgaacacttttgctttaacagttattagcactattgattattttgttaaaattttccctcattgtggcctttgatctggctccataatataccccattcccttattcagcagctctttgaaataaaagtgattttagttcctaggactatttgttatacttttggagctgtctctttccctccctcaggatgtaaaatgtatttcctgtttgtatataccacttcatttaaaaatatttttccttgaggctcaagacagtatgagtaatgataatttttagaggcattaggatcttgattgaaattctggctctgttgtatcctgttgtgctgtcactgtaagaattgtgcctttaatattgatcttcaagcatagctttgcatattttaacatctgaaatcagaaagcgcctttactgggtttctggttttacaaacatcaaataataatgtatgccaaaattgaatggcctttttgactccgatgatatacccctttatcattccaatctcccctttataccaatttaacatttttatccctcctgggaattggaaacaattatttttattggatcttccacacacttcattttccaaattttccacacgaacccttgtaaaaattttgccgcaccctggggttgcctcaccttttcgccccccgaattcccgcaaaatcttttgttcccccctccaataataactcccttttttgccaccctttcggcgcgcccgaaactcctaccccctgggtcccttgcgccctcccacttaaccactgcgtgttctggccccncggtaacaactatcctcttctccccccg

SEQ ID NO: 301551 - DNA, 734 bp, Homo Sapiens; identical to SEQ ID NO: 32887

SEQ ID NO: 301552 - DNA, 450 bp, Homo Sapiens; identical to SEQ ID NO: 32888

SEQ ID NO: 301553 - DNA, 111 bp, Homo Sapiens; identical to SEQ ID NO: 231578

SEQ ID NO: 301554 - DNA, 521 bp, Homo Sapiens
  misc_feature (49)..(248): n is a, c, g, or t
ggacccttttctgggaacgtgagtatcaaccaagaatgaatctcgctgnnnnnnnnnnnnnnnnnnnnnnnnnnnnnnnnnnnnnnnnnnnnnnnnnnnnnnnnnnnnnnnnnnnnnnnnnnnnnnnnnnnnnnnnnnnnnnnnnnnnnnnnnnnnnnnnnnnnnnnnnnnnnnnnnnnnnnnnnnnnnnnnnnnnnnnnnnnnnnnnnnnnnnnnnnnnnnnnnnnnnnnnnnnnnnnnnnnnnnnnttttttcttctgtttttaaaacttgtggtaaaatctagataacaaaaagtttgccattttaaccatttttaagtggacagttcagtggcattagttacattcccaatgttgtgtaaccaccactattatccatttccagaaggttttcatcacccgaaacagaaactctgtacccattaaatagtaactccccattctacccttctctccctccataacctctgttttaccttctgcatccatcaagttgcctgttatagataattcacatga

SEQ ID NO: 301555 - DNA, 804 bp, Homo Sapiens
  misc_feature (283)..(590): n is a, c, g, or t
gggaagcaaaagaaaggcataaagtctaatgagtatagcttctgagctggggaagcagaaggcatgggcaatgagattggggccacacacatggctgaaaagatttgagttaagattccgttaaaaattgaaagcgaatcaaaagaagaaactttgcaaccttggaggccctctagtgcccaaatcagaatgtatggaagaatccagcccactgactccttcctcaggacgaagcacagcacgacagccttcaagttcctatgtgtaaaagtgattcctctcnnnnnnnnnnnnnnnnnnnnnnnnnnnnnnnnnnnnnnnnnnnnnnnnnnnnnnnnnnnnnnnnnnnnnnnnnnnnnnnnnnnnnnnnnnnnnnnnnnnnnnnnnnnnnnnnnnnnnnnnnnnnnnnnnnnnnnnnnnnnnnnnnnnnnnnnnnnnnnnnnnnnnnnnnnnnnnnnnnnnnnnnnnnnnnnnnnnnnnnnnnnnnnnnnnnnnnnnnnnnnnnnnnnnnnnnnnnnnnnnnnnnnnnnnnnnnnnnnnnnnnnnnnnnnnnnnnnnnnnnnnnnnnnnnnnnnnnnnnnnnnnnnnnnaagtgattcctctctgttagtgatctgccgcgtctcagatactttacaaacattattgatcccccccacgatcacctcgcttgggtggcaattttttttctccacaagtttccgatgaagaaaacctgaagtcacaagagaataaaggtggaccttggctcaaagggccccccaaggtggaagtcaaatcccccccaaaaattctcccttttga

SEQ ID NO: 301556 - DNA, 763 bp, Homo Sapiens
  misc_feature (611)..(622): n is a, c, g, or t
  misc_feature (716)..(716): n is a, c, g, or t
ggggattggggtttatgaaatcagcgaatacctcatttcaatctgttgctgcttttctccctcttgtcacttctcctttcactactttcagctgctctaccagaaggtagaggggagtaaagggtcaaacccctatataattagctgttttaaacaactctaggagagcagattaagtagcttagtaagttgaaactattaatttttctaaagaatttgatttgaattccttgagaattgtaattatccacacttcctccagctataattagcagaattaaaaatgattgtactgtacaatgagttgttgaaattgtaagccttagtaaccatctttagctttattgtagtcatgtttagaaaaaattatttttacatatgcctttatttttatgcccactttttgtggataagattctttagataaaatctaaaaattttaagtgactttctccaggtcatgaagattcaatgggtagaattgaatcagaattgaaatgttccagattcatattcttgtgtgtgtttgataaaattagtgggagttcaaagtaactgaacacttcctttgggcccttggagggaaaatccatatttttactaattacacnnnnnnnnnnnnagacatctggcagttctttgaacttaacatattctcatggccatagttccaaattaaagcccgacgcagttgctaaaaaatcttgctgcactgntggaatactaataatggcaccttttattgggatgttttttggcattt

SEQ ID NO: 301557 - DNA, 277 bp, Homo Sapiens
atcccccaaattacaatccacaaagcttaaaatttccaatgttgaagtcccgaaagcctaattctggggaaggactttgtgcattgtctattgtagcatgatagttacatcatgtgagatgggacctatatcttggtattgcctttatccgaaaattaagtatgactttagcagatccccagaggcccagttggaacagggatagatggatggacttaattttagtgggccaaccttgactgggattaagggaatacctaaaaaaccttaccgaggg

SEQ ID NO: 301558 - DNA, 757 bp, Homo Sapiens
  misc_feature (629)..(703): n is a, c, g, or t
catattgagactatttttctaattaagaatagggggtagccataaagagctgtatgttggagggggaaacatggtgggcgggcagtttggttttctttgtgtatccgcgtttctctcacacttcatttgtagcaactcaggccagatgttttcgtctgaaattctctgggcttgtcattccacctgtatcgtgctgcaaaccaggtgttatgctagtaggcatctgccctcacccctctgcctgagttttctgtaggcagatgttaacctgagaaaacaagtgccttgtggacaccaagtaagcatttttgataatgaattagagcaccagtttctactgagtggagcaaaaaccttcagccatggccaggctgcatccctttggtcctggagtttcatctacttactgccatcttccacggtctttgcactgtcccgtgtcccttcccccctgggaggcagaagagattgcctcggaggggccttatttttctcccaacttgtgaaatgatgtagtggtctatgtattatggccgagttttccaagctgtcttccaaatggaaagtaaaatctttccctttgaaatcatttgggaccgggggcccaatatgtgacggcttgctatttnnnnnnnnnnnnnnnnnnnnnnnnnnnnnnnnnnnnnnnnnnnnnnnnnnnnnnnnnnnnnnnnnnnnnnnnnnntggattgttgctaagacccctaagctgtgaaccttttttgttcgcgtggttggc

SEQ ID NO: 301559 - DNA, 763 bp, Homo Sapiens
  misc_feature (527)..(527): n is a, c, g, or t
  misc_feature (595)..(595): n is a, c, g, or t
ggggttgctgggtggaaaacttgcagcacagccctgatgctgacttctgattcttgtgaaggggacgttgtactcaacagcgaaatcagattgtagctcaaatggaattggaagatatcttttttgtgtgatcacttcagtcatcttatgcctcttaaattatagcgccctcccaacccccatgccgtaatctagcaaatgctattgtgtggcactttctcttccaagccacccaacccccaacagcctctagaatacaagagaataagaaaaaaaccttatcgtttgccttcgactgtaggtggaagatgtcttacacatctcctagatggggctggccttctgattagttcatttgcctttaccatcagtattaaactatgtcttcacttgctacaaagaattgtgaagtaatttttaggactttctataaaaaatgccttattacctctcatttattttcccagcattctgtaagccttaggtaaactggggaagtagtgacaaaggccaaacttgtctgttgnccctttacagtgcgcaaagaacttttttatatacaatggtctcatatgtttctttgcagctggtcccntgcatgagggtactattaacttcccccactctattggaaaagaaaaccaaaccccctaaaatattaaatcccattggcccagcccatattagccttggcaccatggatggaaagcttgggggccttcaaaaccccattggggtttttttaaatccctaaggtttcccg

SEQ ID NO: 301560 - DNA, 1025 bp, Homo Sapiens
  misc_feature (551)..(559): n is a, c, g, or t
  misc_feature (716)..(726): n is a, c, g, or t
  misc_feature (841)..(841): n is a, c, g, or t
  misc_feature (848)..(848): n is a, c, g, or t
  misc_feature (916)..(925): n is a, c, g, or t
ggatataaagactgaagtcaacggagcctagtgaaagacttactttgtggcttgtggttgaaagtcacatcaaaagacaaatgtggccacgttcaggaattggagacttactggcatggctctacagctgctcagttattaatcatgcagactaacctgtcaacactgggagatgcaacatagcaaaaggacagagaaattagaattttttgtgcagaaagccctaaattcccacctgaatgtaacttacagctcccttacctactctcacacatgccctcaaacatgctagattggcttatacataggccaacacaaaataccaaacgtgacgtgttcatgtagccctagtgggctatatggcctatttctcccatgtaaccctgggatgggtaagggcttgccaaaactttttaaagtaacatttttccttttcaccagacaaggtaattttctttttttcccatacaaggggggggaatatattaaaaattcctcctcttttcaaatgtggaaaaaagggggcggaaaaaattctcaccggttttggnnnnnnnnncttgggagggttcttggggcacaatttcttccccccccactttttttgtgggagcccacacaaagccaaaactccgggggcgcaccaaagggggagagaaaaatattactaagtatttatagtaaccaaaacatttatttccacattttttttgttnnnnnnnnnnntaaaccaaccccccccaggtgcggggatcatatagtaaagggtcgttgtgccccccccgcggcaaggatcccccgcctttttttatattacaaaaagaaggttctgaaaatactntctttcntccgccccgcaaactaataaattatgattgggtggggcggtcttttttattacaaaaacaagcgggannnnnnnnnncctcgcccaattggacaaaggtgtgtatggttcgaacactcaattttattttttaacacacagccctctccccacaccttaaaaaagcttttcaaacaag

SEQ ID NO: 301561 - DNA, 799 bp, Homo Sapiens
  misc_feature (330)..(397): n is a, c, g, or t
ggtatttgtatatctttgaaccatcaccacattgtcttaattactgtagctttataaataaatcttaaaattaggtagtgttagtcctccaactttgttcttcatttacaaaattggttaggctatgttaagtctttgcagcttatcagtcgctacaaaaatgtaatttcgattgggattatttttacacaatacatcaattggggacaattgagatctgagcaatattgttcaatccatccatctttgtatatgctttaatttctctaagcaatgtcataggtttcagtgaataggtcttacacatcttttgtgagatttaactctacnnnnnnnnnnnnnnnnnnnnnnnnnnnnnnnnnnnnnnnnnnnnnnnnnnnnnnnnnnnnnnnnnnnnctgaatgttaattggtataaacaatcaatttatattcttgtacttattttgtatcctactacgtcgctaaactcacgtattggatttactggcttctttgaacattccattggattttctacaccgataacaatgacattgccatcaccaaagacagctttattctggataacttttctccttctgccttaatggctcgggctataacctccgttactatggttgaaagatgggggaaagagtggggcatccttgttcttggatcttatggaaaaaaagatttaggaatttcatggtcaaagtggggagggttaaccccaaaggtttttcccttaaaaggccccttttattaggggcggggggaaagagttttgtgggttcttttaatgggagataggagat

SEQ ID NO: 301562 - DNA, 1912 bp, Homo Sapiens; identical to SEQ ID NO: 231588
  misc_feature (58)..(109): n is a, c, g, or t
  misc_feature (113)..(148): n is a, c, g, or t
  misc_feature (197)..(423): n is a, c, g, or t
  misc_feature (1094)..(1104): n is a, c, g, or t
  misc_feature (1122)..(1122): n is a, c, g, or t
  misc_feature (1336)..(1376): n is a, c, g, or t
  misc_feature (1456)..(1456): n is a, c, g, or t
  misc_feature (1467)..(1467): n is a, c, g, or t
  misc_feature (1506)..(1568): n is a, c, g, or t
  misc_feature (1768)..(1768): n is a, c, g, or t
  misc_feature (1817)..(1817): n is a, c, g, or t

SEQ ID NO: 301563 - DNA, 507 bp, Homo Sapiens
  misc_feature (76)..(102): n is a, c, g, or t
  misc_feature (360)..(396): n is a, c, g, or t
gggatagagatctatactccaaactttattcctggtatctagttggcttcactgccacagacactgtactctctcnnnnnnnnnnnnnnnnnnnnnnnnnnnccccctcaattggcttatttagtaaatttaggtctgaatgaattggtacctaaaagcttccaaatctatacatttcagaatatgggaattttcttcctcttcttcccccatatcccaacatggaattctggaaaactgtgcctcttcccctgttctgccttcatgggggagagactggatgaaatctacaaaaacagccaaaagtgccaccctggcttcatgtcttgaatttctaacttgctcttggcaaaggtcgcnnnnnnnnnnnnnnnnnnnnnnnnnnnnnnnnnnnnnattctattgctgctgcaaaaattaaggcaaaagtagctttcgatctttcatatttcatcctggtttcacaaggagtcacttatcttaggaggtctgtaagtcaggttacaa

SEQ ID NO: 301564 - DNA, 151 bp, Homo Sapiens
ggtatggtttcctttttcttactttactatttatcagattttcagagtgcatgccccgctttgcggtacttcaaatagatgtgaaacatgcttcttgtcacatctccaatgattgaattgtctcaagtgagatcattaaaagtgagggact

SEQ ID NO: 301565 - DNA, 659 bp, Homo Sapiens; identical to SEQ ID NO: 231590
  misc_feature (120)..(254): n is a, c, g, or t
  misc_feature (345)..(354): n is a, c, g, or t
  misc_feature (517)..(527): n is a, c, g, or t

SEQ ID NO: 301566 - DNA, 364 bp, Homo Sapiens; identical to SEQ ID NO: 32899

SEQ ID NO: 301567 - DNA, 769 bp, Homo Sapiens
  misc_feature (523)..(523): n is a, c, g, or t
gggtaaaggaaatagtcaataatgcattcctctcaggataggcccacgtggatttttaatcttgtccttgccctgtgaagataagctggtaactgacattgtcagggtgagattcagcagaactcagtttttggactaacttacagaggagctgtgtatcctgaagattcagcgactggcaaggaatttccttgggagcaatgtgtgagggaggccatctgaggagatctgtggctttcttttgttgtgggaatctggcttatggatgaatctacgacacaggattgtgaaattacagctctttgggaacaaaaggaaggcagtattgcatgacttagtttcccagcttcactttccctttggcatggtgagtttggggtcttgagagtctattttctttcacacccatcagcactgttaagtaagcaggaagacaacctgaggttgtctctttactttgagttcctacataataaattgcagcctaatttagtacataaacccaaacctaatttaggagtanattttttgtagcagatagccagatttcagccaatcacaggcttccagctaacaagactatgcccaaataaggcaaatgcctcatcacatgatgctcaaataaggcagccacctaagcgaggccaatcaggtaacttttctactttgacttaattgttcagcctgtacaaatttgctgcttatgactgcctgagcaaagctgtctaaacctctttctggtttggagggctgccttaaataatgaatt

SEQ ID NO: 301568 - DNA, 446 bp, Homo Sapiens
  misc_feature (60)..(83): n is a, c, g, or t
  misc_feature (103)..(367): n is a, c, g, or t
gggattctatatactttgtcattggatttaaacaatgaacacaagtgaatataggagccnnnnnnnnnnnnnnnnnnnnnnnngagacaagagtttcactctnnnnnnnnnnnnnnnnnnnnnnnnnnnnnnnnnnnnnnnnnnnnnnnnnnnnnnnnnnnnnnnnnnnnnnnnnnnnnnnnnnnnnnnnnnnnnnnnnnnnnnnnnnnnnnnnnnnnnnnnnnnnnnnnnnnnnnnnnnnnnnnnnnnnnnnnnnnnnnnnnnnnnnnnnnnnnnnnnnnnnnnnnnnnnnnnnnnnnnnnnnnnnnnnnnnnnnnnnnnnnnnnnnnnnnnnnnnnnnnnnnnnnnnnnnnnnnnnnnnnnnnnnaccattttactctttttaggtacagtaatctaatatccaaagtcttggactcagctaaagagggtatttacccaaaaaa

SEQ ID NO: 301569 - DNA, 808 bp, Homo Sapiens
  misc_feature (536)..(546): n is a, c, g, or t
  misc_feature (550)..(655): n is a, c, g, or t
gggtgacactttacatcaacgttgcttcaatattttggaattgaccaggctgctttctcctacctgcaagagaatgtgcctgacatttcccagtgcttactttgggctataggaagtccagcggggatagctcgagcctcttgctccctgagtcatttattccctttacctgaacagagccttacctgcaattcatagtgagagcacctgggtctgtatcctgactccactctaagtgaggtgggactgaatcactgtacctctctgggccttttcatttgaaacaagtgggttagactagattagctccaaagtcctctcttgccctaacattttatttttattttcctgtggttaccactagggtctgacacgtaaaatgtgagggatcacttagaggtttggatgttatatttttgcattgttacagcttatactccccagttgaggacctgtgtcattcttagtggccccacgacccctctgtttgtattcctgctccacttatctatacttttttgggtaatcatcccacnnnnnnnnnnncttnnnnnnnnnnnnnnnnnnnnnnnnnnnnnnnnnnnnnnnnnnnnnnnnnnnnnnnnnnnnnnnnnnnnnnnnnnnnnnnnnnnnnnnnnnnnnnnnnnnnnnnnnncaagtagctggggattactggggcaagcccacaacggccaagctaatttcttgtaatttttaagaaagagaaaagggtttttgaccttgttgggccgggcctggatcttggaattccttgaaccttgaaacatggaccttcagcccttcccgc

SEQ ID NO: 301570 - DNA, 130 bp, Homo Sapiens; identical to SEQ ID NO: 231594

SEQ ID NO: 301571 - DNA, 101 bp, Homo Sapiens; identical to SEQ ID NO: 231595

SEQ ID NO: 301572 - DNA, 812 bp, Homo Sapiens; identical to SEQ ID NO: 32902

SEQ ID NO: 301573 - DNA, 578 bp, Homo Sapiens; identical to SEQ ID NO: 231599
  misc_feature (502)..(510): n is a, c, g, or t

SEQ ID NO: 301574 - DNA, 734 bp, Homo Sapiens
  misc_feature (604)..(604): n is a, c, g, or t
  misc_feature (613)..(613): n is a, c, g, or t
  misc_feature (639)..(639): n is a, c, g, or t
cttttttaatgtgaaaagaaagaaagaaattatgattacccactctgtggttaggataggacaataggcttagttcctgtatggtgacagtggtagggagattacattagtttcctgtgtaacaattaaccacaaccttagaggcttaaaacaacacatatttattatctcacattttcagtgggccaaaattctgggtgtggctctgctcagagtctctcaaggctataattaagacgtcagccagcgctgtagcctcatctgaggcttgactggagaaggaaccatttttgttggcagaatttagttcctttacatttgtaggactgagggcttcagtttcttgctgtcagccagaggttgccctcagttcctagaagctgtcttcagttccttaccatgtgagcctcccaacataggcagcccacaacagtagctcgattcttcaaagccagcaagggaggtactccagcaagaggagtgctacaaacttgtttaacacaattacatacacataattatgtacagtccgttgcctgtactgtattctattgattggaagcaagtcaaaggtccctctcatacccaagaggagaggatcccnctcaaggtngttcctggttggtctcaaatgccagncgatacagtttaggggggaaaaacaggttccccataaagaccacccctccattttcctgtcaaacaatttggcaaattttcaaaggggatttccc

SEQ ID NO: 301575 - DNA, 596 bp, Homo Sapiens
  misc_feature (269)..(269): n is a, c, g, or t
ggattgccttattggaaattctggaaacctgatactgcaacctgcaatgtaggatgtttgtatggcatttaaaggtaatggtgatgtttattattctatactttgcattctgtgagagtaattttcactctgtcttaagtgtgagtaagcctcttctaaaaatcttgttcttgccaagaaatttacaaatcacatacgaagacgtctgttgctaacagttaactttatgaggtaactatatccttctatttctctggactcatttttanaaaatatgccgaatactgcatactgtttaaagtagtatataagtttatgagagaagtggagagctttcttccttgaaaagtcggtatttggtgagataccatttgcctcacagagaagtgttccccactcccatccccctttgccagattaataaatatttttgagaaaaagtgaccctaaaacaagctgaaaatctttaggtgcattctgtcctgccaaacctcccttaagcaagggtgggatccttaacaattcccctttactggccctgggggaaagtgggtaaccttaaactttttgggttgggtcggcgcccttttggcctt

SEQ ID NO: 301576 - DNA, 442 bp, Homo Sapiens; identical to SEQ ID NO: 231604
  misc_feature (47)..(101): n is a, c, g, or t

SEQ ID NO: 301577 - DNA, 152 bp, Homo Sapiens
gggtgacactctcattcctggaccacctgccaggtttatctgttatacctgtggcattcttattatgtcagacaagttattatagttcattcaactctaacaaatgaacaaaagaacaataaataggaggccattaaaggtcttttgtggct

SEQ ID NO: 301578 - DNA, 308 bp, Homo Sapiens
ggcgctcacggcgcgctcagggaatgtgaaatgtgggtgtgtaaaaatgtcccctgactccgcccttcctgcccctaaaacacacgcacatgcacgcatacttatttttagagaaaaaaagctctaatgtccctcaaagaaggtgaggagaagaccttgagtcttggtttagcgaaaactgccccgtgcaaggttgtgcttttagattttcgtcctcatctgggtgtcaggaaaggggagggagtgttctaaatcggggagataactttgtggcccattaaggggagaaagaggtcccaagggaaggt

SEQ ID NO: 301579 - DNA, 837 bp, Homo Sapiens
  misc_feature (512)..(512): n is a, c, g, or t
  misc_feature (648)..(648): n is a, c, g, or t
  misc_feature (668)..(668): n is a, c, g, or t
  misc_feature (758)..(758): n is a, c, g, or t
gggactcaaatttcatcagcatcctctaatctaattgttcaccaagagcagacagtccctgaaggaatctgataactacatatcagttctggaggctggagagtccaaggtcgaggggcctgcatctggcgagggccttattgctgaatcatcccacggcaggaggtggaagagcaagagagagcgagggcatgcgcatgtgaacaagagaaagagactgaatttgcagcctgaagcccttctatgattggcattaatccattcacaaaggcagagccctcatgacctaaacacctctcactaggtcccacctttcaacagagttgcattggggattaaattcccaacacacgctttttaggtgacattttcaaaccatcgcaccttcctagtgcccataggccaggcactgtttctggggacttctgggaattaacacagtaatcctcacaaccagcccatgaagtaggtgttattgttaccacctccatgtcagaggttgagaaacggangtgcagagaggttagttagcatggtgtctggcactggcatctatctcttactactacacctaattgctcaaaattttgaaggcttccagggcagcgacatcacaaatgccagcataatagcaagtagattcttccnagacatgaacatataggganaatacaagtttttactcaattttctcagccattttttcaaaactgtggttccctggaatttggttttggtggttaaataattaaaagtanggggttcttattggcccaagaaagccttgggggaaaaccacctagttaaaattaaaaattaaaaccaggttctcctccg

SEQ ID NO: 301580 - DNA, 686 bp, Homo Sapiens
  misc_feature (116)..(404): n is a, c, g, or t
  misc_feature (486)..(494): n is a, c, g, or t
  misc_feature (587)..(595): n is a, c, g, or t
ggcatactaatcacatcatggaagatagatagggtatccatcccctcaagcatttattctttgtgctaacaaacaatccaattatacccttttagttatttaaaaattctattgannnnnnnnnnnnnnnnnnnnnnnnnnnnnnnnnnnnnnnnnnnnnnnnnnnnnnnnnnnnnnnnnnnnnnnnnnnnnnnnnnnnnnnnnnnnnnnnnnnnnnnnnnnnnnnnnnnnnnnnnnnnnnnnnnnnnnnnnnnnnnnnnnnnnnnnnnnnnnnnnnnnnnnnnnnnnnnnnnnnnnnnnnnnnnnnnnnnnnnnnnnnnnnnnnnnnnnnnnnnnnnnnnnnnnnnnnnnnnnnnnnnnnnnnnnnnnnnnnnnnnnnnnnnnnnnnnnnnnnnnnnnnnnnngcaaacaaaaaattgttaaatcattattgactagagccacccattgtgctatcagatactagcccttattcatttactctannnnnnnnngtactgagattttaatttctgtacttagtaatagctttcaaaattgtcatgttatcccaggaaattgttatttttatccaaggcttattccannnnnnnnnccagttgtttggggcccacaatattgtttcttttagaaataaagttagaaatatccagaataatgaaacacttaagagagaataaggagta

SEQ ID NO: 301581 - DNA, 698 bp, Homo Sapiens
  misc_feature (204)..(204): n is a, c, g, or t
  misc_feature (377)..(377): n is a, c, g, or t
  misc_feature (406)..(406): n is a, c, g, or t
  misc_feature (410)..(410): n is a, c, g, or t
  misc_feature (464)..(464): n is a, c, g, or t
  misc_feature (474)..(474): n is a, c, g, or t
  misc_feature (576)..(623): n is a, c, g, or t
aactagtaaaaatgggtagcttcctgcaaatatttctctctctctcccatccccgggaacattattttcagtatcttgcatctggggggcctccagcctctgaattagctcaggaccctgagtgaactttttaaatccttaggatttttctttttctcccacttcccttggtgccttccagctggacacaaactcattcctaanatatgtggatggaagctatggtaaccatggagacagggcaggtggcaaggagaggcagagacagtgtgagagaccaatagacagataggaagagagaagatataaggaatgtttcagacagagatcgtcaagcaagatggaaaaaatagacgtctaagcaagactgagattanagagatgcaatgtgagagagtgtattacnaggntcgctctttctccctgcccctgtctatctccctgccacaataatacggggtggnagcacctggnatgtcccttgccttatctaaaagtgctcccatatccaccttcctcatatttatctaagaagtctacttaagggaactgaaggtccagtttctcctggcgaannnnnnnnnnnnnnnnnnnnnnnnnnnnnnnnnnnnnnnnnnnnnnnncttaaattccaggctgggaccctggattccccttccccatttaacttacggggaacaaaacgccccccataaaac

SEQ ID NO: 301582 - DNA, 814 bp, Homo Sapiens
  misc_feature (454)..(559): n is a, c, g, or t
  misc_feature (605)..(605): n is a, c, g, or t
  misc_feature (661)..(732): n is a, c, g, or t
ggggcagggctgtgtagtgtgagatgcaccaaattggacgagaagccaaggcaggcttgtgtatggggtaccctggggccctccgcctagtgaagccctatcttctcagcccagcgtcctcgtctcacaagccctcagagccccagcctgctttcctttctgggcctgtgctgcaaccccctcaacatggcccactgggtaaaaattcatgcttcaagactgatccccaagcctgttttgtattatataagtaaagaattttttaaacacttatccccagataatgtgtatttatttataaagtatagccctgtctgcttgactaatatattaaaaaagtgacctttttgactcttggtccaagaaactattgtttgcacttttgtgtagttgtgtatagcatcctgcaaattctgtcagaagtctgatttcagtaacactaaaacttctctcnnnnnnnnnnnnnnnnnnnnnnnnnnnnnnnnnnnnnnnnnnnnnnnnnnnnnnnnnnnnnnnnnnnnnnnnnnnnnnnnnnnnnnnnnnnnnnnnnnnnnnnnnncaaatttgcttaagtgcccccccaccgaactactacataaattaantgaaggatggttttacttaatttgatttttgggaatcattacaccatggtataatnnnnnnnnnnnnnnnnnnnnnnnnnnnnnnnnnnnnnnnnnnnnnnnnnnnnnnnnnnnnnnnnnnnnnnnnggacaacaataaaaactggacaatctaaccttataatggaggaaggaaaaaagaatctgggtacttccaagaaaatttggga

SEQ ID NO: 301583 - DNA, 801 bp, Homo Sapiens
  misc_feature (615)..(615): n is a, c, g, or t
  misc_feature (641)..(641): n is a, c, g, or t
  misc_feature (680)..(680): n is a, c, g, or t
gggaatttcttagagattttcaactcttttacattaggtagctcattttttatatccagaaatgggaatgatttcaaggataattaccattttgaaatgggatcatttgcttgctagaaaatgttaacattgactccagccaagtacagaacattaaaaacaatctggaaaaaggggtgtggatcaaaatagattatgagccaaatctgtctcgaggaaggaagagagtagagtttagcatttataatacatggcctatcccaagagaggggagggactattttatacataaaaaaatattaaaagccttactttgaccaataaattaaaaagaggccatcagaaacaagagccgtggagggacataatgacacataggctggggctagtactggagttcattttgtgacactctggtggcaaatcctgtcagttcttcctgtctctgcctctgccatggccttcattgaggagggttaggggatttggtggcagcaggagcacactgctgatcccagaagcatagggttaagaactaactgccttgaatacgatcttagtgattttcagtggagccaaggagtttgaaatgcataggcaatgtaacttcatcanacttcaaagagccaagcttgataatnctttcagggttgtgagaaaaggatgagaaaggattgtanaagacatgggttagagagagcgagctggtttagcagaattggttgtgagattaaagattaatattggggggcatggttggaaccatccccagaaagaaactagagatccattctctggttt

SEQ ID NO: 301584 - DNA, 809 bp, Homo Sapiens
gggacttgaatgggaaggccaactggtgagggaagtggggtattatctactcaaatgttctaagctaatacaaaagaattacctggcaagcatccccctctgcccttcttgagattctgaatgaacttacaatcagatcaatggtgagacccagttatgtaactttcctttgaagttctaaaggataattgaaaataaagtagtctggcatgtttaacagtaaggagtgacactaaaatttgaatataacagtatgttgcaactatttataatagacctatttatgttttgagaactaagtaaaatgctatgaaaaattcacataaagcacgtaagcaccaaatgaaaatcatttcgtgctttcaaattaatgatactaggcttgtaggatgtcttaaaatcatgtttaacaagaagttaaaatatttgcattttgaaatttttatgcagtttggctaaggaggaacttggaaaataacattcatcagcttctacactgcactttttgtatgtggactttgtaaaagttaatgtccgtttaacagttgcttgtttatttgtgtaaaactagctagtaaatattgatgatgttccggccccctgacttgcacagcccttggagcactatttccacggaacaccatttccaattttgttcaaaacatttaacacacttttgatatcctattccaaaaataacttttggtaccacagggttcattgcctggccatttagaccaaaattatggaactggggatattttcccaactcctaaaaaagatgttgccccaccctaaaaccggtcaaa

SEQ ID NO: 301585 - DNA, 715 bp, Homo Sapiens; identical to SEQ ID NO: 229139
  misc_feature (500)..(500): n is a, c, g, or t

SEQ ID NO: 301586 - DNA, 375 bp, Homo Sapiens; identical to SEQ ID NO: 231614
  misc_feature (254)..(263): n is a, c, g, or t

SEQ ID NO: 301587 - DNA, 526 bp, Homo Sapiens
  misc_feature (302)..(392): n is a, c, g, or t
ggaattaagtacttaatgtgtgttgagctaaattgaataaaggattattagcattagcatattttgtgccttggttgtataagctggttgtttgttttgttacctttgcaaatatttatgattatcacccccccacatactaaattgtttttaaaagttttgcctttccttcagatactaccccaggcaatttgctgtagataatgtgattgcttccaatgacataattatcccaaactctctgccccggatatactttgccaaacgaaatttgaattctctgaataaattggtcatgtctnnnnnnnnnnnnnnnnnnnnnnnnnnnnnnnnnnnnnnnnnnnnnnnnnnnnnnnnnnnnnnnnnnnnnnnnnnnnnnnnnnnnnnnnnnncccttgggggcccccccggcccccaaaaactttttaaaaactttctttgggggccggggccccttggggaagggaactgggccataggggttcccaaagaaacccgggccaagaaaaggggtgggatccccccc

SEQ ID NO: 301588 - DNA, 825 bp, Homo Sapiens
  misc_feature (554)..(596): n is a, c, g, or t
gggggcccacggctcctcccactcccgcagaactctgcctttggcttttccagaccctgggccgggtatgagaaccagcttcttggtctgcagccacaaggatgaaggtttggggatgagagaccagcacgggctctgatgagagacaggtgcaggtcccagcttgtggcttgcaggtctcagtcgtacttgctctcccccaccatcctttccaaccgcctggcctgtggtctggtgaagaagaaacagccgaaccgagactttcaccagcccctctaattgctcaaaccgctttcacaatcctctctttctacatcattcctagtggttcttttctgatggaacctctgactggtaacatggcattaccagtcctttccctctcatgttttgctatttcctgatggaacctgcgagtctgagtgatttgtatttcaagaagcagttatgctggatctctttgttggttaataccccatgacctatctggccgttatgggatatttcagggataggagttgtgaaagagcccttggctggacgtttctagcctnnnnnnnnnnnnnnnnnnnnnnnnnnnnnnnnnnnnnnnnnnngccttcctacagcgtgagcaggtctgggcgggcctctccaaccccctttcagctccaagattcccaggcctgggaattcccgataacctctttggactaccaatggagccgtgggtcttacccctctttgggtcctcctggagaacaactggggcccccttggggggttcctttgggggctaagttggaaacttcatacaatttccccccaaaaggcctctccccccac

SEQ ID NO: 301589 - DNA, 1004 bp, Homo Sapiens; identical to SEQ ID NO: 231617
  misc_feature (523)..(532): n is a, c, g, or t

SEQ ID NO: 301590 - DNA, 1076 bp, Homo Sapiens; identical to SEQ ID NO: 231619
  misc_feature (548)..(595): n is a, c, g, or t
  misc_feature (774)..(807): n is a, c, g, or t
  misc_feature (897)..(953): n is a, c, g, or t
  misc_feature (974)..(974): n is a, c, g, or t

SEQ ID NO: 301591 - DNA, 197 bp, Homo Sapiens
ggggacttctgtcatcgctgcctccaactcttcccccatctttccggagctcccccacccccatccccttcgaatctcagcttggctgtttcctccttggagagatcactcccaggaccccctctgcaggggtgccacatcacctgttctgaattcttaagagcacccctgctctcagaactccttatttatttgac

SEQ ID NO: 301592 - DNA, 586 bp, Homo Sapiens; identical to SEQ ID NO: 32914

SEQ ID NO: 301593 - DNA, 498 bp, Homo Sapiens
  misc_feature (460)..(460): n is a, c, g, or t
attagccacagcacccggccaatataagctatattctttgcctagtacagtatctttgtatcactcaatttggcagctgatctagaaagaaggaaatgttaaagaaagctacccacttgtttattagtagaccaaggaaacaaaaagaaggtttatcatttaaaataattctccaaatagagctgaggcttggttcagaacattttggaattagattaagtgcaattgtcctgtggaggggaggaagtaagaggtgcagcaaatccgttttctccttttacattggagccctggggttagatgcagacgaatagtgttttcccacgccaggcaggcaccgactgcaagacagacactgggtaaaacccacaagaatgtaatggaaccagatcatttcctggttttccccagtcccgaaaactggttgccagctaccacactgtggggaatttttacaagntctccacagcctggtgtaaaccagggggcttaaccttc

SEQ ID NO: 301594 - DNA, 450 bp, Homo Sapiens; identical to SEQ ID NO: 231628
  misc_feature (67)..(115): n is a, c, g, or t
  misc_feature (134)..(142): n is a, c, g, or t
  misc_feature (345)..(354): n is a, c, g, or t

SEQ ID NO: 301595 - DNA, 167 bp, Homo Sapiens
cagcaaacaaaaataggcaacaaggcaggatgcttaggatgtaccactaagcaaaagaagaaaaattggattgtgctttgcttaccactggggtgccaacgatcctgggacaacaggaagcaacagactgtagcatgatgggtttattcatcatagagctcaacttg

SEQ ID NO: 301596 - DNA, 793 bp, Homo Sapiens
  misc_feature (564)..(564): n is a, c, g, or t
  misc_feature (663)..(663): n is a, c, g, or t
ggccagacaggaatggcttgcttgtggacccagaaagctcacaggactttttcctctgatgcctctatccgtgtatttcgcttggctgtctaaattgactcagctccaggtaaggtcagaatcttttcccataaactagacattaagtttccccagtgaggatgtgtgttcgggggctgagaatctccctttcccactttctcagtttgggcagtcacattatctcaggtgtctcctgggtcctgcaggagcggtcctctttcttcagagggtctgtgggtcctctcgggtttcctgatttattcctgcagtcgttctgtagccaaaattcaccgtgtgaacctccacacgctgctctgttcatcccaatcagagctgccatgtagtcctgcctcccatccaccatgacagccaatctccctgctgcacaaatttgtgaaaaacgtatattcccatgtcatggtgaagagattctgattcattaacataaggatgagacccagaaatagatgtttttaggaaacatcatagataacctgataaataacatattttcagaaattnttctatgggtttcaaaaagtgtaatagttgcactaatgggtggtaataactggatacattcagggtactactagtggaccatgtaaaatcataaaactnttggaaacaaatttgccattttctaaagtataatgtatgtctcttttgttgggacagttatattcatgatagcacatgtcgcgctactatatgagtcgaagaaacacttgcctctgatgaagaatatagc

SEQ ID NO: 301597 - DNA, 713 bp, Homo Sapiens
  misc_feature (43)..(56): n is a, c, g, or t
  misc_feature (420)..(420): n is a, c, g, or t
  misc_feature (430)..(430): n is a, c, g, or t
  misc_feature (453)..(453): n is a, c, g, or t
  misc_feature (466)..(467): n is a, c, g, or t
  misc_feature (581)..(581): n is a, c, g, or t
  misc_feature (603)..(603): n is a, c, g, or t
ggggaccttaatgatcacatcactgttttaataggttccttcnnnnnnnnnnnnnncctgaaaattagtagttacgtttagtggttagatctggttggttggtaaaactccgctgcaggtgggagtgggctcttgcaggagacccccagcctctggtggcaaccattgtgaccagatactggatccactcatttcttaggggttactctaaacggtggtactctaaatctgtcattcctttcttacttatagctgggacatgtctataaagcgcagcttctcgtttttttaccctgaggtgcagttcatgatgtttgaatctgtgtgagtttcttagcatcctgcagtgatggtcagagtattttaatgcactcattggtttaaatacttcatacacttctaagggaaatggaaacctgntacctgctangtctccgtgtgtgagtgcagcangagaatgtcctcnntgaggtgaggctgctgtcagtgccaccccacatctttgaaaagccccctccagtggcctcagccagtgcaagaaagccaccgttctctttttccaaacatgcaagggcactggntgtccttcccgccccaatgggnccctgctgggggtttttaaaaacctaatttcctggcacagggcctccctcgggggggcccttgggccccggggttgcatccctcctggcgggggaatgcctttttccccc

SEQ ID NO: 301598 - DNA, 205 bp, Homo Sapiens
gggaacccagtgtctcgaatacttgtaccatctcatcttttaactcctatccatcttattatgttcataccttgggtttagagctgagctcgttatgtgccatgaagactctgacatggacaccaaggatggtcaaaaagctaatgtcttgcttgatgatatcttgggattaaaataaaagctaatgtcaaccttttcctttttt

SEQ ID NO: 301599 - DNA, 364 bp, Homo Sapiens
ggaagcacagactgcagagcacttgttaacttagtcctcctgcatagtgcactcgtgaaaagtagtgcttgctaggtgtttgaagattttatgatccgtgtgcttgggctcgttgagttatttgtaaaataaacatttagtttgagttgatgcagtaagttttttggactagtagtatccaggtccctactctactgaaaatataatcttcactatctccccttaagtcagaggagatgtagcatttagaacaccttgagacatgacattgtaaaatagcttgttttatgttcctgaagctatcttgttctctgttaaagctactaattgtctcagtgtaagttttaaataaacatatttcttg

SEQ ID NO: 301600 - DNA, 590 bp, Homo Sapiens; identical to SEQ ID NO: 231638
  misc_feature (252)..(253): n is a, c, g, or t
  misc_feature (297)..(297): n is a, c, g, or t
  misc_feature (320)..(320): n is a, c, g, or t
  misc_feature (380)..(380): n is a, c, g, or t
  misc_feature (478)..(478): n is a, c, g, or t
  misc_feature (548)..(548): n is a, c, g, or t
  misc_feature (568)..(568): n is a, c, g, or t

SEQ ID NO: 301601 - DNA, 629 bp, Homo Sapiens; identical to SEQ ID NO: 231643
  misc_feature (262)..(262): n is a, c, g, or t
  misc_feature (350)..(400): n is a, c, g, or t
  misc_feature (416)..(516): n is a, c, g, or t

SEQ ID NO: 301602 - DNA, 1069 bp, Homo Sapiens
  misc_feature (353)..(446): n is a, c, g, or t
  misc_feature (459)..(504): n is a, c, g, or t
  misc_feature (517)..(539): n is a, c, g, or t
  misc_feature (577)..(640): n is a, c, g, or t
  misc_feature (852)..(852): n is a, c, g, or t
ggatagttcactcttacatccttcaggtgtcactccactgttacctgagcaggtcgtccttgaatatatacatcagcattccctttcccccctgctttatgtatgtccatagcactcaccacgatctgactttactaagtatttattcatttactgtttgttttcccataccgaaatataaactttctaaggacagaaatttttgtgctttattgttgacacctccatttgtacacacctgcctaccttatattatccactcactaaatgtccattgaccccttactattattactccctctaattccccatttctcctcgtcctcccgcacgatcccaccttccaccttccnnnnnnnnnnnnnnnnnnnnnnnnnnnnnnnnnnnnnnnnnnnnnnnnnnnnnnnnnnnnnnnnnnnnnnnnnnnnnnnnnnnnnnnnnnnnnnaaacgaagcaatnnnnnnnnnnnnnnnnnnnnnnnnnnnnnnnnnnnnnnnnnnnnnnttactctttcttnnnnnnnnnnnnnnnnnnnnnnnttcgattttactcgcctatttctccgccacccatcttnnnnnnnnnnnnnnnnnnnnnnnnnnnnnnnnnnnnnnnnnnnnnnnnnnnnnnnnnnnnnnnntcttcttcactcgccccgcctctgccgtcttctctccgtttcatctttctcccccgctatcctctccgctctttctgttctcgcccgcttccactcactgttgatctcgcctattttttccctgcttcccctcgctccccgcgctccttcgcctattcctatatttgtcctattctccctgcctccccgcctctatccctctcccgcattgnttccctccttctccccgccttattctcttcgattagttttgtcgccggcccgggcccgccctcctgctacgtgtcctcctgcgctttctccgcgttctcgcgctggcctcacgccgttcccatcttttctcctgctattctctcccccgccgcctgtcgctgcctcgcgcttcgtatcgcgcgacatctcctgtgtattattgccggctgcgcctcg

SEQ ID NO: 301603 - DNA, 842 bp, Homo Sapiens
  misc_feature (735)..(756): n is a, c, g, or t
  misc_feature (779)..(779): n is a, c, g, or t
ggcaaaattcaaagggaaaagaggtaggtatgcagttactagtaaagaaatacaattggattctggcctaatgcagtcagtcctttgtttctgcacactgaagtcttcattaaggccatggaactgctccctggagctggtgacctttttgtatctaaagaagactttacacgacttaaattctttttcctttgttggtgaacaatgttcttttcttctgaaagtggatgatgatcagttcattcagaggctacagggtttttttaaaaaagaagggaaaccaagatttaaagtgacttcaggtgattccctgattcttgacacagggagatgagctgccctgaatcaaggtcttcaggatttgaaatgcacacatagctctgaggacatcaggcagcagcagttgtggctagctactgtgcagtgtatattttaagagagcgaagtttcctggtttgggacaagattagggtaaagtattgtgctttgtcctgctggtttgtaactccccatgcgatttttgtcttggtcccaggtcgttttaagtgtctgaaggttggtggatagagtttcttcttgagataatgagaggcttgtcttccagaagtttatatgaaagctctaggaaagactgtaattttccaagtcttgcagtccttgctgaagggaattatccatttactggcactaaatgcctttggattcagaagcgggacaattttttacggtcccgtnnnnnnnnnnnnnnnnnnnnnngcccgctcgctgcctggctcgcnttttgaagaacaaaccttggcctcctggtcctcccccaaggctttggcgatgcgcaagagggc

SEQ ID NO: 301604 - DNA, 789 bp, Homo Sapiens
  misc_feature (79)..(102): n is a, c, g, or t
  misc_feature (611)..(658): n is a, c, g, or t
gggacagtaatcctgtgagaaagacaggacagaaaccactgtgcccggccattttcatgttatagtatgttgtgtggcnnnnnnnnnnnnnnnnnnnnnnnntgagcagttggtaattttatctaatgagatgactacagacttgatattttgcttttgttgctcctttgtgtcactaagagttgataatttataaaactgtgaagtgacctctacgtgtgcaaacaagacacacaggtctaaattctatttttccagctttattgaggtatagtaaacaaatgaaaatggtttatatttaggatgtacaacgtgatgatttgatatatgtatacattctgaaacagtaaccacaatcaagttaactaacacatctgtcacctcacatgtttaccttttctgtgtgtgtggtgagaacaactgatagactcttagtaaattgcaagcacacaatacagtatcattagctacagtcaccatgctatcctttgcaccctcagaatatattcatcttattgaatgtttgtactctgactaatacctccccagttacctaccccttcgcccccaggaaccatcatctactctctgccttctaggagttcaacttnnnnnnnnnnnnnnnnnnnnnnnnnnnnnnnnnnnnnnnnnnnnnnnnggggctgtgatggatgattgaggacaatggtcgtatatataccctaatgggaaaacccattccccaaatcaacaaatggaagggaaattcccggcccaccttggcaaccaatgggcgggttgtaaacccgg

SEQ ID NO: 301605 - DNA, 695 bp, Homo Sapiens; identical to SEQ ID NO: 231647
  misc_feature (49)..(220): n is a, c, g, or t
  misc_feature (326)..(338): n is a, c, g, or t
  misc_feature (529)..(568): n is a, c, g, or t

SEQ ID NO: 301606 - DNA, 404 bp, Homo Sapiens; identical to SEQ ID NO: 32920

SEQ ID NO: 301607 - DNA, 658 bp, Homo Sapiens
  misc_feature (13)..(13): n is a, c, g, or t
  misc_feature (465)..(489): n is a, c, g, or t
  misc_feature (491)..(491): n is a, c, g, or t
ggggtacacaggngaaagctcaccagtgggcagatgtttcctgtgggttaccctatcttgtcctatttcattctcctcccctactttatgcctggatgtattcacatgctagggctgtcagaacaaagtgccacagattgggaggctgaagtagtagaaacgacaattccagaggctggaagtccaagatcaaggtgctggcagagcggcctctctccttggcttgcagatggccattttctccctgtatcatcacatgatcttttctccatatgtatatgactctgtcctaatttcctcttcttataaagaccctcagccatactggattagggcccaccctaaccacctcattttaacttaatcacctctttaaaggccgtatctgcaaatatagtcacattctgaggtaccagatgttagggcttcagcataggaattggggtgcagtcagacaccatagannnnnnnnnnnnnnnnnnnnnnnnnanaacatgtcgggcgcccttcggcccttcaaaaaacttttctagaacctttcgttttggggggccggggccccagtaagggaaaggggaaactggggccataaagcttgttttccccaaagagaaaacccccggggcaacgggaaaaaaaggggccttgtggaaatttt

SEQ ID NO: 301608 - DNA, 957 bp, Homo Sapiens; identical to SEQ ID NO: 231649
  misc_feature (89)..(166): n is a, c, g, or t
  misc_feature (177)..(185): n is a, c, g, or t
  misc_feature (196)..(211): n is a, c, g, or t
  misc_feature (330)..(350): n is a, c, g, or t
  misc_feature (663)..(671): n is a, c, g, or t
  misc_feature (768)..(776): n is a, c, g, or t

SEQ ID NO: 301609 - DNA, 884 bp, Homo Sapiens; identical to SEQ ID NO: 231653
  misc_feature (225)..(286): n is a, c, g, or t
  misc_feature (321)..(405): n is a, c, g, or t
  misc_feature (486)..(498): n is a, c, g, or t
  misc_feature (563)..(572): n is a, c, g, or t

SEQ ID NO: 301610 - DNA, 245 bp, Homo Sapiens
gggaaggctggagagtgaagctgccatgcaaatggtctgagccacatgcagagacgaggagcggaggggaggagcgggcagctggcctggctagctagcggggtggaggggcgaggccggggccagcttaccctgaaaatccccctcacacgtatccaaaactgcgccactcatgtcacacagctgcaagaacacaatgataggattcggagaaaggaatcaacacgacaaaacatgaacgtcac

SEQ ID NO: 301611 - DNA, 1125 bp, Homo Sapiens
  misc_feature (570)..(580): n is a, c, g, or t
  misc_feature (584)..(592): n is a, c, g, or t
  misc_feature (651)..(659): n is a, c, g, or t
  misc_feature (716)..(716): n is a, c, g, or t
cggggcactatgtcaccactacttgtatgtagaagtgagtcaccggctggcaaatgggcatagctgctgggcagtggatgcagctccatgcatgttattctcatttgatacaggatctcattggcttctcacagcaatcctgtgcactataggtattgctcccgggaacagatgaggaaacaggagagcgcgagattacagcaatttcgtaaatgggaggatctgtgaaggtttcagacatacaccctctctcatatgtcaaggatatgaagtctaatgaatcccctaaagcagcaggggttggcaagctgcggtcctggggcccaaatcagcctactgccctgtttctgtaaaaaacccccatgaacgcgggctcccaccccttgtcggccgctctcggcccctcgaaaaaacgctctcctaacaccactccgtttttggcgccgcccggaccccccctatggtaaccgcggaaacattgggtccctacctttggtttttcctcacggaacaccccttggcccgcccgaaaattaccggggcctgtgggattttccccaaacccaaatnnnnnnnnnnnccannnnnnnnnggtgcgtgcacaacaccccaaaaagcgcggctttccgtggcaagcaccagaatctttgnnnnnnnnnaaagcggggaaaattttgccccccgcaaagggagcccccactctataaacgtggggngagattccccgctcgccataccaggtggcacagtcttccggaaataggcggagagctctcccgtcattttctcctccgactttttatacggcgcgcccaacccagcactcgtgttgcacaaccttcctcttgtccgagagataaccgcgtgggtgcggccaactggcccctgttgtaagacgctatgctcctcggagcgagacaaattgtgaaagaccgtttcttcccccacaaaccctgtgcgttttgtagcacgctataccccccggaacacggccgccttatttgtgcctcgcccaataaacgcgcctgtgccctccccgttgcggcatatataacacacccctctcgcacttcttgttggggcaaaacccttgagctctcgccacaccaagactttttatatatt

SEQ ID NO: 301612 - DNA, 703 bp, Homo Sapiens; identical to SEQ ID NO: 231660
  misc_feature (60)..(70): n is a, c, g, or t
  misc_feature (73)..(81): n is a, c, g, or t

SEQ ID NO: 301613 - DNA, 700 bp, Homo Sapiens; identical to SEQ ID NO: 231661
  misc_feature (112)..(120): n is a, c, g, or t
  misc_feature (126)..(126): n is a, c, g, or t
  misc_feature (485)..(493): n is a, c, g, or t

SEQ ID NO: 301614 - DNA, 308 bp, Homo Sapiens; identical to SEQ ID NO: 231663

SEQ ID NO: 301615 - DNA, 186 bp, Homo Sapiens; identical to SEQ ID NO: 231665
  misc_feature (64)..(73): n is a, c, g, or t
  misc_feature (80)..(137): n is a, c, g, or t

SEQ ID NO: 301616 - DNA, 751 bp, Homo Sapiens; identical to SEQ ID NO: 231667
  misc_feature (159)..(169): n is a, c, g, or t
  misc_feature (438)..(446): n is a, c, g, or t

SEQ ID NO: 301617 - DNA, 435 bp, Homo Sapiens; identical to SEQ ID NO: 33063

SEQ ID NO: 301618 - DNA, 191 bp, Homo Sapiens
gggtttgtggtgctgtaacaaaatacctgagactgggtaatttataaattataggaatttatttctcacagttctggatgctgaaaagtttatgatcaaggcactagcaggtttggtgtctgagggcccagtttctaatttgaagatggtgctttaaacactgtcctcacatggtagaaggggcagatggg

SEQ ID NO: 301619 - DNA, 773 bp, Homo Sapiens; identical to SEQ ID NO: 231669
  misc_feature (473)..(473): n is a, c, g, or t
  misc_feature (508)..(508): n is a, c, g, or t
  misc_feature (656)..(668): n is a, c, g, or t

SEQ ID NO: 301620 - DNA, 159 bp, Homo Sapiens
gggtccattgtattgatcatagagcactatagagagaatgcagtacaaaaacagcatggctggagttacaatttttagctctgcctagcatgagcccaaattaaatagattattatgtgctagaaaatgtcttttctaaagattgcaatacgtataagc

SEQ ID NO: 301621 - DNA, 1111 bp, Homo Sapiens; identical to SEQ ID NO: 231673
  misc_feature (291)..(300): n is a, c, g, or t
  misc_feature (353)..(415): n is a, c, g, or t
  misc_feature (470)..(499): n is a, c, g, or t
  misc_feature (623)..(672): n is a, c, g, or t
  misc_feature (674)..(674): n is a, c, g, or t
  misc_feature (768)..(768): n is a, c, g, or t
  misc_feature (825)..(825): n is a, c, g, or t
  misc_feature (858)..(858): n is a, c, g, or t
  misc_feature (882)..(882): n is a, c, g, or t
  misc_feature (1021)..(1021): n is a, c, g, or t
  misc_feature (1062)..(1062): n is a, c, g, or t

SEQ ID NO: 301622 - DNA, 343 bp, Homo Sapiens
gggggctgtgtccccctcagactggggctgcctgaggatgaggctgcatctcccctcagactggagctccctgagggcagggctgtctccccccttcagactggggcctcccccaaaggacagggactgtgtctcccctgggactaggttctttgtgtcttctgcatcagacagattcccatgaggacagggctgtctccccctccatctggagctccctgaaggcaatggcctctcccctcaaatgggacatttgcaccccaccccaccctctggctccccatggcgcccaggcattcctcccaggacaccatttgtcacgctttgatgaatgaaacttacc

SEQ ID NO: 301623 - DNA, 343 bp, Homo Sapiens; identical to SEQ ID NO: 231675

SEQ ID NO: 301624 - DNA, 116 bp, Homo Sapiens; identical to SEQ ID NO: 231677

SEQ ID NO: 301625 - DNA, 1117 bp, Homo Sapiens; identical to SEQ ID NO: 231681
  misc_feature (241)..(311): n is a, c, g, or t
  misc_feature (367)..(401): n is a, c, g, or t
  misc_feature (409)..(423): n is a, c, g, or t
  misc_feature (476)..(484): n is a, c, g, or t
  misc_feature (556)..(564): n is a, c, g, or t
  misc_feature (682)..(682): n is a, c, g, or t
  misc_feature (771)..(771): n is a, c, g, or t
  misc_feature (921)..(921): n is a, c, g, or t
  misc_feature (954)..(954): n is a, c, g, or t
  misc_feature (1030)..(1039): n is a, c, g, or t

SEQ ID NO: 301626 - DNA, 813 bp, Homo Sapiens; identical to SEQ ID NO: 231682
  misc_feature (139)..(147): n is a, c, g, or t
  misc_feature (197)..(218): n is a, c, g, or t
  misc_feature (461)..(509): n is a, c, g, or t

SEQ ID NO: 301627 - DNA, 432 bp, Homo Sapiens; identical to SEQ ID NO: 231683
  misc_feature (61)..(72): n is a, c, g, or t
  misc_feature (334)..(345): n is a, c, g, or t

SEQ ID NO: 301628 - DNA, 129 bp, Homo Sapiens
ggcacatatttttccttgaagttcttagcataatgtatccattacttagtatatatctaggcaacaacacttagaagtttatcagtgtttaaactaaaaaaataaagattcctgtgtactggtttaaac

SEQ ID NO: 301629 - DNA, 813 bp, Homo Sapiens; identical to SEQ ID NO: 231689
  misc_feature (192)..(203): n is a, c, g, or t
  misc_feature (216)..(304): n is a, c, g, or t
  misc_feature (321)..(330): n is a, c, g, or t
  misc_feature (342)..(342): n is a, c, g, or t
  misc_feature (348)..(411): n is a, c, g, or t
  misc_feature (480)..(480): n is a, c, g, or t
  misc_feature (632)..(654): n is a, c, g, or t
  misc_feature (753)..(770): n is a, c, g, or t

SEQ ID NO: 301630 - DNA, 173 bp, Homo Sapiens
gggtactcaaacttaagtccaagcaaacaggaggagcaccggcgcgggttcagtctttccaaacccagttcagccgtaatctctggagtcagacttcgccgcccaattcatggatttgtgcttttgactccgctctgatgtttttgaatgaataaagttgcctaggatactta

SEQ ID NO: 301631 - DNA, 645 bp, Homo Sapiens; identical to SEQ ID NO: 33069

SEQ ID NO: 301632 - DNA, 795 bp, Homo Sapiens; identical to SEQ ID NO: 231694
  misc_feature (221)..(284): n is a, c, g, or t
  misc_feature (369)..(369): n is a, c, g, or t
  misc_feature (546)..(546): n is a, c, g, or t
  misc_feature (626)..(626): n is a, c, g, or t
  misc_feature (640)..(641): n is a, c, g, or t
  misc_feature (763)..(763): n is a, c, g, or t

SEQ ID NO: 301633 - DNA, 135 bp, Homo Sapiens
ggcaattcattttttcctgtgttttcttgtccgggcaatattgacactctcctctttctcttatatttttcttgtagtcaaccatcagctgttactctctttttgttgtccataatggaaataaaatatgttttc

SEQ ID NO: 301634 - DNA, 208 bp, Homo Sapiens
  misc_feature (138)..(155): n is a, c, g, or t
gggcttatcacttccctgttccataggccacttaggattgagttgatatgaggagtaacatttgttctgtaagattatggttattattcgttgaatttttagcaatatttacattctcttgttctcttttatgactcnnnnnnnnnnnnnnnnnnttcaacattgtcttttcttatgattaaaaactactaagaacttgagtatagca

SEQ ID NO: 301635 - DNA, 651 bp, Homo Sapiens; identical to SEQ ID NO: 231695
  misc_feature (110)..(110): n is a, c, g, or t
  misc_feature (113)..(115): n is a, c, g, or t
  misc_feature (117)..(118): n is a, c, g, or t
  misc_feature (120)..(120): n is a, c, g, or t
  misc_feature (123)..(124): n is a, c, g, or t
  misc_feature (126)..(127): n is a, c, g, or t
  misc_feature (132)..(159): n is a, c, g, or t
  misc_feature (173)..(176): n is a, c, g, or t
  misc_feature (178)..(178): n is a, c, g, or t
  misc_feature (190)..(216): n is a, c, g, or t
  misc_feature (343)..(362): n is a, c, g, or t

SEQ ID NO: 301636 - DNA, 241 bp, Homo Sapiens
ggcagttaaggtgagaaagaatgctctgtgtgaagacagtgtacacaatgggttccggtttccttgcaccttgtgcagtatcctttatttctgtgctgttctctcctgagcatgaaaaatgatcattatccaatttgtatttccttggtacatattttaaaaacaacacagtcattgactttacaattcagtaatgaagtttggcaaagcctattttgtaaacaagttaattttataatgt

SEQ ID NO: 301637 - DNA, 170 bp, Homo Sapiens
ggcttcttgagataagttctgtgataccatttgatagaataggacactgaggctaagattttgaggttactagcctaaaatcatataattaagaaacgatgggaacaggatttgagcccagatttggttgacctatgtcctataattctagccaacaaagtatctctgcc

SEQ ID NO: 301638 - DNA, 755 bp, Homo Sapiens; identical to SEQ ID NO: 231702
  misc_feature (166)..(222): n is a, c, g, or t
  misc_feature (224)..(224): n is a, c, g, or t
  misc_feature (235)..(244): n is a, c, g, or t
  misc_feature (278)..(325): n is a, c, g, or t
  misc_feature (460)..(497): n is a, c, g, or t
  misc_feature (583)..(642): n is a, c, g, or t

SEQ ID NO: 301639 - DNA, 317 bp, Homo Sapiens
gggcctgcagtaatatctccccagcatcctcccacacgcccaacttgactgctctgtgcaagccacattaaacctgtctgccatcaatccccgggtctgcttttcagcagcagcttaacgagatttaaatatgaatagtcgactaaagcaagttccaattttgtttgaaggaaagaaggccaaactaaaaaagaaagaagacatagtctttatggcactgaagaactgaataaattaaatttatcctaagttattaaaaaaatggtagatattatgacaggaaaaatactacaaacaaatgaatcaaaaatccgtgt

SEQ ID NO: 301640 - DNA, 408 bp, Homo Sapiens; identical to SEQ ID NO: 231704
  misc_feature (52)..(120): n is a, c, g, or t
  misc_feature (145)..(156): n is a, c, g, or t
  misc_feature (209)..(221): n is a, c, g, or t
  misc_feature (253)..(294): n is a, c, g, or t

SEQ ID NO: 301641 - DNA, 163 bp, Homo Sapiens
gggtgctaaggaaaatatgccagataccaaagaacaatattgtatggtcaaattctacgaggtatccaaactaggaaattcgtgaacacagaaaataaattagaaggatcctggtgctggatgatggagagaatgtgtagccattatttaatgagcacatact

SEQ ID NO: 301642 - DNA, 189 bp, Homo Sapiens
gggcttgagcgtggagggtagatgcttcaggtgaccttttacgagcgtggcgtgtcctggatggcggccgcacacttaggaagaacgggctttgggagaggaccgctggcccgagagtggaaccttgcacgcactgggcgttgaagcagtgctttcttttttaaatacgaaatactgatgtcacaagct

SEQ ID NO: 301643 - DNA, 487 bp, Homo Sapiens
gggaaaagcattttaagatagtgacaatctgagtgtttgtataaaatgtaattctatgcgtttcttatgtgatctaaaaattcaatgcaaatatcttttatttggtagttttgtctacatattttatgctctagcatgtgcaatatatctttgtaaagcacgatgatacaaatctggtgccagtgttatattttgcataacatatttgtaacagcataaaatattgtttgatgatttcagtgggattttgtctataatgttttcttatgtaaattggagttgaatgactctggtaaatgtcatgactgtaaaaatggggaaaatgacttttagttcagtgaatgactttgaaacaatctgaatcttctcaagcacagtttaatacttttgcaactactgaatgctctaataacgtaatgaagtacttaactgtaatatactatggaaatgcattcagatggttatttttacaaataaaaacggtaca

SEQ ID NO: 301644 - DNA, 744 bp, Homo Sapiens; identical to SEQ ID NO: 231710
  misc_feature (134)..(224): n is a, c, g, or t
  misc_feature (309)..(376): n is a, c, g, or t
  misc_feature (552)..(552): n is a, c, g, or t
  misc_feature (712)..(712): n is a, c, g, or t

SEQ ID NO: 301645 - DNA, 141 bp, Homo Sapiens
ggtttccaatcttgatctaaactattagtaaatgtaaatacgaatgctgaggtgattcacatagtaattagatcttgggttttagaaagaacaaccatgatttacttaacaaaaagtctattcctgcagatcatatgaagc

SEQ ID NO: 301646 - DNA, 815 bp, Homo Sapiens
  misc_feature (198)..(212): n is a, c, g, or t
  misc_feature (428)..(436): n is a, c, g, or t
ggatacagtgtaagttacccgcagaaatatagtacttctttctagaagtttacaaactgtccatgtttatcccttgccatatagcaatcactactattagtgctgtacttacgtatttgtttatctgatttctaattgttaatgcttcccccaaatattgtgtgacatgtgtaattaataaaaatcacttaacgatgnnnnnnnnnnnnnnncggaaaaacagtacaatcgaccataataagcaaaaactcaccgcaaaaaaaatgttgtttgtgggccccgccctcgccccctcaaaaatctttctaaaccctttctttggggcgcgcgggcccccctagggaaaaagggaaacctggggccatagtcggttctccaaaggaaaacctcgggaccaaagaataggggctgtggttttctcccccacnnnnnnnnncccccccgggggtcgaacccaaagcgtttttgaaaacaatccccagaagggaaatttcgagaggtgctttccgggggatccctttccaacagggattcccccagggggaagcctctttatatcaaattttcacgcgccccgccctcggagcaaattttattcgggaggatacgtggtgtggaaatctcacttttaaagcccatcctcccgcccccaacctttgaaaaaccccatccaacaaaaacggggtactggaatgaaaacccttgaaacacgccccaaaggggaggcttttcccacacccctttggtccgcccctgttggcaaataaataaataattcgcccccactgggtgggcaaaacaagcggggggcggcg

SEQ ID NO: 301647 - DNA, 312 bp, Homo Sapiens
tgagccaccgtacctggcccttggttgaatctttggggttttctattcatacatataaaatcatatcattggcaaacagagataattttacttcctcctttccaatttggatgccttagatttcttttccttgcctaactgctctgtctagaactcccagcactatgctgaatagagtggcaagagcgagcatttgccttgttcctaaccttagagaaaaatccttcagccttttaccattgaggatgatgtttgctgttagtttttcataaatgatctatatcagggtgaataaatttctatttcctaaag

SEQ ID NO: 301648 - DNA, 427 bp, Homo Sapiens
  misc_feature (392)..(392): n is a, c, g, or t
  misc_feature (400)..(400): n is a, c, g, or t
  misc_feature (402)..(402): n is a, c, g, or t
ggagttatgaaatggcatgacatgttcataaaaaagtgaaaagttcagtgtatcttgtatatgtggggagtgtgcctgaggctagatatatggttagaagtataggtgctgctgtgtacaatgaggcatccctagcttttaggtggagggtaacataatcagctttgcatattaggaagaggactttgtgtgttgtattgagtatagactgcagtgaggagaaactattggcagagaaagcattagaagactattgaggtgtttcaggtaataaatgagagtctgaacttacactatggttataaaaaggatgagcaatccttagggtacctctctgatgtagcttttgtgggatttgttaactggtataatgtgggacatgaggaagacanctgtcctncncaccaaaataaatattcctgtcggc

SEQ ID NO: 301649 - DNA, 158 bp, Homo Sapiens
ggatcaccgggatggctgagtggttaaggcgttggacttaagatccaatggacaggtgtccgcgtgggttcgagccccactcccggtaagcgttggtgtgtgctttgacgtttgcggtttctgccgcagagttggaagccaggtatgcttacatcaga

SEQ ID NO: 301650 - DNA, 878 bp, Homo Sapiens; identical to SEQ ID NO: 231718
  misc_feature (543)..(543): n is a, c, g, or t
  misc_feature (590)..(590): n is a, c, g, or t
  misc_feature (633)..(633): n is a, c, g, or t

SEQ ID NO: 301651 - DNA, 1193 bp, Homo Sapiens; identical to SEQ ID NO: 231719
  misc_feature (571)..(571): n is a, c, g, or t
  misc_feature (725)..(725): n is a, c, g, or t
  misc_feature (771)..(771): n is a, c, g, or t
  misc_feature (881)..(881): n is a, c, g, or t
  misc_feature (1095)..(1095): n is a, c, g, or t
  misc_feature (1116)..(1116): n is a, c, g, or t

SEQ ID NO: 301652 - DNA, 144 bp, Homo Sapiens; identical to SEQ ID NO: 231720

SEQ ID NO: 301653 - DNA, 710 bp, Homo Sapiens; identical to SEQ ID NO: 231721
  misc_feature (76)..(86): n is a, c, g, or t
  misc_feature (206)..(227): n is a, c, g, or t
  misc_feature (255)..(274): n is a, c, g, or t
  misc_feature (327)..(367): n is a, c, g, or t

SEQ ID NO: 301654 - DNA, 502 bp, Homo Sapiens; identical to SEQ ID NO: 231724
  misc_feature (60)..(68): n is a, c, g, or t

SEQ ID NO: 301655 - DNA, 161 bp, Homo Sapiens
gggagaaggagcagtggttattgagcccctactgttcagaatacaggaagaccccagcatacattgtgtcgtttcctcttcacacagtagagggggtggtaggatcattttacatgcctgaaaactgaaacttagcagtttaggtcatttacaaagagctg

SEQ ID NO: 301656 - DNA, 282 bp, Homo Sapiens
ggagtgacatcaggttggtccacatcctagcagttctcttggtgttcctgcgtgatcaaaggatgactgccacaccccagcctgctgacctcagccctggcgtgggcataggagggtctgcgtggctgagcatccagtgtccttcgtactgccactgacagcctcaggcctgatttccagcactgtctgtccaggagcaatgggagcaagagtcactccacaagactctggaggcctgatagacaaaatacatgaagaccagtttctacacagagaatcact

SEQ ID NO: 301657 - DNA, 241 bp, Homo Sapiens
ggattctaatagcatctacttcacatcttgatgtttgtgatgactgatatccatggtgaattgtagacaaaatcttttcactttcctaaagaaacctgatggtttttttcagagataaaatcccatctcaaggcacagcgaaattaaaatgaggtgaagtttaggtactctcagaatgtttattcgcatacagattcttaaaaaacatgatttattgtaggcagatgtcacctctttaagc

SEQ ID NO: 301658 - DNA, 155 bp, Homo Sapiens
agaggattctgagtttgtatagtgagggcttgcagaaattttgaaacttattttgtaagtttacaatgaatttgtacatgatgtgctcatgtcttgggttgagtatcctagacatgattttttcatttgctgcatattaaacatttgttggttgt

SEQ ID NO: 301659 - DNA, 131 bp, Homo Sapiens
ggtctctgggcatgtttaactaacctaggtgggaaaaccatggtgctgtttaattgtaaatagattgatataagattggaccagtacttgatgtgtataattttagtatgtagggtttatgtgcttttttt

SEQ ID NO: 301660 - DNA, 348 bp, Homo Sapiens; identical to SEQ ID NO: 231727
  misc_feature (152)..(197): n is a, c, g, or t
  misc_feature (259)..(308): n is a, c, g, or t

SEQ ID NO: 301661 - DNA, 465 bp, Homo Sapiens
  misc_feature (250)..(327): n is a, c, g, or t
gggagtggttgaagacatctgcatgaaattgcacctaggtgcattacttgatataactctcccctaaaactgttgtaattgcattttttcccttttcttggcacccctttagaaatgtactgaagtctcatttttcacccatttcagccatgggacatttttcataatattaatgtaaagatgtttgtgttactgtttataaattacaattgtaaataaattactagtttgcccaaaactttgttcttannnnnnnnnnnnnnnnnnnnnnnnnnnnnnnnnnnnnnnnnnnnnnnnnnnnnnnnnnnnnnnnnnnnnnnnnnnnnncccttgcttggccgcctcgcccctcgaaaaagttttctaaaccattcgctttggcgcgccggccccagaaggtaagggaacatgggcatacctgtttccaaggaaatcctggccatgactagggcttggattctcccc

SEQ ID NO: 301662 - DNA, 792 bp, Homo Sapiens; identical to SEQ ID NO: 231730
  misc_feature (388)..(423): n is a, c, g, or t
  misc_feature (537)..(579): n is a, c, g, or t

SEQ ID NO: 301663 - DNA, 155 bp, Homo Sapiens
ggggaatgtaaatacaccgtgactttgaaagtttgtacccctgtccttccctttacgccactagtgtgtaggcagatgtctgagtccctaggtggtttctaggattgatagcaattagctttgatgaacccatcccaggaaaaataaaaacagac

SEQ ID NO: 301664 - DNA, 116 bp, Homo Sapiens; identical to SEQ ID NO: 231731

SEQ ID NO: 301665 - DNA, 651 bp, Homo Sapiens; identical to SEQ ID NO: 231732
  misc_feature (432)..(432): n is a, c, g, or t

SEQ ID NO: 301666 - DNA, 557 bp, Homo Sapiens; identical to SEQ ID NO: 231733
  misc_feature (57)..(65): n is a, c, g, or t
  misc_feature (201)..(227): n is a, c, g, or t
  misc_feature (262)..(320): n is a, c, g, or t
  misc_feature (342)..(424): n is a, c, g, or t
  misc_feature (460)..(460): n is a, c, g, or t
  misc_feature (472)..(486): n is a, c, g, or t

SEQ ID NO: 301667 - DNA, 719 bp, Homo Sapiens; identical to SEQ ID NO: 231734
  misc_feature (292)..(511): n is a, c, g, or t

SEQ ID NO: 301668 - DNA, 647 bp, Homo Sapiens; identical to SEQ ID NO: 33074

SEQ ID NO: 301669 - DNA, 219 bp, Homo Sapiens
ggacacagaacctcgcgggccctacactccccctgccgaggttgaagtccccagcggttggaagatcggccaattgtagtgtatttatcagaaaagtgactcatccttgatcctcatttcccggtttgtggaactctgtgaggaaagccctgcagttaggctcaataaaagacagaaattccaaaaaattacgaccgctattatacacccccgtgtccc

SEQ ID NO: 301670 - DNA, 1020 bp, Homo Sapiens; identical to SEQ ID NO: 231737
  misc_feature (105)..(385): n is a, c, g, or t
  misc_feature (778)..(778): n is a, c, g, or t
  misc_feature (819)..(819): n is a, c, g, or t

SEQ ID NO: 301671 - DNA, 582 bp, Homo Sapiens; identical to SEQ ID NO: 231739
  misc_feature (180)..(180): n is a, c, g, or t
  misc_feature (500)..(500): n is a, c, g, or t

SEQ ID NO: 301672 - DNA, 104 bp, Homo Sapiens
ggtgatcagtgccttgaatatcattgatgactcattaaatttataaagagtgcagaggcctcctcagagaatggatgatagaaatgcattgatgagagaagttt

SEQ ID NO: 301673 - DNA, 655 bp, Homo Sapiens; identical to SEQ ID NO: 231745
  misc_feature (44)..(44): n is a, c, g, or t
  misc_feature (61)..(61): n is a, c, g, or t
  misc_feature (85)..(85): n is a, c, g, or t
  misc_feature (130)..(130): n is a, c, g, or t
  misc_feature (138)..(138): n is a, c, g, or t
  misc_feature (143)..(143): n is a, c, g, or t
  misc_feature (150)..(150): n is a, c, g, or t
  misc_feature (214)..(214): n is a, c, g, or t
  misc_feature (246)..(246): n is a, c, g, or t
  misc_feature (272)..(272): n is a, c, g, or t
  misc_feature (295)..(295): n is a, c, g, or t
  misc_feature (303)..(303): n is a, c, g, or t
  misc_feature (318)..(318): n is a, c, g, or t
  misc_feature (375)..(375): n is a, c, g, or t
  misc_feature (467)..(467): n is a, c, g, or t
  misc_feature (559)..(559): n is a, c, g, or t
  misc_feature (603)..(603): n is a, c, g, or t
  misc_feature (629)..(629): n is a, c, g, or t

SEQ ID NO: 301674 - DNA, 958 bp, Homo Sapiens
  misc_feature (61)..(93): n is a, c, g, or t
  misc_feature (108)..(253): n is a, c, g, or t
  misc_feature (337)..(337): n is a, c, g, or t
  misc_feature (451)..(453): n is a, c, g, or t
  misc_feature (467)..(468): n is a, c, g, or t
  misc_feature (487)..(487): n is a, c, g, or t
  misc_feature (490)..(490): n is a, c, g, or t
  misc_feature (554)..(556): n is a, c, g, or t
  misc_feature (562)..(562): n is a, c, g, or t
  misc_feature (592)..(592): n is a, c, g, or t
  misc_feature (598)..(598): n is a, c, g, or t
  misc_feature (617)..(617): n is a, c, g, or t
  misc_feature (624)..(624): n is a, c, g, or t
  misc_feature (632)..(632): n is a, c, g, or t
  misc_feature (634)..(634): n is a, c, g, or t
  misc_feature (687)..(687): n is a, c, g, or t
  misc_feature (700)..(700): n is a, c, g, or t
  misc_feature (704)..(704): n is a, c, g, or t
  misc_feature (711)..(734): n is a, c, g, or t
  misc_feature (751)..(751): n is a, c, g, or t
  misc_feature (762)..(762): n is a, c, g, or t
  misc_feature (773)..(773): n is a, c, g, or t
  misc_feature (787)..(787): n is a, c, g, or t
  misc_feature (870)..(871): n is a, c, g, or t
  misc_feature (905)..(913): n is a, c, g, or t
ggggtaacattagacgaaaataacctttcccgtgggaaaggtttctcgaaggcatggatgnnnnnnnnnnnnnnnnnnnnnnnnnnnnnnnnngcttattttaaaatnnnnnnnnnnnnnnnnnnnnnnnnnnnnnnnnnnnnnnnnnnnnnnnnnnnnnnnnnnnnnnnnnnnnnnnnnnnnnnnnnnnnnnnnnnnnnnnnnnnnnnnnnnnnnnnnnnnnnnnnnnnnnnnnnnnnnnnnnnnnnnnnnncaaggtttgtgggcgcgcgctcccgcccccaaaaaaaatttctttaaacacacttttttttgcgggggccgcgggcccccccanagaggaaacaggaaaaacggggggcgataaatgccgggcgttttccaacaaaaaagaaaacccccgggcgccaaaagaaaaaagagggggtgttgcgggctcccccctcccccnnncacatagaaaaaannccgccgcccccgcgcgggngcngggacaaacaccccccggagtgtttgtttttctctatcaaaacaccaaccacccgcccgcgcgnnnttgggnagcgcccgctccctcgaccttagagcgganctctcntttccgcgcgcgcgggggngagaacnccacccancncgcgagacgggcggagcgaggcgccttcaacacggggcggcgcgacccctccnagaaaactcgccnaccnaaatctnnnnnnnnnnnnnnnnnnnnnnnngggtgcggccaatattnttttatcctanaaacgaagaanggcgcgtgggcaanattaatcctttctattgtaacaagactcttccgcccccgccccgccacaagtagtgagagaccccccctccaccaaacacacnngggggtagtgttgtgtaaaaacttttggtccgannnnnnnnngggcgggggacacaaaaacaaaccccccgtgtggtgggccgtcgc

SEQ ID NO: 301675 - DNA, 291 bp, Homo Sapiens
ggaactgagcaaaatagatgcaactttcttttaatggggtgctgcctctttaggactgactgtactatccactgacactggtttggcagttggtactgctgaacatttttatacatgctaccatgaagctatatatgttagtattgaagaagctaacgggtatactatcatttttgatgtgtgggctgattataatttcctgtatttcctgtacattgggatgaaactactttagcaaagtccacagatcagaaaccagacggtagtgttttgaagttgaaaccagtaaaa

SEQ ID NO: 301676 - DNA, 804 bp, Homo Sapiens; identical to SEQ ID NO: 231749
  misc_feature (144)..(287): n is a, c, g, or t
  misc_feature (308)..(356): n is a, c, g, or t
  misc_feature (370)..(378): n is a, c, g, or t
  misc_feature (389)..(397): n is a, c, g, or t
  misc_feature (528)..(536): n is a, c, g, or t

SEQ ID NO: 301677 - DNA, 635 bp, Homo Sapiens; identical to SEQ ID NO: 231750
  misc_feature (163)..(163): n is a, c, g, or t
  misc_feature (391)..(391): n is a, c, g, or t
  misc_feature (488)..(488): n is a, c, g, or t
  misc_feature (497)..(497): n is a, c, g, or t

SEQ ID NO: 301678 - DNA, 336 bp, Homo Sapiens
gggctacagataaggctgccctcgtgaggccaaagccctggtgaacgctaatagctctatgatgatgcaaacttcacaggcgatcacctaacataacaaaaacctccccagaaccacaacctgttttttcaccacaacccttccgctgcttgaataagaatgtcttttcctttcctacaatttgtgccatggaaatgtgaataatttttcttaacggggaaagtcatagaggttacttgaatgccacctagatgctggaggggcaggtggatatgttgaagagatatagaaagctttgtaaattgcttttgaataaatatgtgactagttccctaa

SEQ ID NO: 301679 - DNA, 702 bp, Homo Sapiens; identical to SEQ ID NO: 231751
  misc_feature (60)..(75): n is a, c, g, or t
  misc_feature (263)..(276): n is a, c, g, or t
  misc_feature (550)..(550): n is a, c, g, or t

SEQ ID NO: 301680 - DNA, 320 bp, Homo Sapiens; identical to SEQ ID NO: 231755
  misc_feature (51)..(52): n is a, c, g, or t
  misc_feature (55)..(55): n is a, c, g, or t
  misc_feature (57)..(57): n is a, c, g, or t
  misc_feature (59)..(81): n is a, c, g, or t
  misc_feature (115)..(123): n is a, c, g, or t
  misc_feature (175)..(225): n is a, c, g, or t

SEQ ID NO: 301681 - DNA, 260 bp, Homo Sapiens
  misc_feature (74)..(91): n is a, c, g, or t
gggaagcaagaggtgtatctggcctttgcttagaatatgaattctcccgttctggtctttgcttctccgggaannnnnnnnnnnnnnnnnnatctagagtaagaaggattacatctaattaggcattgtcactgccaaggaattaattgcaatctctgaatattttggattattgagctgtgcggaaaatctttaattactgtctactgactctgccatttttgttaacaataaatcagtcctcctcgctgtggctgtat

SEQ ID NO: 301682 - DNA, 957 bp, Homo Sapiens; identical to SEQ ID NO: 231761
  misc_feature (275)..(283): n is a, c, g, or t
  misc_feature (455)..(469): n is a, c, g, or t

SEQ ID NO: 301683 - DNA, 912 bp, Homo Sapiens; identical to SEQ ID NO: 231763
  misc_feature (482)..(482): n is a, c, g, or t
  misc_feature (589)..(589): n is a, c, g, or t
  misc_feature (641)..(641): n is a, c, g, or t
  misc_feature (674)..(674): n is a, c, g, or t
  misc_feature (735)..(735): n is a, c, g, or t
  misc_feature (779)..(779): n is a, c, g, or t
  misc_feature (791)..(791): n is a, c, g, or t
  misc_feature (810)..(810): n is a, c, g, or t
  misc_feature (828)..(828): n is a, c, g, or t
  misc_feature (834)..(834): n is a, c, g, or t

SEQ ID NO: 301684 - DNA, 865 bp, Homo Sapiens; identical to SEQ ID NO: 231764
  misc_feature (148)..(281): n is a, c, g, or t
  misc_feature (297)..(297): n is a, c, g, or t
  misc_feature (300)..(301): n is a, c, g, or t
  misc_feature (311)..(325): n is a, c, g, or t
  misc_feature (350)..(362): n is a, c, g, or t
  misc_feature (403)..(427): n is a, c, g, or t
  misc_feature (449)..(460): n is a, c, g, or t
  misc_feature (506)..(536): n is a, c, g, or t
  misc_feature (593)..(604): n is a, c, g, or t
  misc_feature (626)..(634): n is a, c, g, or t
  misc_feature (677)..(689): n is a, c, g, or t

SEQ ID NO: 301685 - DNA, 520 bp, Homo Sapiens
  misc_feature (136)..(274): n is a, c, g, or t
  misc_feature (289)..(299): n is a, c, g, or t
  misc_feature (323)..(333): n is a, c, g, or t
  misc_feature (354)..(476): n is a, c, g, or t
gggtttgctctggaatgttcatcttttagacaggttttggctcatttccaatcatggtgcaatatagtgtaacattcatttgttttcattcaacagttttatttttgtcataataaataattacttttccaatagnnnnnnnnnnnnnnnnnnnnnnnnnnnnnnnnnnnnnnnnnnnnnnnnnnnnnnnnnnnnnnnnnnnnnnnnnnnnnnnnnnnnnnnnnnnnnnnnnnnnnnnnnnnnnnnnnnnnnnnnnnnnnnnnnnnnnnnnnnngaaattgggggcccnnnnnnnnnnnaaaaaatttttaaaaacttttttnnnnnnnnnnncccccaaaggaaaaagaaacnnnnnnnnnnnnnnnnnnnnnnnnnnnnnnnnnnnnnnnnnnnnnnnnnnnnnnnnnnnnnnnnnnnnnnnnnnnnnnnnnnnnnnnnnnnnnnnnnnnnnnnnnnnnnnnnnnnnnnnnnnntctttggggggtttcaaacaggagggggccccagcggggccccc

SEQ ID NO: 301686 - DNA, 103 bp, Homo Sapiens
ggtgatagtagtaggagacacccagactaagctgagctgcgaacccacagaaaatttcgacaagtctgagcatatttagaggacaagttagatttggctacca

SEQ ID NO: 301687 - DNA, 183 bp, Homo Sapiens
  misc_feature (105)..(132): n is a, c, g, or t
gggttttcttctttgcaagactacaaccttaagtggaaactgaatttaaaatataccagtcaattcatcagtatacctttagtaattactacttatggacaatannnnnnnnnnnnnnnnnnnnnnnnnnnncagtttaactttgttacacagttgaaaaataatggattgtggacctcatac

SEQ ID NO: 301688 - DNA, 261 bp, Homo Sapiens
gggttgaacttgctattgtcaggttttggtgtattatgttggttttggagaataaatttaaaagtttcctttatgttatctatacattgcctgaaaagagtttaaatagcattgaaaatgatctcttctttgaagatttaaccaatttcacctgtaaatctgtctgtgctttgtaattttggtgatactgttgactcaaattccaaaagcagtaaatgcagtgttttatatttttctattaaaaatgtaaaatcaaattat

SEQ ID NO: 301689 - DNA, 168 bp, Homo Sapiens
agccgttgccctagtggtttcggacacaccgccaacgctcagtgcggtgctaccgacccgaggtcaagtcccgggggaggagaagagaggcttcccgcctagagcatttgcaagtcaggattctctaatccctctgggagaagggtattcggcttgtccgctgtttag

SEQ ID NO: 301690 - DNA, 892 bp, Homo Sapiens; identical to SEQ ID NO: 231772
  misc_feature (366)..(366): n is a, c, g, or t
  misc_feature (585)..(585): n is a, c, g, or t
  misc_feature (604)..(604): n is a, c, g, or t

SEQ ID NO: 301691 - DNA, 239 bp, Homo Sapiens
ggctcctgagtgagcagcctgtgaccatgctgtacccagtgaagctgaagcttgccgtctctcagggcccaggcaagcgcctttgggaaactctcaagcgtgagcaccgggaaacacacaggagtgttcactgcggtgggatttgtgataagaaaaacgtccgacagaagagcagataaacaagctttggcatacttgctccgctccagtgaaaatgaataaacagcatccaaccaacc

SEQ ID NO: 301692 - DNA, 218 bp, Homo Sapiens
gggagtgcagtccgatgctgcagaagacagactgttccctctctcttcccacagtgtttctcgtctaccttttgcccttattcaatagtgggaagaaatttcttcttgacctcagcaatcctttctgacaattaccatatgcctcaagagacctgggaagcttcgccctgtctggcacagggagacaattcctatccagaataaaactgaaagcttcc

SEQ ID NO: 301693 - DNA, 161 bp, Homo Sapiens
gggctctcaaggtgcaatgctagatagtacttactctcaggcaggtctgtttaccagcttccctgctacgagaagttgtaatgtagcacaagagacgatggggaagggcctaactgaatctctggaatgaatctctggaataaatgtggaaggggtcaggc

SEQ ID NO: 301694 - DNA, 971 bp, Homo Sapiens; identical to SEQ ID NO: 231774
  misc_feature (400)..(416): n is a, c, g, or t
  misc_feature (441)..(441): n is a, c, g, or t
  misc_feature (486)..(527): n is a, c, g, or t
  misc_feature (542)..(551): n is a, c, g, or t
  misc_feature (600)..(600): n is a, c, g, or t
  misc_feature (759)..(759): n is a, c, g, or t
  misc_feature (860)..(860): n is a, c, g, or t
  misc_feature (862)..(862): n is a, c, g, or t

SEQ ID NO: 301695 - DNA, 305 bp, Homo Sapiens
ggtaataaaatatatcttctacatagagtttgtatgccagtagaagcagctagacaataaacaagtatagcatgtcggttggcaacatggcagtggtgaaaaataaagcagagagtgctgggggagttactattttagataggatgtctgggggagacctctatgaggaaatgtcatatgagcagagaaccaaatgaaaagagagtaagacatgtgcttatctgggaaaagagcattccagtcgaggaaacagcgactgccaaggctctaaggataccttcttagtgtattcaaaaaatggcaaa

SEQ ID NO: 301696 - DNA, 1065 bp, Homo Sapiens
  misc_feature (275)..(288): n is a, c, g, or t
  misc_feature (801)..(801): n is a, c, g, or t
  misc_feature (806)..(809): n is a, c, g, or t
  misc_feature (814)..(815): n is a, c, g, or t
  misc_feature (826)..(827): n is a, c, g, or t
  misc_feature (1023)..(1023): n is a, c, g, or t
ggtcaatggaacttccacttgctctaaaaccagggaaatcttagataactgggtgtgatctacctatagatctacctagtctataggtaataatttccagaaggaggatcttgctgtcagttggggatcctctggtttggtctgtaccaaattgtgaatactcttgctgtgttgtacccagttgctttatattaatactgcaacttgaaacggggagggtggggggacaatccgtcgttatttccccccccgccgggtcgcatggcggtttggannnnnnnnnnnnnngatctcgggcgggcggagatgtgggggcggaggccgacgcgccccaccccgttgtgtgttttgtgggccgggcgggtgaccggccacgaaacacgcggactgcgcgtgcgccggctagtaaagtcgccgcggggcgttccccccaccacaggcgttttaattcccgccgctgcacgccactgccccacattccccccgcccgctttgggggggcgcgccgtagtgctaaggaggtccggggtcttctctctccgtcaagtccgccccgcgcccacgagtgaggcgtcccgggccgctcaatatcaccagccgccgctctcccccgcttccgcgatagtagagaaattacgcgcgatccacaagcggcgcccgtagaggtcgagacgtcgacccccgggggggtgttggggtcacgtgtggtgcggcgggggccgcggtcaaagcgccggcgacacaccatgcggcgttgtgaggcacctcctgcctttgatgtgtcgtcagaacgcaaccaancaccnnnntgccnngggaggggctnntagagtctgagtgagagctcttctgttttcctcccccgctcacgtctcgtcctgtgcggcgcgcgcagcatatacgcgccgcatgcggcccttcctcgaccaccccggcagcacgacggcgtggtagcaggacgcgcggaggtggggatccacacggtcaccctagggggcgttcgtgtggtgggcgtggagcaanaccgcggccatcccgcgccgagaccccccacttatacggggg

SEQ ID NO: 301697 - DNA, 186 bp, Homo Sapiens
ggaagggactcctatccagttctccgtgattcaggaacactacccgatatagagtttgtaaacgggtaggtgaagtcatccctacaatatgggaggagatgggaacattctcaggagctgcatattcaaaacagtatcatttggcttatccttttgaaatatggcctctctaaaagaaagctgtat

SEQ ID NO: 301698 - DNA, 383 bp, Homo Sapiens
ggagcacttatttttacagattgctactccaaggaagaaaactggccacttttcatgtaaatattttgttcaaagatttgtatatctctctaggagttttccctcagttcccaggatggggtccaggagtagattaacagctaaaaatctcccaaggatatcttgttttgatttatttactccagggaactatcagctccttcacaggagccaaaggggagctatgaatagagggtcacatgagccagattctttactgttcataaaacccagagagtagttgtgaaagatcctaatacaattgtgaaaagctctgtaaacatgaaatctaaaacaaatgtagattttcacaatatgcttattaataaatgaagtctatggaa

SEQ ID NO: 301699 - DNA, 319 bp, Homo Sapiens; identical to SEQ ID NO: 231780
  misc_feature (48)..(108): n is a, c, g, or t
  misc_feature (180)..(188): n is a, c, g, or t
  misc_feature (211)..(274): n is a, c, g, or t

SEQ ID NO: 301700 - DNA, 178 bp, Homo Sapiens
gggagtggggtgatgtctgggtcccaggaaagaaagaaacataggatttgtgctttttgttgatatgaagttaaggggtacaagtgagagtgattttgttacatgggatacattgcatagtagtaaagtctgggcttgtagtgcaaccatcacccgaatactgtttattgtacccatt

SEQ ID NO: 301701 - DNA, 157 bp, Homo Sapiens
ggccattaatccctctatccattatcatcttttctaaaccaaaggattttactagatcatctctgaaatttcttccaggtctacagtggtatgattatataaattactagacccatagtaaatcatctaagagctcatatgaccttatttagaaagg

SEQ ID NO: 301702 - DNA, 1144 bp, Homo Sapiens; identical to SEQ ID NO: 231791
  misc_feature (45)..(212): n is a, c, g, or t
  misc_feature (639)..(639): n is a, c, g, or t
  misc_feature (943)..(943): n is a, c, g, or t

SEQ ID NO: 301703 - DNA, 970 bp, Homo Sapiens; identical to SEQ ID NO: 231792
  misc_feature (170)..(202): n is a, c, g, or t
  misc_feature (227)..(276): n is a, c, g, or t
  misc_feature (357)..(440): n is a, c, g, or t
  misc_feature (671)..(671): n is a, c, g, or t
  misc_feature (795)..(795): n is a, c, g, or t

SEQ ID NO: 301704 - DNA, 526 bp, Homo Sapiens
  misc_feature (268)..(394): n is a, c, g, or t
  misc_feature (403)..(416): n is a, c, g, or t
  misc_feature (441)..(451): n is a, c, g, or t
ggacttgttataatgctattatttaccctgattcaaatgtaactacttacaatttttaaacatttttatttctgtattctttaaaatattaaggcaatggtttttcttgaaattatattttgccctatgtattctatttttattcacactggatttattatgataattatatcaaagtgattatttttaccctgacttttaaaagtcaactgtttcagaagtcaagttgattgtggatctaaaatataaattcaatgtgttcatagcnnnnnnnnnnnnnnnnnnnnnnnnnnnnnnnnnnnnnnnnnnnnnnnnnnnnnnnnnnnnnnnnnnnnnnnnnnnnnnnnnnnnnnnnnnnnnnnnnnnnnnnnnnnnnnnnnnnnnnnnnnnnnnncttggccgnnnnnnnnnnnnnnaaaaaattttttaaacctttttttnnnnnnnnnnnccccaaaaggaagggaacaggggaaaaactgtttcccaagaaaacccgggcaggaaaaagggttggattcccccc

SEQ ID NO: 301705 - DNA, 663 bp, Homo Sapiens; identical to SEQ ID NO: 231794
  misc_feature (102)..(189): n is a, c, g, or t
  misc_feature (198)..(210): n is a, c, g, or t
  misc_feature (324)..(332): n is a, c, g, or t

SEQ ID NO: 301706 - DNA, 395 bp, Homo Sapiens
  misc_feature (364)..(364): n is a, c, g, or t
ggggacctattccctgccacatgatcctgggggcagatggatagctgatctctgagtgactacagtgaacaaagaaagaaagactcctgccaaaccttgtggacagtcagataattggaatgttccctttgtaaggttgggaagaaggacgatcaagtgggtagctagctccttgcacctctgtggaagagctaaacttcctctgtgaagagcttcaccacagggcccttggcactggggacagagtggcacatttataccaagcacccacttccactttctctctaacacttgaaaactttcacagtactttttcactaaggctactgtcaagtctgaaaaataaagacattgtttcacttanaaaaaggagtttattgttttgttacccttgt

SEQ ID NO: 301707 - DNA, 260 bp, Homo Sapiens
  misc_feature (129)..(180): n is a, c, g, or t
gggggaaataggtccccttcttcccattttgcctccccatcctccttcaccctccacacattggccccagtcaggccatagccatggctggctcctgcaccccactgccagccctccagcccgtccgtnnnnnnnnnnnnnnnnnnnnnnnnnnnnnnnnnnnnnnnnnnnnnnnnnnnngaagacagccaagggggaggggttgagatagactcaaaagtacccgcacgatcagataagtcagtgttgtaagaggcctg

SEQ ID NO: 301708 - DNA, 147 bp, Homo Sapiens
ggagacttactcagaatcaacagttgctgcttaatttgtctattttgtaagcttaggctactattttattaaaactggacatagatacttggctgaaaacaaatagttttgcagattgcaatataataaaggaaacagtaaaaacta

SEQ ID NO: 301709 - DNA, 326 bp, Homo Sapiens; identical to SEQ ID NO: 231795
  misc_feature (52)..(67): n is a, c, g, or t
  misc_feature (111)..(122): n is a, c, g, or t

SEQ ID NO: 301710 - DNA, 893 bp, Homo Sapiens; identical to SEQ ID NO: 231798
  misc_feature (423)..(423): n is a, c, g, or t
  misc_feature (562)..(625): n is a, c, g, or t

SEQ ID NO: 301711 - DNA, 826 bp, Homo Sapiens; identical to SEQ ID NO: 33078

SEQ ID NO: 301712 - DNA, 828 bp, Homo Sapiens; identical to SEQ ID NO: 231800
  misc_feature (79)..(93): n is a, c, g, or t
  misc_feature (251)..(278): n is a, c, g, or t
  misc_feature (431)..(446): n is a, c, g, or t
  misc_feature (475)..(475): n is a, c, g, or t
  misc_feature (593)..(593): n is a, c, g, or t
  misc_feature (743)..(743): n is a, c, g, or t

SEQ ID NO: 301713 - DNA, 121 bp, Homo Sapiens
ggtgacattttctgggtcatttaaggaaaattgctcttttggaagaaactgactcaaaacacactttagttcaatttggaaaaaaacttaatttttgtcttcttaccttcgtatttagtca

SEQ ID NO: 301714 - DNA, 196 bp, Homo Sapiens
ggaccccaactcatcaaacacacctggagaggctccatttctaaggggctggagtccttgaaggaagaacaattggcaaacagctaatcaacatacaggtgttgcccaattttaatagaaagtagagaagtgcaaatgaaagcagcagagcagaaagttactttttgcacttatcagattgtcagcagttagaact

SEQ ID NO: 301715 - DNA, 1124 bp, Homo Sapiens; identical to SEQ ID NO: 231802
  misc_feature (191)..(208): n is a, c, g, or t
  misc_feature (486)..(486): n is a, c, g, or t
  misc_feature (499)..(499): n is a, c, g, or t
  misc_feature (545)..(545): n is a, c, g, or t
  misc_feature (551)..(551): n is a, c, g, or t
  misc_feature (684)..(684): n is a, c, g, or t
  misc_feature (926)..(926): n is a, c, g, or t

SEQ ID NO: 301716 - DNA, 475 bp, Homo Sapiens; identical to SEQ ID NO: 231806
  misc_feature (152)..(152): n is a, c, g, or t
  misc_feature (229)..(229): n is a, c, g, or t

SEQ ID NO: 301717 - DNA, 1335 bp, Homo Sapiens; identical to SEQ ID NO: 231807
  misc_feature (152)..(191): n is a, c, g, or t
  misc_feature (693)..(693): n is a, c, g, or t
  misc_feature (734)..(734): n is a, c, g, or t
  misc_feature (762)..(788): n is a, c, g, or t
  misc_feature (852)..(852): n is a, c, g, or t
  misc_feature (890)..(890): n is a, c, g, or t
  misc_feature (1253)..(1253): n is a, c, g, or t
  misc_feature (1304)..(1304): n is a, c, g, or t

SEQ ID NO: 301718 - DNA, 275 bp, Homo Sapiens; identical to SEQ ID NO: 231808
  misc_feature (62)..(70): n is a, c, g, or t
  misc_feature (211)..(234): n is a, c, g, or t

SEQ ID NO: 301719 - DNA, 571 bp, Homo Sapiens; identical to SEQ ID NO: 231810
  misc_feature (244)..(256): n is a, c, g, or t

SEQ ID NO: 301720 - DNA, 173 bp, Homo Sapiens
ggtattgagattctctgttttacagataacaactggtttttattactcattaagttcatttgcatcccgtagccctctgtaaatgtttcccctagttgtatgtacgtaaatgcacgcttatccagtgtatattagacatttttgtgctaaaatatattaagtgggatttttgt

SEQ ID NO: 301721 - DNA, 132 bp, Homo Sapiens; identical to SEQ ID NO: 231815
  misc_feature (55)..(55): n is a, c, g, or t

SEQ ID NO: 301722 - DNA, 137 bp, Homo Sapiens
ggggccccctcagctctcagtcagagggcagagcaacacagaatagacattaaaggaacagactttgaggccaggcagccttgggtgtgcatctgtccctactaagccatgtgacattaaacaagtgagtccaccgc

SEQ ID NO: 301723 - DNA, 126 bp, Homo Sapiens
ggggtcaaatcggactcaatgactaacaaggacacaaacatcctaacttaggaatataaatggtatactcaaaaacatagcctacacgaccccagcaacacattggctttgaatgaaagaaaagtg

SEQ ID NO: 301724 - DNA, 220 bp, Homo Sapiens
gggaagtattaaagtaagaggtaactcaagcagaatgctggctatgaatgtagatattgaagctattcataaacactggaaatagaattttaagcttttagccttcagtggaatgcacatattggacatgtgcatgtgaacacctttttcagtagcactcacggatttccattcgattgtatagaatgaatacaagtgttttagtggaatttgctaccca

SEQ ID NO: 301725 - DNA, 125 bp, Homo Sapiens
ggtgctttcagtagctgggccattgctgggaacactctgttgcctccctgtgctgtcctctgctgtgccattgtgtggaatgccctgcagcctgcctcaacacaatgaagtaatcttaccagtcg

SEQ ID NO: 301726 - DNA, 322 bp, Homo Sapiens
  misc_feature (72)..(112): n is a, c, g, or t
gggaggaacacagggcctaactgggaactaaaactgctccaagagagaacaagtccaccctagagggaagannnnnnnnnnnnnnnnnnnnnnnnnnnnnnnnnnnnnnnnngagtcctgatgaaccactgcggtgactacagggacttaagagggtgcacaattctagaccacagccccactcaggcagtacatctgggggaaatgggggaaggaggaaggggaagtgacctctggcaacagtagtactgcttaaaacattaaacgacaaggaaaaaaagctatgggaattgaagaaggagaataacggacagaggtttta

SEQ ID NO: 301727 - DNA, 303 bp, Homo Sapiens
  misc_feature (72)..(242): n is a, c, g, or t
  misc_feature (248)..(263): n is a, c, g, or t
ggtgtccctgttcctatgctgaagggaaacttgtacaactttccctttttaaagtaaagagataccacctcnnnnnnnnnnnnnnnnnnnnnnnnnnnnnnnnnnnnnnnnnnnnnnnnnnnnnnnnnnnnnnnnnnnnnnnnnnnnnnnnnnnnnnnnnnnnnnnnnnnnnnnnnnnnnnnnnnnnnnnnnnnnnnnnnnnnnnnnnnnnnnnnnnnnnnnnnnnnnnnnnnnnnnnnnnntttggnnnnnnnnnnnnnnnnaaaaaattttttaaaacctttttttggggcgggggccccc

SEQ ID NO: 301728 - DNA, 747 bp, Homo Sapiens; identical to SEQ ID NO: 231827
  misc_feature (320)..(320): n is a, c, g, or t
  misc_feature (486)..(486): n is a, c, g, or t
  misc_feature (523)..(523): n is a, c, g, or t

SEQ ID NO: 301729 - DNA, 595 bp, Homo Sapiens; identical to SEQ ID NO: 119520
  misc_feature (46)..(90): n is a, c, g, or t
  misc_feature (355)..(454): n is a, c, g, or t
  misc_feature (456)..(461): n is a, c, g, or t

SEQ ID NO: 301730 - DNA, 944 bp, Homo Sapiens; identical to SEQ ID NO: 231832
  misc_feature (44)..(64): n is a, c, g, or t
  misc_feature (101)..(110): n is a, c, g, or t
  misc_feature (228)..(350): n is a, c, g, or t
  misc_feature (758)..(778): n is a, c, g, or t

SEQ ID NO: 301731 - DNA, 152 bp, Homo Sapiens
ggggagagggctgtgctgtgacagagtgtgcagatagttcctcctaaccacagctgtcccctacttaccttttctaaattccaaatgagttttaattcgaaagaaaataaattttgttttcatgaacatattttgcgctatcagtataccag

SEQ ID NO: 301732 - DNA, 141 bp, Homo Sapiens
ggtgaacagactgatataaatattttaatcctgtgcctagatagatggataagataaaataaattagtcatgttctggcccagtctggagactatctgaaagcaagacaaatgtcagcatttgctgtttagggggcacacc

SEQ ID NO: 301733 - DNA, 999 bp, Homo Sapiens; identical to SEQ ID NO: 231834
  misc_feature (321)..(385): n is a, c, g, or t
  misc_feature (875)..(875): n is a, c, g, or t

SEQ ID NO: 301734 - DNA, 136 bp, Homo Sapiens; identical to SEQ ID NO: 231835
  misc_feature (50)..(50): n is a, c, g, or t
  misc_feature (66)..(67): n is a, c, g, or t

SEQ ID NO: 301735 - DNA, 189 bp, Homo Sapiens
ggaagctaaggcactgctgcctgccccaggtgtcccgctcctctcagagtcctccccctaccaggtagtgtgtagctccatttcagaatgttaacctccagtgaagagctaatgactggttagaagattgacaaactaaccaaaattttacacactccggttatgtgtgtgaaaggttataaaaggaat

SEQ ID NO: 301736 - DNA, 1115 bp, Homo Sapiens; identical to SEQ ID NO: 231844
  misc_feature (1014)..(1014): n is a, c, g, or t

SEQ ID NO: 301737 - DNA, 229 bp, Homo Sapiens
ggggagcaacatgtggtctggtactgctagattcatgagtccccatctgctcagaattcaagatgggatctctgctcttagcatcaagaccctttttgatgaatgcaaatggtggctgacagaatgtgactcagaggaaagactgacagtctacatcagtctcctgatttacagcacatttaactctcctgagtcaacacaaagaaaaagaaacaggatattagtaacg

SEQ ID NO: 301738 - DNA, 194 bp, Homo Sapiens
ggcatatgtgaggggcagacattagccagatgacagcaaacataacagaacattataacggtaggaagtgatgtgagtgctcacatcagggaggtctggtaggagaaagaaatagatgacagaggtaggcagaaaggctagcacattctcagtcatctcccactcacacacacgctcaattaaagagaaaactt

SEQ ID NO: 301739 - DNA, 830 bp, Homo Sapiens; identical to SEQ ID NO: 231849
  misc_feature (172)..(210): n is a, c, g, or t
  misc_feature (582)..(592): n is a, c, g, or t

SEQ ID NO: 301740 - DNA, 353 bp, Homo Sapiens; identical to SEQ ID NO: 231854
  misc_feature (119)..(260): n is a, c, g, or t
  misc_feature (263)..(266): n is a, c, g, or t
  misc_feature (268)..(281): n is a, c, g, or t
  misc_feature (289)..(307): n is a, c, g, or t

SEQ ID NO: 301741 - DNA, 125 bp, Homo Sapiens
gggactaatcattgtaaattaagagtatctgctatttattctttataatatcccgtgtagtaaatgagaaagaagtgcagagcaggattaaagaaaaccactaaaaccgactgcgctccacactg

SEQ ID NO: 301742 - DNA, 200 bp, Homo Sapiens
  misc_feature (144)..(152): n is a, c, g, or t
gggttgtgtttacctaacaagtaccataagccttgtgtttgttcttatttgtataatcctagcctgtgacttaatgttgatgctttgctttgtcttttggctggcctaacctacattgacatgtacacagaacattttaaaacnnnnnnnnncaaaagtcataatgaattactttattaataaacaaagtcttgtatttg

SEQ ID NO: 301743 - DNA, 406 bp, Homo Sapiens; identical to SEQ ID NO: 33087

SEQ ID NO: 301744 - DNA, 404 bp, Homo Sapiens; identical to SEQ ID NO: 33088

SEQ ID NO: 301745 - DNA, 1106 bp, Homo Sapiens; identical to SEQ ID NO: 231858
  misc_feature (378)..(387): n is a, c, g, or t
  misc_feature (402)..(412): n is a, c, g, or t
  misc_feature (431)..(443): n is a, c, g, or t
  misc_feature (662)..(662): n is a, c, g, or t
  misc_feature (816)..(816): n is a, c, g, or t
  misc_feature (862)..(862): n is a, c, g, or t
  misc_feature (1057)..(1057): n is a, c, g, or t

SEQ ID NO: 301746 - DNA, 332 bp, Homo Sapiens; identical to SEQ ID NO: 231859
  misc_feature (76)..(85): n is a, c, g, or t
  misc_feature (105)..(163): n is a, c, g, or t
  misc_feature (190)..(200): n is a, c, g, or t

SEQ ID NO: 301747 - DNA, 935 bp, Homo Sapiens; identical to SEQ ID NO: 231861
  misc_feature (227)..(227): n is a, c, g, or t
  misc_feature (248)..(367): n is a, c, g, or t
  misc_feature (408)..(428): n is a, c, g, or t
  misc_feature (673)..(725): n is a, c, g, or t

SEQ ID NO: 301748 - DNA, 427 bp, Homo Sapiens; identical to SEQ ID NO: 33089

SEQ ID NO: 301749 - DNA, 105 bp, Homo Sapiens
  misc_feature (64)..(64): n is a, c, g, or t
aacatgattttaaaagctgagaaataattctgagaaagaatgtttgtaccttattgcaacttanatgtctaaaatgaaaatttgatgctcacaagaatgatgtct

SEQ ID NO: 301750 - DNA, 238 bp, Homo Sapiens; identical to SEQ ID NO: 231866
  misc_feature (48)..(64): n is a, c, g, or t
  misc_feature (106)..(135): n is a, c, g, or t

SEQ ID NO: 301751 - DNA, 481 bp, Homo Sapiens
  misc_feature (218)..(346): n is a, c, g, or t
  misc_feature (356)..(368): n is a, c, g, or t
ggatatatagacgacataaatccatactgtacacatttaagaataaacagtccagtagtaagaggcagtacatattcaatctgctgagaaatgtagacaataactactataagaatcctaatgctacagaagtcactggctgctgggaaaccggggaaaacttggctatggacgtgggggcttgtgtcggactctgaataaagagcagaatgattggnnnnnnnnnnnnnnnnnnnnnnnnnnnnnnnnnnnnnnnnnnnnnnnnnnnnnnnnnnnnnnnnnnnnnnnnnnnnnnnnnnnnnnnnnnnnnnnnnnnnnnnnnnnnnnnnnnnnnnnnnnnnnnnnncctttggggnnnnnnnnnnnnntgaaaaattttttaaaacctttttttgggcgcggggccccaaaaggaaggggaaatgggccaaactggttcccagaaaaaactgggccctaaaccacggcttggattcccccc

SEQ ID NO: 301752 - DNA, 603 bp, Homo Sapiens
  misc_feature (108)..(219): n is a, c, g, or t
  misc_feature (355)..(414): n is a, c, g, or t
ggtgtcataggagaaatcctttcagttttgtgcagtggttcatttgctgttaaatctaccccattaccattccccttactccttgaaaataaagtgatcttcatgttnnnnnnnnnnnnnnnnnnnnnnnnnnnnnnnnnnnnnnnnnnnnnnnnnnnnnnnnnnnnnnnnnnnnnnnnnnnnnnnnnnnnnnnnnnnnnnnnnnnnnnnnnnnnnnnntttggcgggcccctccggccccccagaaaatttttctaaactttttgtttgggcgcggggccccttagggcacgggacctgggcaaaaatttttcccaaggaaatcttggcctggccaagggctgggttccccccnnnnnnnnnnnnnnnnnnnnnnnnnnnnnnnnnnnnnnnnnnnnnnnnnnnnnnnnnnnnccttaacgggccttttcaccgggagcccaggcgacttcaaattaaatttaccccccggccttggccattattcgaagaaaggggggaaattcttaaagcattttggccgaattgggaaccccttcaacaaagggaaggaataaaccttaattcccccgcggcattccgccccctggggccccctttgcc

SEQ ID NO: 301753 - DNA, 318 bp, Homo Sapiens
  misc_feature (126)..(135): n is a, c, g, or t
ggattaaaagtatatgcccaatttgtatgtcttattgaaaacatctttgaaaaacagtacttttggtgtgtatgtggtaggtaagactttgtaagttaagtagttgttcactgaatgttagcatcnnnnnnnnnnaatgttcatatggccttttttgctgtttataaattgtataaactatgttcactatttgatcctgtcaaccaatattaggagtaaccactgcattatatttacatttgactctatgataatatgtaatattcacattttgactctctttgggagaaataaagaataaatgttagttcccaggcc

SEQ ID NO: 301754 - DNA, 325 bp, Homo Sapiens
tcggaatggaccccaactgctcctgctccaccggcggctcctgcacttgcaccagctcctgcgcctgcaagaactgcaagtgcacctcctgcaagaagagctgctgctcctgctgtcccgtgggctgctccaaatgtgcccagggctgtgtctgcaaaggcgccgcggacaagtgcacgtgctgtgcctgatgtgacgaacagcgctgcccaccacgtgtaaatagtatcggaccaacccagcgtcttcctatacagttccaccctgtttactaaacccccgttttctaccgagtacgtgaataataaaagcctgtttgagtccc

SEQ ID NO: 301755 - DNA, 562 bp, Homo Sapiens; identical to SEQ ID NO: 33093

SEQ ID NO: 301756 - DNA, 783 bp, Homo Sapiens
ggtcctatggctgctactttgtcccagccttttcggggctgtatgcaccttactgggaacccagtgcaagagggataatctgtggtctcactcagttcaccaacaaatgccatattgcctttgctgcgttagaagctgtttgtttccaaacccgagagattttggatgccatgaatcgcgactgtggaattccactcagtcatttgcaggtcgatggaggaatgaccaacaacaggattcttatgcagctacaggcagatattctgcacattccggtagttaagtctgtcatgcctgaaacgacggccctgggagctgccatggcagccggagctgcagaaggggtaaatgtttggagtcttgaacctgaagatttgtctacgatcttgatggaacgatatgaaccacaaatccaagccacagagagtgaaattcgtttttcaacatggaagagagcagtgatgaagtcaatgggttgggttacagcaaaggaccctgaaaatggcgataaccctgtcttctcttgtctgcccttgggtttttttatagtgagtagcatgacgttatttattggagcaagatgtgtctccactgctgaagagtaatttgaaccacggacttgcaatgtggtgaactttttaccgaaagaattccatcttttagtgtgaaaaccatattataaggttttatttttaacctatagccacttgctttacaggaaacccttgaaggccccctacaaatactccttaaaaataaaggttttggaattaaggagaaaat

SEQ ID NO: 301757 - DNA, 897 bp, Homo Sapiens; identical to SEQ ID NO: 231875
  misc_feature (542)..(593): n is a, c, g, or t
  misc_feature (675)..(768): n is a, c, g, or t
  misc_feature (879)..(879): n is a, c, g, or t

SEQ ID NO: 301758 - DNA, 766 bp, Homo Sapiens; identical to SEQ ID NO: 33094

SEQ ID NO: 301759 - DNA, 613 bp, Homo Sapiens; identical to SEQ ID NO: 231876
  misc_feature (247)..(327): n is a, c, g, or t
  misc_feature (335)..(336): n is a, c, g, or t
  misc_feature (552)..(572): n is a, c, g, or t

SEQ ID NO: 301760 - DNA, 762 bp, Homo Sapiens; identical to SEQ ID NO: 231877
  misc_feature (716)..(716): n is a, c, g, or t

SEQ ID NO: 301761 - DNA, 785 bp, Homo Sapiens
  misc_feature (618)..(621): n is a, c, g, or t
  misc_feature (623)..(627): n is a, c, g, or t
  misc_feature (629)..(630): n is a, c, g, or t
  misc_feature (632)..(634): n is a, c, g, or t
  misc_feature (637)..(637): n is a, c, g, or t
  misc_feature (645)..(646): n is a, c, g, or t
  misc_feature (650)..(650): n is a, c, g, or t
  misc_feature (652)..(653): n is a, c, g, or t
  misc_feature (656)..(656): n is a, c, g, or t
  misc_feature (719)..(727): n is a, c, g, or t
ggggaggtggacgtgcctgccgtcaaagtgaaagaggagccacgagatgaggaagaggaagccaaggtgaaagcccctccaagagcagcccggaagactcctggcctcccaaaggacgtgtcggtggccgagctgctcagagagctgagcctcatgaaggatgaggagctcctgttccttcagctgcctgacaccctccccgggcagccacccactcaggacatcaagcctgtcaagacagaggtgcagggcgaggatggacagatggtagtcataaagcaggaaaaagaccgggaagccaggctagtagagaatgcttgtaccttggctgacctgacagagggtcaagtgggcaaactgctcatccgtaagtcagggaacgtgcaactcctcctgggcaaggtgactctagatgtgccctggggaacgacttgttctttcctgcaggaactggcgcctgtgaaccttggagacacacaagggtgaatgaaggctgggactgtaaaccaaactgttgctccctgtttcatcccctgatcacccggatgccaccgccatattcccacgctgtaacaacaagcctcccctcctgtccgtccgtggcccgccgtaccaaannnncnnnnngnngnnntcngcgtttcnnaccntnnttncccccggctttgcgcgttttttcctccccgttatccctttttcccaccttttggctttctctnnnnnnnnntttatctattattcgcccaacgctctccttactacccgcattcatctcctttccgcca

SEQ ID NO: 301762 - DNA, 940 bp, Homo Sapiens; identical to SEQ ID NO: 231878
  misc_feature (864)..(864): n is a, c, g, or t

SEQ ID NO: 301763 - DNA, 768 bp, Homo Sapiens; identical to SEQ ID NO: 231879
  misc_feature (652)..(702): n is a, c, g, or t

SEQ ID NO: 301764 - DNA, 820 bp, Homo Sapiens; identical to SEQ ID NO: 231880
  misc_feature (486)..(550): n is a, c, g, or t
  misc_feature (767)..(775): n is a, c, g, or t

SEQ ID NO: 301765 - DNA, 778 bp, Homo Sapiens
  misc_feature (547)..(547): n is a, c, g, or t
gggatagacaagactggagcaacagctgggacaacagcaacatcaatgcggtgctaaagcaaaagggcttctacacagagaactacaggcaatggctgactgtggaaggagattagcctctcccagggcgaggccctctattggttgtccaatgcggagtggccagccttgaaaacatacacatataagcaacaaaaatggactcaggaggtgtgcgtcaggtggacaaaacctagccagcgtgtcttctcatgcacagtcaaatgtgctcacgccactgcagcctgccggctcacgtctccactgcaccttgatgatttacacaaggtccaggattctttgtcactgcttgtgcggccccctttcacatgactgggaactttctaacatgctgcttactaaagaagtcccagctgctggttcattgaccttataatggaaattaagcttcattgtctgatggaacccaatgttgtcacgcatgcccttgaaaacagaggtcgtcttagctcagtgcagaagtcaaaaagactggaagcatgaaaanaccttgacacatcgttcctgactgatggcaaaggaatgggagtgcatgcagagaagcaaataaacgctaccagcaaccagcaagctcaggagaagactgtgaccccagaatgtggaaaggatggctgtaccggacactttttatttcagatatggggagacttggagcagaaggattcaaccgggaaggcgtggaaacttctaacctacagaaaacgccggggggaaaggg

SEQ ID NO: 301766 - DNA, 383 bp, Homo Sapiens; identical to SEQ ID NO: 33098

SEQ ID NO: 301767 - DNA, 841 bp, Homo Sapiens
  misc_feature (733)..(741): n is a, c, g, or t
gggagaactggatattaactgtccgtatccggcggtgtccggagccgggtgaccgggtgtccagcagaaggcgcgaatgaaggcaaagcctcccacccacctgcaatgtgtcgactgagggtcttgctgctgctgctccccttggccttcgtgtcctcctctgctctccccatccatgatgtcgactctcagcagaacacctccgggttcctgggccttcagaggcttctccaaagctttagtcgactgttcctaaaaaatgacctgctacgagacctggacaacttcttctcctcccccatggacttccgagaccttcctaggaacttccctcaggaagagaaccaggagcacagaatgggcaaccataccctctccagccacctacagatagacaaggtgactgacaaccagacaggggaggtgctcctctcggagaaagtcgaagcctccattgagcccgaacggaacccgggaaggggactggaaagttcccccaagtaaaagcaaaagaagccccccggtgcctggtgcaaaaagtcccccgacaggcttgcaccccaaagccccccggcaggtgggtttttctgggaatcattaaaaattgccaagcgtgggaaggaaccccacccccgaatggtccaagaaaggggaggccgtgtttggttccatccaacaaagcgcacttctgcttgcccgggcccttccggggatgggacccccctgggaaagnnnnnnnnnttaagaacaaactccgcagaagatagggggtacctatttttaccacgcaacacgcagcgctattttttttcccccaccaaatggacatcctcccttctct

SEQ ID NO: 301768 - DNA, 739 bp, Homo Sapiens; identical to SEQ ID NO: 33099

SEQ ID NO: 301769 - DNA, 908 bp, Homo Sapiens; identical to SEQ ID NO: 231881
  misc_feature (598)..(625): n is a, c, g, or t
  misc_feature (636)..(636): n is a, c, g, or t

SEQ ID NO: 301770 - DNA, 832 bp, Homo Sapiens; identical to SEQ ID NO: 33100

SEQ ID NO: 301771 - DNA, 793 bp, Homo Sapiens; identical to SEQ ID NO: 33101

SEQ ID NO: 301772 - DNA, 856 bp, Homo Sapiens; identical to SEQ ID NO: 33102

SEQ ID NO: 301773 - DNA, 289 bp, Homo Sapiens; identical to SEQ ID NO: 231882

SEQ ID NO: 301774 - DNA, 992 bp, Homo Sapiens; identical to SEQ ID NO: 231883
  misc_feature (326)..(334): n is a, c, g, or t
  misc_feature (434)..(442): n is a, c, g, or t
  misc_feature (651)..(661): n is a, c, g, or t
  misc_feature (675)..(675): n is a, c, g, or t

SEQ ID NO: 301775 - DNA, 544 bp, Homo Sapiens; identical to SEQ ID NO: 33105

SEQ ID NO: 301776 - DNA, 799 bp, Homo Sapiens
  misc_feature (676)..(731): n is a, c, g, or t
ggggaatggaactttggcacctcaagcaacaggagggagaaattatggagtgatgctgtcaggaagcagcggtctccaccttccagacactaccatgccatcttccgcaggactgtattttgagcctgaaccaacgtcttccacacccagttattttcaaactcgagaattttccacctgtgtctcttgtgaagaaattcctagctgcctcgaccagatcttcgagtcctaccttcagacagacacactcccggagcctttgctcaactctgcacagattgctccccactatttcccagagagctgtcaagtggcccctttctgccccaaccagagcctgattccagggtcgccttcggattcttccagtctctctggctccctttgattgcagttactcaccaactcagctgccttccctacactccagaaaaataaagctcgcctccctttctctggaatcccctacacttccagcctcccccaaagaagggctactttctggccaacattggggccttctcacccccccgttaaaaccaacttcgttcccagacaacccccctcctcggggctggttcactatggcctccctgggaagggcaaaagccatctgggaagccccccccaaaaccacaaaagaggttcttcctccccacctccgggcaatgggaannnnnnnnnnnnnnnnnnnnnnnnnnnnnnnnnnnnnnnnnnnnnnnnnnnnnnnncgaatttctttattatacagggggagaaacaaggccttggtgaatacccccccgcctcttaaaaattt

SEQ ID NO: 301777 - DNA, 780 bp, Homo Sapiens
  misc_feature (612)..(612): n is a, c, g, or t
gggtgatttactgtgatttgtgttctccatttctccaatgagtgataatcacagtttgttcagcttgcaggaattcttggtgatttttggcaaaagtgtgttagcaattctttgtgttctctctcccatctatttctatggagtggaaaacatgctgtttggtagaagatagacatgagtagtggagctaggaagagtggtcctagaaaacagcccacaacatcttcctgtttgtgcagcctaataatcccaaactacaagcttcatatccatcacccagcagacagcctacactactatgtatgagcgagcatctccaggaaacaactgacagctgttctcaactgtatccaactcatcccaaacacatcctgttctctgcacatccagtgtaaggtcaccccatataaggtaacatgtctgagttcaaatgccaccattgcgaggaatccttgcaaggtaaaaagtatgtgcagaaggatggagccaactactgtgtgacatgctttgactcgcattgtgccaatatctgtcaggaatgccacaagcccataagtgcagattccaaggaggtgtgttataaggagcaattctggcacaacacctgcttcnaatgttccaagtgttctcaactcttggctactgagaacctttgttgcctggggacaagaatatcctgtgcaacaagtgtgccactcgagtcacctttccccaattgcaaaaggtgcctcaaaagatattgaggaagggagaccattaatgtgggaaataccaaaggta

SEQ ID NO: 301778 - DNA, 840 bp, Homo Sapiens; identical to SEQ ID NO: 231886
  misc_feature (756)..(756): n is a, c, g, or t
  misc_feature (772)..(782): n is a, c, g, or t

SEQ ID NO: 301779 - DNA, 813 bp, Homo Sapiens
  misc_feature (465)..(465): n is a, c, g, or t
  misc_feature (747)..(748): n is a, c, g, or t
  misc_feature (770)..(770): n is a, c, g, or t
gggagagaaaaagactacttgatcttaaaacaagaactatgaacaaaaggtgaagaaaggaaagaaaatccatgataattcatcatatatcataagacatcagcatctggacataagaaccatgccagtcactgtgactctaaacacagagagaagaagtcctcttcgagccccaccagtttacagaagtctatcaatctctctgtccatcttccggatcattattcaagttactatccccaattttgctgggtacataagatcaagccacactccgtagatcatttttcctccttgtggattaggaatttgttctctttatattatctctgagagaatatgctgcttagaaaaagtagtaggaatgtcaacatcacctgtgtttgccttgtgtatgtgtttatatatctacctctccacccttgtactgtgattgccttacaagaagttaaaactatgtctganaacagtagcaaaaatcctttgtaatgtcatgctttccttgtttctattgacacatattatcttggctctctcaagggacctgtatgtttttccaggtcaggaaagacaatttgaaagagtcccctattgatgtaaaaaattattcagatggttaggtcatttcatcagggaatgaccaataggctgggggaattggcatgggatggtttaccgaatttcaatccgcccaaaccggaaaaatatactggaataaaaagctaaaatggcctattgccccaaaanntaatattacttttcgcttcacntttaacatgttcggcccgccctcgggcccccgaaaaaaacttt

SEQ ID NO: 301780 - DNA, 901 bp, Homo Sapiens; identical to SEQ ID NO: 33108

SEQ ID NO: 301781 - DNA, 885 bp, Homo Sapiens; identical to SEQ ID NO: 231887
  misc_feature (401)..(409): n is a, c, g, or t
  misc_feature (488)..(537): n is a, c, g, or t
  misc_feature (540)..(576): n is a, c, g, or t
  misc_feature (649)..(723): n is a, c, g, or t

SEQ ID NO: 301782 - DNA, 761 bp, Homo Sapiens
  misc_feature (663)..(671): n is a, c, g, or t
gggggggacactgtatacaaagaacatccatgactcccaacagtataacccagcccatcttggggatcatcaaacgcagttggtagtaccactacccccagggtaaagtgtctagaaagaacttctgaggggatatgtcaaaggacccaggtggccaaagaacatcacccatgggagagctgagcttcccatctgattctttctgggcatctataccccacattccatccaggagcaaaggctgaatacactgtttctgtctctatgttggcctcagaaaagcagaaatcagaagccagggacagcccttttgctcagatggtcagaaccagactccctgtggcagtacatcatggtaactgccaccatagactcagagaccatcctgcaggaactggtagggcaggaactctacaccatggacaaatgctgcataagtggataagaggcctaaggccctgcccccatcccttctcagaacagtggaaccattccccaggctaaacacatagatccaggaaacaagagggtgcatgaagaggagaggccagcggcagacaatgaaaacatccactgggcaccagaaagaaaagtggagggggcaccaagcaccataaatgggaatctggagaagccacatgtttgttccacatttaattcctnnnnnnnnnaaacctttcttggccggcctgccctcagcgccctaaaaaaatttcctccaaaaccctttcccttttggcccccgcaggcccctcataagg

SEQ ID NO: 301783 - DNA, 813 bp, Homo Sapiens
  misc_feature (540)..(540): n is a, c, g, or t
  misc_feature (634)..(634): n is a, c, g, or t
  misc_feature (641)..(641): n is a, c, g, or t
  misc_feature (704)..(715): n is a, c, g, or t
gggacccaaactcgacgacgacaaccagacagcagagaacacatgcaaacctgcagaagagcagcctcaacagctcaggtgggacgatattcacttgccccggttctcactaaagcaagggatgatcccgacccgttacgtcatgccttggaaagaaaacatgaaattcaggaacgtgaatctacagcaagcagaagcctgtgggatctatgctggccctttggaagattctctgttctggggttacagcgagaggctttgccatggggaagatcggaaagccgtcctgaagaaaggcctgccggagataaagattaccgacatgcctttgcattcgcctctctccagataccagagcacagtgatttcccacggtttccggaggcgactgatctgataggcggatctcggaagttgctgtcattcggtaatggtgcgcttgcctaacacgcgagacgctcagggtttgaaccccactactactaaaaccagtaagataaagtagttcagtctcttgccactcctcggaaaaaaacctanacccgcttcctccccgtttaccccatgtccccccgcccgggcccacttattgtcggcgggcggcgttagggaagcccgctcgcccgccaccagnattaaantccgtggtcgggcgggcctcggcccccctgagaaaacttttccataaaccaattccctttgtnnnnnnnnnnnnccccctttgggggtagaggcaaacttgggcccaaaggagcggtttccccaaggaaaaacccgtggacaagaaacccacggcgctgggattctcccacc

SEQ ID NO: 301784 - DNA, 799 bp, Homo Sapiens; identical to SEQ ID NO: 33109

SEQ ID NO: 301785 - DNA, 760 bp, Homo Sapiens; identical to SEQ ID NO: 33110

SEQ ID NO: 301786 - DNA, 445 bp, Homo Sapiens; identical to SEQ ID NO: 33111

SEQ ID NO: 301787 - DNA, 601 bp, Homo Sapiens; identical to SEQ ID NO: 33112

SEQ ID NO: 301788 - DNA, 558 bp, Homo Sapiens; identical to SEQ ID NO: 33113

SEQ ID NO: 301789 - DNA, 776 bp, Homo Sapiens; identical to SEQ ID NO: 33114

SEQ ID NO: 301790 - DNA, 812 bp, Homo Sapiens; identical to SEQ ID NO: 33116

SEQ ID NO: 301791 - DNA, 835 bp, Homo Sapiens; identical to SEQ ID NO: 231888
  misc_feature (692)..(702): n is a, c, g, or t

SEQ ID NO: 301792 - DNA, 772 bp, Homo Sapiens
  misc_feature (614)..(614): n is a, c, g, or t
ggggtcgtcttggcggaggttgtggtgacgccatcatgggagctccggcgctgccccagatctggcagctgtacctcaagaactaccgcatcgccaccttcaagaactggcccttcctggaggactgcgcctgcaccccagagcgaatggcggaggctggctttatccactgccctaccgagaacgagcctgatttggcccagtgttttttctgctttaaggaattggaaggctgggaacccgatgacaacccgatagaggagcatagaaagcactcccctggctgcgccttcctcactgtcaagaagcagatggaagaactaaccgtcagtgaattcttgaaactggacagacagagagccaagaacaaaattgcaaaggagaccaacaacaagcaaaaagagtttgaagagactgcaaagactacccgtcagtcaattgagcagctggctgcctaatgctgagcctttgctgagataacttggacctgagtgacatgccacatctaagccacgcatcccagcttttccagccagggcctcctagcaggatcttagagaaagagacagtggtattttgaaactggatatcaaatatttttggttttgctttanagtggctacctctctttggttttgtggctttgctctattgtgacgtggacttaagcaataaggaagtgatgaaaggaccgtgttctctgacggaacctggggggggccggggtgcctgtgcccagggccttgggtctgcattgggatattttccatac

SEQ ID NO: 301793 - DNA, 988 bp, Homo Sapiens; identical to SEQ ID NO: 231890
  misc_feature (225)..(282): n is a, c, g, or t
  misc_feature (341)..(384): n is a, c, g, or t

SEQ ID NO: 301794 - DNA, 763 bp, Homo Sapiens; identical to SEQ ID NO: 33119

SEQ ID NO: 301795 - DNA, 437 bp, Homo Sapiens; identical to SEQ ID NO: 33121

SEQ ID NO: 301796 - DNA, 588 bp, Homo Sapiens
  misc_feature (563)..(563): n is a, c, g, or t
gggctccggcccaaggactcgagcccgcccgccgccgccggaggcgctgcccaccgtcggcttcgaagaggaggtgtacgactgcctggattactactaccttcgtgacttcccggcctctggggctggacgcagcaagggccggacgcggcgcgagcagcagctacgcaccaactacccggtgcccggcggccacgagcgcaaggtggcgcagatactgctcaacgggcagcgcaagcggcgccagcgccagctgcaaccgcggccgcgcacacgcctggcctgagcacacgccacgcttgagcgggaacctgagacaggaggatcttgagttggagtcctgcctgggcattattgaaacctgaaagacctgttaaaaactcttttccagctgtaaccaagatcctccgtgctggtcacctggactttttgacagggttttaagtttactgctctagtgtttttcctcactaattaattgttaagtaagtagtttcctggtgtgtatgccttttttagggtttttcaattaaaagagcacagcaagaatgcacccccttccnatattaacccataataccccctgtc

SEQ ID NO: 301797 - DNA, 224 bp, Homo Sapiens
gggaagatggatacctagtccttccccgcttggtacccaccaagagtaacagggagatatgtgtgcggatcaccacgtggctgccaagggcagactcaagccctgtcatagctcaaagacaggagcgttggggtgggcagaatcgaaagcacttcttagtcaccaggggctgcagaagggccaccagcctcccaacttctctgtcaaaattaaaccttttgtac

SEQ ID NO: 301798 - DNA, 477 bp, Homo Sapiens; identical to SEQ ID NO: 33124

SEQ ID NO: 301799 - DNA, 828 bp, Homo Sapiens; identical to SEQ ID NO: 33125

SEQ ID NO: 301800 - DNA, 889 bp, Homo Sapiens; identical to SEQ ID NO: 231894
  misc_feature (604)..(618): n is a, c, g, or t

SEQ ID NO: 301801 - DNA, 812 bp, Homo Sapiens
  misc_feature (545)..(606): n is a, c, g, or t
gggaggaattgtgggactgagccgccaggattcggcgaggcggagggacgcgccctcctgcctcgatcacaaggcggcttcctctgctaggccctcggtcccctggttccgggttctcctggctccccgcactgcggggtcgaagtcaggggtggtgatctccgcctacaccgagggagaggtgtactgcagcaccactcacccccttgtcccagctcctgagtgagcgtccctccgcttgtctcttggggtcatccccctaggctgtcaggatggtgtcctggatgatctgtcgcctggtagtgctcatatttggcatgctgtatcctgcgtatgcttcctacaaggccgtgaagagcaagaacattcgagaatatgtacggtggatgatgtattggattgcctttgcgacctttctggcagtataaaccttcccagacctcttcatttcctggttcccttttcacttaccagtctccggaaggatttccgcggctgtcgctgattcccccccttaccctaggggggcccacgttcctcctttnnnnnnnnnnnnnnnnnnnnnnnnnnnnnnnnnnnnnnnnnnnnnnnnnnnnnnnnnnnnnntgttttcttgtccttttcaatgccgcccccccacttttgtctaccttggttctatcccactgggggcccccccctcccattaaataaatatcccgcctcccagcctcaacagtcccaccacccgggttagaaatattatttcccattgcccttcccccattccagccaaggccccgcgccctcatctaatcccgtaattctcaaat

SEQ ID NO: 301802 - DNA, 759 bp, Homo Sapiens; identical to SEQ ID NO: 33127

SEQ ID NO: 301803 - DNA, 808 bp, Homo Sapiens; identical to SEQ ID NO: 33128

SEQ ID NO: 301804 - DNA, 761 bp, Homo Sapiens
  misc_feature (660)..(660): n is a, c, g, or t
ggacacatcaatgctcgagctctggacattcaggctggcttggactccggtcctgttgtgccaacgccaagaggctcagaaaacgagccctggtaactccactcaccatggccagccagttctgccttcctctggccccacgcctctcaccccttaaacctctgaaatcccacttcacagacttccaggttggcatctgtgtggcaatccagcgcagtgacaaacggattcacctggctgtggtcacagagatcaacagagaaaactcctgggtcacagtagagtgggttgagaaaggagtcaaaaaaggaaagaagatcgaactggagactgtacttctgttgaatccggctctggcctctcttgaacaccaacggtcacgtaggcccctgcgcccagtgtctgtagtaccatctactgccattggagaccagcgtacagccaccaagtggattgcgatgatcccacacagaaatgaaacaccctcaggggacagccaaaccctgatgatccccagcaaccccttgtctgatgaagcggaaaaaatccccctgcctacgggaaattgaaaagctgcagaagcagagagagaagcgccgcccgactgcagctagagatccgagctagacgagcccttgaactcaacactgggaaatcccnaacttcgagactatgcgcatgattggaggagtatcgcaagccgtctaaaataccagcaagaagtcccgccctgggagccccccataaaaccaccggaacct

SEQ ID NO: 301805 - DNA, 750 bp, Homo Sapiens; identical to SEQ ID NO: 33130

SEQ ID NO: 301806 - DNA, 890 bp, Homo Sapiens; identical to SEQ ID NO: 231897
  misc_feature (272)..(372): n is a, c, g, or t
  misc_feature (375)..(375): n is a, c, g, or t
  misc_feature (740)..(754): n is a, c, g, or t

SEQ ID NO: 301807 - DNA, 858 bp, Homo Sapiens; identical to SEQ ID NO: 231898
  misc_feature (411)..(542): n is a, c, g, or t
  misc_feature (576)..(611): n is a, c, g, or t

SEQ ID NO: 301808 - DNA, 735 bp, Homo Sapiens; identical to SEQ ID NO: 33131

SEQ ID NO: 301809 - DNA, 519 bp, Homo Sapiens; identical to SEQ ID NO: 33132

SEQ ID NO: 301810 - DNA, 607 bp, Homo Sapiens; identical to SEQ ID NO: 33133

SEQ ID NO: 301811 - DNA, 857 bp, Homo Sapiens; identical to SEQ ID NO: 33134

SEQ ID NO: 301812 - DNA, 901 bp, Homo Sapiens; identical to SEQ ID NO: 231900
  misc_feature (395)..(403): n is a, c, g, or t
  misc_feature (463)..(473): n is a, c, g, or t
  misc_feature (530)..(531): n is a, c, g, or t
  misc_feature (538)..(538): n is a, c, g, or t
  misc_feature (543)..(543): n is a, c, g, or t
  misc_feature (545)..(554): n is a, c, g, or t
  misc_feature (641)..(703): n is a, c, g, or t

SEQ ID NO: 301813 - DNA, 697 bp, Homo Sapiens; identical to SEQ ID NO: 33135

SEQ ID NO: 301814 - DNA, 890 bp, Homo Sapiens; identical to SEQ ID NO: 231901
  misc_feature (166)..(224): n is a, c, g, or t

SEQ ID NO: 301815 - DNA, 781 bp, Homo Sapiens
  misc_feature (556)..(594): n is a, c, g, or t
ggagaacagacacttcattgttccagcttctcggttcaaactcctgaagggtgctgagagcataaccacatacacctttaacacgcacaaagcccagcacaccttctgcaagagatgtggtgtccagagcttctatactccgcgctccaaccccgggggctttggaatcgccccccactgcctggacgaaggcactgtgcggagtgtggtcactgaggagttcaatggcagtgactgggaacgagccatgaaggagcacaagaccatcaagaacatgtcaaaggagtgagcagggcagtagccctgtaggttgcatgggtgtgtgtcgctgtgcaggcctgcctgggctaccatctccactccccatgtctctgaggttcactccagccaccatttctttaggcagctctgccttaacccaggtttcgtgtaagaaacttaaccttctcccttcctaccaatttttgtgtgatcttttagaaaataaatatttctgacattaaagacccgacccctccgttccttgccccccctcgctccatacaccgccttaccnnnnnnnnnnnnnnnnnnnnnnnnnnnnnnnnnnnnnnngtaaatgtcccgcgggtggcgggacaccttccgccccatgcggaaagttgttatagcaccccttccttggctggggctgggccccccctttatggtaaaaggccgacctgcgtcccgcgcccccgtcctcttccggagaattctcttggatattaataccttattgtcggcgggattttccccgcaa

SEQ ID NO: 301816 - DNA, 589 bp, Homo Sapiens
  misc_feature (349)..(351): n is a, c, g, or t
  misc_feature (353)..(366): n is a, c, g, or t
  misc_feature (388)..(543): n is a, c, g, or t
gggagagtccagcaaggaggtctgggattcacactgagcacgtgtgtctgcctaggcttgggctgttttctgggatggactacctgaaattcatcatgtccacttccatatgtgtgaaagtgcatgaggaggacatggaatgatgctacatatcttgctacaaatatgtataaacagttgctgtatatgaatgatctctttcaacgccccggcctcagaagtatagattgacaatgagaaaaagcagatgattgagtaccatggaatgtcagaaaatgaatgagaattgacaagggaaatattgatttcctaggaacaataaacactaggccaggaataatcaagtgcnnncnnnnnnnnnnnnnnccccacccccctaaaacacacnnnnnnnnnnnnnnnnnnnnnnnnnnnnnnnnnnnnnnnnnnnnnnnnnnnnnnnnnnnnnnnnnnnnnnnnnnnnnnnnnnnnnnnnnnnnnnnnnnnnnnnnnnnnnnnnnnnnnnnnnnnnnnnnnnnnnnnnnnnnnnnnnnnnnnnnnnnntcctcgcacgaccatgttctcctcgcacttccccttttgcgcctcg

SEQ ID NO: 301817 - DNA, 774 bp, Homo Sapiens; identical to SEQ ID NO: 33136

SEQ ID NO: 301818 - DNA, 793 bp, Homo Sapiens; identical to SEQ ID NO: 33137

SEQ ID NO: 301819 - DNA, 653 bp, Homo Sapiens; identical to SEQ ID NO: 33139

SEQ ID NO: 301820 - DNA, 600 bp, Homo Sapiens; identical to SEQ ID NO: 231903
  misc_feature (474)..(474): n is a, c, g, or t

SEQ ID NO: 301821 - DNA, 773 bp, Homo Sapiens; identical to SEQ ID NO: 33141

SEQ ID NO: 301822 - DNA, 900 bp, Homo Sapiens
gggaggtgagggacggcttacagaacactgagacggtcttaaaataggatattctgaataaccttgagtcgtgtgaccttgaggatgatgaccttatgttggatgtggatttgccggaggacgcacctcttgaaaatgtggagtgtgacaatatgaaccgctttgaccgaacagacagaaatgtacgacagtcgcaggacggattttggaaaaggccaccccagaggtggagtggacaggaccattaccacctcagccaccctggtcactatcatcaccatggacaaagtgacttgagcagaggctctccttatagagaatctcctttgggtcattttgaacgctatggagggaccccctttttcccggttcaaaagatgtttgtatatgtgcccgacaacacagtggattcctggatgagatgacccctccggcacatggttccaggaattgcaccagctgtgcaacacgccttttaccttgaaactccagcgtcccgtttaccacacccattgacggaaagtgggatcattggcattgacgtttcccgctccttctttgcccatcccagcccccgaagtcctcaagcaacgcccgcttcgcatttttttaccaaatggaaacaatttccctaccaatgaaaatactccccccacttttcaccgccgcggaaaccctccccctccataatactggtaccccaccccccacctccctcttattagcacccccgctttggttaaccccccaacgattaaacctgtgtgagtccgcccatccccttaaccgaaggtgaaagcgcgggccgccatcttggctcgcgctacaaatctactcccccccgtatcgtctttttgtaataaccccggaattttccttcttcttccttccgccccctcc

SEQ ID NO: 301823 - DNA, 851 bp, Homo Sapiens; identical to SEQ ID NO: 231905
  misc_feature (338)..(338): n is a, c, g, or t
  misc_feature (674)..(731): n is a, c, g, or t

SEQ ID NO: 301824 - DNA, 855 bp, Homo Sapiens; identical to SEQ ID NO: 231906
  misc_feature (288)..(429): n is a, c, g, or t
  misc_feature (541)..(581): n is a, c, g, or t
  misc_feature (650)..(720): n is a, c, g, or t

SEQ ID NO: 301825 - DNA, 840 bp, Homo Sapiens
  misc_feature (577)..(588): n is a, c, g, or t
gggaagaagcggtggatgagagctgtcccaagtggtgtgcccctcgcgcctctagcgacgagagctgtcccaagtggtgtgccccgcgtgcctccacctaccagtcgccgctgcaaaagaagtttaggcctacagatacagtgggttttgtggagtcggagctgaagaagattctgtcagtgcaacgagaggctcgcctctggaaggtgggcaaccccgagggccgggagctgctgacccagccagacatcacactggaggaggctggcatggtggacggccatcacctgctcctggaggacatggacgagatgggaaactggcccccctccagattgaggcccgtgccggcaggagcccaccgtgcccacactcctgggcacccaggctggcgtgtgcctctccttgggacacatgccaggagtccctgcggccctgggtttcggggatgagcaccattatgtgtgtggtgcggccggcctgcctggcacctggtccctaccccggcagacttctgcccaatgcctttattaattaacgccttaattttcgtctttcactctcgcctacccctttnnnnnnnnnnnntattccccggttgtttttacttcccccaaacacgccgtcgttgcgcttagggcactgtcttactaggatttacccccttaaaccccacgttttcctcggcgccgggttccctttggtccccccttagaattttttctccaaaccccttttttctttggtgcgcctgccaccccagtacgcacctctttccgtgccctttgccccctttgcctctccccctcttgtgcacccctttttcggcggtgcgaccaa

SEQ ID NO: 301826 - DNA, 758 bp, Homo Sapiens; identical to SEQ ID NO: 33142

SEQ ID NO: 301827 - DNA, 431 bp, Homo Sapiens
  misc_feature (189)..(254): n is a, c, g, or t
gggctcaccgagttgaagtgtgaagtgtagttccttattgatcacatgaacgtctcctgagcggagactgtagaacttggaaatgagaaatcttgccgtgggcagtggtgcaaactgtggctgaggcccgaggagcttgagttcaagcctgcttcgggctgtgtagccagactgctacaaaggggttannnnnnnnnnnnnnnnnnnnnnnnnnnnnnnnnnnnnnnnnnnnnnnnnnnnnnnnnnnnnnnnnncattcagctggcttgagctgtgtagtctgcagagacttcagaaccacacattccttcttatgtggaattgtgaaaagaacactagatgattttatgatttacatttctacttttattgcctaatttcttttcacacttggaaggagaagggaatttatccatgtttttctacaaact

SEQ ID NO: 301828 - DNA, 373 bp, Homo Sapiens; identical to SEQ ID NO: 33145

SEQ ID NO: 301829 - DNA, 873 bp, Homo Sapiens; identical to SEQ ID NO: 231907
  misc_feature (397)..(476): n is a, c, g, or t
  misc_feature (523)..(557): n is a, c, g, or t
  misc_feature (583)..(621): n is a, c, g, or t

SEQ ID NO: 301830 - DNA, 755 bp, Homo Sapiens
  misc_feature (195)..(250): n is a, c, g, or t
  misc_feature (492)..(515): n is a, c, g, or t
ggaactggggctcttcgccagggcggcccagtaacgcgcgccgccgccgcttgcgctccatcacccaaggggctcagacaggaaagcgagctgcaggctcgaaggtgaaagaggctgggtcgccccggaacgcgtgatgctcacggaaagatgagcctatcgcctttgtgtggcggatggatatgaactgcagcnnnnnnnnnnnnnnnnnnnnnnnnnnnnnnnnnnnnnnnnnnnnnnnnnnnnnnnnttccccccaactcttgagtttcacggaacaatctgcgatagcaaacaagattctacaggtttcatgttacctggaagcaaactattagaaagctggttgccttgcttcctgtgaaccgcacaagggaacctgagaggaggaacctggctccatctctcagggtcacggggacttgtggcttttgtacttaagaaagttatcagaccagttgattacaccatcacaacgattgcacagacgannnnnnnnnnnnnnnnnnnnnnnncctgtcggcgcctcggcctcaaactttcaaccttcttgggccggccagagtaggactggctacgttccagaactggctgaatgtgatccccaaaacgcggcacgagttgaaacagagcagctagaacaagacaacatataccgcccaagtgattatcagaccagtacatcgcctctgatcgaggaactgctagacggaaatacgagcactaacagcagtgggcctcaacacggtggtacc

SEQ ID NO: 301831 - DNA, 1014 bp, Homo Sapiens; identical to SEQ ID NO: 231908
  misc_feature (519)..(519): n is a, c, g, or t
  misc_feature (521)..(521): n is a, c, g, or t
  misc_feature (523)..(523): n is a, c, g, or t

SEQ ID NO: 301832 - DNA, 813 bp, Homo Sapiens; identical to SEQ ID NO: 33147

SEQ ID NO: 301833 - DNA, 750 bp, Homo Sapiens; identical to SEQ ID NO: 33148

SEQ ID NO: 301834 - DNA, 906 bp, Homo Sapiens; identical to SEQ ID NO: 231909
  misc_feature (321)..(432): n is a, c, g, or t
  misc_feature (501)..(517): n is a, c, g, or t
  misc_feature (519)..(527): n is a, c, g, or t
  misc_feature (529)..(536): n is a, c, g, or t
  misc_feature (538)..(539): n is a, c, g, or t
  misc_feature (541)..(547): n is a, c, g, or t
  misc_feature (549)..(551): n is a, c, g, or t
  misc_feature (553)..(714): n is a, c, g, or t
  misc_feature (758)..(758): n is a, c, g, or t

SEQ ID NO: 301835 - DNA, 796 bp, Homo Sapiens
  misc_feature (619)..(627): n is a, c, g, or t
ggggcataacctgggctccgcgcttaggcctccttcggctccccctccatgcctggtgtttagggcaggctttttagcctgccttttgccacgcacatctgggttacagcacccgggtgtctgtggcattcctggctaaagaaggtggcagaagtgacttccagctggactactgctatacagaggatgtgtcctggagctggaaagaaacagtgacccacagggaagtggacagaggattcagggattgacaagagccaaacttgagattccatctgaaactggctccagagtgacgtgtcacatccaggaccctgacacggaaccatgatactgcaggcctggagatctctgcagctgctgtacctcttagaagccatctctttactgccttgtactgaagctcttctgtgctatgaggcgacagcatcagccttcagagccgtgtccttagataactggaagtggcttctgttgacgagcatggtgtgcaatcagagagagggctgccaggaaaccgtaatgttcatcgagacggggaccagtaaagggagccctgaatttcaaaggctgcagctccgccttttctttaccctcacaaattctcctacctcctgtnnnnnnnnngggagtggttcattgccctctctaacagcgggccccggcaggttcccatcctcctgcaaacaacctatccccaacctgggaaccctttttgtggaaaaccccaagggcaatgtaaaccccaattgtcccacaattaactttccggccccaaaacgctggtcccacccct

SEQ ID NO: 301836 - DNA, 865 bp, Homo Sapiens
  misc_feature (527)..(527): n is a, c, g, or t
gggagatctatcccacgctgacacagaagctcccagaacactcaggaaacctctctggatgcagttatctttgtcaccccaaggccctctaattgtctcctagtcccgggaaggggcagagggctcacttcctcccacccagagcttttatgaatgacaatcagctcatgccaggtggggaccagggcatgatcccagcgcccagaccctgggcctgccccttgccaccaacctaactgtgagtgtatgtgcccccctcagtctcccttctgccgtaggaccaacaacacccaggtttggagattgaaagaaggggaggcctaggaaagccccgggctcaccccacccccattacagccaatgcttgagttggtacagatcagatgcgaaggccagtctacccttgggttccaggcctctgagtcagttatgtcactggattgtgcaggaaatgagggacaggggtaccaccacatggggtccgtgtgaaggtgtttaaaaataaaccttgttacctcaaacctccngggggggccccacgaaaaccgcagcctccactacccgttagttaccaccgccccgcaaccgcgtgacattaaccctcagatgacaaaatccctttgttccggcccccccggggcccctccgaaaaaaagcttttccaaaaaccattttcctttgggcccccgggcggggccccagggtgggggcaacgttggaaataggggccccatacactggttcttcccatatgagaccatccgctggcctagggaaaaaaaggggcctgggggatttctcccaccccaaaataacaaacagcgcctcggcggggaaaaacccccaggcgttcttgtgaaaacca

SEQ ID NO: 301837 - DNA, 847 bp, Homo Sapiens; identical to SEQ ID NO: 231910
  misc_feature (326)..(326): n is a, c, g, or t
  misc_feature (399)..(411): n is a, c, g, or t
  misc_feature (577)..(604): n is a, c, g, or t
  misc_feature (705)..(792): n is a, c, g, or t

SEQ ID NO: 301838 - DNA, 792 bp, Homo Sapiens; identical to SEQ ID NO: 33150

SEQ ID NO: 301839 - DNA, 159 bp, Homo Sapiens
gggagggtggtctctgagccagcaggctgagacctttggttggttcagccccattcagccaagacctcaagtctaattctcataattataaaataatcaattgctattttatactgattctgtaaaaaatgttttgtaactattaaaataattttctta

SEQ ID NO: 301840 - DNA, 706 bp, Homo Sapiens; identical to SEQ ID NO: 33151

SEQ ID NO: 301841 - DNA, 665 bp, Homo Sapiens
  misc_feature (622)..(622): n is a, c, g, or t
ggttagatgcagatatcactatcatgtctggctcagtgttcattctcaatatggcttcaggctgtgaagatgagaaaggaaaccagcagcctttccagatgtgagaagagccttgccacaagatgcttggaggaatgaatgaccagtgtgcaggacacccagatgctgtcctggcccctttggtactcagcatgtaatcttaggatcaacttcttgctctttttctaagaagtactcttgaatccgaagaacaatatcagttattatcaataatcatctgcattagagcagaacgaatacatttctatcagggaagagaaaaccacccattccatcattaagctcaacatcattttattgttttcattattatttactattggcaggtgggctgtgcatgacagtgcagatgctggggccagaagtctactccatgtagttcgttctctcctcccacctctatgtgggttccagcagtcaaaatcaggttgccaggtttgcacagcaaacaccttcaactgctaagccatcttgctggcccaaaggttggcatcactgaagcctacagttttttatggtcctccataaaagaagtgacagaagtccccattttctaccatanagcctccactttcttagaggccagtggccaagacaagtgagaa

SEQ ID NO: 301842 - DNA, 366 bp, Homo Sapiens; identical to SEQ ID NO: 33152

SEQ ID NO: 301843 - DNA, 867 bp, Homo Sapiens; identical to SEQ ID NO: 231911
  misc_feature (572)..(614): n is a, c, g, or t
  misc_feature (668)..(677): n is a, c, g, or t
  misc_feature (714)..(724): n is a, c, g, or t

SEQ ID NO: 301844 - DNA, 667 bp, Homo Sapiens
  misc_feature (545)..(554): n is a, c, g, or t
gggggtggggccggggccgccgctgaggccgccggagccggccggagccggcgctgaggaggggccatgagctggttcaatgcctcgcagttgtccagcttcgccaagcaggccctgtcccaggcccagaagtccatcgacagggtcctggacatccaggaggaggagccgagcgcctgggccgaggccatcccgtacggcgagccgggaataagtccccctgtgagtggaggatgggacacttcaacctggggattgaactcaacaagcagcgaacctcagagtcccccaacagcctctcaagcaattacaaagccagttcgaaggactgtagtagatgaatctgaaaatttcttcagtgcctttctctctccgtcggatgcccataccattcagaagagcccagtggtatcaaaacctccatctaaatcccagcggccagaggaagaagtgaaaagcagcttacaagaatcgtcatctcctggccagtccagagtttctgagacagctgaagtgagagactccgtgcgtgtttctggacagannnnnnnnnngggtactccctcacctgtaactggaagaccagcccgaatgaacccgcaggtcgagcattcctgacgcgaccgggcccacttgtccaaatttgtaggccgtcctcgcacccccc

SEQ ID NO: 301845 - DNA, 915 bp, Homo Sapiens; identical to SEQ ID NO: 231912
  misc_feature (737)..(737): n is a, c, g, or t

SEQ ID NO: 301846 - DNA, 741 bp, Homo Sapiens; identical to SEQ ID NO: 33156

SEQ ID NO: 301847 - DNA, 816 bp, Homo Sapiens; identical to SEQ ID NO: 33158

SEQ ID NO: 301848 - DNA, 742 bp, Homo Sapiens; identical to SEQ ID NO: 33159

SEQ ID NO: 301849 - DNA, 796 bp, Homo Sapiens
  misc_feature (617)..(617): n is a, c, g, or t
ggggtgcacctgaggagcaagggaggcggacgattcaggaagatggcacgcaccaagcagacggcacggaagtcgacgggaggcaaggctccgcgcaagcagctagccacgaaggtggcccgcaagagcgccccggccaccgggggcgtgaagaagccgcaccgctaccaccctggcacggtggcgctgcgcgagatccggcgctaccagaagtccaccgagctgctgattcgcaagttgccattccagcgcttggtgcgtgagatcgcccaggacttcaagaccgacctgcgcttccagagctccgcggtgatggcgctgcaggaggcctgcgagtcgtacctcgtggggctgttcgaagacacgaacctgtgcgctatccacgccaagcgggtgaccatcatgtgttgacacagcactcccagctgtccttcctctgcccttcacccagcagccccgagctgctgagatgaatgacgcactggtgaccgggagcagggatggggctagataccaaagagctactggcctcgtctcctgggctctgggagaagatgtggcttgctagacttcaggtgcctggaaccctgggacttggaattgtcatattcatttgntttgtttgtttggctcaatttgtttgttttaagaacaggtcttcccctgtgtaaaccctgggctgtccctggaaccttgcttctaaaagatcagggctggcctccaaaactcaaaagggtttgcctggcctcttgccctttttgaaggcctgggaatttaaagggcatggtgcccaccc

SEQ ID NO: 301850 - DNA, 491 bp, Homo Sapiens; identical to SEQ ID NO: 33160

SEQ ID NO: 301851 - DNA, 823 bp, Homo Sapiens
  misc_feature (705)..(778): n is a, c, g, or t
ggggatttaaaaggagggagttatggagagccttttggggtgccacttggcaggaatctgacattggccatgacaaggaaatgagctccaggcaggaatctgacattggccatgactgggatgtaagctcagacaggaatctgacagtgaagccaccactgacccggagaaccaatgtcacatggacggccaacactgcctgtagccactgctatactgcgtggactccatccgctgacacctgccatcattcaccacgtggattgtcagtgctgctgcaggccatggctgctgcggccacgactgctatgagactcacagacttctaccacctcctgttgcaggattaccagccactgtccacagaagaccagctgtccacagaggaacctgatgctaatgtttaccaagtggatcctgatggtgaaagtcagctacaccccaaaactgacgacgccccaagacagcaggaggcagcttaagagacaggatgcccctcattctcttttcaccatcagcttccccctccctttccccccacttctctttataataacaagacaggagctctgttgggtatcaggacccccggaccctcccgaaccccacgtacatccccatggggtggggaacctgccatcccctgttttcccagggtaaccactccccccatttttcccacaactctattttgggcttaccctnnnnnnnnnnnnnnnnnnnnnnnnnnnnnnnnnnnnnnnnnnnnnnnnnnnnnnnnnnnnnnnnnnnnnnnnnnttttcgctatcaccaccctcttctcttttctggccaccccacgtt

SEQ ID NO: 301852 - DNA, 1024 bp, Homo Sapiens; identical to SEQ ID NO: 231915
  misc_feature (121)..(122): n is a, c, g, or t
  misc_feature (158)..(158): n is a, c, g, or t
  misc_feature (276)..(316): n is a, c, g, or t
  misc_feature (389)..(399): n is a, c, g, or t
  misc_feature (417)..(476): n is a, c, g, or t
  misc_feature (862)..(870): n is a, c, g, or t

SEQ ID NO: 301853 - DNA, 624 bp, Homo Sapiens; identical to SEQ ID NO: 231916
  misc_feature (260)..(346): n is a, c, g, or t

SEQ ID NO: 301854 - DNA, 786 bp, Homo Sapiens
  misc_feature (666)..(666): n is a, c, g, or t
  misc_feature (668)..(668): n is a, c, g, or t
  misc_feature (689)..(689): n is a, c, g, or t
ggggggatcctctgcgaaccaggtcgtgctgaggctacactagtctccagggagtaagcgtgcgtctctgggcctttaaacatgcttcagcctcaggaaactttctcgaaccctgccttacgcgacgaagacaaacatttgggaaatctgtgggcttctaagaaatcgctgtataagaacccagctcaccttgcgcaacagcaggatccctggagtcggctcagctcaacccccacagccacgtccagaagtcgagacaccttttttgattctaagataccaaaggatgacctggacttccgcttagcaaccttgtataaccaccacactggggcattcaagaacaaaactgagatattgttacaccaggagaccattgaggatatccagggaaccaagatccagtttcctggagaatgtttccacgctccttcagcccccattacttcccggaccaccatcaggcactggatcaaccctaagaaagagtccatccatagcattcagggatccatagtgtctcctcacactgcggccaccaatggaggttactcccggaaaaatgatggtggcttcttctccacctagtggtgacaaccaggctaatttccacatggtggaacatccagccacccatcttcattaataagtttgttcacgatgaananataacccccattatttaaacnaatccccttgtcgggcgccctcggcccctcgaaaaagctttctaaaaccattcccttttgggggccccggggccccgttagggtaaggggaaccttg

SEQ ID NO: 301855 - DNA, 764 bp, Homo Sapiens
  misc_feature (595)..(595): n is a, c, g, or t
  misc_feature (717)..(717): n is a, c, g, or t
gggagtgcgaggagcagggtgcaggcagaactggtccagtcttgctcctacagccccagcatgagtccatctacaaagaagaggccgagggataaagtgccttctaagatgcaagatgagaaactgcaggacaagataacccagcatgtgagcaaagtgattgagcggaatcgacttaaaatggtattaaaaaacttgtccctcttgaagctattcaagagctcaaatagccggatccaagaactccataagctggccagaaggtgctggaattcaatgctcagagttccaaagatcctgcaaatctcttctagggacaaggacaaagtgaaacaaaataatataaaattccaagagattagggtccttgaaatgagaccaaattctaagaaggcagagtccgtaaaggaacccaagcaaaaaacatccaaaaagtggaagcccaagcaaggatctaaggggtcacctgcagccgtgacatggagaaaaaagcaggaaacatttaaaatctccaaggtaataaagagtggtggcttgcaagccagggcccagaagaggaagacctacgttaagaagccccgagttgtcttcttanagacctaccatcacagcactaccatgggggaagatgaaggcactggatataactgaccagttggtctgggttttgagggcttcccacacgcatacacatcccagggcgccggaatcatgtgntagatcgtctacctaccggtgcctcaagcgctcctgcaccccgtttc

SEQ ID NO: 301856 - DNA, 836 bp, Homo Sapiens; identical to SEQ ID NO: 33163

SEQ ID NO: 301857 - DNA, 595 bp, Homo Sapiens; identical to SEQ ID NO: 33164

SEQ ID NO: 301858 - DNA, 792 bp, Homo Sapiens; identical to SEQ ID NO: 33165

SEQ ID NO: 301859 - DNA, 798 bp, Homo Sapiens
  misc_feature (653)..(665): n is a, c, g, or t
ggggtggagctgctgtccagatacagatcatgagtggtgggtacgatctcaacctctttgccagccctcctgactgcaagttcctgtgttctgtctgccatggggttctcaagaggccaacgaggttgccgtgcagtcacatcttctgtaaaaagtgcatcttcaggtggctagccagacaaaacacctgtccatgctgtagaaaagaggtgacaaggagaaagatggtcgaagtgaataaactccgaaaaaccattggccgcctacaagtcaagtgcaagaacgctgcagccggctgcttggacacacaccctctggctcatcgcaaggagcatcaggactcatgcccctttgagctgatggcctgccccaatgagggttgcactgtgcaggtgctgcgaggtgtcctggatgaacaccgccagcattgccagcagaatggacagcagcgctgccccttaggctgtggggcccaccctggctgcctttggaaaggtgagcaccacaactgctaccgggagctacttgatgccttggtcccaacccatgagcgcaaccggaacctgcttgctggcccttcctggggcccggttccacccggcgcacctttaatcttagccttttttccccccttctgccttgccataacttgnnnnnnnnnnnnnggaatggttcctgtattaattcggctcccgaaatcgcccatggggagaataaaattccgcggataactcccgaaatagccttcacaccgcgcgggcgttcccattagcgcttccgcctagcccattacccgca

SEQ ID NO: 301860 - DNA, 841 bp, Homo Sapiens; identical to SEQ ID NO: 231919
  misc_feature (357)..(432): n is a, c, g, or t
  misc_feature (450)..(459): n is a, c, g, or t
  misc_feature (688)..(698): n is a, c, g, or t

SEQ ID NO: 301861 - DNA, 669 bp, Homo Sapiens
  misc_feature (204)..(214): n is a, c, g, or t
  misc_feature (521)..(521): n is a, c, g, or t
  misc_feature (538)..(538): n is a, c, g, or t
  misc_feature (547)..(547): n is a, c, g, or t
  misc_feature (556)..(556): n is a, c, g, or t
  misc_feature (622)..(622): n is a, c, g, or t
gggggttccccctggtatcttttcattttccatcttatatgaactgagcaagactatataaggtgtaaagtcagcgaacttttactaaatattattttttggcatttaaaagaaaatcggacttttcgttgtccaggataggacttgctatgtggtcagtgtcagtgcgtgtttatgtttagggttttggttttgactttacannnnnnnnnnnaatgttttcagtgtcctttattccaatgtgatacatcttattatttccacaacgttgattctgaaatctccttacagtctgattaaaactagactggtagttttacagtaattttctaaaaaggagttagatatagccaagcttgatttaataaaagtccaaatataaacattgttgtttacactgaaattatcagatgcagcttttcagccgtcctggttcatcatgtgattgagtcgagagtagccagctcagtagaagcatgtgtcagctcagtgtcagcctgcgtgcggaagggtggaggtanagaacctataggcgcgntgaggttgntgatcttangaaaatcagtgctaataaagatacatgcttcgtgttcataataaaagctacatttttaagagaacnatccccccccactccacctattacatccctgtcggcccgcccccgcc

SEQ ID NO: 301862 - DNA, 786 bp, Homo Sapiens; identical to SEQ ID NO: 33168

SEQ ID NO: 301863 - DNA, 896 bp, Homo Sapiens; identical to SEQ ID NO: 231920
  misc_feature (105)..(117): n is a, c, g, or t
  misc_feature (221)..(229): n is a, c, g, or t
  misc_feature (545)..(546): n is a, c, g, or t
  misc_feature (549)..(550): n is a, c, g, or t
  misc_feature (627)..(627): n is a, c, g, or t
  misc_feature (782)..(782): n is a, c, g, or t
  misc_feature (816)..(816): n is a, c, g, or t

SEQ ID NO: 301864 - DNA, 166 bp, Homo Sapiens; identical to SEQ ID NO: 231929

SEQ ID NO: 301865 - DNA, 292 bp, Homo Sapiens
gtcgaggaaaggaggtctgcctgaaaaggagccagagtggttccgcccagactgacgtgcttctggcagccggtgtgtactgcttggtgactgctctttcatttcaggtggtgatttaccaaatgccgctttttttctgtatgacacaggcgtggccaaacatagtcaccactcagaatgttggggaagtttctcgtccccatcaaacagagggagcaacccttggtggttcaacaatgaagcctccattagctgagaagtctaactgtgatttatcattccctacctaaaa

SEQ ID NO: 301866 - DNA, 338 bp, Homo Sapiens
gggatgagagatcggtattttaaatgcgctgcaagattggttttaactggagattttgcatatcaatataattttctgatcagttaaattaaaacaaaaagcatacagtgtccacagatgaaaggattaaatcatttagcgttgtttttctctgtttgttaaagaataatcttattaaattcttacacaaagtgtggcaaatataaaatttgcttgaaaatatatcttagaaattaaacttttaatttaattttctacagtatacttatgccacaatgtacgtttccatgcaaaatcttctgtttgtaagtgtgaacattaaacattgcaaaatagta

SEQ ID NO: 301867 - DNA, 678 bp, Homo Sapiens; identical to SEQ ID NO: 231933
  misc_feature (81)..(304): n is a, c, g, or t
  misc_feature (364)..(373): n is a, c, g, or t
  misc_feature (533)..(542): n is a, c, g, or t

SEQ ID NO: 301868 - DNA, 388 bp, Homo Sapiens
ggtgtacataatacatgtgaccttggaattcaatagaattttcgaaactagaagtaactcagaacgttcactagatgtgttttaaagtctttttttgatactgtccttaacatttgcttatttgcaaattaatatgtaagaatgagtctaaaagtaagttttaggaatggttattcgacaaagatgttattcctattaccaatactgcgaaatgataattacagaaacaatgtgggatccgttttataacttcaaatttaagttcctttgtactttggagcagaaaatgtaagaaatcgaaatcaagagttagtattttttatctttcaggctggctttaactgttcatacacctagcaaaataaacatttgtgaaaggcgttaaatg

SEQ ID NO: 301869 - DNA, 404 bp, Homo Sapiens; identical to SEQ ID NO: 33174

SEQ ID NO: 301870 - DNA, 406 bp, Homo Sapiens
  misc_feature (168)..(219): n is a, c, g, or t
  misc_feature (228)..(322): n is a, c, g, or t
gggaggtgaaagatcttgataccacacaggtataattacaatctgcaaacctactcaaggggagttgcaggtgaagataaggaagtcagcctcattccattacctaatcagattctcagccaaagacaaacagcaacatatgggactttaagggtctcgctctgtcannnnnnnnnnnnnnnnnnnnnnnnnnnnnnnnnnnnnnnnnnnnnnnnnnnntggactcannnnnnnnnnnnnnnnnnnnnnnnnnnnnnnnnnnnnnnnnnnnnnnnnnnnnnnnnnnnnnnnnnnnnnnnnnnnnnnnnnnnnnnnnnnnnnnatgagccacagcaccttgcttattcttttgtttgctattaaaatataagcattttctagtcaataaaaattaaccaagaacatg

SEQ ID NO: 301871 - DNA, 112 bp, Homo Sapiens
ggcatttagtgaggagtcacacagaacacactcactgtgcaaaatcagtgtacttgcaaacaagagttgaacaagaggcaggctcacacaaatgagaggttatcccttagag

SEQ ID NO: 301872 - DNA, 147 bp, Homo Sapiens
ggaagaccagtgaatccgaaggtggaccaccagctgagggactagattccagactgaatagaacaactttccctgtctctccacataaagtgtgtttgtttttcctcttacaggtttccttaatgacaacaaaaaagggagtaatcc

SEQ ID NO: 301873 - DNA, 144 bp, Homo Sapiens
ggcttatataagaggaattattcaatatttgtccttttgtgattggcttacttcatttagcaaaatgtcatcaaggttcatctatgtgatagcatgtgtcaaaacgtctttccttttaaaggctgaatcgtgttccactgtaat

SEQ ID NO: 301874 - DNA, 262 bp, Homo Sapiens
  misc_feature (119)..(210): n is a, c, g, or t
ctgcaactcctgtgcacaaaggaagggccctgggtaggggtcaggagctgccttgcccagagatgtgtctgggtcactttggaaacaggaatcctctccccaaaatgggtagcaatggnnnnnnnnnnnnnnnnnnnnnnnnnnnnnnnnnnnnnnnnnnnnnnnnnnnnnnnnnnnnnnnnnnnnnnnnnnnnnnnnnnnnnnnnnnnngtgtcagactcctgctaagagacagtatcaagaaagataacttcaaaataca

SEQ ID NO: 301875 - DNA, 104 bp, Homo Sapiens
ggagttttttgttaaaccaggttctggaagacttaactttataagaaatgaacatatattctgtgtaattttcccatcacattaataataaatgtttcagaaat

SEQ ID NO: 301876 - DNA, 123 bp, Homo Sapiens
ggttacctgttttcagctgaagaatgtgagatgaagccttgaaaccctaaaagtgatatggtaactagggcaggtctttctgtacataaaagtgacttaataaacagtgaatttcatacaggt

SEQ ID NO: 301877 - DNA, 641 bp, Homo Sapiens; identical to SEQ ID NO: 231946
  misc_feature (140)..(259): n is a, c, g, or t
  misc_feature (391)..(399): n is a, c, g, or t
  misc_feature (500)..(509): n is a, c, g, or t

SEQ ID NO: 301878 - DNA, 327 bp, Homo Sapiens
ggattttcaacacatacgctttttactggtttatactgaactatctgatgagaattcctgtgttcccaaagcaactgatgtttacaggtcttgtgtttctcctcctcctttctaaggatgagggaatccacaacagactttctctagaaaacactaatgatggacaactttttggtgtcatcaatgagttggctactaccttgatgtaaaaatttgtaaggaaaattttcaccatttcgagtgtcaagtgtatttttaactgtctggtttgtacttttatgacttttgtactaccaaagcggagttaaaaataaaaatgttaaacgc

SEQ ID NO: 301879 - DNA, 463 bp, Homo Sapiens; identical to SEQ ID NO: 231950
  misc_feature (47)..(203): n is a, c, g, or t
  misc_feature (258)..(376): n is a, c, g, or t
  misc_feature (396)..(416): n is a, c, g, or t

SEQ ID NO: 301880 - DNA, 171 bp, Homo Sapiens
gggagagccgagtcgaaccgagccgaggctaacagtgccttacctgacacgggcgaagagctagaaggccccgggcgagaagaccactaggcctcctccgcctggcctccccgaccccaacgctgcccggtcaccctctcgtttatttcaacgtatgaaaagctgtttcta

SEQ ID NO: 301881 - DNA, 264 bp, Homo Sapiens
  misc_feature (160)..(175): n is a, c, g, or t
ggaaggactggtaaataaaggttagagggtaacttagaatccagaagcagactgaaactgattctgctagtaaactgctgaaaagtaggggagaaagagggagtgtgtgtgcatgcaagagaaggtgagcatataacaggtaaataacagaagctctgannnnnnnnnnnnnnnnatagtttgggactattcatccagcaagagaaggacgcttaaaagtagatttatcagagcttgatgccacaaaattaagatatactatcc

SEQ ID NO: 301882 - DNA, 294 bp, Homo Sapiens
cagagaagcctctgttctctctgccgcgctgtggcgtctcacctagacacctggcccctgaagcagagatctgtctgctgccaccacagctcctctctccagactgttcagatctggtccctgtaggatggaagtgcacacactgtctctgcctgtccccagggagcaagatgtaaacttcctccttcatcattcgggcaaaaactgaataaatagatgaacaccaaattatggaaatcttcattatgcaggccaggttgccaaacatgcccagacctgcttaagctgagaagt

SEQ ID NO: 301883 - DNA, 782 bp, Homo Sapiens
  misc_feature (55)..(193): n is a, c, g, or t
  misc_feature (323)..(391): n is a, c, g, or t
  misc_feature (659)..(667): n is a, c, g, or t
ggggttttaagtcaggaagcagcatgactaggttttcgatatagaaagatctctnnnnnnnnnnnnnnnnnnnnnnnnnnnnnnnnnnnnnnnnnnnnnnnnnnnnnnnnnnnnnnnnnnnnnnnnnnnnnnnnnnnnnnnnnnnnnnnnnnnnnnnnnnnnnnnnnnnnnnnnnnnnnnnnnnnnnnnnnnnagaggtttggggagtgggttcactctctcttgctcttctgctcttttgccatataagaacatagcattcctcacctttgaaggacacagcattcaaagagccatcttggaagcagagaaaccaggccgtnnnnnnnnnnnnnnnnnnnnnnnnnnnnnnnnnnnnnnnnnnnnnnnnnnnnnnnnnnnnnnnnnnnnncttctagtctcaggaattcccttacagcaacacaaaatggactaaaacactgcttgcagaatggaggatgggttccaactgaaccaccaggatgtccagaccaaacagggtggggatgggctaggactagaaggatacctagaaggtacaattagtggggcggggacggaaaaaagggaggtgtgccttattgcaccaaagacttggggcatggggggctggaaaaaacacctgagaattgggtaatccaagagggagggttttgaannnnnnnnnagtttgcctggaagggaaaatggatgtcccagcttaacaattattgttggtagaaaccttaccgaaagaaagccttcgcgaaaaggaagcggtcttttgtaacgtacgtttcgaa

SEQ ID NO: 301884 - DNA, 569 bp, Homo Sapiens
ggggctctcctaggagacctgaaggctgcttccgctaacccgggctggcgctgctaacctcacccaacgatccctgctgtcggaaaatgtccagaggcaccatccctgctatgaagagggaatgccagtacaacagccacaaggggtcttcctgtggccctcaaacaaaaaatcactgcattacatcagcagactgcattggagagaaaggcgccgggacagaaaagcctgagataaaccacctgtcattcttggagaaaaggatgctgcggctttcccgatttggttgatgagatggaaaatcaacccttacaggaaggacatcaccaattccggaaaggatgctgcgccagtcatgtttccgcactctgtgagacgttgaaatctccagaagttgcccaaggtttttcaagctgaacacaggagaaatgactctggatctctgaggactgttctcctcaataaggagctgcaatcttggctccaccaccctccctccaaaacatctcgtgtgtctggtatctggttatattgtggcctgacagagaagttttcttttcgggcccgcc

SEQ ID NO: 301885 - DNA, 1016 bp, Homo Sapiens; identical to SEQ ID NO: 231956
  misc_feature (530)..(530): n is a, c, g, or t
  misc_feature (610)..(610): n is a, c, g, or t

SEQ ID NO: 301886 - DNA, 885 bp, Homo Sapiens
  misc_feature (310)..(381): n is a, c, g, or t
  misc_feature (489)..(548): n is a, c, g, or t
  misc_feature (569)..(569): n is a, c, g, or t
  misc_feature (576)..(576): n is a, c, g, or t
gggagacaagcggctgaacatcaagaggagaagaagcaactgagtgtcagagatgtggcttaacttcaggtggcatgacttcagggaggagcccggccagagacagcaggcttcagggaaaggtcactttcttcctgcaccatcccctttgcagctccccttccactgagagccacttccaccatttaataaaatcgtccacatccatcaactttcaaaccattcatgcaacctgattcttcctggatgctgaacaagaacctgggtaccaacagggcagggtgtaaaaggctgccaccctgactctccnnnnnnnnnnnnnnnnnnnnnnnnnnnnnnnnnnnnnnnnnnnnnnnnnnnnnnnnnnnnnnnnnnnnnnnnaatgctgctgttgggctggagcccaaaagtgctcatcgaagccctggcacccacttgcctgcgtgctcccgctcccacagagagtttgagcatggtggtgggccagtnnnnnnnnnnnnnnnnnnnnnnnnnnnnnnnnnnnnnnnnnnnnnnnnnnnnnnnnnnnngaagtatggcaatttcttatnaaattgnacataggggttactgtacaaacctggcaatttcactccctaggcatttagccaagtggaaacttatgtccctctaagactgtggtgtaccaattttttatatggggctttactccataaatagcccgaaatacccctggaaaatagccccaaactggatctttcatttgaggtggaatgcttaacataagcctctggggtttaatatttaccctcccccaccaacaggaaatcccgggacccttcctttgggaaaagaggagggggaacctattttaattaccgtggccacttaaccttttggggaacc

SEQ ID NO: 301887 - DNA, 884 bp, Homo Sapiens; identical to SEQ ID NO: 33180

SEQ ID NO: 301888 - DNA, 634 bp, Homo Sapiens; identical to SEQ ID NO: 119577
  misc_feature (453)..(454): n is a, c, g, or t
  misc_feature (459)..(548): n is a, c, g, or t
  misc_feature (556)..(556): n is a, c, g, or t
  misc_feature (574)..(574): n is a, c, g, or t
  misc_feature (577)..(577): n is a, c, g, or t
  misc_feature (579)..(579): n is a, c, g, or t
  misc_feature (585)..(585): n is a, c, g, or t

SEQ ID NO: 301889 - DNA, 712 bp, Homo Sapiens
ggggctcaggggatggcggagctgtgaaactcggagctagaaggaaagtctcaacgcttgtctaaattttgctttgtcgtgacgagctacctagacccacgcagagctaacttgggagagcgcttgtgacgctacgaacctctcgaacacctgacgactgggcgccagggccggatggagggtggagagccagtgcggcgcagctgcctcctcttaacggggacaccttgcaggaatgtgcggagtggagctaacgggagcggatagaaaccgagggaggggaagagagcgcgaaggcttggccggaaggagaggttaaaaaggaaaggcctaaaatgaggaagagagttaccacaacgagcagtacctagttccagttcttggtcccaggagtttgtggttgttgctgctttcatcttcctcagccaacacaaaaggaaagtgccaaggggcgattcctaggaccttcagtgcagtctccaccttgcggacttggctcatttgtgtccactcctttctccagccttttacacttgatgctcttggatgaatagaaaggagcacaattaatggaaaacacaagcttgggagtcaagggatttgggttctattcctgtcctcccttggtgacgacatcattaccttggggttatttcagctttcagtgccagagttccctatatccataaaagattattacattgacctcctt

SEQ ID NO: 301890 - DNA, 559 bp, Homo Sapiens; identical to SEQ ID NO: 33183

SEQ ID NO: 301891 - DNA, 866 bp, Homo Sapiens
  misc_feature (726)..(755): n is a, c, g, or t
  misc_feature (828)..(828): n is a, c, g, or t
atagacggacttgccatcctgcaaagacctgaggaaccatcctttttctcagagtcctctcaagaaaaagaagtctctgcaacttggagcaatctctaagtagctgtctgagccccctggaagagggctgttgtgggcagctgcattcagtgtgagcaacctggagtgggcctgacctcctgctcgttcccaggttcaggcctggaagagggagttggaggcatgagagaagccactgtggggagagcacctggttcttccaaggctcggggcatgtgtggtccctggctgacttgggtgtcctctggtgtgtgcggtcagtcttcttctgactgtggatgccaaagggggagggccctttatctcttagcggatgactcatctcttcgcgcatgactcatctctttgtgcatgactggatttattctccccgtgtcatggtgggtcctgtgcataactgaagctcaatgaaatatttggcttggatttccagggaatggggtttagccctaaagaatgcctaccctccctggggaaagccccttgaggagggaagggatagtttaaaaaaatttccattatcaaccccaagggaagggccttgggccctttggccctccttttgtgggtaccagggggaagggcaaattctttccttaggccttcctgggaatgggcacatggccctccaataagggggggccttcctttatattttcgcgcctnnnnnnnnnnnnnnnnnnnnnnnnnnnnnnacaaccaaatttcctggctccccctaaaaaggggcctcgaggaaccacacaagaggccacccccccttggggngggccaactattttttaaaagtggaacctcccacgcgt

SEQ ID NO: 301892 - DNA, 862 bp, Homo Sapiens
  misc_feature (437)..(491): n is a, c, g, or t
  misc_feature (814)..(814): n is a, c, g, or t
ggcaccaaggcctacccctccttcccctgtgccacctgcaacactactcacggtgccaccaaggcctacccgtcctaccactttgccacccacaccactactcacggtactacaaaggcctaccgaacttcaacccacaccatcaccaccacgcatgcatctccctgtcttgcatgtgccagaccaatcaatgcaccctcttactcatcaaagcaccccaaatgatccagatagtccagaaccacggtccccgactgtattttataacattccacctatgccattacccccctcacaattgccaccaccagcagcaccagcacagccacctccaggggtcatcaacgaccaacaattacataatctaccctcggggccaccatggtggccacccatctgcgaccccccgcaaccctctaagactcaaggccagagcnnnnnnnnnnnnnnnnnnnnnnnnnnnnnnnnnnnnnnnnnnnnnnnnnnnnnnnagtccagggacaagcaacgcaagcccggtggaccatggagaccagagccaaacacctccagtcctagcatgcctgaactaagtccagtcctccggtcttcatcagggacaaggggctggggaactcaccaactcctggcccaatccaatgccgccccccggttgtagaaaattccacacacagcaaaacccctaaagggtttcaccaaataacatgggaaccgggaggtcccctataataagcaagaaggcgtccccatttcttctttcccccggaggaattggggaattccctcccatctcttaaaggaccccccgcgcaanacttttaaacaccaaaagagttgggggaaattacacattttttttgag

SEQ ID NO: 301893 - DNA, 980 bp, Homo Sapiens; identical to SEQ ID NO: 33184

SEQ ID NO: 301894 - DNA, 680 bp, Homo Sapiens; identical to SEQ ID NO: 97970
  misc_feature (353)..(547): n is a, c, g, or t

SEQ ID NO: 301895 - DNA, 998 bp, Homo Sapiens; identical to SEQ ID NO: 231963
  misc_feature (102)..(158): n is a, c, g, or t
  misc_feature (189)..(189): n is a, c, g, or t
  misc_feature (195)..(195): n is a, c, g, or t

SEQ ID NO: 301896 - DNA, 790 bp, Homo Sapiens; identical to SEQ ID NO: 33186

SEQ ID NO: 301897 - DNA, 963 bp, Homo Sapiens; identical to SEQ ID NO: 231965
  misc_feature (583)..(629): n is a, c, g, or t

SEQ ID NO: 301898 - DNA, 552 bp, Homo Sapiens; identical to SEQ ID NO: 231969
  misc_feature (144)..(144): n is a, c, g, or t
  misc_feature (260)..(260): n is a, c, g, or t
  misc_feature (326)..(326): n is a, c, g, or t

SEQ ID NO: 301899 - DNA, 761 bp, Homo Sapiens
  misc_feature (668)..(668): n is a, c, g, or t
  misc_feature (696)..(696): n is a, c, g, or t
gggggccaaaaagtaaccttctgctcaaacagtacttttagctatgatgggttcatggaggtttgccaggagctctgggacacaaatgggcgcagcaagctgaaagcagggaagggaagggaagctctgctcagcaaagcacaaaaaggcatccgggaaggggccaagcaaaagctgcaggtggctgtgcccagagagcaaggtagcttcaccaagcataaggccagtggggcaaggtttctgtctgaagtgtcaggactgtcctatctgcagtgggaagcagccgcagagagggatgggtgcatttgagctcaatctctagtatcaaagctcagccgaacctggagaagaagccacccagggacgaattccactgctgagatcatccaggacttagctctctgcccactccctttagagttagaccctgacccagcagccaggcctccagcttcagaggagagaaagattccagtagcttccatgtgataggagcaacaaggccaagagaaatgggcaacctggtcatactttgtgggaagatcagaacaaccttttaggagagctattgtcatacgtaccaaacgccttcaaatttgacatttcctgtgatgaaatcattctacttctaggagtgtttcttaatgtaatatcaaagacgtggccanaaatcaactagaaagaatgtccactgtngatttttaatgttaaaactttaagaaatctaaaccttcaataatggccaatggttcaatgactta

SEQ ID NO: 301900 - DNA, 651 bp, Homo Sapiens; identical to SEQ ID NO: 33188

SEQ ID NO: 301901 - DNA, 555 bp, Homo Sapiens
  misc_feature (145)..(153): n is a, c, g, or t
  misc_feature (354)..(354): n is a, c, g, or t
  misc_feature (489)..(489): n is a, c, g, or t
tggctgacttctgtctttatagataagctacctttctcccagctctggtgaatgcatctatctggtcactgaattcaagctcttcttgtctatcaccaatattctttcaaaattaatttattcatccaatgaactactagttaannnnnnnnnccaaagaaaatggtaagccaatgttagaccgcacatggaagatgtaaaaggtacaaaaatagccaaaagaactttaaaatgcttaaaacagaagacaaagacgaagatgtcaaagataaagacttaaaagtaagatttcaggagaaaatgtagaattacattatcacattatggtaggtagaatttttaaaataagacgtnaaatgcataaatcataaagaggattgatacagttatttacctcaatattaatcgccacaagacaagtaaactactctaaaccaactaaaatgtcaagacatatgtttggagaaagtattaagtcataaaacccantaaagggttttgtgccgaataaaaaaataattattctttgaaacagattaggacggacccgaaaac

SEQ ID NO: 301902 - DNA, 890 bp, Homo Sapiens; identical to SEQ ID NO: 231976
  misc_feature (302)..(350): n is a, c, g, or t
  misc_feature (386)..(468): n is a, c, g, or t
  misc_feature (567)..(673): n is a, c, g, or t
  misc_feature (728)..(728): n is a, c, g, or t
  misc_feature (749)..(749): n is a, c, g, or t
  misc_feature (754)..(754): n is a, c, g, or t
  misc_feature (756)..(756): n is a, c, g, or t

SEQ ID NO: 301903 - DNA, 1250 bp, Homo Sapiens; identical to SEQ ID NO: 231982
  misc_feature (664)..(664): n is a, c, g, or t
  misc_feature (1205)..(1205): n is a, c, g, or t

SEQ ID NO: 301904 - DNA, 640 bp, Homo Sapiens
  misc_feature (211)..(272): n is a, c, g, or t
  misc_feature (285)..(474): n is a, c, g, or t
gggcctgctggcctggagctgattgacgctttcctgccccagcagttgagaagtccatttatttccctccaggggcctcacagacccatttaccccagagctgtgggtctgggggattcaaagagagacctggtgactgtgacagcctctggaaacctgagtcgacattgtctgctgggcattagtggtgatgccccagagacaggatctnnnnnnnnnnnnnnnnnnnnnnnnnnnnnnnnnnnnnnnnnnnnnnnnnnnnnnnnnnnnnntgtgctcaagcannnnnnnnnnnnnnnnnnnnnnnnnnnnnnnnnnnnnnnnnnnnnnnnnnnnnnnnnnnnnnnnnnnnnnnnnnnnnnnnnnnnnnnnnnnnnnnnnnnnnnnnnnnnnnnnnnnnnnnnnnnnnnnnnnnnnnnnnnnnnnnnnnnnnnnnnnnnnnnnnnnnnnnnnnnnnnnnnnnnnnnnnnnnnncgccttgtgagctaatttgcaagaatggaacaatgaagactcctagacctactcacctgccttaaagatatgctattgtccccccacagaggtggccaaatgggtttgtaattttggtcttaggccttggacttttaaaaaccctggattttgaatgggtggtgcc

SEQ ID NO: 301905 - DNA, 670 bp, Homo Sapiens; identical to SEQ ID NO: 33197

SEQ ID NO: 301906 - DNA, 804 bp, Homo Sapiens
  misc_feature (219)..(233): n is a, c, g, or t
  misc_feature (248)..(465): n is a, c, g, or t
ggtcaccagctcagtcacgtctatcttacaaatccccatctagcaggaagcctgctctgcccttggactatagacctgaagggctgttgttaagttacaacgttcccagtggaaggaggacagtacttaaaagttacaagatgtgggttctgttcttagttcttatggcctgtcagccagggaactcctggccagtagtctcatccttgaacttcttcnnnnnnnnnnnnnnnctcaagacggagtcnnnnnnnnnnnnnnnnnnnnnnnnnnnnnnnnnnnnnnnnnnnnnnnnnnnnnnnnnnnnnnnnnnnnnnnnnnnnnnnnnnnnnnnnnnnnnnnnnnnnnnnnnnnnnnnnnnnnnnnnnnnnnnnnnnnnnnnnnnnnnnnnnnnnnnnnnnnnnnnnnnnnnnnnnnnnnnnnnnnnnnnnnnnnnnnnnnnnnnnnnnnnnnnnnnnnnnnnnnctcatccttgaacttcaaatttccaccccaccttactcccacaggcatataccagttgttcctttttctctgttcttatgcaggaaatggcctgaggtccaggagtccccttggtccccctttttccctcactctcaacattcaattagtcttcacatctacagccgacaattgtaacttcttttctttactcattatttcctaagtgacaacaggagcttcctttgggggcctccctttttctaaaaccctaaattcgaaactcttacgggtttagatctttccttacttaaaaccccttttcctgggccccctaaacctactgaaagaaattcttag

SEQ ID NO: 301907 - DNA, 1037 bp, Homo Sapiens; identical to SEQ ID NO: 231992
  misc_feature (109)..(383): n is a, c, g, or t

SEQ ID NO: 301908 - DNA, 1280 bp, Homo Sapiens; identical to SEQ ID NO: 231994
  misc_feature (540)..(540): n is a, c, g, or t
  misc_feature (707)..(707): n is a, c, g, or t
  misc_feature (748)..(748): n is a, c, g, or t
  misc_feature (1050)..(1050): n is a, c, g, or t
  misc_feature (1134)..(1134): n is a, c, g, or t
  misc_feature (1232)..(1232): n is a, c, g, or t

SEQ ID NO: 301909 - DNA, 840 bp, Homo Sapiens
  misc_feature (670)..(670): n is a, c, g, or t
  misc_feature (732)..(743): n is a, c, g, or t
  misc_feature (749)..(749): n is a, c, g, or t
  misc_feature (753)..(754): n is a, c, g, or t
  misc_feature (760)..(762): n is a, c, g, or t
ggagaagcgggcggggcttcggcctcttcccggctcccgccagctccgtggagcctggagccccagccgcgcctccctggctgcagctgctgtattcacagcagccgcttcaggcgggccgccacggcgatcagtttttcatggcctccaggttctgatgaagcgtgggattttctgccctgtacccctcagaacaagaaaccaccttactgcagtctgtaagtggctcctcagtaacagggcacccacaactttcatggcatccgcccgttacttttgtgtcttcccttctgtgtgtgggaccaggaacctgtggagctggctctcagcttactgctctttctgctatgtaagcgatcaactgtctgactctaaaagtgactcgtatttttccctttgaatcagacagaccctgatctgggttttgctttgtgttttatgtgtgagctttatactctgaagtcgctttatattttattttttcatttattaacaaatatttctatcatatttcctatggaccaagcactttacaaagtattaatacatttaatacttggtataaccctataaaggcagtgctattatcacccctcactttaaaaatgaggaagcaaagccctagagtgggtaagaaacttgtcccagattacacagccagtggcagagntcagatgggcctcctcttggagtcaaaggctctttacaccactgtggttttggctgcccccnnnnnnnnnnnnagaggngagnnaggggnnnccctttggccggcccgcccctcgggccccttccaagaaagcttttttctaaaaacacattccccttgtggggcggcgc

SEQ ID NO: 301910 - DNA, 216 bp, Homo Sapiens; identical to SEQ ID NO: 231995
  misc_feature (42)..(42): n is a, c, g, or t
  misc_feature (53)..(54): n is a, c, g, or t

SEQ ID NO: 301911 - DNA, 398 bp, Homo Sapiens; identical to SEQ ID NO: 33205

SEQ ID NO: 301912 - DNA, 470 bp, Homo Sapiens
ggtgtttccctgaagtctatgtcacactgagaactttttctgactgcactgctttggagctattcatttaaattgagtttggcctagttttcctggtataaaacaggaaatctacattgttccctctttctctcccttccatcccttcccctgcctttcctatacacgctggtgtgcttttgccctcagaaattcttggtttgggagttatgtatttttgagtgatcgaggttatgacatacttggagcggcatgatttcaagaagccattccaaattcttatagctccttagctctggttttactctcgtattttccccaagaaaattttttggctattcaaagaaagcacaaaatatgtgatgtggaactcatgaaaatagggacttttgatatctctttaaatattccctgactcacggaaaagatgtcctcttttggtgtatacattgtgaaaatctacccattta

SEQ ID NO: 301913 - DNA, 706 bp, Homo Sapiens
  misc_feature (48)..(60): n is a, c, g, or t
cctcattgatatttttggtgaatgtagccacccccaaccccaccctgnnnnnnnnnnnnnaacagaaaacaactcagtttgatatttcctcatatttagaatcagtttatgtgtttttgcccataatgacttgatatccatctgccccctcattgatagtggtaaattttgatcacttggtcaaggtgtccaacttctctgtatatccccctacctggaacttataaccagtatatgtagactttcagaccatgccaatctcttgcctatgaaagtgtccccgttaaaattagcatgcattgatgtttcttacctgcactgatcttttactatgtttgcaaaatgattttccaattctaacgccttccccaactttaaaggttgcacttgggaatctactataagccaaaaccccttccttcccaaattaatccctttaaatttcctttatacactcctgggactgcccaaccattgatttaccaccccaccatccgtacattgccgtcgccccccgccctcaaaaaacttctaaaaccctttttttgggcgccccgggccccctaaggaaagcggaccctggggccaaacccgtttccccacggaaatccttggttacggaaaagggtctggactatccccccaaaataaaacaccccggggggtaaccgacccttttttaaacaaaccccaaacgggattttgg

SEQ ID NO: 301914 - DNA, 879 bp, Homo Sapiens
  misc_feature (55)..(68): n is a, c, g, or t
  misc_feature (461)..(471): n is a, c, g, or t
ggggccggcagcagcggggctgagctggtgcggccgcagggtttgcagagctccnnnnnnnnnnnnnncgggaaacgctctccccacacgtaaccccactaaagccacaagcagcagggcacgcgctgcagcctctcaacccctgccctctccaccgcccctaaaaaccgacgcacattggtgggggccgggactgggaggagccgccttcgccgtgctgaaggggaaggagcccgggccgggcgcggggcgtcggaggtttgccccggactggggatcggagccgggagggatgcagagagaggcaggcccctgactgctgggacttccttgctggcagtttcttccttcctgctctgggttagaggagaagcggccgggggcgagcgcccggcagacccggagcgcgctctcagccccgactatctgagatcggccaagatgactgatgtgaagctgannnnnnnnnnnatggaggaaatcggcctcaccccccgaagggatggccttttcttaccaattccttcccaaactccctcacaattttgacccgctgctgccaccccccctgtccattgttccgcgtatttgtttttttgtcggcccccttccagtccttccaaaattctctcccagaccattttttttggtccccgggtccctccacgcgaaaggcgcccccgtgcccacccctgttttcctattgacaacaccctccccataaaacttcgcgtttgggcatcccctgcccaaataataaaggccccccggatcgatagcatacccctatcctcaaaaaattaccacaacgactccccttcggatactctgcgcgctacttttttttacagctggccccacacacgtgtattcttgcct

SEQ ID NO: 301915 - DNA, 961 bp, Homo Sapiens
  misc_feature (264)..(278): n is a, c, g, or t
  misc_feature (292)..(462): n is a, c, g, or t
gggttattggtgaatacagcatagttaaataaactgttacagtaaatctacacttggatttgctgcacctctaccaatagccttttgaatgactgaaagtgttaacagagaaagaggcatgtctgcagaaagagatagctaatattttttggtactttatctgaaatccaagatgctgcttcccctgcaggttgttttccttcttacgatcctcattgaatcccctctgggagcacaggacagttagtagaactctccatttcnnnnnnnnnnnnnnnagacggagtctctnnnnnnnnnnnnnnnnnnnnnnnnnnnnnnnnnnnnnnnnnnnnnnnnnnnnnnnnnnnnnnnnnnnnnnnnnnnnnnnnnnnnnnnnnnnnnnnnnnnnnnnnnnnnnnnnnnnnnnnnnnnnnnnnnnnnnnnnnnnnnnnnnnnnnnnnnnnnnnnnnnnnnnnnnnnttcaccggtctttggggcccgggaagggtcctttgaaactcccttgaccctcgggggggaattctggccccgcccctttgggcctctccccaaaagttggcctgggggaatttaccaggggcgggttggaagccaaaacttggcctttcccttggggcccccaaaaaacacattcctgcttttcctaacaaattacacccttttgaatgttagcggtgggccaattaaaaaaatggcaccttgggcccctctgtttttaacaaaaacccgggaaaacttttctccccaaaataattttccccaattccggagaaaatcccccaaaaagccccccaaatggggggctttccctccaaggtggggaaagaaaaacccgccaaatcttaacaataactcttcttcggggaaacctcaaattgtggttaataaataaaaacttccagcccttttcccctccggctactcaccgcccctgctcacatatcacccactttttgta

SEQ ID NO: 301916 - DNA, 447 bp, Homo Sapiens
  misc_feature (302)..(391): n is a, c, g, or t
ggtccggattggaagccccaaggattctgagagccccgctaatctggggatgactcctaggagtagaagacggtccatcttagttgtcacgagtatctcacttcttggaatccggcggcgttcacgtgtgtgctccagagaagggcgccagagggtattccctgaaagtgaaaggtcggcgaaagaggagtaaagacggcgagacgcgtccacgcagggggagtctgtgcggtttggaggaacgcgccaatgtctgcactcatgaggagcccccaagggcggttttaagagggtgaagcagnnnnnnnnnnnnnnnnnnnnnnnnnnnnnnnnnnnnnnnnnnnnnnnnnnnnnnnnnnnnnnnnnnnnnnnnnnnnnnnnnnnnnnnnnnagacctcatcgctaccaaaataaataaagtaggcatccatttgtgtaaaacaaacc

SEQ ID NO: 301917 - DNA, 516 bp, Homo Sapiens; identical to SEQ ID NO: 232011
  misc_feature (67)..(276): n is a, c, g, or t

SEQ ID NO: 301918 - DNA, 721 bp, Homo Sapiens
  misc_feature (423)..(518): n is a, c, g, or t
  misc_feature (522)..(522): n is a, c, g, or t
ggggacgcgcctggggccgcgcgcctgggctccagggccccgcgcgtcgccacgatcccgacgttgcaatccccgccaggtcggcgggggccgcacggggctgggtctcccggatcccgcccggggattggagtctgaggctgaaatttgaaatcttgaagtggccccaagccacaaatactacagactggtttcagtgggaattaggaccttgtgaaaggagacagcagtgccccaaagactgggtagattttgaagatcaaaggcacttgcctaggaacaaaaatgatttgcctgactcagttccaaaatgcagcaaataataattaaagcgaaacacacacgcactgttttttttaaatgcaagagcaaaacttttaaaattccaaaagaaaataaattttggtttccgagatgaattcnnnnnnnnnnnnnnnnnnnnnnnnnnnnnnnnnnnnnnnnnnnnnnnnnnnnnnnnnnnnnnnnnnnnnnnnnnnnnnnnnnnnnnnnnnnnnnnnacgngcaaaaaggggcatgagcgatgtgaaaacttgtcgggccgccctggggcccttggaaaagtctttcctagacccattccgtttgggcgccgcgggcccccgggaaggctaaagtggaacatggggccataacgtggggtttcccaagggagaaaccctgggccgtggacctaagggcgtttgggattccctccccaaag

SEQ ID NO: 301919 - DNA, 728 bp, Homo Sapiens; identical to SEQ ID NO: 232019
  misc_feature (147)..(560): n is a, c, g, or t

SEQ ID NO: 301920 - DNA, 792 bp, Homo Sapiens
  misc_feature (394)..(435): n is a, c, g, or t
  misc_feature (745)..(745): n is a, c, g, or t
gggagccacgcagatatctgagaaaagagcaatcagattggagaaaagagcaagtgcaaaagcccttcaggctggggagggtttaaggaacccatgggggaaggtacggattttggggatcctatggtggctccacctctgtaatttctggtttaattggtctgagctggggttaggcattaggatcgctccaggtctaagaagcactggtctgagggttaaataagccttatcccctgtatttggtggagagatttgaagggtaactgtgagtaggagacttcagctgctctgatgggaagggcaagcaagggccccctgaccttgccaggaataacaggaatcttccacagtaataaaaactcttcagtttatgtcccttttcttatttgannnnnnnnnnnnnnnnnnnnnnnnnnnnnnnnnnnnnnnnnnaagtggtttaaatttaatggttttctagaatctctttggctccgatagtcctgaatctttctagtgttggaagaagctctaatctagaacagtgttctagagcaatgttgtctaatcttggtcttataacactctaagttgtgtcatcattatggcaagggctgtggtgaatgtctcaataccaaattgaaggaaaatttgtgccctattcagtagcaccttgggaagatgagtgtgttgggaaacttgaaatgtgaaaactgacctgcctggtttggagtcccaagtacaggggcagctttggtcctgnggggcaggcaggagcctggatggccagtcttagttccctcactggtg

SEQ ID NO: 301921 - DNA, 764 bp, Homo Sapiens
  misc_feature (149)..(430): n is a, c, g, or t
ggggcctcctcttcctgataataatagtggctaacaagttttactagattttaggcaactcaaggagctagctgttattttgttcattctacaagtgaggaaggaagcacagacagtggttaagttacatgtccagagacacacagagnnnnnnnnnnnnnnnnnnnnnnnnnnnnnnnnnnnnnnnnnnnnnnnnnnnnnnnnnnnnnnnnnnnnnnnnnnnnnnnnnnnnnnnnnnnnnnnnnnnnnnnnnnnnnnnnnnnnnnnnnnnnnnnnnnnnnnnnnnnnnnnnnnnnnnnnnnnnnnnnnnnnnnnnnnnnnnnnnnnnnnnnnnnnnnnnnnnnnnnnnnnnnnnnnnnnnnnnnnnnnnnnnnnnnnnnnnnnnnnnnnnnnnnnnnnnnnnnnnnnnnnnnnnnnnnnnnnnnnnnnncacacagaggaacacttggcatcagggagtctgttgtctgacccgcaactaggcagcctcatacattattttcactaagagaccagtggggctggaaagggacttgtgaggtgctaagtagccagtgagagcttctgggtcctgtcgcagttttgccctttcttccctcaaaaaaggtctctccacttctctgtgggaaaagcttgggcaagttctctggtttccaatgaggccagagaacctgtgctgatccctaacatcctcacccatcggggggcaaataagtaaaataaaagtaatgtaagcaatgtttttataaaaggggtaattttaa

SEQ ID NO: 301922 - DNA, 678 bp, Homo Sapiens
  misc_feature (126)..(134): n is a, c, g, or t
  misc_feature (145)..(254): n is a, c, g, or t
  misc_feature (340)..(477): n is a, c, g, or t
  misc_feature (485)..(494): n is a, c, g, or t
gggttctggatttgagtgagtgccttctgggcacctcctcctttgatggagaaacaaatccctcctgaccttgagcaacactacaggaatgtgcctggtgtaaacaggaaccagccgttcgtttcnnnnnnnnngagatggagtnnnnnnnnnnnnnnnnnnnnnnnnnnnnnnnnnnnnnnnnnnnnnnnnnnnnnnnnnnnnnnnnnnnnnnnnnnnnnnnnnnnnnnnnnnnnnnnnnnnnnnnnnnnnnngccgtttactactcatagtttttatcttgccaagaggtcaccctgacgttggcctgccttagctctgttaaaaaggttgtgctctnnnnnnnnnnnnnnnnnnnnnnnnnnnnnnnnnnnnnnnnnnnnnnnnnnnnnnnnnnnnnnnnnnnnnnnnnnnnnnnnnnnnnnnnnnnnnnnnnnnnnnnnnnnnnnnnnnnnnnnnnnnnnnnnnnnnnnnnnnttgggttnnnnnnnnnnttggccaccggggcttgggtaatccccgggttttattccggggggggtttgaacacggaaaaaattccccccttggaaacccccccgcaaaaggggggggaacggtcttttttaactgggaagccctgggggaaattggaggtccccccttgggtgaaaaccccctctaacgcccccgccgggg

SEQ ID NO: 301923 - DNA, 795 bp, Homo Sapiens
  misc_feature (605)..(613): n is a, c, g, or t
  misc_feature (649)..(661): n is a, c, g, or t
  misc_feature (683)..(706): n is a, c, g, or t
ggggtggcagggaaatggtcttagtatgttctggctgccataacaaataccttagactgggtggcttaaatgacaagcatttatttctcaccattttggagggtggaggtccaaagtcggagattaaggtgctagaagattcagtgtctggtgaggggcctctggttcacaaatggtgccttctggctgtgccctcacatggtggaaggggcgaggggtttctcttaggcctcttttataaaggcactaatcccatgtatgagagctccattcttatgacctaatcacctcccaaaggcctttcctcctaataccatcaccttgaggcttaggattttcaaatatatgagtttgggcagggccacaaacattggctttattgcagaaacagtgtcatctgaagacaggggtacagattcttgagaatccaaaggacctggaaatgaaaggaatcataattccagggatcgcactagcatttaggaaatatttcccaatgggacccattcagggaaccttgggggttcatggtggaaccctaagaacttggggcccttccgggctaaaaagtgggttcttcaaggggcattcagcctttccagttnnnnnnnnnccttgggtttaaacatggccaaaattgcttgggaannnnnnnnnnnnnaaaagtttcccggccccccctnnnnnnnnnnnnnnnnnnnnnnnncccttggaggaaaaccctggggggtttttcttaaaacactggtggtctcccccagggtgtggaattgccccaaaatggtgttttgtctt

SEQ ID NO: 301924 - DNA, 396 bp, Homo Sapiens; identical to SEQ ID NO: 33221

SEQ ID NO: 301925 - DNA, 701 bp, Homo Sapiens
  misc_feature (71)..(294): n is a, c, g, or t
gggaagccactgaatcttctttctgtttcctggaagtaaactgattagaatgagtcacatgaacctttttnnnnnnnnnnnnnnnnnnnnnnnnnnnnnnnnnnnnnnnnnnnnnnnnnnnnnnnnnnnnnnnnnnnnnnnnnnnnnnnnnnnnnnnnnnnnnnnnnnnnnnnnnnnnnnnnnnnnnnnnnnnnnnnnnnnnnnnnnnnnnnnnnnnnnnnnnnnnnnnnnnnnnnnnnnnnnnnnnnnnnnnnnnnnnnnnnnnnnnnnnnnnnnnnnnnnnnnnnnnnnnnnaagggcagttcccttcaactgaccaatatcgagaaaactgacctctctgctcctcaggtgctgcagaagcagctgagtcagcctctttccccatcctgaccctgagtgatggagcacagccacgcttagagctccgggaaggacctgatatgttggatttttctctatgcctccctaacctagatcattttagaaccagggcactgtcatagggtgggcttaggggtcatggaagagctgtgctttagagataagggagcctcacactccctttcaagaggaattgcgcccaagtccctcccaactcctttaaggaatggaatctgcctgtcttctgggccagggtgcatggggaccgggacggcccctagagctggaaagcccttcctccccagtggggcaggggg

SEQ ID NO: 301926 - DNA, 967 bp, Homo Sapiens; identical to SEQ ID NO: 232034
  misc_feature (280)..(337): n is a, c, g, or t
  misc_feature (352)..(404): n is a, c, g, or t

SEQ ID NO: 301927 - DNA, 327 bp, Homo Sapiens; identical to SEQ ID NO: 232035
  misc_feature (250)..(250): n is a, c, g, or t

SEQ ID NO: 301928 - DNA, 565 bp, Homo Sapiens
tttgaaaaggcaaaatgaagaccagtccgaaaaggtggccataggatgacctttgggattctctaggcatggcacctctctgacttattcaccattgatgaggctgggctctgatgagtagattgataagatatagctagcttctgtcaggtagaaaagatgacccaagataatgggcttattaccctgcagcgcagcaggtacttttggatgtaactcagcaatcttattccagcattgctttttcagtgcctctgagtatttcagtctctccagttccctttgaactagtgtttccaccattatagtttcttaacacctgaagtaacctttggtacatacattaaagacagtcatgtttataactttggaaattatatcctgtgacacatttggagactgtctcaccaagatgtccaattggttttggctgccagagccaattacactttgttgcacgtgacatttgcctcataggttcacctgcctcaggcttcctggctccatcctgtgacttattatttttttaataatacccagtacagcttggggtgtggttgctcac

SEQ ID NO: 301929 - DNA, 310 bp, Homo Sapiens
  misc_feature (127)..(159): n is a, c, g, or t
ggctggggagaaagttcacggcaggattccctgaaggatcgagaattaagcgagacctgtaggataaaaggtgttaggaatgtagcagagggacagcagagtgaagatgggaaggggcccaggcccnnnnnnnnnnnnnnnnnnnnnnnnnnnnnnnnnatggcccacaaaggctgaggctatgaggtagacaggcaatgacctttcatgccttgcagggcaggccatgttaaggatattgttcttttcttgcgagcaatgggagctgttgaaaagcagtgagaatatttgcattttgaaagtaatccac

SEQ ID NO: 301930 - DNA, 706 bp, Homo Sapiens
  misc_feature (688)..(688): n is a, c, g, or t
gacaagactgtctggaaaatggctctcctaaaaggaccagttgccatcatccacagtggaagattcaaagcagttggtccttggtacgtatgagaagcggatttcattcccttgaattctacagagcagtttattagagtgaatgcattttaaggccttgcatttgatatgtcatccagttcataatcaagttgcctttttctggctaaaacataatgattatgtatttttctcatttggtcctacaagctgctggccctttgtccctccactgtgggaatcagatctagagcaggctgagcctgcagacacagcagtggccaaaaggtcactctaagtgttttgtcttgactccttacttgaagtccacccagctagcacacatctggtttatactgaagccccctgcctagaaatactcatttcaggaaccaccagtaagcatctgtgaccacacaggctttttgactgatggcttcccggatctggtttcaagggataaccccgtctgtgtgcatctatggtcttctctctacagcgaggactttgcagtgcctgcttgtgggtcacacaagggggctcagagctgagtctgaactgcttcatggtcaccagctcctgtcccttcccagtcttgagagctttttttctccagatggaaccttttccttcccgccgttttccccgngccccctggctgttttta

SEQ ID NO: 301931 - DNA, 781 bp, Homo Sapiens; identical to SEQ ID NO: 232042
  misc_feature (101)..(341): n is a, c, g, or t
  misc_feature (387)..(683): n is a, c, g, or t

SEQ ID NO: 301932 - DNA, 795 bp, Homo Sapiens
  misc_feature (454)..(499): n is a, c, g, or t
  misc_feature (775)..(775): n is a, c, g, or t
gggaatactagtttcgtagaatgatttagggaggattctctctttctctatcttttgtaatagtttcagtagtattggaaccaattctgttttgaatggctgacagaattcagctgtgaatctgcctggtcatagacatttttggtggcaatttttttctattaccgtttcaatcttgctaccagtcatacgtctgttcagagattttatttcttcctggtttaacctaggatggttgtatatctccaggaatttattcatctcctctaggttttctagtttgtacatataaaggtgttcatagtcgccttgaaagatcttttgtatttctgtggtaccgtttgtgagatctctcattttgtttcgaattgacctaatttggatattctctcttctcttcttggttaatctcaataatgatctattaattttgtttatcttttcaaagaaccannnnnnnnnnnnnnnnnnnnnnnnnnnnnnnnnnnnnnnnnnnnnnagttctgctctgatctttgttatttattttcctctgttgggtttgggattggtttgttcttttttctctacttccttgaggtgcgaccttagattgtctatttgtgttctttcagactttttgatgtaggcatttaatactgtgaactttcctcttagtactgcttttgctgtatcacaaagggttttgataggttgtgtcactattattctgctcagggaatttttaatttccatcttgatttcattgtttatcctaagatactcaggagcaggntatttattttcatgggattg

SEQ ID NO: 301933 - DNA, 676 bp, Homo Sapiens
  misc_feature (391)..(391): n is a, c, g, or t
ggggggctaggtctgcaaggagtgcctcatctccctgaagagctctcagtggaacatacttcacccatccatgtacccacatctttccttgcccagaaggcgagagccagctataacagacccatttcaataccctggcaagtcattactgcccttagctcttggtgtccccatctgtgaaacatgggggacagctgctagcctggattggaacttgggcaaagtccaaagaatgggatttagagctgaatgaacctcacactgagggcacaatagcactaggcactgcccccagagcctagtgctatatgcctgctgcaggtccctacccaagcatgctttactgaggaactcaacgtttcaaagcttgagggtcagggttgatcatggngcttgtgaccataggcttccttagtatgccaggcttgggagaaccgtgaaaaaaacaggggaagatacccttcaaggggtagcagggcatcaagctctaatcacccttggccccataaaggctttggcctgggtcatgcctggccaccggggtccatatggctgggacaggggaagaaaccaagaagtccccatccctgggaaacctccagaaaaagccccccctgggaaggcttccagcccccctggggaaaaggcccaccagcccagggccccttggggggtg

SEQ ID NO: 301934 - DNA, 530 bp, Homo Sapiens; identical to SEQ ID NO: 33225

SEQ ID NO: 301935 - DNA, 219 bp, Homo Sapiens
ggacagacaggctgccagccctcagcatggacccggcacatggaatctgtgatcttaaaagagtcaagtgactacctttggcaaccaaaagagacactgccttttagaaggcatatcatctgaaactggctgaaagagctgtcttacttaggaagaaaaatctctcctttggaaagagctggaacttttagtaaaactgaacagtgaggtggcggaagg

SEQ ID NO: 301936 - DNA, 598 bp, Homo Sapiens; identical to SEQ ID NO: 33227

SEQ ID NO: 301937 - DNA, 401 bp, Homo Sapiens; identical to SEQ ID NO: 232051
  misc_feature (140)..(292): n is a, c, g, or t
  misc_feature (295)..(295): n is a, c, g, or t
  misc_feature (305)..(305): n is a, c, g, or t
  misc_feature (329)..(329): n is a, c, g, or t
  misc_feature (361)..(361): n is a, c, g, or t
  misc_feature (363)..(363): n is a, c, g, or t

SEQ ID NO: 301938 - DNA, 573 bp, Homo Sapiens; identical to SEQ ID NO: 33228

SEQ ID NO: 301939 - DNA, 863 bp, Homo Sapiens; identical to SEQ ID NO: 232057
  misc_feature (312)..(327): n is a, c, g, or t
  misc_feature (354)..(354): n is a, c, g, or t
  misc_feature (368)..(370): n is a, c, g, or t
  misc_feature (375)..(375): n is a, c, g, or t
  misc_feature (383)..(383): n is a, c, g, or t

SEQ ID NO: 301940 - DNA, 1030 bp, Homo Sapiens; identical to SEQ ID NO: 232058
  misc_feature (887)..(887): n is a, c, g, or t

SEQ ID NO: 301941 - DNA, 835 bp, Homo Sapiens
  misc_feature (718)..(718): n is a, c, g, or t
gggaccctggagaaagaatcttacaaagaatactaaagagcatccaagtgtgaagaatgaaacacacagatgagccccaagaggatgaggaagggagaggctggtgggggtctgattctcatctccaccttaacagaatgcacatgaagtccagccatggtgtagccaaggagacccactaagaccaccaaaagcttggaaatgaggatgcaggggcaaaggacggcattataggcgccctgactccagcttgggagtggggtgtccagggaccctccaggatcgatgacaacagactgaggggcagctgcaaaacaactggaacaaatcaaaccaaggccaaacgttaactgcctctggcaacttctcctctttcttcgcctctctcccaggacccagaaaggctaaaggttcaggtcataaaatccaaactccccgacccacaaatcatcatttccagcctgagggagacacccaaccctgccaaggtcttcaaggacacacattagtcatcggatcagccctgcccatcccacctccaaggcccctttcatttccacactcctcagattgttccatgagtggtagccaaataaaaagtccaggaggttctaagggagccctgggtcttacctggaattgtgtgttactggcaactaattcctgtggactgacccaggggagctaagggtgtcttttagcccccccatgcagaggncagaagacctcacccttttaccagccaccagcccagagatccctgctgtgagcaaatgaagcctgtagccacaacctgcacaccgggtccggattgagatttgttctcccaggagaa

SEQ ID NO: 301942 - DNA, 540 bp, Homo Sapiens; identical to SEQ ID NO: 33232

SEQ ID NO: 301943 - DNA, 919 bp, Homo Sapiens; identical to SEQ ID NO: 232061
  misc_feature (215)..(215): n is a, c, g, or t
  misc_feature (217)..(383): n is a, c, g, or t
  misc_feature (393)..(407): n is a, c, g, or t
  misc_feature (435)..(448): n is a, c, g, or t
  misc_feature (461)..(469): n is a, c, g, or t
  misc_feature (493)..(503): n is a, c, g, or t
  misc_feature (547)..(556): n is a, c, g, or t
  misc_feature (696)..(705): n is a, c, g, or t
  misc_feature (723)..(743): n is a, c, g, or t

SEQ ID NO: 301944 - DNA, 890 bp, Homo Sapiens
  misc_feature (667)..(704): n is a, c, g, or t
gggtggtaaaataaacataagatttacccatcttaaccatttttaagtatacagtacattagtattatagtcacatgattatataaccaatctctggaactttttcatcttgcaaaactgatactctgtacctattaagcctcccaatttaccacttccttagctcttgataatgttacactttctgtctctgaattggctgctttaggcacctcatataagtagaatcatacaatatttgtccttttttgattggcttattttacgtagcataatgtcctcaaggttcatccatgttgttgcatgtgccagaattcccttcctttttaaagctaaataatgttcattctgtgtatgtataccacattttgcatgtgcgttcttttatcaaggaatatttgggttgcttctaccttttggctgttgtgaataatgctgctacgaatatggatgtacaaatatctcttcaaggtccttctttctttttttggatatatgtgcagaagtggaattcttggatcatatggtttatggcgcgttttcgaccttcagaatataagattccttttccgcaccctccaattcctctctaatgcaacttgttctaacccgcgcaaccgccgaacggccctgatcccctccccagttcgtcgccggtgtgctccannnnnnnnnnnnnnnnnnnnnnnnnnnnnnnnnnnnnnatcctcggcgctccctcgctttcctcgcgccccccagatccttcggcccggctccgttccatcgtcacgcacctacttcgtccgcgcgccgcccgtagtattatggccagccccctacggacctccttgccgtgccccgcgtcccacgggggcgcgacgcgggcccccgcggcggcatccgcacgg

SEQ ID NO: 301945 - DNA, 877 bp, Homo Sapiens
  misc_feature (513)..(602): n is a, c, g, or t
  misc_feature (661)..(669): n is a, c, g, or t
  misc_feature (712)..(767): n is a, c, g, or t
ggggagttggaggaagcagcggcagcggcgagggcggcaggctagctgtcggagacggcaagcacggatcgggcacggccggcgggtcgcagccgggctggaggccggtcggaaccgagcgggcaggaggccaccgctgcagcgcgggccccgcagaggaaggaagccggcgggcggggtgaagctcgtgtgtggagtgccacggtacaatcagacgacagatggacagtgtgacaaaagtgtcagaaaggattgggcctcgctgtgagagtcagcctggattcaaagtgttgacaagttgctgaaaaggaagccagtgagaggactgtggcacgcagaggaagtggagccctgtcttcggtcacaccattgatggaggacagatggacagccgtatggccagccacctctcctcttaaacctttggagagtggtcctttgtcctctgctggacacataacaggaattctaacgcctgctccgaattcccttttcataacaccggcccatcgnnnnnnnnnnnnnnnnnnnnnnnnnnnnnnnnnnnnnnnnnnnnnnnnnnnnnnnnnnnnnnnnnnnnnnnnnnnnnnnnnnnnnnnnnngggcgcgtcgcgtcgcccgtccgggctctccgcggcccgcgtccgggtggcttccctgnnnnnnnnntttctccatgccgccccgccgcgtaccgccggcgggcgcactnnnnnnnnnnnnnnnnnnnnnnnnnnnnnnnnnnnnnnnnnnnnnnnnnnnnnnnntcctcccgtaacgacggcgcccgccgtccccgctatgatgcgcgggcggcggccggcgatttaccccatctattcccgcgccggccgcccttacgctttctttatactcg

SEQ ID NO: 301946 - DNA, 307 bp, Homo Sapiens
aactgagatgtacccaatctgtttgagagaagatttacgcactccttggcatctctgtctttctgtgcttccacttctcggacgaggtagagggaaagctgccctctgggcaggataatccaattcagcgctccctgacatcttcttccaggcgggatcccactcaaaggaaaaggaatatgtgaagctgaccacggctttgtcacagccaagtaattgtcactctcaaccttcaacgtgggaagcactgcctggagaaacttctcttctaggagagcaatctaggccaatgtatctgccccttgtt

SEQ ID NO: 301947 - DNA, 105 bp, Homo Sapiens
ggtggggagtcattgggtcttacaagcataaacttcctgagcacctggtcactgtcaatgctgcttttcaggtcacttttgatggctggacacacggacgtctga

SEQ ID NO: 301948 - DNA, 127 bp, Homo Sapiens
cattcctcctcagaccaactcaggggacatttcttagagagtatgatggaaggtctgatcttcatgttggaataactaacacaaatggggttgtgtataattgcaggacacatggtgtccagcgaga

SEQ ID NO: 301949 - DNA, 387 bp, Homo Sapiens
aaggaccttggcgatgaaagaccttggtgaaggaccatggtgatgaaggaccttggtgatgatctaccttggtgaaggaccatggtgatgaaggaccttggtgaaggaccatggtgatgaaggaccttggtgatgattgaccttggtgaaggaccatggtgatgaaggaccttggtgatgaatgaccttggtgaaggaccatggtgatgaaggaccttggtgaaggaccatggtgatgaaggaccttggtgatgaacgaccttggtgaaggaccatggtgatgaaggaccttggtgatgaacgaccttggtgaaggaccatggtgatgaaggaccttggtgttgaacgaccttggtgaaggaccatggtgatgaaggaccttggtga

SEQ ID NO: 301950 - DNA, 379 bp, Homo Sapiens
tccttcatcaccatgatcatgatctttcatcactacagcccttcaccaccagtgtccttcaacaaggtgttttatcaccaggtccttcatcacaaaggccttcctcaaccaggactttcccccacgaggttctacatcaccatggtccaccaccaccatggtcctccaccgaggtccttcaacacgaaggttcttcatcaccatggtccttcaccgaggttgttcaccacgaaggttcttcatcaccatggtccttcacggaggtgcttcatcaccaaggttcttcaccaccatgtttcttcacaaaggttctccaccaccatggtcctccaccgaggtgcttcaccaccaaggttttccaccaccatggttcttcacc

SEQ ID NO: 301951 - DNA, 101 bp, Homo Sapiens
ttctgtaactggagcgatgattaccagtgcagcagtctctggcatttacagagtagctgggaagaacatggcccctttggaagcgctggtatggggcgttg

SEQ ID NO: 301952 - DNA, 183 bp, Homo Sapiens
ttaaccctcaactacaaaattgccagtgttatacaaatgtactctgatcagaaacccacacttgtgttttgtgcaacaaggaagggtgtgcaacaggctgcaaatttttaacatgattaatacaaacgttatgaatttattttcagttttgtgcaacaaggaagggtgtgcaacaggctgcaa

SEQ ID NO: 301953 - DNA, 399 bp, Homo Sapiens
aggagacgaaactcatctgcctcccttacagtgggcacacctcatgccaggagcatctgtggaccgcttccatgctcctgggcttccaaagttggagaaagctgccaggctcagaaccacctgagctgaatcttcccttgatcccaaagactgtcctgtggtttcctggcctttcttccataggtggttcttgcaaattggtttttaagtgacatcttatcaagatggatccaaccctagtttcccagtgctggaatgtctgaaatggatggacaagttaatcccactttccaaccactgggtaagcttggggacctctatacacctgagccccaaacatcaccttttgttctggatctaccttgacagatttttgaatcctcgaagaaaaactgactg

SEQ ID NO: 301954 - DNA, 539 bp, Homo Sapiens
ctggaaaaatgtgctgtttgtggactgcctgcaagcatctggctctttctgataatctgaagcctcaggagaagatgtttttcaaaagtcctgtggagacagctttgcagtattttagtcacatctctcaggtgtggagtttccagaagaaacaaacagatctcctcatcgccttttataagcatagaattacaaagttagaaacagccatgcaggaggcacagcaagcactggtgagccaggacaaaaaattgtcagtcttaaggaaggagaatggagaactgaagaaatttctagccattctaaaggaatctccaagtcggtaccaaggaagcaggtcaatcacacctcgaccagtgggcattacttccccatcacagtcagttaccccacgacccagtttccagcatagcagtcaagtggtcagtcggtcctcctcagcggaatctattccttatagagaggctggctttggtagcttgggacaaggaggcagaggtctgcagggaaggagaactcccagagactcttataatgaa

SEQ ID NO: 301955 - DNA, 521 bp, Homo Sapiens
actcctcagccagggcccggaagcgccgccagtcatatagctccttgtgtgtatagaagtggcccaggtcatactcgtgggaatgctcatgagtcaccaggaaggccagggtatcattgacttggaggcagactgtggggtttcggatgcctggctctgggggcagcagatccccaagatgtgtggagttgaggctcagtgaccaagaagagtccagatgtccttccctagactttccatctggtctggtcaggcccaggaagccaagcgctagaacaagcagggattccctctgaccctgcagggaccggggtaagagttttcccaagagcatgtatataatcagcagctgttcagcctggtttgcacgtggtagcttcaactttcatccatctagaccacatagagggggacagacttctgccctaagtccaagttgcagggatggcccacagcacgtggtggggaaggctggtccagaaggtaaaaatcctgactccccatgccttcagtgacagaaa

SEQ ID NO: 301956 - DNA, 119 bp, Homo Sapiens
taaaaacaccaccttcaccacctcacagccatggttcagggggacgaccgtcatgggaaggctgtagtgcaggcggtactggctctttcgcatgtcctcttttccctggaactcacgca

SEQ ID NO: 301957 - DNA, 252 bp, Homo Sapiens
agcttcatcgggccacagaacctgagagttgggaagctgctgagtctgggaggcagaatcgtcggatcgtttctttgacttcgaagagcccttggatgactttttgggcttctttatccgttggtatttcagagcctccagcctctcaggcgcagcagcgttcccgggtgcaggtggaagtgttcttcccatgtaacgcaagctgggatgcatttagtgccggatacggaagtaggctgaacatctggagtt

SEQ ID NO: 301958 - DNA, 410 bp, Homo Sapiens
  misc_feature (190)..(199): n is a, c, g, or t
ctggggaggcacccacagtacagactgggacgaagatgatgatgaggaggccgtagctgggtgaggtggggaggtctctccacaagtggcagccttttggggaagaatctcaatcctgaaggaacctgcacaaatcgggcactgtccactatcctggccaccactgctttgggcctggggtcggtgctgnnnnnnnnnngccatgctcttgctgtctccctcctgtttggccaagaattagagttggataaaggcctttggtgctgcactttccttcttttcatcctgcgtgcgtcattctcagagttttgctcctctgctctgggatctgccctgtctggatgactggaacctggttctgcatggttgttctttgggcttgccacactgactggaggcaccctgtgggc

SEQ ID NO: 301959 - DNA, 206 bp, Homo Sapiens
tgtcttgcctcttcattatctccccaacttttgtctttaatgtgggtgctcaaatgtggcagaacagctgtagagtgacgtgatcagccaaatggtccactgcggatagaagcgaaagactgtaagacaggacaggaacacagaactattggtcgtcccttccaagtgcgcgattggtcttggcttctgatccaggttgaacctgc

SEQ ID NO: 301960 - DNA, 127 bp, Homo Sapiens
ccccgcctacctgtactcgtgggaggtgtggatgactgcacacccctttcaggggcaattgacttctacacactccctgtggggcccctcaaagcgcccgtcaccgagagccagttcctcatcagcg

SEQ ID NO: 301961 - DNA, 506 bp, Homo Sapiens
ggaatagcgggagctgaggtccgactgagagacgctgcagcccccgacgcctcacggacccgcggctctggcccatggggcgcggccgggacagtggagggcgccgcggaccgcgcggctggggctggtttctcgggggtcgcgggctccgccgaggggccaggagtggtcgggaccgtctccgggttcccggccttgccctcttctcccgtgcgggacaccggcgcgttggcgttgcccggcccctggaagagcttcttcaccaggcttgccctggggccgcctgcgccggatcctcgcacgaattcgcatttgtgccgcgatctggctgcggggtctccactgggctcctgcactccggtggtgccgtgtcctgcccggggcttcccgcgtagcctggggcaaggagcctctcaacagggggcgcgctcagggccgccagggcgcgcatcttcgcggggaatggaccgaccggggttacgggtccagcggagacgcgctcgagt

SEQ ID NO: 301962 - DNA, 226 bp, Homo Sapiens
gaagtctggcatcatgtcttcactcatctggacaatgccaagctgctgagcgcccagggactggcgggccggctgattgccggccaggcgggcgaggctaggcacgctgcgaggagtgaagagcacctcagtgaggatctggggatcctcggtgcgacactccattcattcagccatggtgaaatagtggcaggcagccgcttgggaggcctcccggcagtgcatg

SEQ ID NO: 301963 - DNA, 554 bp, Homo Sapiens
tgtagggtggccctgcctgggccccatctcctctgctcactcactttagtcccagagacctttcccagtcccaggggcagggggcagtgggcccacagtggagggcgaggctcccgggctctttctgtccagccaggagcagagagcgagagacactgaggggccgagacaaggagacctggaggcagggcttgggtggggctggcccctgcacccagggtcgaaccagggggctcccaggcaggggggatccattggctcagggaccagaccctgcccatgcccacccctgtcgcgggagggaggggccctggcctcgcccagggtagccctgtcccagcttcagtgcgggctgctgggctctgcagaacagtccttcctgcagctggagcaggagaaccacagcctgacccgggagacgcctggacttcgggagctggtggaggccctcccggtgccggtgctgcagttcctgcccctgtgtgccgaacactctttctggcctgctccggactggccccccgacccggctggcatgcacttcttggggaaca

SEQ ID NO: 301964 - DNA, 109 bp, Homo Sapiens
tcctggagacgccccaccagtcctccaaccaaagggagtccgcagggcacagcgattgctgtgggatggacgtccacctcgcatctggaggaggtgtgggccctgctgg

SEQ ID NO: 301965 - DNA, 561 bp, Homo Sapiens
atccggagtttgcattgaggtagaggccaatccaggcttctgtctcactcatgatggatctcaaggcctccttgcctgtctcatccgtcaccatctgcaggtcggccagatccgtgtggtggctgcggcagtacagcagggccgaggaccatgtcatcacttggtcaaatcgcatgaaggtctgaccactgatctggaccacagctggctttggagaggtggtcaggctgagagagggcttcgtggagatgaggtgcccgacgtcagggtcacaaaagcagagagctggcttctgccctgcgagggaggaacctcctatccggggtaatttcagaggcagatgcagcgggagacagaaccccaacccgcactgaggaagcttctggccccgctgctggtctgtgacggtggaacccctggaccagtctcaagcagtagtggatttcccgcaaagatgcccgaagagttggctcccacagcccacttagcgggaagcaggggatctcccagagggtggccgctcccctcctgcccagttctgagaccctaaccatccaccac

SEQ ID NO: 301966 - DNA, 181 bp, Homo Sapiens
caggagcgaccccctcaagctgactgtaaaatatgaccactatataggaagcctgatgggggtcctggtggggagtcttctggtggctgctcttgttggtttcttgctcctcctacaaactggtggggccaacaatcagagtaatttctgggggcagcagcccccagcctcctcccccggc

SEQ ID NO: 301967 - DNA, 112 bp, Homo Sapiens
catgagcagcatctaccagtttgggtcgcctgagtaggatgattactcagaccccttgcaggacctggtctcccgattcctgttggtgcaaccccagagctgctgcacagcg

SEQ ID NO: 301968 - DNA, 146 bp, Homo Sapiens
acgaggtctttcttggtgtagctgaatctctcaagctgcatcgtgtaagtttggaagaccatggggacgttcttgaggtccatcatgctggactaaatgggggtcagcctgatgctgtacagcacattcctattcttgaagatgcg

SEQ ID NO: 301969 - DNA, 411 bp, Homo Sapiens
  misc_feature (297)..(349): n is a, c, g, or t
tacgctcagggattcgctcgggtcttcctgaacctcctaaaaagtgggacaaaccagtacccacctccagagatcactgaagaatgtgggggcctacaccgtggggacactgtgctgcaattagtcacacctgtcaacaggatgcccaggcaccagtttggtatgtctggcttggctgatgagttggaagcacttgaagcaacaggaatttgtctagaagagaagagaaaagacatcacaacatctataagtcagcaagaagcacttgaaaattatgaaaataacaaatatgacatnnnnnnnnnnnnnnnnnnnnnnnnnnnnnnnnnnnnnnnnnnnnnnnnnnnnntaaatgcagacactacctatggtaaaaaccaaactacttcttggtccttaagttggattcac

SEQ ID NO: 301970 - DNA, 482 bp, Homo Sapiens
aacttccacatgccccgaacacctacctgagccattcactagttgcaattgtgttcagtcaccaggaaatggcgttaggatctcagcatcaaaagattgcaagcgctcattttcatactctgagcagatgacaccagcgtcttccccgtgcccacagttgtgggtggaccagccagcatgggagcactcctccaggtagtcctcaatcccggaacactgcacatcgtccagaagaatggggccggagccctggccaaagtgggcctctccaggggcagagatggctgcactttgcaactataccaagtgctaggaagcagtataatctcttgatgttttgagagtatatgatgaagtggggtgggatttggggatgtcttccctaagagatgacaatggatctgaggcttgaaataggagtaggaagaagttacatagacaaagaaggatggggagaaggacagagccatattctgtgcatt

SEQ ID NO: 301971 - DNA, 772 bp, Homo Sapiens
agtcgacggtaccggacatatgcccgggaattcggccatgacctcgcagaaactatcgtataacatgtcgaacgggctatgcgagaaccaagtcatgataattgaacatgttgcatagactgattatgcctaagcaatatcgcctgcgtctatgaacttatatagcgtataggcattcatccgaaccaagagtaacatcacacagactccgcgtggaagcctgaccgtgagacagtgcatgacaagactgatgaatccgagagataggcagagtacatgacagagctctctctagctgcgcagtctgacttctaacacaggtgagattccaaatgctgccgacctccgtctaatccgaccgattaactccgcgcgcagccactgtgccacgaatcttgcccagttgcaacttaaagacgatcaaggtgcgaggcgctgcaggcagcaaagtcctgaagcccattccagaaaaagcacccaggaaccaaaccaacacttttcgaacctataacaagtcgtaccgaggaggatagtctttttgaccagtcctccaaacaagccgttaccacaaactctactgctacaaaaatcccaactaagagcattccccaacaaagccacacgacatccaatctttccaagcctttgacctaaacgcccaaatactatgaaccaaagcgggtttattcttctcacaaattactccacaattctccagttcccaatacataacctggcttgtgaaacaacacatccttatcccggttgccca

SEQ ID NO: 301972 - DNA, 621 bp, Homo Sapiens
gtactagtgagaaaatcatcaagaatatagaaaatctgaacaacacactcaacaaaatcaaattaaaacatacaaatactacaccagaaaaaagtacccattgaatattcactaagatagaccacgtcctgagccatgaaacaaatctcaacatatttcaaagagttaaatcaatatagaacatgttatctaaccataattgaatcaaactattaatcaataacagaaagataatgagaaaatctctaagcacacttctaaaataatccatgggtcaaaagaagttacaaagaacagtctaaaaatcataaaactgaatgaaaataaaaagacaaacaccaaaatattgtttgatgcaggtacatcaagaggaaaagaatcatatcactacatgcttaccttgaacaaaagtcttactactgacctaggttcttatctcagaagtgaaaaaggcaataaacttagcggggatgggggactcttagtagcgcccgactctcagtgcgcatgctcgggcacaccctaagactgctttgaaacgggtaatgtaccccgggtcctgacacacccgcgggggacaagaaccccggggagtcccccctaaaggcacctcccgcacac

SEQ ID NO: 301973 - DNA, 494 bp, Homo Sapiens
tgccaatagatctgcagacagggcatggggtaccagagaaagaaatgccaaggatcatgatgtgatttggcctgagaaaatgcaaggacgtatttgccaataacttagttggggaagactatagaagcaggtttcaggttaggagactatcagttcagtttatgttgatatgttcgttatatagtcaagtaaagatgataagcaggcagcaggataggagtctcaagttcagggaagataattgtgagttgcagtatgtaaaggtgaagttatgatgaaatcagatgagcttaccaaggaagtgagtgcagctagaaaggagcagaaatccaagacttatccctgaggcattctaatacacaaagatgcaaggaactggttaaggaatctgggagtgagcataggaaagggagaatagaaaatctaatgtcctagaagccaagtgaaaacagtacaatgtctctaatactgcaaatatgtattcatatcactga

SEQ ID NO: 301974 - DNA, 896 bp, Homo Sapiens
  misc_feature (50)..(766): n is a, c, g, or t
agtcgacggtaccggacatatgcccgggaattcggccattacggccgggnnnnnnnnnnnnnnnnnnnnnnnnnnnnnnnnnnnnnnnnnnnnnnnnnnnnnnnnnnnnnnnnnnnnnnnnnnnnnnnnnnnnnnnnnnnnnnnnnnnnnnnnnnnnnnnnnnnnnnnnnnnnnnnnnnnnnnnnnnnnnnnnnnnnnnnnnnnnnnnnnnnnnnnnnnnnnnnnnnnnnnnnnnnnnnnnnnnnnnnnnnnnnnnnnnnnnnnnnnnnnnnnnnnnnnnnnnnnnnnnnnnnnnnnnnnnnnnnnnnnnnnnnnnnnnnnnnnnnnnnnnnnnnnnnnnnnnnnnnnnnnnnnnnnnnnnnnnnnnnnnnnnnnnnnnnnnnnnnnnnnnnnnnnnnnnnnnnnnnnnnnnnnnnnnnnnnnnnnnnnnnnnnnnnnnnnnnnnnnnnnnnnnnnnnnnnnnnnnnnnnnnnnnnnnnnnnnnnnnnnnnnnnnnnnnnnnnnnnnnnnnnnnnnnnnnnnnnnnnnnnnnnnnnnnnnnnnnnnnnnnnnnnnnnnnnnnnnnnnnnnnnnnnnnnnnnnnnnnnnnnnnnnnnnnnnnnnnnnnnnnnnnnnnnnnnnnnnnnnnnnnnnnnnnnnnnnnnnnnnnnnnnnnnnnnnnnnnnnnnnnnnnnnnnnnnnnnnnnnnnnnnnnnnnnnnnnnnnnnnnnnnnnnnnnnnnnnnnnnnnnnnnnnnnnnnnnnnnnnnnnnnnnnnnnnnnnnnnncactagatttatttccagcaatagtctagtgagggaaataagtttaggaagcagtggagattgccccggtggtaagtttgggagcaatgtgaatgtccggaagcgtgtgcactgtaaggaggaagaaggg

SEQ ID NO: 301975 - DNA, 1037 bp, Homo Sapiens
  misc_feature (46)..(334): n is a, c, g, or t
agtcgacggtaccggacatatgcccgggaattcggccattacggtnnnnnnnnnnnnnnnnnnnnnnnnnnnnnnnnnnnnnnnnnnnnnnnnnnnnnnnnnnnnnnnnnnnnnnnnnnnnnnnnnnnnnnnnnnnnnnnnnnnnnnnnnnnnnnnnnnnnnnnnnnnnnnnnnnnnnnnnnnnnnnnnnnnnnnnnnnnnnnnnnnnnnnnnnnnnnnnnnnnnnnnnnnnnnnnnnnnnnnnnnnnnnnnnnnnnnnnnnnnnnnnnnnnnnnnnnnnnnnnnnnnnnnnnnnnnnnnnnnnnnnnnnnnnnnnnnnnnnnnnnnnnnnnnnagaaaagaaggaaatacgggggtcatatattaagggtatactcaagtccaggggaaggtatgggaagtatatccaggggtcttctctcaagaataactttagaattaaggaaagagtggactagggaagcctctgtgggccacgggggtgaagaggtttttcccttcccttttaaaggcggggcagagggaaacggccatagtggtagacaggtttaaagagcattcccaagtggtcctttcccacgggtgtccagtatattttcccacggctaaaagggggcaaaataaggggggggatatttcttaagagaacttccacaacggggggttcacactaaaagggggtttgtgggagattcccaagatgtacacatttacaggtcatataggtaaaacctaattatctgtggtacaaagaagttttgagagaaacttaccgagaagatagagagatgagtgatgttccccacacaaaacatttttggatgagagaccaggtggtggaagcagagccaacacaaccacactcgtggaacacacaggcggggacattcagtgggggagccaccacaaaacacgagcaaaacgcgaacagagcctgctgagcagaaacacaacaacacccgcacgagcgaccgtcgcgccccacgcgccccacccagagagaaaacacgaacacaggggcgacgagagcgggccca

SEQ ID NO: 301976 - DNA, 441 bp, Homo Sapiens
acgctggaagtggacgccaggagatcggggccaaaggaaattcacaggctgggggccgaccagaagcagagaactccggagcctacacaacaaaaacaagcaaaacagacagacgaaagacaaacatatttggtgcgccaccacatcgagggcccctgagaagaagagttgtacagaacacacaagacgtaatggggggcaggcggcgccccacggaaggggtggtagagaagacacgggggcaaaagagtgtgctaaccaagaaagaaaaccgtggggcaacaaaacaacggggcgggaagagtttcccaccaaaaatataaaaacccgccgggggaaaaccgcaagcggttgtgtgacaaaaaccacaaagtaggaagcgaaggagaccaaacggggagcttcaacaaggggagaccccacagagaggcgggaaataat

SEQ ID NO: 301977 - DNA, 1190 bp, Homo Sapiens
  misc_feature (74)..(109): n is a, c, g, or t
  misc_feature (147)..(299): n is a, c, g, or t
  misc_feature (302)..(318): n is a, c, g, or t
  misc_feature (749)..(870): n is a, c, g, or t
gatgatagatcatatagggcgcccggctgcaagcgaacgacgagcgcagcgagtcttgagcgaggaagcggcgnnnnnnnnnnnnnnnnnnnnnnnnnnnnnnnnnnnnagtcgacggtaccggacatatgcccgggaattcggccnnnnnnnnnnnnnnnnnnnnnnnnnnnnnnnnnnnnnnnnnnnnnnnnnnnnnnnnnnnnnnnnnnnnnnnnnnnnnnnnnnnnnnnnnnnnnnnnnnnnnnnnnnnnnnnnnnnnnnnnnnnnnnnnnnnnnnnnnnnnnnnnnnnnnnnnnttnnnnnnnnnnnnnnnnngagtcagctgcaaaacaatcttacacaaggacatgcacaccaacttagttaccaaataagcttcataaaactgtttattttattgttttggtcaaatgcctgaaatttttttgttaaaatgggccattttctgatttgcctgaagccctgtgacaatttgggaaaagttgacgaggctaataatcaactatcagcaggaggaagaagaactcaaaatagcaaaattcctaagggaagcaggacagacagagtctagaacttccttccactctgagaatcctagcacacctcagaaaaagaggtatatcggaaacactggagaaggagatataaacaacagtaaccaacataaattcaccaggtaaggtttcagtatctactagggaaggtggttcaaaagcatatgctgggagtcacattgcctggctatnnnnnnnnnnnnnnnnnnnnnnnnnnnnnnnnnnnnnnnnnnnnnnnnnnnnnnnnnnnnnnnnnnnnnnnnnnnnnnnnnnnnnnnnnnnnnnnnnnnnnnnnnnnnnnnnnnnnnnnnnnctcgatatgttcttcaggtggctagaaacatggtttagaacattttaaatgtgcaacacaaggtattctattgggtagaaatttgaccgcacaagttctaacctgctagggattgtggtcttaaagagaattattccggcagtttgttaagatggtttgataatttgaatcattaaggatcattggtgaagaaaaacactgggacatcttcagtgtgttaagcgaaggtatcgtaaacaggggggatcaatggcacacaggtggatttacaggggtagaggtttattagggaaggaagggaaaggggaggagttttaaag

SEQ ID NO: 301978 - DNA, 1133 bp, Homo Sapiens
  misc_feature (56)..(96): n is a, c, g, or t
  misc_feature (100)..(135): n is a, c, g, or t
  misc_feature (185)..(211): n is a, c, g, or t
  misc_feature (218)..(235): n is a, c, g, or t
gaaaacaaaagcataaaaactggaagactactattagggcgctagctttttgagannnnnnnnnnnnnnnnnnnnnnnnnnnnnnnnnnnnnnnnnccgnnnnnnnnnnnnnnnnnnnnnnnnnnnnnnnnnnnnagtcgacggtaccggacatatgcccgggaattcggccattacggccgggnnnnnnnnnnnnnnnnnnnnnnnnnnnaatctcnnnnnnnnnnnnnnnnnnctcgattagttactcattattcctcttccagggattccaaaggttgaccttctcaaacaggctctatattgtaggctcattagttaaggcacctcacggttttctctcaaaggcttaatggctcactcaaggttttcaaatttattaccaaaacaatgccttgtgccacggaagcgaaatggaagtgtccctaagccaaaaggtccacaacaattaacctcaaaaatttcaaaaggtggaatcctaaggccaggcgcacgggggcgcctcacggtctggtaatcccaaggcaactttggggaggcgacacagggtgggatcatgcgagggtcaagggacgtcccaaggatcaagcctgggccatagtatggtgtcgaacaccccggcctctaatctaaaatatctacaaaatttcacgctggggctttgggtggcgcgggcggcctggtatatcccaagttaactcccggcgagcgctggagcgcaaggaggatatcggtttggaacccccttgtgggccgaggtgttgcgctggtggatcctggaagtattaaggggccattggcatctcccaagctctgggggcggcgacaggaagcgaagactccccggtcctccaacaacacaatcacacaaaataacaccaacacattctggcgacacaaacttttgtcgtggggcggggtatcgaggggcaccttggaaaaaaagggttttttaagacaccacctctaggccggtgtgggggacggcgggggacgcccaacatagagtctaaatggcgtacacccggtggggcacaaacggggtgtaggtcccacccgaaacagaacaactgcggtgggcgcaccagcaaccacacgacgggcgccgggggactcttccccacacccacgat

SEQ ID NO: 301979 - DNA, 1689 bp, Homo Sapiens
  misc_feature (76)..(111): n is a, c, g, or t
  misc_feature (160)..(220): n is a, c, g, or t
  misc_feature (227)..(246): n is a, c, g, or t
  misc_feature (691)..(691): n is a, c, g, or t
  misc_feature (896)..(896): n is a, c, g, or t
  misc_feature (1673)..(1673): n is a, c, g, or t
tgatcactataagggcgctagcgtcgggttattgcgaacgacgagcgcagcgaagtagtgagcgaggaagcggcgnnnnnnnnnnnnnnnnnnnnnnnnnnnnnnnnnnnnagtcgacggtaccggacatatgcccgggaattcggccattacggccggnnnnnnnnnnnnnnnnnnnnnnnnnnnnnnnnnnnnnnnnnnnnnnnnnnnnnnnnnnnnngtcgtcnnnnnnnnnnnnnnnnnnnnccctgtggccaattttcacaacacattaccgggaagaaaattatattttccgggtgtgcccattttatattggttattagccagaaggggcttttaacctcgtggtgttgttgccccagaatgtgcaggcttcgtggggagcattgggtctaggtggtgcgcgtgggaccttttcttctacagggggccatctcaattcaggatattcgcatataagtgagatttctgagattgagaccaggcgaattagcgcctgggggcgaatttattcaacctctacagttgggggggtagacacggggcgctataaagagcgcccttttctcgatatattataatatgtggcggcacctgtcccctatcttttttgtgagagacgagaatacgggggacgtctataaaacctctgtgggttacaaccactctttggaggctgtgggagatntgatacccccctgtggggtgttaccaacagtacaccaccggggggctactcacaaaacgatgtggtgaggagcggcttatcataaacccctctcctctgtggggggggctcctcaaagggggtgcggtattctgtgttactactattaatgttgcgccccggggaggagcataaaaccactaataaggggcgagatttagacacnaacgaggggggctaacaagcaaagaaccgggggttttctcagcgaccccaaatgtgtgttttgcgcccccaaggaggggctgtgtgggacaaacgacagcgagaatttatatgtcgccctaataagggggccatcaacaaaggggcaagagaatttcttgtgggccccacaaacctcttattaaaaactttttccgccggggagaaaaagtgttgtgctttcggagagcattcttacaccccaggggggttttgttgtgcgaaacgaccccaatgtgtgtggcagaccaccacacgaagcggccccttttgggtggctgcaacaacatatgtcaagtcacaagacctgtatctgcattgcgggaaacaccacgggggggcaattcgcggacacatacgcatttcttcacagttaacaacagagaagcactttattagaacccccatatccaataggggggggacgaatacccatattaatgattgacaggaaaatcttcagggggcgaaaaagttgcggggggactgcgaaactgtggcggagacgaccaatttattagtgttgaaaaggagttatacacaatgaggggatataaacggtgtctgtcaatcacaccgcatgtgtttttgtaagccacccatatgatgttgtacacctatacacgaccacgtttttgttcgtgcccattagaaagttatcaacttgtgtcgattggtgaaaagggggcgacaaatataaacttagacgtttggtgatgtattacaacacggtgtgagngacaactattatatct

SEQ ID NO: 301980 - DNA, 1072 bp, Homo Sapiens
  misc_feature (46)..(277): n is a, c, g, or t
  misc_feature (890)..(953): n is a, c, g, or t
agtcgacggtaccggacatatgcccgggaattcggccattacggcnnnnnnnnnnnnnnnnnnnnnnnnnnnnnnnnnnnnnnnnnnnnnnnnnnnnnnnnnnnnnnnnnnnnnnnnnnnnnnnnnnnnnnnnnnnnnnnnnnnnnnnnnnnnnnnnnnnnnnnnnnnnnnnnnnnnnnnnnnnnnnnnnnnnnnnnnnnnnnnnnnnnnnnnnnnnnnnnnnnnnnnnnnnnnnnnnnnnnnnnnnnnnnnnnnnnnnnnnnnnnnnnnnnnnnnngaagagatctccggtacccaaaaaaataaatgataatgactaacaattaggaagccgggtgtggtggctcagcgccttataatccgcagcacttctgggaaggactagcggcaggtggactcacctgaaggatcagagacagttcacagggaccacgccctggcctacattagcagacacctcatcatctagctagacacacagtacaaaacatagttaggcctggcgcattggctggtgctactgcctactaagccccagcactactttcagcagcgctgacgcaccaggcaccagactcgctctgcccatcgcagcaacggcgcagcacatccgctcgcagacagccccagggatggcaacggccacacaaagcaactcaccatcccgccccgcgcgacccaccccgcgcactcacgcgcaccactccgaaccggcgccgcccgcgcgacccacagcgtgcacaaccacaccccacacacaccaccgcaacccgacccaagggtcccaaacacctcccacaagcggaccaaaccgaacccccacctggacggcccccgcaacccatccagcacaaccacccgccacacggaacaacaacttcccacgcacnnnnnnnnnnnnnnnnnnnnnnnnnnnnnnnnnnnnnnnnnnnnnnnnnnnnnnnnnnnnnnnnggctcacaacacccgccacgcatccgctgccgaacaccaccaggcacccagcccaacccaaccaccgcgcgacccgccgacccagcacatccacacccacacgcaccacagccggcacc

SEQ ID NO: 301981 - DNA, 789 bp, Homo Sapiens
  misc_feature (46)..(114): n is a, c, g, or t
  misc_feature (116)..(133): n is a, c, g, or t
agtcgacggtaccggacatatgcccgggaattcggccattacggcnnnnnnnnnnnnnnnnnnnnnnnnnnnnnnnnnnnnnnnnnnnnnnnnnnnnnnnnnnnnnnnnnnnnntnnnnnnnnnnnnnnnnnngggttcttggacaattggcttatagtttattagtagattagttttcatttaacaaattatgattccttaaattattaagaaaattttaaaacggcatttccttagtagaggcatttttaaaaggtgataccttttaaattagtattaccgagtattaatatttaataagcattctgattatattggattgcaatacctgaagttgttgcacctgacactgaaacataactctttttggttggttttccctgtggattgttaaaaccaatctaaaatgggaagttaaatctcagtggagctatatgattggtttaaaatttcccttagtggatggctcaaaatggatgggtttcattaatagggaagcttttatatcgaagtctaattcaaacttttatggttagctattgggtggctggggaagttacattggtacattggatgcaggattttatactactgggacacggtcactatagtggctggttgctgccttaaagttgcaagttgagtattcacatttggtaccgaatgtccttcaactttaaatggctgtttctaaaacatagggaaatgccttgaactattttcaatcttgtgtactactactattctttctaacaaatatcttggttgcttcctttattggtcatcca

SEQ ID NO: 301982 - DNA, 702 bp, Homo Sapiens
  misc_feature (43)..(276): n is a, c, g, or t
agtcgacggtaccggacatatgcccgggaattcggccattacnnnnnnnnnnnnnnnnnnnnnnnnnnnnnnnnnnnnnnnnnnnnnnnnnnnnnnnnnnnnnnnnnnnnnnnnnnnnnnnnnnnnnnnnnnnnnnnnnnnnnnnnnnnnnnnnnnnnnnnnnnnnnnnnnnnnnnnnnnnnnnnnnnnnnnnnnnnnnnnnnnnnnnnnnnnnnnnnnnnnnnnnnnnnnnnnnnnnnnnnnnnnnnnnnnnnnnnnnnnnnnnnnnnnnnnnnnactgtatcttaatagaggtatcattcctaatagcaactcaagctcactagaaaaggtgcaataagatgctttactgataattaaatatgtggactttcagcctaaagacagtttacttggggagtcactggtaatcagaacaccgatgctattttggactatatggtggtcctgtaattgttagagaacaattattaacataaataaacatctaggaggttggtttagcagttagactgttttgtatttacttatcaggttcattcatctattagcattgagaattttgactagaatttcaaaactaagaaacttagaataaatgaacacctattctaaaactttttaaaatggagttactcccacaaaagtagattcatgtattagctaacatctatgtgattcaggttaactcccaattcatgc

SEQ ID NO: 301983 - DNA, 1063 bp, Homo Sapiens
  misc_feature (50)..(198): n is a, c, g, or t
  misc_feature (206)..(223): n is a, c, g, or t
  misc_feature (578)..(578): n is a, c, g, or t
agtcgacggtaccggacatatgcccgggaattcggccattacggccgggnnnnnnnnnnnnnnnnnnnnnnnnnnnnnnnnnnnnnnnnnnnnnnnnnnnnnnnnnnnnnnnnnnnnnnnnnnnnnnnnnnnnnnnnnnnnnnnnnnnnnnnnnnnnnnnnnnnnnnnnnnnnnnnnnnnnnnnnnnnnnnnnnnnnncaacctcnnnnnnnnnnnnnnnnnngaatctctgacctttttattacccatgtggaaaaggccaccacttcgtgccacctttaaatataaaccattcagggaactcaggagattctccaaggagggaacaatctcgtgcattcaaggttcttctcacccaaggtgtgttttttaaaggcagaaattaattgaaattaggggaagcaagaaaattatgcctgtgtggcccatgagaaaaaaggaggtcttaattctggtccctccaaataaaggcgttttgtttccttctcaataagttttcaccaccaaaaaacttcaacagctcacaagaggggggttttctcgggtccttacattaagttctccccaatgaaaatggngcatatatcaatcctcaaacaaatttcaacctccaaagttcgccacgggcaaaccttttatgaaccccttaggttcctcacaccccttagaggtatcatcatgtgccaccccatttttacagggctacctaagtggtcctaaaagactatatccctctaaactctttccatgttaggcaaaagccccattaaaatttccgggtctggggaaaagtggcttaacatactcctcttaaatttacctcagcaaaaattccaaacatctaacactttgtgaaccctggggtttcctcgtgcccccaaaggttttctgtccccaggggagcccaataattcaccttaacggctttggcccatcccactttgtaacggaaaaaactctcttattaatttaacttcccggctgttaaaatgagaggtccgttccctattttatatcccaaaatttcttaacagtccaaaatatcaaacgtgggactacaacg

SEQ ID NO: 301984 - DNA, 1019 bp, Homo Sapiens
  misc_feature (46)..(354): n is a, c, g, or t
agtcgacggtaccggacatatgcccgggaattcggccattacggcnnnnnnnnnnnnnnnnnnnnnnnnnnnnnnnnnnnnnnnnnnnnnnnnnnnnnnnnnnnnnnnnnnnnnnnnnnnnnnnnnnnnnnnnnnnnnnnnnnnnnnnnnnnnnnnnnnnnnnnnnnnnnnnnnnnnnnnnnnnnnnnnnnnnnnnnnnnnnnnnnnnnnnnnnnnnnnnnnnnnnnnnnnnnnnnnnnnnnnnnnnnnnnnnnnnnnnnnnnnnnnnnnnnnnnnnnnnnnnnnnnnnnnnnnnnnnnnnnnnnnnnnnnnnnnnnnnnnnnnnnnnnnnnnnnnnnnnnnnnnnnnnnnnnngaggaaccaactgtgaatctatataggacagtataaggaaaccgagaaaggtacaaggaaaaacaagtgttagagaatattcgcccaaaaaaaatgttgccatggagcaaataaaattagtgctatttcagatttaaaacctttaaaatgagaaagcacgagattttacgaattcagggaagatagagtacgatacttataagaagatcaaatgggagctatcagagttcaggtacggaacattgacaccgacacacactaaagctattggacactcatggtgaccttacttcacctagaaacaccacaaagaacacttaaatacttctgtaaggacattacggatggcagatacgttgagcaaaaggacgtagaacggaccacatacttttacacatacttaggcagaccacttattgacgcaaaggacaccataacatactgtggaggttgccaggaaaaacacgtagcaggcgcaacaaagtggacccggatttttataattactggttcacgcgattatttaccacttgagattttacctcgggttgaaataaatggggcttacaaagcagaagttcctttgggtcacctagaacaggtacggattcagggcctacagaggggcgcaaagaggaggaacagtcatgaccgcagagtctgta

SEQ ID NO: 301985 - DNA, 866 bp, Homo Sapiens
  misc_feature (45)..(84): n is a, c, g, or t
  misc_feature (88)..(123): n is a, c, g, or t
  misc_feature (173)..(276): n is a, c, g, or t
  misc_feature (377)..(408): n is a, c, g, or t
  misc_feature (692)..(726): n is a, c, g, or t
gagaaccctttgtatcgactcactatagggcgctactcgtcttannnnnnnnnnnnnnnnnnnnnnnnnnnnnnnnnnnnnnnnccgnnnnnnnnnnnnnnnnnnnnnnnnnnnnnnnnnnnnagtcgacggtaccggacatatgcccgggaattcggccattacggccgggnnnnnnnnnnnnnnnnnnnnnnnnnnnnnnnnnnnnnnnnnnnnnnnnnnnnnnnnnnnnnnnnnnnnnnnnnnnnnnnnnnnnnnnnnnnnnnnnnnnnnnnngtcagtaatgcagatggagaggtggatagaatcagtagctatttagatcaagttgaccggatttgatgatagcttacatatgtaaggtcggaaggtaagtnnnnnnnnnnnnnnnnnnnnnnnnnnnnnnnncaacaactgtggctttaatagcaccttgatcagagttgtgaggcacagtgaaatagggtgtggttaatcattcttactttctcctgaagtagtaattccaattggccttggattatactaagcttcatagaatggttctcactcactgaaatgattaacagtttcgggaacaaagagagatgacctggagaacacggtaacacttactaaagtcatactggtatttcagacagtctgccaaatcccttacaaatcaacaaccttgagacagggtaaggaccacnnnnnnnnnnnnnnnnnnnnnnnnnnnnnnnnnnntcctactttaccaattgaggcaaacggaggcttcgaaaaagttcactgggctgaagtcaacagccaatacgtgggcacacggcaagacttcagaagccatgcctgtcctgaattgtcaaaaggtccagtgcatcttccag

SEQ ID NO: 301986 - DNA, 1110 bp, Homo Sapiens
  misc_feature (85)..(120): n is a, c, g, or t
  misc_feature (158)..(461): n is a, c, g, or t
  misc_feature (758)..(758): n is a, c, g, or t
aaagacttttacgtcatatagggcgccactcgtgatagcccgaacgaacgagcgcagcgagtcatttgagcgaggaagcggccgnnnnnnnnnnnnnnnnnnnnnnnnnnnnnnnnnnnnagtcgacggtaccggacatatgcccgggaattcggccnnnnnnnnnnnnnnnnnnnnnnnnnnnnnnnnnnnnnnnnnnnnnnnnnnnnnnnnnnnnnnnnnnnnnnnnnnnnnnnnnnnnnnnnnnnnnnnnnnnnnnnnnnnnnnnnnnnnnnnnnnnnnnnnnnnnnnnnnnnnnnnnnnnnnnnnnnnnnnnnnnnnnnnnnnnnnnnnnnnnnnnnnnnnnnnnnnnnnnnnnnnnnnnnnnnnnnnnnnnnnnnnnnnnnnnnnnnnnnnnnnnnnnnnnnnnnnnnnnnnnnnnnnnnnnnnnnnnnnnnnnnnnnnnnnnnnnnnnnnnnnnnttagaagtttgtggttaaatccccaggtattggggatttccagctatcttccggatttcaattcctagttaaattccatgaggcctgaaagcagaccctatttgactccttaatatcggcgacggtgtgtttatgggcccagattgtgatccggctggggaatgccccaggtgatttggacgacagacttcgtacctccggctgcctgctgcctggttgacatattcctggagatttgccactttctttcccgttgatctgccacgtgtgcgtggactccacctggtgtcactaacnggtttctgccttgctgacctgtgtggccccattcctggtacgagggaagttggttaaaggtctcccacctattatggttaggattccccccagggtccttctcttgacggttaatccaggctgtttgtcctcctttaccattatttttgggagtgccgcccgggctggttacagggtggcaattccccttttcgcgcaattcatgttgcgggctacgcccgggttgtaccgcgggctcgaattgtcccgtgtttaatcccccccaaggtggtttcgcccattacacggggcatgtgcccctttgtgccctgggggcatacacagcggtgtgtctcttgtgtccacccggttt

SEQ ID NO: 301987 - DNA, 900 bp, Homo Sapiens
  misc_feature (44)..(342): n is a, c, g, or t
agtcgacggtaccggacatatgcccgggaattcggccattacgnnnnnnnnnnnnnnnnnnnnnnnnnnnnnnnnnnnnnnnnnnnnnnnnnnnnnnnnnnnnnnnnnnnnnnnnnnnnnnnnnnnnnnnnnnnnnnnnnnnnnnnnnnnnnnnnnnnnnnnnnnnnnnnnnnnnnnnnnnnnnnnnnnnnnnnnnnnnnnnnnnnnnnnnnnnnnnnnnnnnnnnnnnnnnnnnnnnnnnnnnnnnnnnnnnnnnnnnnnnnnnnnnnnnnnnnnnnnnnnnnnnnnnnnnnnnnnnnnnnnnnnnnnnnnnnnnnnnnnnnnnnnnnnnnnnnnnnnnnnttaaaaggggacaacgttagcgtcgatagcgagtatgctcagacaggggagacagaaaaacttttaaattggggggctacgaaggtacgagaactactgtaacaaccaacacagaactttacgcttccgctaggtaaattatacttggggtggccagctcaaatcatctccgacgatttcatctatgttgagacaccgttcctgagactggtgatacaaggcgtgcggattaccactctgacgatgaattacacagagcaccattccgtgggatgtcataatacattacacccggcacctgggggctaccctggaggacgacaccagaggaatacccgcgggcatattggcgacaagcaacgttctcaatacaaaaaacccccgtgggggccaaggacgcacaaggagggttcacaaacccctcgcgtaatcccccagcacgactagcgggcaaggcggcccacagggtggaacaacggggtacttcaccaacagggctcaagcgaagaaatcggacgaacccaactcccgggggctaacaacaccaggtgaaaacat

SEQ ID NO: 301988 - DNA, 955 bp, Homo Sapiens
  misc_feature (52)..(93): n is a, c, g, or t
  misc_feature (97)..(132): n is a, c, g, or t
  misc_feature (170)..(340): n is a, c, g, or t
  misc_feature (532)..(540): n is a, c, g, or t
gacaaaacctgtttttagactcactataagggcgctagctcggttctatatnnnnnnnnnnnnnnnnnnnnnnnnnnnnnnnnnnnnnnnnnnccgnnnnnnnnnnnnnnnnnnnnnnnnnnnnnnnnnnnnagtcgacggtaccggacatatgcccgggaattcggccnnnnnnnnnnnnnnnnnnnnnnnnnnnnnnnnnnnnnnnnnnnnnnnnnnnnnnnnnnnnnnnnnnnnnnnnnnnnnnnnnnnnnnnnnnnnnnnnnnnnnnnnnnnnnnnnnnnnnnnnnnnnnnnnnnnnnnnnnnnnnnnnnnnnnnnnnnnnnnnnnnnnnnnnnnntctgaaagctaccactttcctatttataaatatattcaaatttctggcaaatgaattccataaatataaagagtgtttgcatattcatcctcttgtgcttgggaaaaaatgactataacatcttgttgagtagaaatgatgaaccttggggaaatactgcataaatcacttgacagttttcatttcttaccnnnnnnnnnctatttgaacgatctgtgtacttaaatgagttattttccttcactaagaacttaaaatgttttaaagataatatttccgtctcgtctggaagtaagggaccttttcgattacttccacttacacaggagacacaggtactgtcaaatattgatagtaaaaagctaaatattgagagtggtcttaaaactctgtctacaatcaaaagtcttcagacagaaagaccaatcggtgtgtacataatatagaactattattcagaaataatgccattccatatacttaattcctgagttttttctttatccttatgattaatttctagcactttaggctaaggaaacgggaatgacttctgtgtcagatttagtaaacgatatttgatacgtattcgatcatttccttttattgaacatg

SEQ ID NO: 301989 - DNA, 993 bp, Homo Sapiens
  misc_feature (78)..(113): n is a, c, g, or t
  misc_feature (163)..(285): n is a, c, g, or t
  misc_feature (329)..(451): n is a, c, g, or t
ttgtataactcactatagggcctcctcgtactagcgaacgacgagcgcagcgagttctgtgagcgaggaagcggccgnnnnnnnnnnnnnnnnnnnnnnnnnnnnnnnnnnnnagtcgacggtaccggacatatgcccgggaattcggccattacggccgggnnnnnnnnnnnnnnnnnnnnnnnnnnnnnnnnnnnnnnnnnnnnnnnnnnnnnnnnnnnnnnnnnnnnnnnnnnnnnnnnnnnnnnnnnnnnnnnnnnnnnnnnnnnnnnnnnnnnnnnnnnntacaactaaattgaaaacctaagtccacacaatggttgaatcannnnnnnnnnnnnnnnnnnnnnnnnnnnnnnnnnnnnnnnnnnnnnnnnnnnnnnnnnnnnnnnnnnnnnnnnnnnnnnnnnnnnnnnnnnnnnnnnnnnnnnnnnnnnnnnnnnnnnnnnnnaaatatcacttaggaagttagcggatcccaaggtggaacgcagactactacaatacaatctaactatattataagtgtgtgaaacatccccactgaagggaataggggaaagaaactgcccaagtaattttgggaatgaggctgttagcgtaaaggcaaacagaactgcatataagcattgtactctaactgacaaagttgttccccagtggggaacaattctgatgttgccatgcatgtatactagaatcaaacaactaattaaatagatggtggatgaacaaacacaaaacacaaacaaaaactttttgggccgcttgcgcctgaagaaagttttaaacaccattctttggggccgcggcggccgcaatagttttgatgtgaccctggccaacagcggtccccagagaaacacccgcccagcaaaagtgctggctttctccccaattaaaaaagccccgcgggcaacggacttttcggacaattcccgaaggagtccgaaggcaaagggatcatcacagggcccaggcgactcattaatc

SEQ ID NO: 301990 - DNA, 1154 bp, Homo Sapiens
  misc_feature (351)..(351): n is a, c, g, or t
  misc_feature (563)..(604): n is a, c, g, or t
  misc_feature (753)..(783): n is a, c, g, or t
  misc_feature (918)..(918): n is a, c, g, or t
  misc_feature (1032)..(1032): n is a, c, g, or t
agtcgacggtaccggacatatgcccgggaattcggccattacaggacggggccttaatttacttttttcacaggagttccaaagaatgatagaaacaagagagaccagatggatgaggataaatatgagctgaagaacaaatataccggaaattatcaacttgcgagatcatataccggccagacgcccactcgctacctaaaattgctgactgccactaaaacagagccgaccaaaaaaaccatgactatctctatctcaagctgaccgagcaaactaaaggagccgagcctgacaccatattaaagaatgaatggcctgccgggactgtaccctggattgtatgcgcanaaagctacccgaaagggaccatcccataagaactagccaccatagggtaactaaaacgaaccgctggactaactctagccaaaaagacaaagataataaccgatacgaaaacccctactcgaagctgctctaatcttacttcctacgaaagaactaaatcgaaggagtagctatctcagctgaaaaaacataataggactagttcgaagggnnnnnnnnnnnnnnnnnnnnnnnnnnnnnnnnnnnnnnnnnngatgatgaaagtcatctgatgagaaacaaaagcgaatttgaaataacccaatgacatggaaagcaaatttgacacatggacatataatacaagatcatatttctagctacaaaacataaaaagcaaaacaaaatgaagaacccgattcnnnnnnnnnnnnnnnnnnnnnnnnnnnnnnncacccacaaaaactgtacgcggaagaaaaagcggaaacgcatgagagcccccgattaatcaggacacatcggactgatgggcggaggcgcggaaataggcggacgacgaggcgcctgggggagcggaaggcgcanaggggggacccaccgcgagaacagcggaaaaaactgcgaacccgaagttcattaacaaacactaaacccgaagcgcagagacgggaaaacccagaagaggcctttgtcgacaancactccacgaatagggaaacccgagacggaatatatcaagagcgcgacctatcaaagagcgggaggataaaaggcccgagaaaaaatataaaaattgaaagaaacagaaagtgaagaacaac

SEQ ID NO: 301991 - DNA, 1129 bp, Homo Sapiens
  misc_feature (81)..(116): n is a, c, g, or t
  misc_feature (154)..(327): n is a, c, g, or t
  misc_feature (490)..(768): n is a, c, g, or t
aagattttacatcactatagggcgctagcgccttttatcgaacgacgagcgcagcgaagtatatgagcgaggaagcggcgnnnnnnnnnnnnnnnnnnnnnnnnnnnnnnnnnnnnagtcgacggtaccggacatatgcccgggaattcggccnnnnnnnnnnnnnnnnnnnnnnnnnnnnnnnnnnnnnnnnnnnnnnnnnnnnnnnnnnnnnnnnnnnnnnnnnnnnnnnnnnnnnnnnnnnnnnnnnnnnnnnnnnnnnnnnnnnnnnnnnnnnnnnnnnnnnnnnnnnnnnnnnnnnnnnnnnnnnnnnnnnnnnnnnnnnnncccaatgaagtctttagttctttccctgtcttactatcaccactatttcagacattatttcatgtctgtgcattactgtaagtcttctggctgatccctttttctcaatccaaaacatcctgtctaatatcaccaaactaattttaaaagtaccatccttctnnnnnnnnnnnnnnnnnnnnnnnnnnnnnnnnnnnnnnnnnnnnnnnnnnnnnnnnnnnnnnnnnnnnnnnnnnnnnnnnnnnnnnnnnnnnnnnnnnnnnnnnnnnnnnnnnnnnnnnnnnnnnnnnnnnnnnnnnnnnnnnnnnnnnnnnnnnnnnnnnnnnnnnnnnnnnnnnnnnnnnnnnnnnnnnnnnnnnnnnnnnnnnnnnnnnnnnnnnnnnnnnnnnnnnnnnnnnnnnnnnnnnnnnnnnnnnnnnnnnnnnnnnnnnnnnnnnnnnnctagtccaaagaaaacagcaacagaaaaaaacacctacacagtctggagcggcgggcggtgagcaagctggcgaacaaaactccacaaaaagaatccaggtgtgtgagcacggggccccctagggggcaaccgccaagaaacgaaggagcagatctagggaccatgagaaggagcacccccgcgaacggacgaaacgtagagcgggaggaccacaccacacgatcagaaaaaccgacgcgaccagcggcgaaacaaccggacgcccgcaggccacaaagccccaagcgagacgccccaggcagcaaacaagagcaaaacacacaaaggcaggccagtagacgccccgcgacatgatagacc

SEQ ID NO: 301992 - DNA, 798 bp, Homo Sapiens
  misc_feature (55)..(336): n is a, c, g, or t
agtcgacggtccggacatatgcccgggaattcggccattacggccgggcagaggnnnnnnnnnnnnnnnnnnnnnnnnnnnnnnnnnnnnnnnnnnnnnnnnnnnnnnnnnnnnnnnnnnnnnnnnnnnnnnnnnnnnnnnnnnnnnnnnnnnnnnnnnnnnnnnnnnnnnnnnnnnnnnnnnnnnnnnnnnnnnnnnnnnnnnnnnnnnnnnnnnnnnnnnnnnnnnnnnnnnnnnnnnnnnnnnnnnnnnnnnnnnnnnnnnnnnnnnnnnnnnnnnnnnnnnnnnnnnnnnnnnnnnnnnnnnnnnnnnnnnnnnnnnnnnnnnnnnnnnnnntatttctgccttaattttgttatttacccagtagtcattcagtagcagattgttcaatttccatgtagttgtgcagtttggagtgaatttcttaatcctgagttctaatttgattgcactgtcatctgatagactgttgttatgatttcagttcttttgcatttgctgaggagtgttttacttccaattatgtggttgatttcagaataagtgctatgtggcactgagaagaatgtatattctgttgatttggggtggagagttctgtagatgtctattaggttcgttttggtccagagctgagttgaagtcctgaatatctttgctaattttcggtcttgttatctgtctaatattgacactggggtgttaaagtctcccactattattgtgtgggcatctaagtttcatttgttagttactaagaacttgtttatccaatctgggggctcctgtattggt

SEQ ID NO: 301993 - DNA, 549 bp, Homo Sapiens
  misc_feature (47)..(192): n is a, c, g, or t
  misc_feature (389)..(390): n is a, c, g, or t
  misc_feature (411)..(412): n is a, c, g, or t
  misc_feature (505)..(506): n is a, c, g, or t
agtcgacggtaccggacatatgcccgggaattcggccattacggccnnnnnnnnnnnnnnnnnnnnnnnnnnnnnnnnnnnnnnnnnnnnnnnnnnnnnnnnnnnnnnnnnnnnnnnnnnnnnnnnnnnnnnnnnnnnnnnnnnnnnnnnnnnnnnnnnnnnnnnnnnnnnnnnnnnnnnnnnnnnnnnnnnccaaggggggtttcttcatttgcttaaggggtttcctcggaacgggttttttctgggcctttggaaaacgaattaatttccccttgtaaaggacatccaatccccccaaggttgcctgccacttaaaagaaacattgatccagtttgacatgcttaccccttgtgaagtgcacttgcttgactgacgcccagtgcanntatccaagctacatggcctgnnattccctttcacgatggtgacgttttcacggcaattcactggacagactgaacaaccgcgagaaccatgtttctatttctcccaagccccacnntatagcggcccaatgaaattccggtgacggtgggaccctgcaa

SEQ ID NO: 301994 - DNA, 1059 bp, Homo Sapiens
  misc_feature (51)..(86): n is a, c, g, or t
  misc_feature (124)..(413): n is a, c, g, or t
  misc_feature (419)..(429): n is a, c, g, or t
taaagacgaacgacgagcgcagcgaagtcatgtgagcgaggaagcggccgnnnnnnnnnnnnnnnnnnnnnnnnnnnnnnnnnnnnagtcgacggtaccggacatatgcccgggaattcggccnnnnnnnnnnnnnnnnnnnnnnnnnnnnnnnnnnnnnnnnnnnnnnnnnnnnnnnnnnnnnnnnnnnnnnnnnnnnnnnnnnnnnnnnnnnnnnnnnnnnnnnnnnnnnnnnnnnnnnnnnnnnnnnnnnnnnnnnnnnnnnnnnnnnnnnnnnnnnnnnnnnnnnnnnnnnnnnnnnnnnnnnnnnnnnnnnnnnnnnnnnnnnnnnnnnnnnnnnnnnnnnnnnnnnnnnnnnnnnnnnnnnnnnnnnnnnnnnnnnnnnnnnnnnnnnnnnnnnnnnnnnnnnnnnngtatcnnnnnnnnnnngttgcgggggggtgctcaatcttaactggcagaggatctacagcatgaacaaacaaagtgtggggaaagtgcttaaaaaaaattagaaaatgtggtgcaattttttacaaaattggtaagcgttaggaaatactaatatatggaatagtgaccataagtgtccgagttgatgtattggtacatttcagtcacatgtgtaatgggtcccgagatatgacccgtgtagagcagaatacgggaagtgtaatgttaagcctatttggacagaaaaaattcattcggagaaaaagttgaaggatttcagagacaacacagttgaagaaattacagggtgaatggtcgagaaaaaacggttcgggttccacaagcaacggggaagaccacgcgggggacgacgtgaagggggaacacagagcctcacataagctcgtgggggagcgtatattcaccatctagaggacgcacattggggaacaaatcgcctggcagagcacacgcacgagggctaatgggcggcccacgtggctaaggtggtacacagctcccctttcagacctgtgcacgcccttaggacagtagtacccccaaaacacaagcaagttggacctcggagctgcaaagcgatgaccg

SEQ ID NO: 301995 - DNA, 532 bp, Homo Sapiens
caacgaggcatcagcagttatactgcacataaaaactaaatgagtactggatgagaactgtttgcactagaatcgcttacggaacttcccagttcaatactacacacttaatagaaaactacttttccaaaaaatctactcttaacaaactcgccccatcacacatttaacgcactattttaacacaacaaaatgcatcgacacatacgattctggttatcacaaggacaaagactagtacagtcttatcttctctggtacctaccaatcctagcccacagtacatacccgtggacaataacagtggtactagtatgggctgctgaggttaggcatccttaggtctcgaatcgtgtacctcaattgtgtactacttactagtaaattactctgtacctgttacttcagctgttctacagcgggatgactaccacatacctgtcctctcaaaagttggctactgagcactcacaacattgtgacccatgcctggctcactactggcatacagctcacaccactctaaatcatg

SEQ ID NO: 301996 - DNA, 1238 bp, Homo Sapiens
  misc_feature (49)..(89): n is a, c, g, or t
  misc_feature (93)..(128): n is a, c, g, or t
  misc_feature (174)..(313): n is a, c, g, or t
ccacgtcaaaaaagacttgaatctcctatgggcgctagctcgcgtattnnnnnnnnnnnnnnnnnnnnnnnnnnnnnnnnnnnnnnnnnccgnnnnnnnnnnnnnnnnnnnnnnnnnnnnnnnnnnnnagtcgacggtaccggacatatgcccgggaattcggccattacggcnnnnnnnnnnnnnnnnnnnnnnnnnnnnnnnnnnnnnnnnnnnnnnnnnnnnnnnnnnnnnnnnnnnnnnnnnnnnnnnnnnnnnnnnnnnnnnnnnnnnnnnnnnnnnnnnnnnnnnnnnnnnnnnnnnnnnnnnnnnnataagccactgcgcctggacctatccttccttcttgagtgaagactgaaggctattggatttaccttcggtgatatatgctctcgactagtgatcccacgacagtcctgcacatgcagttcagtatcttcgagatgcatatgaactgtattacttctcgtcttccaaattagagaaaatggtgaggttctccagctacctggtgtggccccaagggttgggaaagtgagcacgtaagagtggagagattctacagaagactccacttgtgcgcaactctttctgggcgctaccataaaagggtccgagagtgagataactgccttgcgaccatcacaaagtgtctatccctatatcccgagaatatacacgcgtgggggcacccataccggggagggcccaacaggttgaccaccacagaccgaagaggtctgccagagggcaataaccatctcttcaacagcagctaatattctcgcacaagcgggagaggacagaacagggggcgatactaagtggccacgaagtcggccgatgcgcaccaaacaaggagagtggagacatatcgagccaccgaggggggaaagccattcccgtgggagcaccccaaaaagggaggtacgaccacccgcgggaaccaccccggcacaaacaatgaaggagacccctacacagcagaaaacaagagaagacacattagggacacatctacacccacagggcgacggcgacaagaacaaccccaagcacacacaccacagacgcccgagagacagagacgcccccaacacgataaacaacgaacgaggcgcagaagacgcaacaccacatggagcgcgggagcaaacctgagcaaaaaccacacaaccatagagaaggaagcgcacccaagcgacaaagagagctcacggagagacacaaccaaa

SEQ ID NO: 301997 - DNA, 551 bp, Homo Sapiens
  misc_feature (50)..(172): n is a, c, g, or t
  misc_feature (285)..(357): n is a, c, g, or t
agtcgacggtaccggacatatgcccgggaattcggccattacggccgggnnnnnnnnnnnnnnnnnnnnnnnnnnnnnnnnnnnnnnnnnnnnnnnnnnnnnnnnnnnnnnnnnnnnnnnnnnnnnnnnnnnnnnnnnnnnnnnnnnnnnnnnnnnnnnnnnnnnnnnnnnnatgacaggaaatgagaagttaaagctgcatggttcaatatttttttgcggggtgaggtaaatattctataattgattgccacattggttacacaactctttgagtatatttannnnnnnnnnnnnnnnnnnnnnnnnnnnnnnnnnnnnnnnnnnnnnnnnnnnnnnnnnnnnnnnnnnnnnnnnttaaaaaattctaattactagaaccagaaatcaaagtcatgtttaacaactcactattatgaggccttgattttgaaagctaccaattttagaattgaatctactctgaaactgttcagagtagattctacttgtttgattaatacttgttgcatctccttcggcatgaaatgaaacctttaaaattcagttgt

SEQ ID NO: 301998 - DNA, 818 bp, Homo Sapiens
  misc_feature (49)..(99): n is a, c, g, or t
  misc_feature (269)..(360): n is a, c, g, or t
agtcgacggtaccggacatatgcccgggaattcggccattacggccggnnnnnnnnnnnnnnnnnnnnnnnnnnnnnnnnnnnnnnnnnnnnnnnnnnnatgcataatgagatatttcgaggaggggacccaagtctaaacataaaattcagttatgtttcacatacatcttatacacaggctgaatgtaattttatgcaacattttgaataattttgtgcatgaaacaaagtttgactgcaacccatcccatgaggccagatacaatnnnnnnnnnnnnnnnnnnnnnnnnnnnnnnnnnnnnnnnnnnnnnnnnnnnnnnnnnnnnnnnnnnnnnnnnnnnnnnnnnnnnnnnnnnnntagttttcaagctgtttttcaaacaatagcttttcaaaagaaagcttatatgcaaacacaagatgcagaactaaagtcaagagcagctctggtgcagtctgagagccatgctttctcttagcccttccttcccctgctacctctcagaaaagtgtattattacccagagatacgttacagatattctgagcaagatcatgagctcatgtctgaggtggcttttacttgaagcatttgtaattttgtgcccataaggaagtttcggtcacattacaccattttttaaaagtgactttctttaaatttttgcagcaaagtcatagccttagctggcatcaaatgctttgaaataaaccagtttgctctgaaattaacatagataattctattaataacaccaatcaactatacaaaacttactggtttccagatccacttaaattatgcagatactgtca

SEQ ID NO: 301999 - DNA, 1363 bp, Homo Sapiens
  misc_feature (50)..(104): n is a, c, g, or t
  misc_feature (200)..(220): n is a, c, g, or t
  misc_feature (606)..(614): n is a, c, g, or t
agtcgacggtaccggacatatgcccgggaattcggccattacggccgggnnnnnnnnnnnnnnnnnnnnnnnnnnnnnnnnnnnnnnnnnnnnnnnnnnnnnnntgttaaaaaaatttccagttgaaaaagtatattcccatatctgtgttgttctaaacctatttaaaaatcctctagtaacagaattaagttgtgtgnnnnnnnnnnnnnnnnnnnnnggggccagaccaagaacctcggtttccaaagagaaacccccaacaaaaacacccagaacaaaaaagagaaacaatgtgtatgggcgttttaacaatcttcacatcttcaatataaatctcccaaatattgagtttttttatccccaggtgcctatttggctcttatgggtttaagaggtggcctcaatatagctaaaccatgtgtggcgcatagggggcatactcatattgtggggagagtgcccaattctcttagaatctcattccatatttgtggcgacaacacctttacaatgtgtgtggggagaggaccttctctgtggagcgcggcatgtgatctccttttaaaaattattaagcggaaatctaaccctttgtgctgtgannnnnnnnnattttttcttttcttgtgtgcgtatctccaggtctgtcccccaatatatcttcctgtgcacgcgagcagggcgcgccgtggttgagcacttgttttgtgtcgccaacacaaaccctcttgtgaacccgcggtgggtctcgccctgttgcacctgtcgcctgtgttggaaccaacttggtgcctctctgttggacccatcctcgtgcgggcgaacatctccccacgaggagagaacctctcgagatattttcccacaggctgtcgggccggggggagactcgtggctactacacaattttctcttctgttgtacactcccccttcttataattcgtttttattttacacccctttaaaccatcttcacgcggggcggcgaacaaaactactacccaattttttttgggcacccatcacagcattctttttgtgccgcccccaaaaaacatcaatgccccccagagggacagtgtctctaaaacagagaacaaacaccgtgggggggtcgtgggaggccgaccacctcttgggggcgacgatctcgcaaggggggcacagacaactcttttcttggacacatttgtgtgtctccgagtcggttctcacacacaacatcctcccctgtgggattttttgtaatgaaacccccccaccggcggtttgtttcttgcgtcacacccaacgtctggttgtttcttccttggggcctgaaaatttccacttctacccgtgcgacactcactcccgag

SEQ ID NO: 302000 - DNA, 999 bp, Homo Sapiens
  misc_feature (50)..(338): n is a, c, g, or t
agtcgacggtaccggacatatgcccgggaattcggccattacggccgggnnnnnnnnnnnnnnnnnnnnnnnnnnnnnnnnnnnnnnnnnnnnnnnnnnnnnnnnnnnnnnnnnnnnnnnnnnnnnnnnnnnnnnnnnnnnnnnnnnnnnnnnnnnnnnnnnnnnnnnnnnnnnnnnnnnnnnnnnnnnnnnnnnnnnnnnnnnnnnnnnnnnnnnnnnnnnnnnnnnnnnnnnnnnnnnnnnnnnnnnnnnnnnnnnnnnnnnnnnnnnnnnnnnnnnnnnnnnnnnnnnnnnnnnnnnnnnnnnnnnnnnnnnnnnnnnnnnnnnnnnnnnnnnnncttaaatgaagttaaacacacatattaaaacagtagcaggagaggttacctgtttgagcacctatattttcttagagggaatcatgtcttaccagccagattgcccataaacctcaaaaaaagtcacctgggagaaaaatataacacaagacttgattttgcaatgtctgtaagccccctcaaaccccaaacttggggctcactgaatgaagataatttgtttttccattttcttcttgagaaaaagatgatttttaaaaatcagtgccttttgatatattttcaaagtccgacaatgtgattgattaacatcaagtctcttgtgtgaatttttctaatgctccagggtagtttcctgattgacagcatatacagaagtatttcagcattcattggtaggaaaagctagcagaaaatgaccagtcaaattataggcacccaaaaaacaacaagagacgacacaaacacactgtcgaggcacgctctagggccccgagagaaaggttcacagagccaatgcgtatgggcaccgaggccacagagggaagtcacactgggccgagcaggacccagagcacacccgcggacgagcaaggcagggatttccaccgataaaaagcccggggacccagcgtcgaaaaacccaatggatcagaggcac

SEQ ID NO: 302001 - DNA, 1658 bp, Homo Sapiens
  misc_feature (1140)..(1193): n is a, c, g, or t
agtcgacggtaccggacatatgcccgggcaattcggccagttacggccggcgataccgtcattcatcgtgaagatgcctggcaataaacatatggaacttcgttcctggtagcctagccctcaccccgttacaggacctttttcgtccgtagtttttgagcacgaagacaagttcaacgcaacgaacgacataccatgactatgctatcctacttgtccaacgaacacttgactacctattcgctctcacagtgggacattagagacgactatccaacagaaacgacaagactacttcatctctacagacacacatgttcaacgccttggccccgacatgtgccccgtctcctatgagcagcaaaatggacacgaacacttaattccacggacccgcccaaaattataccacgtgggactactgtacacccaagctgttggtttcctacctttccttgcaacagtgctttggaccggatggtgaagcgaattatcccttcgggggactcatgtcataccccgaagaagtgaaacctaagtggtcgccccttagcgacacattgataaagatgggttaccttggaccatcggcttcacccccagatacatataagttaaccatcactgcaacatctttaaaacaccgatcaattactgcccactttccccaccccgattccattaattaaacttattctatcccccaaccaaatacacctcggtctttcgctttacgccccccgagactggcacattatctcattcaatgccaaacacctcactaacaaccccccaccaagtacacctattgatgcacacgctttaccaagcccaacggtgcccacttgggtcgtatcccactttggtggcctcgcagacacgcccaccctaaagacagtgcccgaagcgtccaaaatgccaaatggtcccaaaacacttatgagcctccacagagacccaaatagtgtcatcacaacccccaagaaaagaccgcccgaaacacattaccccactcacacacacaaacaccctatgacgcacacgcgacatatcacacgccacaaccgcaggcacaacaaccaggcaccccaaccaacacccaacacaaccaccctcagccgcgcgcacagatacacgggnnnnnnnnnnnnnnnnnnnnnnnnnnnnnnnnnnnnnnnnnnnnnnnnnnnnnngagcacaccccaccgcccgacaccaaccagccaccaacggggacgcgccccggatacccaacctgcgccaccctccccgccatccgcaccccccccataccgccccgaaaccatacgcacacaggcgacccacacagccgcacacagaccctaacgcaaaaggacagcacaggggccgcccgccactcactgacaggcacacgccacaccgcgtctcccaccgacgctaacgccgcgacacaccggcccgcaccgacagcaatacgaaacgctcgaccgcacagtctacaacgccccgctacgactcaccccacgacgagatgcacaccacccagatagtaggggcgagatccccaccttctgggggccacggcagcacccccgacggccgagaggtgcccctttccccacccccgtaccgcgctgcccgctcccgctccgcaaagacgacaacagccgacctgc

SEQ ID NO: 302002 - DNA, 666 bp, Homo Sapiens
  misc_feature (48)..(156): n is a, c, g, or t
agtcgacggtaccggacatatgcccgggaattcggccattacggccgnnnnnnnnnnnnnnnnnnnnnnnnnnnnnnnnnnnnnnnnnnnnnnnnnnnnnnnnnnnnnnnnnnnnnnnnnnnnnnnnnnnnnnnnnnnnnnnnnnnnnnnnnnnnncaatagataaagcataataagaaagacaaactaccttgttgcgggcgctcgctgcctctcgagagaagtacttttgaacccacccactccggggattggttggcgcgcgcgcgtgtggcccacacaagattacgggataccaagacagacagtatcctgtgggccattagagaggaatagttccccacaaaagggcaagagctccgagggaaggaatcaatgatctcttatagggcgttcagcgcagtagttttctctctagatcagcctttataaataacagagcgcgccaggttggaggaccgaacagcgcgcgtcttcttcgttgagacagatacactctgcgtataccctggagaccttcccaggggaggcgctatctatccacgggggggccgccctttagctcagagaccgaggacgggagggtctcgacaaagcgcgatcacgccccggagttctccatagatatatttgtcacgcccaccgcggcgcctctggggtgggcga

SEQ ID NO: 302003 - DNA, 535 bp, Homo Sapiens
  misc_feature (77)..(112): n is a, c, g, or t
  misc_feature (155)..(227): n is a, c, g, or t
tagactcactatagggcgctcagctcttacagccgaacgacgagcgcagcgagtctgtgagcgaggaagcggcccgnnnnnnnnnnnnnnnnnnnnnnnnnnnnnnnnnnnnagtcgacggtaccggacatatgcccgggaattcggccattacnnnnnnnnnnnnnnnnnnnnnnnnnnnnnnnnnnnnnnnnnnnnnnnnnnnnnnnnnnnnnnnnnnnnnnnnnctctctggtgcttcaagcaacatctctggagagtcgtgttgtgtgaattggtttgtatacattagtatgtgtatgtattcacacattcatatacactcaggatacagttggcctaattatcattggggccataggtaaaacttatgaagaatgttctcatgctgaattgtaattttcttttacctgtaaagtaaaatttagatcaatcccatgtctgtgtttattttgaatatcatagatatgctgtacatttaaagaggcaatgctactgggattatgtaggttctaactcattttaacaagggcac

SEQ ID NO: 302004 - DNA, 935 bp, Homo Sapiens
  misc_feature (80)..(115): n is a, c, g, or t
  misc_feature (158)..(455): n is a, c, g, or t
gagacttgtataactcactatgggcctccggtatcagcgaacgacgagcgcagccgagtattgagcgaggaagcggccgnnnnnnnnnnnnnnnnnnnnnnnnnnnnnnnnnnnnagtcgacggtaccggacatatgcccgggaattcggccattacnnnnnnnnnnnnnnnnnnnnnnnnnnnnnnnnnnnnnnnnnnnnnnnnnnnnnnnnnnnnnnnnnnnnnnnnnnnnnnnnnnnnnnnnnnnnnnnnnnnnnnnnnnnnnnnnnnnnnnnnnnnnnnnnnnnnnnnnnnnnnnnnnnnnnnnnnnnnnnnnnnnnnnnnnnnnnnnnnnnnnnnnnnnnnnnnnnnnnnnnnnnnnnnnnnnnnnnnnnnnnnnnnnnnnnnnnnnnnnnnnnnnnnnnnnnnnnnnnnnnnnnnnnnnnnnnnnnnnnnnnnnnnnnnnnnnnnnnnngaaattttttgaccggaaaattaagaggacggcttgaagggaacccagacaatgagaagggccaggaaaagaaagagctggaaattgggagaaagcccaagagctcagaacagttgggatacgggacgaagaaacaaggggtctccactacagacccagcccaggttcaattgtcctccgaaagattgaggttcttccccgtggtgattggctccccatgccctgttctatccaagattcaaattctccctttgtcctccggggggaatatctaagacaaggcaagcggaatcccgtaatagatgacgatgggattggttagcacatgtgaggggatccctccgaggtgtaactaaacgggtcgttttcccctgtttgaacattagaaaggcacggtggtgggccatgagcatgtatccccagttaaagagctggttgtccgtaaaacccaaatttccaaacagtttgtagaacaaccat

SEQ ID NO: 302005 - DNA, 1203 bp, Homo Sapiens
  misc_feature (44)..(99): n is a, c, g, or t
  misc_feature (101)..(114): n is a, c, g, or t
agtcgacggtaccggacatatgcccgggaattcggccattacgnnnnnnnnnnnnnnnnnnnnnnnnnnnnnnnnnnnnnnnnnnnnnnnnnnnnnnnngnnnnnnnnnnnnnngattctgactaattattcccatggtggaaaagccaccacttcgtgccactttaaattaaccattcagggatctcagagattcttccaaggaggacaatctctgcattcaaggttctttacaccaagggtggtttttaaaggcgaaattattgaaattagggaggcagaaattattgccttgttggccccattagaaacgcgaggctcatattccttgtgttcccatcacataagggccatttttattctcttatcattagtttacacccagaaccttaaggttaaacagtgtggttttttctgtgttctctttatcatactttcttccccatgtgaaaatgggggcatttttcatctcttacaacagctttcaacctccaagttcgaccagggggcaaacctttatttgacccttaggttcctatcaaccccttatgtgttattcattcattgtgccacccatttttgaacgggcacacctaattggtcctaaagctttattccttcataaaactcttttctcagtgtttaagcaagagcttcaattaaacttccggtgcctgggaaacatgtgctatatgatacctctcattaacatttaccttcagccaaagattcccaatttttacctttttggaacccgtggattgccatcgggccaccaaagtttcgtgtccccaattggaaagccccaatgtatttcaccatattaccggtttatggtcacaattaactgtttttaacccagaaaaaactttcttttaatcaaacgcttactctccagggtgtataaacatttgagagtcccgtagcgctgattctaatttctccaaaattttctcgtaaaatttccaagatgttttaaagcggtggacagataacacatgtgggccccagatacccaatttcgcgggtttccctttcactgtattaacgccaacatttgtgggacaacatttagagttttgcccctattcccgggaacgagattaagggccctttagcacatttcaccggccttcatgggaaataaaaaggaagacagtttaaacaactccggaccagtttttacgtgatggggcccttatg

SEQ ID NO: 302006 - DNA, 1494 bp, Homo Sapiens
  misc_feature (47)..(62): n is a, c, g, or t
  misc_feature (323)..(323): n is a, c, g, or t
  misc_feature (917)..(917): n is a, c, g, or t
  misc_feature (1138)..(1138): n is a, c, g, or t
agtcgacggtaccggacatatgcccgggaattcggccattacggccnnnnnnnnnnnnnnnnagtaagggcccctccaattgtcccccgaaaatgtttttaaaaggactctcaccgagagaagtgggggtaagccttgtgggcggcatgtgggcttagcgctgaagagaatgatagaacatttgtgccccgtggtcaagatggtcgaccggaccatccctctactgctatccctctccgagaagacgcgtggaatgaacgccctctcagacaaaaacaatttgctccgttggaacagcgttgatattcttgatatatcagcancggctgggagtgtgtgtaacaaccgtgtgtgtgtgccagtgagacatgtatgtgcagccgtgtttgtatgttggaagcatagaaccgtgtgtctccccttgtggggtattttaaacgcgcgtgtgttcaacgggcgcaatgagacgggtgtgcttacgggggagaaactaatctctgtctatatggagagcgccgagtgagagaaagaaaacaccgagggatgtgtgtatgtgtgagtctctgtgagcgagagagtgcggtgcatgcaagagggggcttgtgggcacgaaagggttcgccaaaagcgcgctgtggatgagacacacccgagatgttacttcctgctatctttatataaacgcgctgagagtgtttgtttttgagggggctccagaaaacaaactaccgcgggggggagcgctgtgagtttaaaacatgagcgcctgttgagacgagtatgtgcgtgaagacgcgggggatatgagtcgaatattttatagacggcgccagttgggtaaaacatgtggtgtattgtcttcagctgctgcccattaaacacatcttatatgttgtcctagagggagtggattaaantcaatgatgtggtgtgaccgcgccaagagttatctctcggagaaagtatctgttgtttgaacaaagagacgatatgttggcaccacctgccaaacatacttgtgggggcggttatcaccactaccgggtgagtaagtatgtgtggaaagaacaactattctttgaggggcgcaccgccacgcaagtaaaaaacccgcagtggtttcaaattgtgtgtggtnttagaagggggacaagaagaatattaatcaagatcgtgtgactcttgtgccgcggtgtatacaacccggcgataatcagaggtgtcaagcaataaagaacaacatacattcagtcacaaacaaaaaacaaccacagctgtgtgtgagggagccctcactcgcgtggcgagctcctagtagagaagaaaaaggttgtgttatgtaagtacaagcaacaacaccatctatagtagtagtgagcgcgcggcgggggcacccccaacagtatagagtggactagtgaaacaacaaacagaggggagcaacagagatgaggttgctgcccagcaggagagaaaaaactacgggtggagcac

SEQ ID NO: 302007 - DNA, 1184 bp, Homo Sapiens
  misc_feature (98)..(128): n is a, c, g, or t
  misc_feature (167)..(322): n is a, c, g, or t
  misc_feature (324)..(333): n is a, c, g, or t
aaaaaacccatttgtatagactcactatagggcgctagcgcgttttttcgaacgaaccgagcgcagcgaggtcagttgagcgaggaagcggcgcatcnnnnnnnnnnnnnnnnnnnnnnnnnnnnnnncagtcgacggtaccggacatatgcccgggaattcggccnnnnnnnnnnnnnnnnnnnnnnnnnnnnnnnnnnnnnnnnnnnnnnnnnnnnnnnnnnnnnnnnnnnnnnnnnnnnnnnnnnnnnnnnnnnnnnnnnnnnnnnnnnnnnnnnnnnnnnnnnnnnnnnnnnnnnnnnnnnnnnnnnnnnnnnnnnnngnnnnnnnnnncaaggctaactaattattttttcatctccttagaaagcttaaaatttccccatgtgttgttagcatgtgcaaatataaacaaatttagcgggggttgtgttacaaaagcccgggcgaacaattctgtgatatatttatttaattagagggagaaaaacctctcatttcacccaggatattggtgacaaaggaattaacttacacatcttcgttaagaactatagggccattttaacacattagtttattttcacaccttattattctcgtgctattgtttccagagaacttcgtgcaggtgcaaggatttaacaccaggttgtacaatatagattccttggaaagagacacttttaacaaaaagaagacccaaaattgtgaaactctctgaggggagtgaaacgcccctaccaaatttcgtggccatttaagcgaaaatacctggggctcgtgggaactaaagtgcctttttttaaagaacattggcctctgacagcagaacacgaatttactgcgcacgattcgaagcgaattatctccattcgcgttaagaaaacacgatactccacaaacggggaactcctttccaacgggcaacaacacagcattgaccacgactctggacccagcagttaactcggcggacgctacgtgggggcaacactatacaaagacaggcctataagtcaattcacttttaccattttcaaggcacctctgacagggcacgggcaaggggcggcacacataacaattttttcagaacaataagtggctaaatgttgtatgacccccacaattgcgagcaaacctggtacacttggcacggtcataagacgcatacactacac

SEQ ID NO: 302008 - DNA, 292 bp, Homo Sapiens
  misc_feature (43)..(78): n is a, c, g, or t
  misc_feature (116)..(210): n is a, c, g, or t
aaaacggacgagcgcagcgagtttttgagcgaggaagcggcgnnnnnnnnnnnnnnnnnnnnnnnnnnnnnnnnnnnnagtcgacggtaccggacatatgcccgggaattcggccnnnnnnnnnnnnnnnnnnnnnnnnnnnnnnnnnnnnnnnnnnnnnnnnnnnnnnnnnnnnnnnnnnnnnnnnnnnnnnnnnnnnnnnnnnnnnnnccaagtcggatgacttcgattactccaaaattagcgccccggcctctgattgtataggattgaagagagcagcgaaaggcac

SEQ ID NO: 302009 - DNA, 1086 bp, Homo Sapiens
  misc_feature (50)..(861): n is a, c, g, or t
agtcgacggtaccggacatatgcccgggaattcggccattacggccgggnnnnnnnnnnnnnnnnnnnnnnnnnnnnnnnnnnnnnnnnnnnnnnnnnnnnnnnnnnnnnnnnnnnnnnnnnnnnnnnnnnnnnnnnnnnnnnnnnnnnnnnnnnnnnnnnnnnnnnnnnnnnnnnnnnnnnnnnnnnnnnnnnnnnnnnnnnnnnnnnnnnnnnnnnnnnnnnnnnnnnnnnnnnnnnnnnnnnnnnnnnnnnnnnnnnnnnnnnnnnnnnnnnnnnnnnnnnnnnnnnnnnnnnnnnnnnnnnnnnnnnnnnnnnnnnnnnnnnnnnnnnnnnnnnnnnnnnnnnnnnnnnnnnnnnnnnnnnnnnnnnnnnnnnnnnnnnnnnnnnnnnnnnnnnnnnnnnnnnnnnnnnnnnnnnnnnnnnnnnnnnnnnnnnnnnnnnnnnnnnnnnnnnnnnnnnnnnnnnnnnnnnnnnnnnnnnnnnnnnnnnnnnnnnnnnnnnnnnnnnnnnnnnnnnnnnnnnnnnnnnnnnnnnnnnnnnnnnnnnnnnnnnnnnnnnnnnnnnnnnnnnnnnnnnnnnnnnnnnnnnnnnnnnnnnnnnnnnnnnnnnnnnnnnnnnnnnnnnnnnnnnnnnnnnnnnnnnnnnnnnnnnnnnnnnnnnnnnnnnnnnnnnnnnnnnnnnnnnnnnnnnnnnnnnnnnnnnnnnnnnnnnnnnnnnnnnnnnnnnnnnnnnnnnnnnnnnnnnnnnnnnnnnnnnnnnnnnnnnnnnnnnnnnnnnnnnnnnnnnnnnnnnnnnnnnnnnnnnnnnnnnnnnnnnnnnnnnnnnnnnnnnnnnnnnnnnnnnnnnnnnnnnnnnnnnntggcgccaccacatagaacccggggcggcaaacctacaaaacgggggccgcgccgccacgggttctaaccaccgtaccaattggcgggccaaactgtgcacacaacctcgagtggaacacggcataaccacaatacccccaaagctcgaagttcacaacatggcggcccccacatcacaccccggcaatatatccccggaacaaaacaacacgcggcagcgtcac

SEQ ID NO: 302010 - DNA, 834 bp, Homo Sapiens
  misc_feature (46)..(317): n is a, c, g, or t
cagtcgacggtaccggacatatgcccgggaattcggccattacgtnnnnnnnnnnnnnnnnnnnnnnnnnnnnnnnnnnnnnnnnnnnnnnnnnnnnnnnnnnnnnnnnnnnnnnnnnnnnnnnnnnnnnnnnnnnnnnnnnnnnnnnnnnnnnnnnnnnnnnnnnnnnnnnnnnnnnnnnnnnnnnnnnnnnnnnnnnnnnnnnnnnnnnnnnnnnnnnnnnnnnnnnnnnnnnnnnnnnnnnnnnnnnnnnnnnnnnnnnnnnnnnnnnnnnnnnnnnnnnnnnnnnnnnnnnnnnnnnnnnnnnnnnnnnnnnntgattgacagcagccaagcactcagttcgtcaaaaactgcactcacagctgacgcccctacgcatgaacgttcgaattaccccagtaactgcgcccctgccacatgaggtccactgtctaggcacccaccccacgcgcggacctcctatgcacattgcccgcacagaacctagacgcccttacgcttgttacacgacgctatctcatgtgccacgtgaatcgcactgtgagggtgcccactgggccttaaagttcaactggcggccaggagacggaccaacaaagcgtggcgagccaaaggctcgacatttaggccgcagccctaacagaccccccacacctggtcaccaccccagcctagtgtcatgcgcctatggtacgcggccaagacccgagagctctaccaaatgcagatctccgttcccactttgcttgtccacaagatagtgtggcctactgacgccactggtatgcttgtgcagcgagtttgtacagagctgctgatatgctttgaaaa

SEQ ID NO: 302011 - DNA, 921 bp, Homo Sapiens
  misc_feature (399)..(399): n is a, c, g, or t
atctcccagccggggttaacacggcgagaatcttctgttctcaaaaattgaacaacattgcacgaagagaacaagcacgtttcaatgcgactcacagttcccacatgtggctgtgggagaggctctcagggaaaccttaagaattcttgtgacgagaagggccccttctttcacgagggccgcgcacggagaagcagaacattgaacgcccaatattgacggaggaaagcccctttattaaacccttcatcaagaactcctcggtggagaacactcacttaatcgacaagcaaccgacgcttggggcgcgacacaccgggccccctaatggcactcctaagtgtatattcctcccacgtgtggttccccacacgcctgtttgcaccacgcgaggggcanttatcaacgacttctcagggaactgcacaactcggcgctgggcgcagcacatttagaaacctcgaagccggcggttaatttcacagggggggtgataacagcacaggggggttgggccaatcttaccaggtcggggaacaccatttagttgggccctttttgcacatcgtgcctacatctcacaaatttacccccataaggtgtgcgacgagttgtcccaattaggggcttcccccccgcgtgctaattgacttcccggaggacggtttatagcaacggcgaccagcgcttcccaaggggccctaacacagcgacttttcttaccctttttgcagcagaaattcccccagaggaaacataagtgcgagggaaactatattgcaacaggacctttcaaacatgggcagagtgaaaaccccccgcgctgtgtaagcaaactggtcacggtggtgggacacaacgttcttcgcacaacgcaccctcgcgaaaacgtggacctctttaggcggggccagtccccag

SEQ ID NO: 302012 - DNA, 370 bp, Homo Sapiens
  misc_feature (75)..(110): n is a, c, g, or t
  misc_feature (148)..(296): n is a, c, g, or t
  misc_feature (298)..(324): n is a, c, g, or t
gacttttatatatataggcgctacgcgcttcatcgaacgacgagcgcagcgagtagttgagcgaggaagcggcgnnnnnnnnnnnnnnnnnnnnnnnnnnnnnnnnnnnnagtcgacggtaccggacatatgcccgggaattcggccnnnnnnnnnnnnnnnnnnnnnnnnnnnnnnnnnnnnnnnnnnnnnnnnnnnnnnnnnnnnnnnnnnnnnnnnnnnnnnnnnnnnnnnnnnnnnnnnnnnnnnnnnnnnnnnnnnnnnnnnnnnnnnnnnnnnnnnnnnnnnnnnnnnnntnnnnnnnnnnnnnnnnnnnnnnnnnnncctctcttcctactcccttagtgttttgaagaaaatcacacagtcc

SEQ ID NO: 302013 - DNA, 1082 bp, Homo Sapiens
  misc_feature (43)..(271): n is a, c, g, or t
  misc_feature (394)..(438): n is a, c, g, or t
  misc_feature (471)..(492): n is a, c, g, or t
  misc_feature (500)..(795): n is a, c, g, or t
agtcgacggtaccggacatatgcccgggaattcggccattacnnnnnnnnnnnnnnnnnnnnnnnnnnnnnnnnnnnnnnnnnnnnnnnnnnnnnnnnnnnnnnnnnnnnnnnnnnnnnnnnnnnnnnnnnnnnnnnnnnnnnnnnnnnnnnnnnnnnnnnnnnnnnnnnnnnnnnnnnnnnnnnnnnnnnnnnnnnnnnnnnnnnnnnnnnnnnnnnnnnnnnnnnnnnnnnnnnnnnnnnnnnnnnnnnnnnnnnnnnnnnnnnnnnnncaattacttgcgcttctcatcatacaaccttatgagacccactcccccaatacacaggaaaactgttacctttctaaagggctctttgttgagcttttcttagttggaaaccttcatgttacnnnnnnnnnnnnnnnnnnnnnnnnnnnnnnnnnnnnnnnnnnnnncctatgacacaagagaaaagcaatacagtagtnnnnnnnnnnnnnnnnnnnnnntagcctgnnnnnnnnnnnnnnnnnnnnnnnnnnnnnnnnnnnnnnnnnnnnnnnnnnnnnnnnnnnnnnnnnnnnnnnnnnnnnnnnnnnnnnnnnnnnnnnnnnnnnnnnnnnnnnnnnnnnnnnnnnnnnnnnnnnnnnnnnnnnnnnnnnnnnnnnnnnnnnnnnnnnnnnnnnnnnnnnnnnnnnnnnnnnnnnnnnnnnnnnnnnnnnnnnnnnnnnnnnnnnnnnnnnnnnnnnnnnnnnnnnnnnnnnnnnnnnnnnnnnnnnnnnnnnnnnnnnnnnnnnnnnnnnnnnnnnnnnctcatatacggaggacaatcgccactgtttggagccgcccctgtcgtcccctcctgaagaagtctttgcttaaaaaccagattcggaactggagcccgtcggtagccccagggttggtgtaagcgtgagcacacattgggacaatatagcgtggtatcgcctaaagagaaactcccgctggaccagtaaccaaaggagcgtggaaatacctcaccaccaatataataaaaacgccgctcgcgagaaacaccgaacagtttgcgaaaaacgctccgatgttggtaagt

SEQ ID NO: 302014 - DNA, 246 bp, Homo Sapiens
  misc_feature (52)..(147): n is a, c, g, or t
agtcgacggtaccggacatatgcccgggaattcggccatgactagtgcttgnnnnnnnnnnnnnnnnnnnnnnnnnnnnnnnnnnnnnnnnnnnnnnnnnnnnnnnnnnnnnnnnnnnnnnnnnnnnnnnnnnnnnnnnnnnnnnnncaagcgagctcgatatcaaatacgccgcccgagaaaggggaatttccaaaacccaaaattttccccttttcaaatctttttctctctgtgtttcataag

SEQ ID NO: 302015 - DNA, 905 bp, Homo Sapiens
  misc_feature (47)..(126): n is a, c, g, or t
  misc_feature (497)..(505): n is a, c, g, or t
agtcgacggtaccggacatatgcccgggaattcggcggccgacatgnnnnnnnnnnnnnnnnnnnnnnnnnnnnnnnnnnnnnnnnnnnnnnnnnnnnnnnnnnnnnnnnnnnnnnnnnnnnnnnnaaaaatattctccatatggtcgtggtggaacaaccgcgggtttattcccctgtggcccccatcaccaaaatttttctaacaggcgagcatatttatactcagtgagcctctgaggtcactaacaccagaggggaggtgttgctcctcacagcggattaacgagggggatataaaactcctccgacatcaacagctctttgaccgcacaggccgcagaaaaagactatcccacgctctgttttacatttttcaaacagtagttcctacagaccgagactagttattttcttcacaaatatcacgacgctgcagtgtttgtccagcgggaggagtttcacaaagccaagctcttttcacatctttcttctacnnnnnnnnncatttattatgccaaaatccacgcgtgtgaagtgtgtgtccacagtcccacccgccgagaagcaaccgcttcagccaatgtatgaatcggcaaactcaatcgtcgagtgtgtgtttcaatcttccccccaaatgattagatagtgtttaaaaacaaaaataggggcgacctcgttgtatagatattagtgagcggagacttctctatatatacgaccaggggtatctaaccacaaagacagaagagcgtgttttttaaacaaagagagggaagtttttttctctcgcttattattgagagatatcagctagctacagatgttatacttacttaggggtaagagacgcgcaagaagaaaagtattccttcttaccaagggcgagtatacaataagtaaaat

SEQ ID NO: 302016 - DNA, 955 bp, Homo Sapiens
  misc_feature (61)..(103): n is a, c, g, or t
  misc_feature (106)..(141): n is a, c, g, or t
  misc_feature (179)..(364): n is a, c, g, or t
  misc_feature (387)..(831): n is a, c, g, or t
aagaacacagaaacaaagaaagacatgttatcatactatagggcgctagctcggctgattnnnnnnnnnnnnnnnnnnnnnnnnnnnnnnnnnnnnnnnnnnncgnnnnnnnnnnnnnnnnnnnnnnnnnnnnnnnnnnnnagtcgacggtaccggacatatgcccgggaattcggccnnnnnnnnnnnnnnnnnnnnnnnnnnnnnnnnnnnnnnnnnnnnnnnnnnnnnnnnnnnnnnnnnnnnnnnnnnnnnnnnnnnnnnnnnnnnnnnnnnnnnnnnnnnnnnnnnnnnnnnnnnnnnnnnnnnnnnnnnnnnnnnnnnnnnnnnnnnnnnnnnnnnnnnnnnnnnnnnnnnnnnnnnntacatcaagaagacaatcccccnnnnnnnnnnnnnnnnnnnnnnnnnnnnnnnnnnnnnnnnnnnnnnnnnnnnnnnnnnnnnnnnnnnnnnnnnnnnnnnnnnnnnnnnnnnnnnnnnnnnnnnnnnnnnnnnnnnnnnnnnnnnnnnnnnnnnnnnnnnnnnnnnnnnnnnnnnnnnnnnnnnnnnnnnnnnnnnnnnnnnnnnnnnnnnnnnnnnnnnnnnnnnnnnnnnnnnnnnnnnnnnnnnnnnnnnnnnnnnnnnnnnnnnnnnnnnnnnnnnnnnnnnnnnnnnnnnnnnnnnnnnnnnnnnnnnnnnnnnnnnnnnnnnnnnnnnnnnnnnnnnnnnnnnnnnnnnnnnnnnnnnnnnnnnnnnnnnnnnnnnnnnnnnnnnnnnnnnnnnnnnnnnnnnnnnnnnnnnnnnnnnnnnnnnnnnnnnnnnnnnnnnnnnnnnnnnnnnnnnnnnnnnatccaggtagtacaagctaactgcatagccctaaacgactcaaactctgaatgtatctcaaaaagccaactgatttccacacaggtgtcaagaacctacatggggaaaagagcaccctcccttc

SEQ ID NO: 302017 - DNA, 1821 bp, Homo Sapiens
  misc_feature (41)..(80): n is a, c, g, or t
  misc_feature (84)..(114): n is a, c, g, or t
ctagcatgcatagactcatataggcccccgggttttaaagnnnnnnnnnnnnnnnnnnnnnnnnnnnnnnnnnnnnnnnnccgnnnnnnnnnnnnnnnnnnnnnnnnnnnnnnncttatcacgtcgacggtacctggacatatgccctgggaattctggccattacggccgtgggaagacagagtggggcgactgtcctgcgtctgttggcttgggtgcctggctcgctggtgtgcagatctaagtccctctggctccctgtgccaatggtgatggctccccgaagcgtgataccttcgtggcaaaagtgggctcccgcaaaggctcacatgaaaatttgtccctgcctgggtgccgctcccggtcggcagctgggggaaacacattagacacggccaccatattctcatctggctacttccccccgtaccccacattcgccactcgaatccaacggcttgaaacccaacaggccggaagtgccggcgcaccacaagaaaacgtaagagagttcgccggcagggggcaacccggggctctggaatccgaccccgttaagtcaaaagccaggtgcaacgccgccccaatttgaaacctggccgttggccccccgaaacaatctccattggagtgaaaacgcccttaaacttttaagcctccgttcgccgccccgttgtgctgccaagggcggcattataaaggcattggccccactgtgggccccaaaacgcggcgttatccccctgtgggcaacattggccggctaggaaaagttcccacagccctggaccttttgggcgacgtgacaaacaacgccaagctattactccctgagatgcaccccaagagacgggatatgagagacctatgaacccctacgtccccgtataaccctttggaaaaccggaagcttggcaaaccttctctcccaagtgctattccccccccgaagcacaaacgcccccttacacacgcgccgtagacgcctctcggggtcaactcttggggtaccctacttccccaagcatcgcccaacaaccttgggtggccaaacctctcccccccaggacaaatcttccccaaaacgtgtgcgccgcagagcgtcccgaaaaagcaaggagcacttacgtccccagttatttggggccgtcttccccacatggatgctgtttgagcgcccgccaagaacaaggtggcccgcttcccggcgcgggcactttgtgtggcgcacaagctggaccgcccccgccgtctgtttgttttccgccccaaagaccgtggctcccgcgccgcccgcagaagtgcgggggccctttgggtggccagtcgccccgttcttccgccccccggatggtggccctttaaaccccaaatacctttctccgggacagtatgccacgcgcattaccccggcggacgaaggctgggcaaaaaagtgccccactgtttacccccccaatggcgcgcatccgcacagctattaccccagaacgaggaccactaaacggggggggcaaaagccccaaaacgggacaaaaagctgcgaggtgagcgcagtctactccgcgcggtacgctgtggtggtgagtccttttgtggcgcactccacgcgggcgtcaggctcacccgctgggccccctacgctcctccgtcgcttacttctgtggtgccgcctctgtgtggtggtgacagccatccgcgccccccgctttgttgggccgctgtctgcgccgctctttgcggacggagcaacaaaggatggacgtgtgggggagcagagggcaaacaacacgttttttggtgcgcacacgaatcgacgaa

SEQ ID NO: 302018 - DNA, 494 bp, Homo Sapiens
  misc_feature (53)..(170): n is a, c, g, or t
  misc_feature (202)..(263): n is a, c, g, or t
agtcgacggtaccggacatatgcccgggaattcggccattacggccgacatgnnnnnnnnnnnnnnnnnnnnnnnnnnnnnnnnnnnnnnnnnnnnnnnnnnnnnnnnnnnnnnnnnnnnnnnnnnnnnnnnnnnnnnnnnnnnnnnnnnnnnnnnnnnnnnnnnnnnnngtttgtttgttgtgtgcgtgcttttcttgtcnnnnnnnnnnnnnnnnnnnnnnnnnnnnnnnnnnnnnnnnnnnnnnnnnnnnnnnnnnnnnnaggcaaccaacacaccaagatggcagcgaccgcgcggcgaagcgggtgagagaggagagggtgtgaggcgggcgcgcccacccacgtggggggggcgaggagatcacaacaaaaacgaaaacgattgtgtctttgtggcgagcgagacgagggaaaataaacacaaccctacaagcaagaaaaaaacatagtccagtgtggtcgcgctgctcggggcgtcgaagataagag

SEQ ID NO: 302019 - DNA, 873 bp, Homo Sapiens
  misc_feature (43)..(81): n is a, c, g, or t
  misc_feature (85)..(120): n is a, c, g, or t
  misc_feature (158)..(474): n is a, c, g, or t
  misc_feature (687)..(695): n is a, c, g, or t
agatgtatcgactccacctatagggcgctagcgcggctatatnnnnnnnnnnnnnnnnnnnnnnnnnnnnnnnnnnnnnnnccgnnnnnnnnnnnnnnnnnnnnnnnnnnnnnnnnnnnnagtcgacggtaccggacatatgcccgggaattcggccnnnnnnnnnnnnnnnnnnnnnnnnnnnnnnnnnnnnnnnnnnnnnnnnnnnnnnnnnnnnnnnnnnnnnnnnnnnnnnnnnnnnnnnnnnnnnnnnnnnnnnnnnnnnnnnnnnnnnnnnnnnnnnnnnnnnnnnnnnnnnnnnnnnnnnnnnnnnnnnnnnnnnnnnnnnnnnnnnnnnnnnnnnnnnnnnnnnnnnnnnnnnnnnnnnnnnnnnnnnnnnnnnnnnnnnnnnnnnnnnnnnnnnnnnnnnnnnnnnnnnnnnnnnnnnnnnnnnnnnnnnnnnnnnnnnnnnnnnnnnnnnnnnnnnnnnnnnnnctttttgggcggcgcgtgggccctctgaaaagacgctttttgaaaacaccattctggttgtgggcgcgggggccccatagtagatggtatagtgtggaacaatgtgtggctcaataaggtgtgttcccttagaggaacaactcgggcgctcagaagacacaaaggcgctgtggggattcctctcacccaatattataaaaaaagcggccgccnnnnnnnnnaaccaaccgccggaggctgttttgctggacacacaacattcctccgagagatgggggggtgctagaagggaggccatccaatcccgggggaatcttatttcaaacgggggggagcccccaagggcgagacgcttcgaaattattcaataattaagccccgcgttcctcggggggatgc

SEQ ID NO: 302020 - DNA, 602 bp, Homo Sapiens
gcattacatctctgaaggtaaagtttaaatcagggggctcaagattggcaggtacagcctgtgttaatgccttcaataagtgcttacgttcctggtctaatgggtcataatttccacatcctcttcagatacaatctgagaacttgttgactaccttggttacttgcaaaaatttctatttaatatggcattatattaatggttccatagtacattccagttctttatctgaatacaagcgtttggctttaattcccagtttctgggaccagaacaataaaatccataagacatcgtttctatatggtcatatacgtatatcgaataacgactggcatgtacaatcattgaatggagtatacagaacctttagtttaagagctaaggtacctcaggggaatcgggtaaagtgattccccttcgtaaccgtcatttggtgtataaaccttaagctttctaaataatacggtatccaatataaggaatagcgggtaggtagaaaggaattaccatggggaattaaatggaactttatggagcgtaatcatatttcctggtaccaggtggtgactgaataagataagtgattggacacgagattg

SEQ ID NO: 302021 - DNA, 589 bp, Homo Sapiens
  misc_feature (179)..(228): n is a, c, g, or t
ctattataagtatggcaggaaaacttgaatacctttatatgattaaagcttgcacataagtggattaaaaacatcaaatccaaataagtattataataaacaggaaaaggatgtaaaaagtatacaaaagaagtatatcgtgaaaaatgtcaaatttactgtaattaagaaatacaaannnnnnnnnnnnnnnnnnnnnnnnnnnnnnnnnnnnnnnnnnnnnnnnnngctgtcagggatgccacaaaacaggaactgcttttgagagcatgaagggcccaacctttgggaatgcaacctggcaacagtaatcaagaactttaaaaaacattaacaagtttcaatctagtaagtctatttctgggatcctgtcctcagagtgcaatcctacatatggaacaaaacttcctgcacgaagacatatattggaaatggaaacatcctcaatattcaataacaggagaactgttaaataagactatgtgactataaaaattacgctaacaaaagaacagctataaaattggagaatacatgtgcttcaatggtacagtagaaccagggtttagaactgcatatatagctaatg

SEQ ID NO: 302022 - DNA, 771 bp, Homo Sapiens
  misc_feature (43)..(79): n is a, c, g, or t
  misc_feature (147)..(261): n is a, c, g, or t
agtcgacggtaccggacatatgcccgggaattcggccattacnnnnnnnnnnnnnnnnnnnnnnnnnnnnnnnnnnnnngttcaagcagttctctgcgttagccttctgagtagctgggattacaggcacctgccactacgctcagnnnnnnnnnnnnnnnnnnnnnnnnnnnnnnnnnnnnnnnnnnnnnnnnnnnnnnnnnnnnnnnnnnnnnnnnnnnnnnnnnnnnnnnnnnnnnnnnnnnnnnnnnnnnnnnnnnnatgagccactgtgcccagcccatgataacagatgtttgaaagggaataaagtcgtgtctagtgtcattgtgctagcgtgcccctcccccttcagtgttggcccagatcttccctttatttttttatgtttgtgggaaaggggccacatcagcagcaatcatcaaccaatcaataggatctacttagtggtgaacatattggctgtttaattggtaagagtcgctggcctgaccacaccacagcatggccacttgggttcctgtagagatggcctcagtttccaatgttcctcccagacgtttgcttcttgcccaatcgagaggggatctcaagactcctgatttggtcattgtgagctctcaccctgcgttggcttgtgtagatagactgcataagatacatgaagtggggatgggggccaaggtcctattactgctgtttggaaattaacttgcctcttacagatccagcctttattgttttctgacatcctagtaatggcaagatccg

SEQ ID NO: 302023 - DNA, 531 bp, Homo Sapiens
tttgaaacctatcccttaacacaagtatgagcaaattatgtcttaatttaataacctgtttttttaaagaaaaagtcaaatggtaagggatcaaaaagaaaatctcaacatttatgttataagagaaggacatttcattaaaatgtccttctcttctcttcctcagataattcacagtagaaagaataggcggatggttgctaagccttaggcagaatcattcctttgcctcaacacttgggcaaaataacatactaatggcccccactaaggctgttaagctgaggcaaagactggccagatgttaaccaaaacagtttcctcttttgcttgggcaaatagctaggctatccaccccagcccctgcaggtagcctctgactgacttatagccactgaagtagtagtaaaagtgatgtgtgctactcctaggcctggtccagtaaaaacctccaacacgatgctccatgcccttttaccttcctccaacttaatgcaggtaagacaaacttagaagctataaaggggggaa

SEQ ID NO: 302024 - DNA, 973 bp, Homo Sapiens
  misc_feature (49)..(115): n is a, c, g, or t
  misc_feature (542)..(563): n is a, c, g, or t
agtcgacggtaccggacatatgcccgggaattcggccattacggccggnnnnnnnnnnnnnnnnnnnnnnnnnnnnnnnnnnnnnnnnnnnnnnnnnnnnnnnnnnnnnnnnnnnttcaaatcaaatggcaggaaaagcttataacaaaaactgtagttttctctcccatcccttctaatcccctgcccagaggcaaccacttgagctatttttttccttcatattttcaaatatgctcttatggctatttcttatcaattttaaacactgcccattaacttcattttaaggtagatgaagatttagttatcttatgttcaccctttctccataccctccactcccaccatcactgccacatcatctgtcctcttccccattctcccagtattgtaatatagtttgatcagaactcttggttaagtcactagtgtttacattactatggctgtgtcactatttctctctgctgacccaagcatgacactgattaggtttcctttctcatataactcttgtccttggattcagtggccctcannnnnnnnnnnnnnnnnnnnnnctgttactgttcatcacatattttatacagctgtcgatgttatttattcaaacgatgtaccagttccatttgtttgttgtttctggagacctccctctggagctttccaccttcctggctctaatctggactggttgctttaggcctgtggtctaaacagctgttatttcaggacttccttgactgttctcctttgtttgcccttttttctgatctcatgggttttgtggtgtaccttttgtatcttgcttaaaccctcatttggctggtaactatcttcaagggattttctaagaaaagatatgtcggaagtagaatttttgacggctggatatttggattcgttttccacatgtgtaaccattcccatagatctttatatttaaaatatttttgttccaccctaatgt

SEQ ID NO: 302025 - DNA, 979 bp, Homo Sapiens
  misc_feature (86)..(121): n is a, c, g, or t
  misc_feature (171)..(221): n is a, c, g, or t
  misc_feature (346)..(802): n is a, c, g, or t
agaacccttgatatagactcactataggggctcgctctcagagcgaacgacgagcgcagcgagtctgtgagcgaggaagcggccgnnnnnnnnnnnnnnnnnnnnnnnnnnnnnnnnnnnnagtcgacggtaccggacatatgcccgggaattcggccattacggccgggnnnnnnnnnnnnnnnnnnnnnnnnnnnnnnnnnnnnnnnnnnnnnnnnnnntggtaggagtatgcccttacttatcaataataaattgcatgtaagtggactaaattgccaatcaaaaggtgtaaagtggctgaatgaataaacaaacaaggtccattgatctgttttctgcaagnnnnnnnnnnnnnnnnnnnnnnnnnnnnnnnnnnnnnnnnnnnnnnnnnnnnnnnnnnnnnnnnnnnnnnnnnnnnnnnnnnnnnnnnnnnnnnnnnnnnnnnnnnnnnnnnnnnnnnnnnnnnnnnnnnnnnnnnnnnnnnnnnnnnnnnnnnnnnnnnnnnnnnnnnnnnnnnnnnnnnnnnnnnnnnnnnnnnnnnnnnnnnnnnnnnnnnnnnnnnnnnnnnnnnnnnnnnnnnnnnnnnnnnnnnnnnnnnnnnnnnnnnnnnnnnnnnnnnnnnnnnnnnnnnnnnnnnnnnnnnnnnnnnnnnnnnnnnnnnnnnnnnnnnnnnnnnnnnnnnnnnnnnnnnnnnnnnnnnnnnnnnnnnnnnnnnnnnnnnnnnnnnnnnnnnnnnnnnnnnnnnnnnnnnnnnnnnnnnnnnnnnnnnnnnnnnnnnnnnnnnnnnnnnnnnnnnnnntagatcattctcaaggaaagatcatatgtcagttatgtattacgataagtattagaacattccaaaaaatcgaaataatgcgtcttctctgatcacaatgaaataaaactagcaatcaaaaccagaggaatttcggaactgtacaaacactggacaattaaccatatgctctgaatg

SEQ ID NO: 302026 - DNA, 481 bp, Homo Sapiens
ttttgttacgaccgatcatctctgggaaagacttgctccttggcatttctttgggctaggtaaactgaattggatactgtgtgaactcattcatacatcagttttcttggctcacagtacagatttgtatactatttgatctttttaaattaccccatgccaactttaagcctgtactaagatttcatatagtaaaacattattttattcgggcacagctaatttaaagttacatatgtgcaacgctgaaatgtacctttgtactaaaagtttgataattacattaatagagtaaattacactgaagagatgtttcttaaatatcaaaaatgtccaaattaaagaacttccttctaaccactaaaactaccttggcattgatctgcttgcatttaaataatacgttaattacgaatggctcatattaaatttatcaaccaattcctggtgggtcctctacttgaaatcatgttcatataat

SEQ ID NO: 302027 - DNA, 756 bp, Homo Sapiens
tggtacggtccggaatgtcgggatatcgtcgacccacgcgtcgccacgcgtgcggtgaggggcgccgtcctgcctgaggggctgcagatcccggctaccgcgagcgccgtggctggcttggctgttccatgtggctccggcggcgatggaggactcggtggcggcggcggctgctgctgcggcggcgatggaggagcggctatgagaagggaacggggccagactcagcccgacagcgggattagagccctccagaatacccatcatatgcccctgaggtggcatggtgatgtcatccatgagggaaccaccttcggccactcatccctgtcacgtatatcatagtgttcttgactgggcatgcatctaagatgggatataccctgtgaaacagaggagaagacttaatggaccccaagcatcatttcgagttgtagaagagtttaataaaagacatacatgcacaaggtcctctgctttggaccctctgcattataaaaggctgctgtattgctaaacccagaactggctccagatgtcttgacgtgatcatcatggcttacaagtgggaagtagcacctgcagcgtgtggcaaaaacatgcatccagagttccagtatgaggacacctaccaggagccgcaatggttaagtgtacgacagaaatggccgccaggataaactggtggtattagagcagaagacgccgaaggacactactaaggcacatagagcaacctgataaaaatccatcggg

SEQ ID NO: 302028 - DNA, 978 bp, Homo Sapiens
  misc_feature (169)..(181): n is a, c, g, or t
tggggttaacccggcccggaatttacgggatatcgtcgaccacgcgttccggtagaaattatttgtaacttttcttctcccagaaacagaagaatcaaatactattctgttaggattctatctagacctgtgactcttagtataataacccttttattattattattannnnnnnnnnnnnccagtaatctataaagtagagttgcttagtttggagcaatttagggctttcttatgggccagtaggtaattcatttggctgctaaatataattttgggttaattttaacattatagtgctggccgctgggttctatgattacctaaaaatctagtttttttcctccataggtagatgtgtgtgtatgcttacccccacacacacacgtacatatatgtggtcatagagaggtatttcaacccttatttcaaataacagtagaagatacgaacatgaatttatatttggtaaaaatgtcattcatccacttggttttccatgggaaatagttttataagaagggttccccctgtgctctctccacttaacaatttcattatatacgtagaaaaagcagccgacttaagggcttgatgtttttcaggccttgtgggatccaggtctccagtttcccagtgcccttagtggatgttatgaatgctaagcccatttcttttacagaagaagtgattctagtgtatttcttacttgcatattcttgggcctaaaaagctgtgttcgtctataggaccctatgtccgattgccaccatacctcgtttgtcctaattccacgccgggagtgtaaatactcccgatcctggaagtctgcttgtaaaaccccactctcttgcggttttttcggcgcctcagatctctgtccctgcacaggcagtcgcggagccacctcggacctacttcacagttttcacggtgagctgttagggaatacccttctgtggcaacccccgtctagga

SEQ ID NO: 302029 - DNA, 762 bp, Homo Sapiens
  misc_feature (47)..(55): n is a, c, g, or t
gggaaacccaaaatttacggcaaaaattttttcccagggatttaggnnnnnnnnnttggccttggttatttctcaagtcaggtaactcaaagcaaaaaagttgattccaactgtgtagagttatgagtttggcactccaaaaatttggacatttacggctaaataaatctcagggaattttggctaaaattcagagaatacgggaagtttcacaatctacctattggtagactttgaaggttgcgaacacttacttacattatttaatgtgtaaactcaacctttagggaccgggaatgggtggcatttaaggctataatcgtgggatcgccacaattttcccaaaaatatattttaaaaaaattcacatacccttttttaagggaaaattatttaagggtttacaaaattcattattggcattattcaaggtaaaaggttactttgaagtgcttaattaaaatttccccaagttatttaacgtggtatgaggtttacttttactaaactaatgatgcctctgtgggtctcttagtgaagcataggctcggatttgggaccccgtaatttaaggctgtaagaatagaaatgggtattatagattcgaccgacaggggttaaattgagcgggttgggtaacttttgtgattttattaaatttggactaatttggcaggtttcttggcaagaaaagtgtgggaacaaggactcgttacggaaagggttcgaaaacgtttggtgtgaaagtgtatatcaaaaagt

SEQ ID NO: 302030 - DNA, 1110 bp, Homo Sapiens
  misc_feature (65)..(277): n is a, c, g, or t
aaaaacagtggagttaaaagcggctggtacggccggaatcccgggatatgtcgacccacgcgtcnnnnnnnnnnnnnnnnnnnnnnnnnnnnnnnnnnnnnnnnnnnnnnnnnnnnnnnnnnnnnnnnnnnnnnnnnnnnnnnnnnnnnnnnnnnnnnnnnnnnnnnnnnnnnnnnnnnnnnnnnnnnnnnnnnnnnnnnnnnnnnnnnnnnnnnnnnnnnnnnnnnnnnnnnnnnnnnnnnnnnnnnnnnnnnnnnnnnnnnnnnnnnnnnnnnnngaataaaaactgacgactgacaactaactgaccactgaaaatgacgactaactgacgacttggactgacaactacacacttcactgaagactgaatactgaacatgaaactgatggactgcaccttactgacgactgaacatgacgactgaaatgtacactgacgactcacccctcaccactgaacataactgaaacactgacacactacctaaaatgagactgaacctaatgaccctcgcaccctgaaatggcacatgactcacactgacgaagaaactgctgaccactgacatgatgaaatgcatgccgactccgataacaaatccgatgaaatgcatgagatgcaacatgacgcatgaactgctgcacatgaccctgactgacatgcgaatgaatctctgctgccgcctgacccctgaccctacctgacatgacctcgcctcaccacggaacaactggacactgatgcgctgagatgcatgcgtcgacctgaacatgccttactcatcgacgatcaactgccaccgcgctcgccgcactcccttaatgctacatcacaggatacaggcataatcacaaaaacaagagacaggcggacagaagacttcctgcgaaggccgatatataacaccgcgatactatccacccgggcccaaagagcacgcaaacgagaaagcggaacaaccacacgagcacgaggacatagcaccataacagaaacacgccaacacaacaagcgacacaacagccccgacacacaagcggagcacataaataccaacaaaagccaagaactaacaagacaccgaaacacgaaaaacagaacaccct

SEQ ID NO: 302031 - DNA, 805 bp, Homo Sapiens
tgggtaccggtccggaatgttgggatatcgtcgaccacgcgtcgagatgggccccctcccctgacccctgtctacactcagccagtaagctgatttgagctggtcccacagtgctgcctgtgggaacccaagcccttcctgctcctatctgcctctggctggatgacgccccgggcaattccgcccactgttttgaccccaggccccaaacctaggtgaggaacgccctcctcacagtccttccctgcttccagttcagtgttgacagtgagcagtgctcgctttgctatggctaggccctcactctcctctcttttcaaggccccaagagagtaagccatttattcacaccctatcttgacagcaaagccggggccttgaacctggggcactgctttcagccattattcttgcagaggccccagagctcccagcctgcatttttggagtctgagcagggcccacagctgttttgcttcagctaggagtgaaggctgacaaagagcaaggtctctggagaaggaggaaatgttttctggatgccaaactggtgactgtggggaggtgtggggcagcggggagggaggagctctcacttgtgcctagggaaaggtcatggtcaatgagaaagcctttgatggggagagtctgagatgggacccaggaacatcaccatgaagctgtccaggatggatgtgggaccctctgtccagaccaggcagttctcttaatgtaagatcaagaggccaagggtcccgggaatatgggaagcctcccgaagtgggctgtgattcctgaagggtcc

SEQ ID NO: 302032 - DNA, 2344 bp, Homo Sapiens
  misc_feature (70)..(255): n is a, c, g, or t
  misc_feature (309)..(319): n is a, c, g, or t
  misc_feature (671)..(688): n is a, c, g, or t
  misc_feature (1537)..(1591): n is a, c, g, or t
ccggggtcctgggaacttcccctgggaacctactcgtccgaacccccaccgccgtttcctggaccttttnnnnnnnnnnnnnnnnnnnnnnnnnnnnnnnnnnnnnnnnnnnnnnnnnnnnnnnnnnnnnnnnnnnnnnnnnnnnnnnnnnnnnnnnnnnnnnnnnnnnnnnnnnnnnnnnnnnnnnnnnnnnnnnnnnnnnnnnnnnnnnnnnnnnnnnnnnnnnnnnnnnnnnnnnnnnnnnnnnnnnnnnnngagcgggggcgggcgcgctgctccacacactactattctctctctctctgttannnnnnnnnnnccccccacactccttaaactcagcgcgcactcccccaccgcacctttattgtggtgtgacggtacgacacgacgaggagagaggtggcgctccctcatatacttagaggtagagcgagtcgctgtcgtactataatatactacacccagccgcagcagaccggacagagcgggggcggccggcggttatgtatttactactacacacaccacacacctagatgtccagtacggtggagtcgggcgggcacacaacacgatggggtgcgcgccatcgcatgtgtgggggtgtctctcatctgtgtggaggacagagggaggaggcaaccgccccccttccttcctttcgtgtnnnnnnnnnnnnnnnnnncaggcacgcacacatcacgtgtgtgtgcgcgcagcgccaccacccacttctcctcctctgctcaggcactctggttatctcttcgtacagacagaactactacatcgagaggaggtagggcagcaatcatcatcatcatcacaacacatcatcgttctcagccgcagcagcgatgcggctgcttcaccgcagcggaggtggggagctgcagcacaacaaccaccatccaccaacagtacaagataatcatcattatgcttggctgcagaagggagagaccgagaagtaccacgacactaccatgtgtgttgtgagccctccatcgtcccagagtaggagtaatcaccatatatctattcttctgtgtttgagacccaccattcttatctctatctctcctcacacgcggggagaggagggccggcgtttatttgttagtaacaacacaccccacacaataaagcgaccgggaaggacagacaaaaaccgaagcaagacgcgaacgaacaagaccaacagacgacgacacaggcgccaccgaacgcacaacgacgaaaggaccacaacggaagaagcaggcccacacgaccgaaccgtccagaccaccggaagcaccgacagcaaacgcgaggaagacgcagaccgcgacccacaaccggacacccagaacgaaggatcgagacgacatgaagcaacacaccagacgaaccaccaacgccagcggaggaaggtaagagagaagagaaggagatgaggaccgaaaacgagaaccaacaacaaaaacaaaacggaaaccaaccccaccaccacgccaccacccaaccctcgtccgacagcaaaaaaccgacnnnnnnnnnnnnnnnnnnnnnnnnnnnnnnnnnnnnnnnnnnnnnnnnnnnnnnncaaagtgcgcacactaaacgacagccgcctcaagccaagacgacgcacaacgctaggagcacagcagcaagcaggatgggcaagccaccaccaaccactacacgcactattcacatgactccaaccatacaccgcacagtctatgtgcagcttacaacactccgaagccaaaccagcgctaagacagcgaacgaaaccgacgagacagacaactgaaagagacctcgagcgggggcggacgctgacgcagcacccaacagcaacaaggcgcaaggaagaagagaagagggcgaaagggccaagaggagacagagaagcgagtgaatgccagagaagccagcaatgcccgcgacgaggcgccaccaccgatcacgatccagcgccgcatgtgcacgcgcggcagaatgaccagacggagccgactaccgcgcgcagcgaacgcaggccacaaacaacactgcccacgcacagcaccacgcggaccacagacgacacgctacacgccgggacacgacacacgaacccgcgtgcgaacacaaacgacgtggccaggcacgtactaccgcccagtagcaccgactggtagtgaagccaagcgagctgaccgtcgacaggaggctaatcaggctggaacagcatccgacagcagacgccgacacgcgacaaggacgaaggcagaccacgagcacacggaaggagagcacgcggttggccgtccgcgcagaggtaccgatgccacggcccacgctacca

SEQ ID NO: 302033 - DNA, 1050 bp, Homo Sapiens
  misc_feature (140)..(242): n is a, c, g, or t
  misc_feature (263)..(376): n is a, c, g, or t
  misc_feature (761)..(761): n is a, c, g, or t
agaccaaaagcaaggggatatgaacacccctcgcgcatttaaataagcaggctgtacggtcggaatcctgggatatcgtcgaccacgcgtcgatttaattgtaatattattcttgggagacaggatctcagctctgtcannnnnnnnnnnnnnnnnnnnnnnnnnnnnnnnnnnnnnnnnnnnnnnnnnnnnnnnnnnnnnnnnnnnnnnnnnnnnnnnnnnnnnnnnnnnnnnnnnnnnnntgcatacaccaacacagccannnnnnnnnnnnnnnnnnnnnnnnnnnnnnnnnnnnnnnnnnnnnnnnnnnnnnnnnnnnnnnnnnnnnnnnnnnnnnnnnnnnnnnnnnnnnnnnnnnnnnnnnnnnnnnnnnatatccggccctactggaatatgttaaagtaaatctcaggtgttacatcattgcacttgtaagtactttaaaatgtatctctagcagataaatctttttaacaaaaaccacagcatcattgtcacactcaaaaaattgacaagatttccttagttatcatataatagtcggtattgtttctatctcaaaaatacagttttcttggttgttgaaatctagatccaacattgcgattggttgatgtgtctcctttactctgtaaattacccctgcgttttagtgcttttcggctttgatttgtcctgtggaattcctccactcaggattttgactgagagtatccccagagtgtccagtaagaactagaaagctggattgatcctgngttcatttaatttgcccccagaaattatcccaataggtgatgctataaacgttcgtcttacgatcattcaggagggaaccttgaggtcggttggtccaccttcgggaatttacatttggtcaggagtcgggggaccactaatacagattgtcgaaattaacgaggcttagggaatgaatgggcggatccatatataaacggtgaacaagacgcggaaacaaacctgagaacaaagactcagcacaacagacaggaggaagtacaagtacgaggagagagatataaggca

SEQ ID NO: 302034 - DNA, 1142 bp, Homo Sapiens
  misc_feature (80)..(226): n is a, c, g, or t
agggggatatgaacaagccctggacgtttaataagcaggctggtacggtcggaatcccgggatatcgtcgaccacgcgtnnnnnnnnnnnnnnnnnnnnnnnnnnnnnnnnnnnnnnnnnnnnnnnnnnnnnnnnnnnnnnnnnnnnnnnnnnnnnnnnnnnnnnnnnnnnnnnnnnnnnnnnnnnnnnnnnnnnnnnnnnnnnnnnnnnnnnnnnnnnnnnnnnnggggttttataaccctccggggaatttaataaacccttgattttagttaatttaagtcatagtctcatttaaagtcttttaataacaggcccaaagaaggcttaaacattcatttattccccatttttagaaaaatgagggcagaaaaccttagggaagggattaaattaagtgtccgccaaatgtgtcaccttataagcgcccccggggttgggactgggaaggatttcataatctagaagtgtctcttacccaccattgctgttaacacttgattggccctgaatcataacccctggatttagtttcacacgattttacagtgcaataactaagggtcaaatttgacgcttctacagacttctctggcagcgccttataattgggatccctacaaggtgtttttgccaccctgaacatgcggggggaacaaactcaggggggtgtaaagggcgctgatagcttgtggttcccccaaaaaattcaccgtgaagcaagttccttagtccccgccgcttatgaaaggtgaccggctatcgggagaatggcgtttggaacacaagctcctcagcgacacagggggtcatcagtgggggccataacgcaagaatgacgggggtccccagaagaacaacaacttggcgcccaacaaagctccggacggggagcgcatgagcgacccggggagaagggcccctccaacctagaaaaaggccgaaggagccaccctggtaacctggaccttggactagcccccaaagtggcacaactctgtgtgcgccccggtaacttggtggggcccacaaatccggggggtcgacctgcgggtaccacacggggcgcaagccagcagccaatatcaaactacggcacacgggccactatgaacacatgctcagggaccaaaaaacatgcc

SEQ ID NO: 302035 - DNA, 1050 bp, Homo Sapiens
gcaggctggtaccggtccggaatctgggatatcgtcgacccacgcgtcggctccgctccctgtgccctggtcctgctgctggcgctctgggctgctgcggcctccaggcggtgggcccgcagggccccggacccggcttccaggagcgcttcttccagcattgtctggaacacttcaatcttcgagcgcttcggcacaagaccttccctcagcgcttcctggtgtcggacaggttctgggtccggggcgatgggcccatcttcttctacactggagaacgaaggcgacgtgtggacctacgccaacaactcgaccttcatcacggagctggcgggcccgagcggggggcatctactggtcttcggcggagcaccgctactacgggaagtcgctgccagttcggtgcgcaagtccagcgcgaagcgcgggcatacggagctgtctgaccgagtggagcaggccctggccgacttcagcagagctgtctccgtcgtcgctacgacgccgacctctgggtgtcccatgagtatgcccccttccatcgccttcggtggaagtcatcggggtggatgctcacgctgcctacctagacggatgatgtatccccacctggtggcggggggcttcaggcggccgtgtggcctcgcgttcattcagtgctggtgcagctcctgagccgcacgggccgttgtcccgtgcgcagtggccgcgacgtcttccgagcgagctaggcgctcgcgatgagattccgcgacgggtaatgaggcgaaggacgtaccccagagcatggagcgggctggtgcatgatcccctgacatctgacatgcgtttggccgatcgcaacaacgggaccggaaccctactttggtcccactatacggacctcagcgagtactgtcgtcttcgcacaaatcatctcaccatttgcaagagcggtacccgaaaaccatgagattcgttgtaccccacataccaagcaatacctctcactccaaaggttcaacccaatctctctatctcagacaaagctacaaccacataaaatcaatt

SEQ ID NO: 302036 - DNA, 972 bp, Homo Sapiens
taccggccggaatcctgggatatcgtcgacccacgcgtcggcaacaacagagaaaatcaagagtgttgcaatctataacagttaatattgattcattcacattcctgtgtaaagtcattttatatggaaaggcttacaaatcaatatgtaagcatgcattattataagaatgtacaatgtattgtgtaattatagaagtaaaatctagatgttgagacctgttggtctaatagatgtggatacagttattttacttgaccatccttgttgtctacttgtgtgtctaacgtaaatatatgtcagagtatagaatctgcctgcagtcgtgacaacagaaagcttaagtgcatgcagctctatcggcaagatgcaatgataatggaaaaatagaaagcgaatactcagtttaagccaaggaaaatatgtggatttaatcatcgataaaactgactttctgtcacaaacaggaacaattttatagcatcagtcatataacatctggtttatcaatgcacgttcaacacaataaatactctgcagtggaggacacagtctaacaagatcgaagcaatagacgtagaaaatatatcttacaatagttgacctagatgtcatcacaatagctacttaacgatgtcaaagataggaagctattgcttgcaaccgagacacttgcacatcaggtgcacccccattgctatagaaagctcatagacattaacaccatacgatgtaccccagaacgacgtaacaagactgacagagacagcaaagaaaccatacatgctcaaaacgatggcgcactgaaaccaaacggacgcaaagaaataagcacccaacaatatgaacaacagccaccacgtcaaaagcagaacaacaacacaccgaccagcacgcccacagcacaacacgggcaacacagaccaacacgaaagaacacaaagcagaagaaacaaaaaacaagacaaaaac

SEQ ID NO: 302037 - DNA, 584 bp, Homo Sapiens
  misc_feature (90)..(164): n is a, c, g, or t
tggtaccggtccccgagctcgttatgatatcgtcgaccacgcgtccggactagtctagatcgcgagcggcgtcatttgacctcagccccnnnnnnnnnnnnnnnnnnnnnnnnnnnnnnnnnnnnnnnnnnnnnnnnnnnnnnnnnnnnnnnnnnnnnnnnnnnggggggcgttaatatattagttgagtggaggtgaattctaagtgacatgtttttttggaagatgtggcgaacagggactctatattatacatagagagaggcggggggccgaaagatgaaaccaaataagcgagagtaaggtgagtaatgatacttttatgagggaaatcgtgcgcggaggcaacggtattatagctggggggagcggtctactctctgaggggaattcacctcagaggaaaaggtaagaaattgcacctccgtgggggatgaattaagaaaatataagcaagcgagttttgtggggcgatgatgaaagcgtccagatttccgtcaaagtcaagactgattgcatagaaaaaatatgtatgtaccaggatagatatttttaatcacgggagttctttaaaaaagtcccct

SEQ ID NO: 302038 - DNA, 594 bp, Homo Sapiens
gtaaaggggggaaggtgttatgcggctgctccctccgtcccagaggtggcagtgattccataatgtggagactagtaactagatcctaaggcaaagaggtgtttctccttctggatgattcatcccaaagccttcccacccaggtgttctctgaaagcttagccttaagagaacacgcagagagtttccctagatatactcctgcctccaggtgctgggacacacctttgcaaaatgctgtgggaagcaggagctggggagctgtgttaagtcaaagtagaaaccctccagtgtttggtgttgtgtagagaataggacatagggtaaagaggccaagctgcctgtagttagtagagaagaatggatgtggttcttcttgtgtatttatttgtatcataaacacttggaacaacaaagaccataagcatcatttagcagttgtagccattttctagttaactcatgtaaacaagtaagagtaacataacagtattaccctttcactgttctcacaggacatgtacctaattatggtacttatttatgtagtcactgtatttctggatttttaaattaataaaaaagttaattttg

SEQ ID NO: 302039 - DNA, 464 bp, Homo Sapiens
ggaaaagggggaggaaaaactccccaaggggggccccacaagttacgagtaccacgttcgggaaaaggggggccccaagggggcgcattatattgccgcaagaagcacagtgtgaccgcagcttttacacagacgtttcgtcacgttgggaaacaccgtggaacacgtgggcacctttgtgggaacacgagaaccctatattctctggtggcttgttgacaatagtgggcgacaaattgtcccacagagaatatttaaagcggactttaaggggggtattattgttagaatattttttaagagggtggtttaataagggtgggttaaaacaggatgaggttgcgtaaatttatgctggtgatagtgtgttgtgcaaaaatgttttgtggcataattagggggagttatgatgacgtatatgtgaaagaatatttattattaccgggtggagtgatactgaggtg

SEQ ID NO: 302040 - DNA, 754 bp, Homo Sapiens
tacgtgaatatacatgcactgggaaatctacttaagagtcttcactgagaagttcactcgatagaaaggtcttgatagagaagagaagaggaaagcaatggtctgaaggcaaatcctgctttaacttggtggtccatttcccattcattcctgaaccaatgagagcagaaagaaacaagtcaacccaaacaagcaaactaggggctggacgcggcgaatggatgctggtcagttggcaaattcactgaaactcatcaagaacccagctgaacttgcattccaacttccacaattatctgaaagggctagggaccaggtagccatgtgtcccaatcacacgggggagagtctgccaccggcggtgagagaggtggggaagcttggaggagacagtatattcacctttttatctttgggtaaaagaaaccaacaggactttggtgcagtagatttctcagtgccttctttaggaattctatcttaagcacacttcaaggggaaagaaaaaaggaggagagaacatttgttcccgtgaagtccctttctccaaaggactggggatcaagaaggaagaagagtaagaaggaaaaacaacaaaatcctgaggaggccatttcttttaacccacccagcttgcccctgaaaactgctggtgatacaaactttttcaaactgacttccagcttctccatgtgtcttggtaactgtagcctcgtctctgccctttctcctaataagatccatgtttctaagg

SEQ ID NO: 302041 - DNA, 871 bp, Homo Sapiens; identical to SEQ ID NO: 58259

SEQ ID NO: 302042 - DNA, 1145 bp, Homo Sapiens
  misc_feature (509)..(509): n is a, c, g, or t
  misc_feature (984)..(984): n is a, c, g, or t
gagagaattggccgacaagagaatgacctatttgccaatggtgagctggaaatctgttcgaatgtgcaaaactagggccgctcggttgtgtcgcagatagtggctcgagagtgttattccatctttgcgtcgagtgcctcaatccagatcgatagagtcggaccaaatctgtcatacggttgcccccgtgtagccttactccactagagtctcgagagggatccctccattgttgggtaccatctattctgcctgtaggaagaatttttgctgacctactatgccgaaaaaaatccctacatggtatccgaagaaggtgaggtgatgcacttagcgttgtctcgcgttttctccgtatcgattgcgatttgaagctggccgattgacccttgtatccactggagtctcccatgccttctgaacgtgcggtccactatgttagtatgttcgccgctgagatacgctgcgtgtgtttgtacctaaagtaaaaatgcacgcaatattctgcncggaatcccaaatgtcctgtggtgggatttacgctctaacatagcgtgccgttgcgcgcgagcaagatgcgggacctttgctacaagacgtaccacgggggagggttgttatacatttaagaactaaaactgtaggatggtaagccaagaacatactcgaatagcagatggatcccttgtgagagtcgctttgtcgtgagccaagggctttcgtgtctggggaaattggggcaccattggttctaccatttgtgcggctccttcacaaacgcttattaatggagcaagccggggaatacccgtacatttaccgatcgccttttgcgctaggaatcgttggggttcttcccctcggttgttgcgcgggacgcacaccctgagtttggaagcgaggttctggggttcatgtagtcaccgacgcaattttctgtccctgttgtacgtgggttgtctggggtgacaaccccgattcggncgtggaccaccccgttgggctgttgaggcacggtttgagccttggctgtggggctcttggtgccttccttttcctaacccggaacccgcctgtggattgggggtgccccctctcgttcaattttgtcccgtgtcccttgggctcccattggttgtccccac

SEQ ID NO: 302043 - DNA, 664 bp, Homo Sapiens
  misc_feature (148)..(166): n is a, c, g, or t
ctatatttttaatcatcagttggttgaacccatgatatggagggccttgtgtatataaaaatcaatctagctaatagtgccattgttgttggctttgaacacgtagatagatagggttcccccaggatctaaatgataaattctggannnnnnnnnnnnnnnnnnngtgttcattaaagagtgcttaaaacctttaagcttaaaatctcacccttcagaagaaatctttcggtaagagtttctctttgttctcttggtaagtaaagaaaaactttctaattcaatgaaatgatgacacagacaagggacatgcatttatttgatgattgttttaagccgaaatatccttcttgtggagagattcagggaaaatacaggcaaatcaaattcagttgccatgaattctgctctgcttttgacaccccgtcattaagagatcagctcattagaaacgctctcctgtgctgtgtccctcatttctccgtctttaaggggaagagctacttgaaaggcctgttgttttaatggcaaattcttggtgtcatttataagctgacccagccatttagagtgatgataaaacggagctagttgatgatcaaaggagctagtggtttaacaaattgaagaagccaagcgcttttccgaaactgattatgatcct

SEQ ID NO: 302044 - DNA, 943 bp, Homo Sapiens
  misc_feature (267)..(267): n is a, c, g, or t
  misc_feature (416)..(416): n is a, c, g, or t
ataactgggggggcccaatttctagtccggcaacggccaaaactgggtgatgggagctgcggcccgctgtaactagccagctgggcacgtgatttttggaaataaaaaagtgaaacgcacttataaggggggttgcccctacacaaaagcatttttgcctgtaaaactaccctttggaaagtggcctattaagccggtttgatatattacaccctggtgagaagcttcaccacgtggtggtagaggtctcccgggtgattgtgttgngcacaccctctccccagagcgccctctctctgtgctttctctttataaggtaaactacgtgggagtgcggtgccgcatctcctctctctcacactcttctcttggtgtgccaccgcctcattattacatttttcgtcctctgtgcaccnccatgtggacgacaggggcaaacactatcagcgtggatgtgtcatcatacatttttttataaacacatatgagcgggtgttaaactctattatctctacaacgtgtattattatgagcagccatgttgtctcgacgggcaaaataaacattcttattacagacgaagaacaacaccacttttgtggtgggcctgcggtgggacaaaaaagttggctgtggagcgcgagagagagcccccccttatttgtggtgtctaacagtgtctgggggcatcattctgtgcgggagaaaaaaatcaaccccctgtgtgagaaacagttgtggggtaccaaatgttggtgcagcccaacagtgtggttttgggggccaccaaaaagtgtgggtgtgtccacacggctatcaaccaatcgtgtggttgtgagtgtctagtacctatattatagatcactgtattatagattaaataatttgttgcaaaaaacacattactcttttagagcccacaataaatatataaactcccccg

SEQ ID NO: 302045 - DNA, 777 bp, Homo Sapiens
atttaaaagtctccacccctaagagaacatgggccatatgtaacacgttttttcagtacacatgcgttaggaccaccttcataaatattcatagcttctcctgtaactgttgagtatgtatacttggccaacccattcagcataaatccctgttctaccctcctgtccctcaaagtgcctgtcttttggttgaccctttataagaaatagtttcctctccagagttacagatcctatgatttttttgttgacacttctaattatccagcctatataattttcctatacatataatgctgtagttttaaatgacaaaacattctggaatcattgtcactaatccagtaattaggaacagtctctactgtcaacaactgaactgtgtttgaagtacaaattccccaaaatcctaaatcttaacttcctcaagtggatcatcttaaacaaaaattattcttaaagacaatagtgctcattaggagaataaaatgggcttggccctccctcgagaaagtatcagcaatccaaagtaacctctcaccatatccattcaccaatcagagtgggaaatgactctatcatcaaagcacaaaaaaagattttgcacttctgaacctttccgattggtgctgaacctacatacacggatgaatgggtggatgtgggatggatgaccagttatgtataatctgatgagaaatttgtacatgacctgcaaaccttgaacaaacttttcagcgttcaggaaaatttgtttggagacagagttccactcgt

SEQ ID NO: 302046 - DNA, 106 bp, Homo Sapiens
gattatttttgatagatagtgggggcggcgaaaaaaactaaaggatgaatgtttttttagtagggaggtttttttagaagcgtatcaaagtagtgcatccctctat

SEQ ID NO: 302047 - DNA, 1285 bp, Homo Sapiens
aggtgctcggcagatgaactgccacgccaagtggggaaagctacgatatgggcatgtgtgctgttcgacgtgcaccgatgtgcgctgggagtagtggccgcgtgatggttggaggtcctgtgatgggcgtcatccttagcgtgggcctaggctctctgctaatgtctcctacggtagtcagtcgtctcaagacgtccagtgggggcagggagtctgtacagcaccgagggagacgagagagacagtcattgcgtcgcagcggtctgcttaacatgtgtactaccccagaaggtagaatatgcacacggctgtcggctcgccagcgacgaggcctctgtgaacgcggcatctcccctcgaagttgggcgtgaattgtcgtcacaagtgactataacatacgaataggcctggtatctagcgaatgcgtcgagatgctcgatcgaccaagctcgcacgtctatccgggggtcttcgcccatctacaaacaggctcgcgaagtcgacatcaaccgggagggcgcagggcaatgcgcgaccagtgtcgatttaagcatggaatccgtttcacaaggcgaagaggaacgggagtgaggcgcgcacgagaaggaattgcgacgagtctggttgcccgaggtaaggccagcgcgattatagaatgtgaccggagagggcacagagagattcctggaggaagagcaccaaacgtaggtaacacgggaaactactgggtcccatgggtcctccgagtgagggtcggttaccgagttaagttaactactctacttagggtctctgtaaagtaactacgagcgttgagccgcgaggagcacaagtctgtctgtaaggcgacgtggtacgtgggccctttcgtcaagtgttcggggcccgcggagacggcaattttagcgtgccaggtgtaaccccttgaggttaatccccgttcgtggtacacaatgggggctgggccaattctccctttgaatgagacatgagaggctccgtgttacattgtcacgttcacccgtgccgttagggcgccaaatcctcgagaggcacaagacccgcattctagtaacccaaacgcgggttcggaaggcaaacctgtggagcgcatgcacatgcgagggctttcatttcctctgtagcgaaaagttctactcccggtgtggcaagaggcgagaaaaactcctttataaatttttccatgagtgtgcctgctatgtacccatttagagatattgggcaacatcaaacttttaatcccctaattaaaggcaatttacta

SEQ ID NO: 302048 - DNA, 1257 bp, Homo Sapiens
acttgccccatgggagactaggagactgtatcagaaacatgattacaggcacgtctccggctgactgtgcttgtccatgagttgtgctgctggtgttggtgaagtgttgaaggctggttatctccaataatgtcgcagacccgagagcagtgcccgtatcatggactgtaccacttcgtgggctgtgaaacaggcgtagttgtgtcgagtgttaatcgatcagtggatatccacatgagggcctcccatattcggaggcagacacgagaatatcgaggaagatagttgaaggaagtcggtcactgacatcaagaaaaatcgtcatacgaacacctcgacatccagatacgccagtattgtgcctaactattctgggtctggaattgcgtgactaagcgaatgcgtggacgcccaatgtgctgtaacactgccgtgggattcactggcgatggaaaagatcgcccctggtaaggattggccaaatgccaggtggaacctacgacgtgaggtatgacggctgtccgtggattctgtgcagcttcttagcacacccgaagtctcgatccaaaccatgacctacagctccatttggagcacatgccatcttgcccaggatgtgtctctatccaaaagattgggtgagaaataagcgtagcgtgataccctggttgggcgcgacctggatgagactggatgttgcgtcaaacatgccctggttcatgggtagcgctcagccatttagggcggcccaagttcatattgtttaacacactggaacacgttcaccaactcgtgatagataaactggtccccgactgcaaagctgtctatgaagttgaaagctcttgtccttgagagcaccaacatgctggggcttccaatggtcggagcaaactggtgggtctggccaaacggacaggctccgcacggtgagccacaacgtttgcttgggagacagctgacatgaatgaacccgcaccaaaatggaaacgcagccttggcgttccgcacgcctcagaccgcgaacttgctccatgatgcacattcccggggccacacttacagctgccggaaaaaggccccggtcctggaacacgcgagaacggaataccactcggggttgccaaggttgggatgatgccgggcagcgaaaagacctggaatggaccggaacctggcagagagactgggaagaaaggcgccgaaccattcacgtcaggctgatccaacctgatgaagcacatgctcgtgacagcc

SEQ ID NO: 302049 - DNA, 451 bp, Homo Sapiens
gtttaaaaattttaaacaaagaaggaactgcccctgaggtaagaaccaagggagggcctcccagaggtcaggtggaaaaagttttaggaaggaggaagtagtcaacagggttacctgttgcaaagtacttaagtaatatgaggcctgatagtggtaaacttgactaccgttggatttcactagtgggacaaggaagtctaattaaaatgcactcaagagactaacagtcgcaggcatgaaatacaatacaggtacatggttttttattatgtgtgcatctgcttcagtaataggtgtgaattactcagttggatcattaggagttcaaaatctagttaaatgactagataatagtggatgtaaattctgtcattctgaactgcagggattgtcagtaacttaactgcaaactaaactggtgatactcatggtaaaattgcaagacgagcaa

SEQ ID NO: 302050 - DNA, 740 bp, Homo Sapiens
aatacccaccctagtcatttttggaaaatatgccagacatattgacatgaattcatgtttattctggcttctgttcccaagcagaagtggattaaccctggcaagtggctggcttcactaactgtacttgcacccagcctgggctgccatctgctcagccaggagaagcagggagtggggtgtgggccctttaagttcgctcagggcacactcattcagtctcccctgaggagaccttgtccccctttgtggggtgaatgctggctgttgcaggccagaggcagtgccaactggagactcatcctctcagctttggtcagcttcagccacgtattcttcatgagtgctggcttctgaacctgcaggatcatttctcagtcagtttatggtgcagggtaattcatctcaaaataaagcccattaaaacgcccatggctatagaatgggttctaaatagatggtcctggagacacatcattgtatagtctttgcttccctctcatgacctatcttggagtagaactggtgtactacagtccttgtctccgagctgggtatatgtgtgactggtacagaaatacagtcacatattatatcaagatatatagatggataggagagaacctacagccataggtatcgtccactaacctgattctagaggtagaactacttagagtatacactcccatggttcctggcttggagatattgtatttcaattacgatatgctagtaca

SEQ ID NO: 302051 - DNA, 956 bp, Homo Sapiens
gaagcgaggggggcggaactgcagacgcactcatgcagcaagcggagcagacacgagcacgacagagccacagaacacagacagagtgaggagcgcgcgacggcgaggagcaacagagccagccacaagcccatctgcacttctgtcgtctaaaggctatccgattgatgtagtgatgcagggtatagcgatggagagataagaggtatgaccatgacgatcaggccatcagtgatctgattatgtggcgatcgtggatcatactaacgtggcggatccgactacccgtgctcctcaccgtacacaaaactgtcggactgaatgagtgagacgctatgtgtgaaggaggtagtagagtgcttgagcgagggaccagttggcgtggcttgcgtcgtcactgtttcgttgtacttgaggagtgaacgcacccgggtgtggcataggttgagggcgtcggaagagatatttgccgactgcgtcttgggcgtggagggtcttcatatggtttacacatcttaggagccatactgaaaacaaaaccaaggtacatcacaccccatcattttcatcctccccctataataaccccactcgcactacgtccatccatctcacatctccccctattcccctctactcactagttctataatacttgacaccctcccacccactactcacgccatcgtacatcgcccacccacgccgattagttagcgtttcatactaacataaacacgctcgagctgctgtagcactgatgcggcagggccggacgtgtgagggtgggggagctgccggacgcggagtcgggcgggggctgcggacggagggagggggcgcggcggtggtggggaggagcagagagagccacagtggcggcgtagcgtagagagtgcgtggcgaggtgggtggctgcgggcggcggctccgcgagtggccggttggacgcgggc

SEQ ID NO: 302052 - DNA, 490 bp, Homo Sapiens
gggcccccaaatactcgacccgactcacgatataactcaccaagcagccaccccgccgtcacaccgccattataacacatgggtaggacgaaaaaggagcaaacaagccggcaccgtcatgtgcatatactcatgtgcgagcggattgcacccctctcactaacgcagtcgcgatgagacagcaatctcagccgggtgcacctactctgcatccgcacacagaagcgttatcaagctgcaccgtaacagaggggtacgtactccatctaacccacacctcgactcaagccgcgagactaaaacacgggagcggtaacagactaccgaccggtcccaggtaagtacccctcgacagcacgacgccgcaccccaaacaccatctagcagtcactacaggacagaagtgcgacactctcagtcagacccgccatctcatagaaccacggacgcgggaccaaccatatctgcataagtcctcgcgacgcaacac

SEQ ID NO: 302053 - DNA, 928 bp, Homo Sapiens
  misc_feature (495)..(505): n is a, c, g, or t
aaattttaaaccctttatgaaaattggggttataaaacaccaaagggttcccccgacatttcgtcgtcccaccaccctcattccccaacgggggttataatctcctctcctggtgtgaagtacctaccaatacttttgcgtgtgctaactacacggtgtgtgtgaattattgtgcgcaaacaaacaacacattgttgtgggacaccatatataaatcatccaccccaaaaaatcttggtggaacaaaatataaactccataccgccaccggatggtggaccaacagaaaaaggaagggtgtgggaggccccctcggtgcggggggagcgcatcacggtgatagaaaaaaccagaggcggaggcgcgccgccacaaaaaaaatatttcctctcttctcctccacctaagtggtgcgcgcgtggagagaaaacccacaggtgtgtgttaaccccacaagaggaggtgacctctagaaaaacaatctacgccgccgcnnnnnnnnnnncgcagagcaagaggggaaagcgcgctcacaagccttggtggaacaaaaacaaaattgtcccatatactactccaccactataatataccccactagtatcgggcggcccacaacatacaaatatacaccccagaaagacagcccacaaaatcccccacacacaagacctcaccgaaaaaaagagcgcgcccgcgagggtgccaacccacgcgcgggactcacccccgcggtgaagaaacccacccattgacaaacaagaaaccctaattcagactcccaaacaaaaaacacccgcgacaccaaacgaccaaccagaggggccacccacaacaagcacaggggcaccaaacaccacccaacagagcgggcggcgccatctcacaagaacacagcaaccacaaacaccgcaccacaccaccagcg

SEQ ID NO: 302054 - DNA, 1200 bp, Homo Sapiens
  misc_feature (597)..(646): n is a, c, g, or t
  misc_feature (927)..(936): n is a, c, g, or t
ggggaaaatggttattatcataataaacaaaaacaacacaaacaaaggggagaggtgcagagtggtcctcttagaggagccatcacaaactattatttgctgctgtgccctctccacatcatctaatcctccttatcatctctgctccccccccggggaaccaccctccctctctcttttttgttcacacacaatagcgctcgacaagagcatcttgtcgggtggacagaacaaaacaacaaacccaccccacacacacagagagatcacgttgtctattctattatgttctcacagaagggtgctgcccagagtggtaagagaacaagcaaccgtgtggtgtttttgtgcaaccaactctctaaggagggaatatatttttattatctcgcgccccccgcgtggtgtgtgtaccaccacatgttgcaaatatcgtgcgagagagacgccgcgcgtggggtcatcacacaccaaaaaaagaggaagcaacaacatattatgtgactctcacgcgcgggtctatcgcgaggaaaaaaacatccccccaccatacataaaaagagaggtggtctctcccccgcgcgttgtaacacaacnnnnnnnnnnnnnnnnnnnnnnnnnnnnnnnnnnnnnnnnnnnnnnnnnntttcccccgccgcgagagggggggccccacaatattatcgtacgctgctacaccccgcctttcttttttgtgtttaaaacagagggtggtctccccacatagatagagagagagccgtctatattataacagcgacacgcgaagagcaggcgcgccgcgcgcgtgttctatcaacacacgcggcgtgcgtaagtaagacgtgggaaaacaaaccttgttgtacatcgttgggagaaaaacattttgtgggaggaagaggaacaccccatctacttacgggnnnnnnnnnnagaaaccacatatggtcggcaaacaacctatcctctccacggagagaattatataaacgccccctagaggagggagaaacaaaattataacaacttcttccaacctgcgtgttcaacatggtgcgctgtctaaaccaccaccacgctcatcgacaattattcgtcagtgctctcgtgaaatgaacaaaacatattgtgctgctccacacctccagtcggattatatctaacttatttagtaacaacaataatttttttatacca

SEQ ID NO: 302055 - DNA, 235 bp, Homo Sapiens
cgagccaaaagaggcaagtagaaagccggaacagacaaggagccgtgaggcctcactacccagcgacacagctattagcgacgaccaacaactgaacaacagacaaaggcgtcccgacggcgtaaagccaaaagagagacacatacgacgaaagaatagcacagagagcaggcacaggcgcgaaaacaaagagaacacaaaagagggctaagaacacacaacacaacaaaggaga

SEQ ID NO: 302056 - DNA, 102 bp, Homo Sapiens
gggctccataaattttcctggttggccatggaaatgtaaaagtggattatttaattacatttctcagtttaagtcctcgtgtaagtgctcgggaaattttcc

SEQ ID NO: 302057 - DNA, 1077 bp, Homo Sapiens
  misc_feature (341)..(341): n is a, c, g, or t
  misc_feature (495)..(495): n is a, c, g, or t
ccacgtcgctctggtgattcgtggactgaaggtagtaacagcgcagcccagcatgtccggcgcctgttctggtggtgaccagtgttacagcaggaggacgtgagcgtgcagactccgagattgatcatggcatcactgagggaccgtaagtgtcgctccattcagataacccttgtcagagtagtgctacacgtgaatgcgctacaaccgacgtcactccgatatgactcgcatgcgaaggggtcaggactcatatcctacagcatgagcttcgtgcaaggcgcatggcaccaaaggggatcatcaacgagctattgactgcaagcctagagccctccctntaactctagtgagcggccattcgggttgctctccctagaagggattcctgtgagtgcttggcctgggctggctgtgagaagaagatccgcatgtactcccagaggaataccaagcctagtgcgtgaaaccgttgcgaaccgcctattttgcagngcacaagacgtatacgtgggctaccagcgcagtgctctgagttgtacacttgtatcccccttggttcttgtatacctcatcacgcgtagcctaagtcttcttagatgggagacgtctccgcgtgaaacgcatttgttagaatggggggatgggagaggaaggatataagagggagaccatccccattcggcttaaaaggtcttgttgcatcctatccttgttgacgggtctaaccatatgaggacgcagcataatgactcttaaagttcgtttatcacctctattctccccccttccccacgggttttctcccactgagcgttcgctataccagaagggccttgttcattgccccgcagaagggcggccccttcttttgcccccgtattttccaccatgcatttgtgcgtcgccatgaccttaaattacttgaaagggggcccaggaggtcttccccatgggttgggctttcctttgcgcgtagggtcgattcagaagttggattggggcctgtgcgcgggcgggagggggactctgggtgggcaacggtcaaagccttttgccttttttccttggcaagcg

SEQ ID NO: 302058 - DNA, 989 bp, Homo Sapiens
  misc_feature (479)..(556): n is a, c, g, or t
aacttaaaaatgctttatgggaattatttggataaaaccaaatactgtgtttttaaaacaaatttgggaaataaaacctatctcctgtgaagtcgccccctaaatttccagggctttttccccccaatagggtgacagctggcctcacacgggatattacagggaaatgttgtaagtcctaaggatatcgcccagcaccaggcgcgaaaattttggtgtcagcaaatctccatagcaaggaaggaaaacaggcatgtgggtctcctccaccttctctcccagcctgtaagggctcatagtttgcgggaactcacgtggtcataagcatttgacagccattacaaagctttctctctccagggagggggaagatctccaaacctttagacctttcatcttcaaatttagggcaaaactctcgtggtaaagggtgcttgtgctcccgtgggtgtgggcttcccagaagttcatccccgtgnnnnnnnnnnnnnnnnnnnnnnnnnnnnnnnnnnnnnnnnnnnnnnnnnnnnnnnnnnnnnnnnnnnnnnnnnnnnnncttgtgcaaaacgcccgcttctttacccagggtataacaggggagataaactgttcttacaactccagttggttagagacgtacaccacggggccttgtgggcgccgatagccggatttccccctgccacagagcttaggtcaagtccccaagcaaatgaccccagaaactcccagtgttgcacaccggtagtttacaccacaatcggcacggtggggcacccggcccctttacttacccacagacaagggcccgaaaatgttggctcgccccgcccggttgtttggccagatggcgccacaaacccttgtgtgtaatcccccgtgttcccccctacattacaaggcgggccattaaaaacttctattttggccacccaagaaagcccacttccgcaaaacaaaaaacgagccgggccctatagaaaatccca

SEQ ID NO: 302059 - DNA, 423 bp, Homo Sapiens
gaggagcagcacgattcgacatatctagtctttctgaacgagcaggacatcactcgcattaccacagctaacaacctagagttaaacggaagaccgcgtcagccgcccttatagctgagcctatctacttttgtgatcaaaactatcacatatcacagcaacattttcactactcctaacgagagtgactcatgtatactcacaatcgcacgaacagggactctatcaaatgcgctgtacgatgccaagaacccagcaccatttattctgtgcaccagtagaacaacaacacatttcagccttccacatgtagtttctgatcatctttgtaccatactcttttactagcgcagagcgaatctaactctgattgatactgagtcacgattcttgctggtgcatcaaccctcccacctaaatcat

SEQ ID NO: 302060 - DNA, 423 bp, Homo Sapiens
cattgaatttcataaaatgttatatctgttgatcactgagagatgaggaggcaacccacctatacacttgtctgacgtctgcatgagctgaataacacaccggcactgaccagccaatcaccactagtcttcgaaagcagtgatgtcctaatcatgatgcccatctgttatttatgtcatttttttggactaaagagccagcagcaaggttgcaccttatacaattcgttaaaattccatggcaaatgaagtttgaaccatgctggtggggaggactggagttattaaactaaaatgtggtaagccaaatatgtccatatggggactgggcaaagcaaagactgcccacatacagcaccttagcctttgtatgagttaggaaacaatggactgtttttccttctacattcacactcaacatag

SEQ ID NO: 302061 - DNA, 1156 bp, Homo Sapiens
  misc_feature (350)..(350): n is a, c, g, or t
ggctacgctacggtgcctcgtagaggcccgtcgatgacgacttatattgacctctttcgaagcgtgccgtcgacgacggtgtccttgtatgcgtatctccggatcgcctgaacggaacggagaacggatctcgtccaacgtatgtctctcctcggacgaaccatcgggctggaaggattagcaatccatgctcgcagacggagtcacgatccgctgtagggcccgaggtgagtaatcatgtgactagtgtgctcgatcggaagttgtacttagctactcgtgcgaagaacagcaatatagctggagtactgtagtagcgcagtagtcgatagttggtgacacatcactgnacgtttctggctgcaagcggtctttgggctctgtacctggcttgcgtatgtaaggagcacgaagaggcagacctcgactgaatatttgggggagatgaactatttatatcaggggaacgagatttccaacactgaagtcaacaaacctgagcagtggacccacgcatgtgcgcaacactgcgagggtgacctagcaggggattcaaacttgcctagagttgggatagtaaggcccgaaaaacctcactgctagtttggggactttatgcaatgagttgacaacgagttcttgtgcgtcaccccatagctatgcaatggggatttccctatatattagtcttgaggacagaaatgcccttgcgtaaccgcgaacaaatagttgcgtggtcactaagacttcaatgtgaaaatccttgaatgggaaagaccgatccggggaatggttcatatagtaaaaattctatgcagcccctcacgggtgcgtgctcgttataggcatgacccaccctggagagaatgtcggtctaactccgtttacaccgcgtttaaaccgaacgttggctgacgcatacttgataacgttgacccattctccgtgaatattctccccttttaacaagttgtcctaccgaacagggaagcgttgcgcaatttcaccctcggcgaattggaactgcaaggtcttcggctaggagaaacaggtttggcttttcacccctagagtaaagttcgttcggccaccgggcctacttcggtgccccaaagagcgtgtgcacacagaattttttttgggaggattccctata

SEQ ID NO: 302062 - DNA, 671 bp, Homo Sapiens
  misc_feature (437)..(466): n is a, c, g, or t
ctatattattattttatctattattatgttaagtgttgtattaactatatggtacagtgcagccatggtttaccaagcagaaagatgtgaagcggacagaaaggtgacacacctaagtgagtgacagcacaacagcgaagcaggtcaccaactaatagctgcgcacttgaaagactaggggtagctgccacataagcgacaagtactccagacgaagagaagtagcaatcactaagacgaggcgcacagagaacacgatgcaatgctgtcgacagaactgtgccaacgcacacacagaaacaccgtcagtggcgaaaagatccaccggggcgggagcgagaagataaagacacagccgattgatgaagcaacggaagtctgacgggcccaggcgagtggcaccaagcggaaacgataacttaacaacagagttcacnnnnnnnnnnnnnnnnnnnnnnnnnnnnnntagaggtaaccaaaacgcatggagaataacaaaaaatagaagacaccaacaaagacaaccacggaacaagacaaagcacaagaaatagacaccaacaaaacaagaacaggacaaagacaagaaaaagaatcaaaacgcaccagaagacaacacaaacacgacggacagcgccacagataagacgacccagcgactggcaacgacg

SEQ ID NO: 302063 - DNA, 747 bp, Homo Sapiens
aaaaaatagtctgatactttttcccagttgtgggacgatggaatggagtaactgttggctcacggatgagccccactctcccgaggttcactcctcattcactcgcatgtaatccagctactaccgaagaataacagtgaggtctaatgaggcatactcggtcataacctaagaccgcggtattaactctaatgtgcgtaattattcacacgaagaacacagggggtagtcctaccgtagtttaaccgcagtaaaacgagtttgaaccgtccgtaagctttgagaacctcaacgcgcacgtaggcacctccccaaagaatgggcgagggaaatccctaagcacgttgtgactgccagcacgtagacgtgggtttgcatacaaaaacccacggagattcttaagaaattcatacgaagttgtattgtctcggcccatgaagatatgtcgcatttcttaccatgttgggcccaggagtggagtcaaaaggtagctctaagatgccacaggaaggaaggggagttcgaacatggagacacatcacgtactaggcacgaaccaagcccatcggatgacgaagaacggacccaggggggcacctaccccaaaaggagccccgagaaaaagcaccgcccgcgaaaaatgcggggacaagtcgccctcaaacaaacatctgcgaacacagatgtgtccatcgaaaaaacagcgtcaccctaaaaagaagcataccgggaaaagcctccatgaga

SEQ ID NO: 302064 - DNA, 897 bp, Homo Sapiens
acaagcattaggggaggaagaaagccgaatgatcctggagcatgtccttggcgcaggcactgctggacaaagcagtccatctcggtgggctggcactgcggagccagcgtggacattccaccgagcacgaggcgaaaggggcagcccagaggcctgccactgaaaccgccttctgcaggcaccgtctgccagtgctcagcgctgttagcagggctcctcctctgctgggatgaggggttgggatgacaggagttcacagtgtcctgcctgccccttcagcagcataacctttgtctttctggactcctggctggagctggtgatactgtgaacatgctgcctctctggaagctgctccatgtctccctatatccccagagcatggcagctgtgatcagaattccacagggtggggctgatgaggatccatgcacatccgtccctgtacccctcattagggacttgggttggggggtgcctatctgcacgtgttctttttcctctcatgcactttgtcggtctctgtgcagggtttctattatactaataaggagcactggggacgctggcgacagtgtgataatcgtccccttggagggccagaggcagtcggtgtgcgctgacctcatcctgggggagtgctgatgaaactctggcttggccttactgcctgagcactgcgcctgatgtggagggtacgggggcagggttgccgggctgtacttctacggctcattgttaccagccatgcttgtctcaggggcattccttcaaaacttcttaagttatgcttaagaactttaaagagctgatgagcctaatggacaacttttcagtataactcagtacagggaacacacttcaacaaataccaggctaattagtccctcagagcac

SEQ ID NO: 302065 - DNA, 306 bp, Homo Sapiens
gggccctccacaaaactcccttggggggggaccatgggggtttccgcaaaaaccggacgtgggggggcgccgttaacaacaacaaaacccacagaagatagaaaggatgcaatgcggcggcggcccccagaaagagtcggcgacacggcacgcgcctgaaacaaagagcccctgggggggtacccctatcaataatcggcgctcaatcgacccaggggcttaagggggagagcaaaccttatatattaagagaacgccctgtgagaaatattatgcgacccccctcttggagtaagaaacgaacgt

SEQ ID NO: 302066 - DNA, 699 bp, Homo Sapiens
  misc_feature (195)..(246): n is a, c, g, or t
taagaagataaaaatagagaaaaataagaaaattaaatatgaatagtagaaaaggagtaatagtgatagagaatagaatgatgtatacgatagtgatgtgatcgtgcgatcaatgatgatgaatgttgttaaacgaagaatgagaaaattagttgataacgaggaatataggcgagaagataagagcacaaaagnnnnnnnnnnnnnnnnnnnnnnnnnnnnnnnnnnnnnnnnnnnnnnnnnnnntacaagaggtgtaagataacaagggtgtatgaagaaaagataaaaagagatagatgtatgaatgtataaatagtaatataacaatacacgcgatgatagcagtagttaatagtagtatagtaagtagaaaactgaatgtagatgcactgagcagaagcaagcgagagagacagcagaagagcggtgagcagtgagatgagagagggagcaccgagcggcagagaagacagaacgacgagttggatgcgcatgtcaagaatgcgagagagaatgagcaacagccaatggaggtaggagtcagagacagagaacgcagagaatgcagacaagcaggcagaggagtgcgcgagacagatgagcgacacacgcggagagggacgcagaggagcgagagcacgacaagccgcataggtagtggtagaggcgcgacgcgtgagcggcgcgtgcggcggc

SEQ ID NO: 302067 - DNA, 498 bp, Homo Sapiens
  misc_feature (41)..(68): n is a, c, g, or t
  misc_feature (322)..(322): n is a, c, g, or t
  misc_feature (413)..(450): n is a, c, g, or t
cggacgcgtgggtcctagttctagatcgcgagcgccccccnnnnnnnnnnnnnnnnnnnnnnnnnnnncacagctggggggtttccccttttttgacctcctcctctttaaagctacaaaaaccacctcccttttttacaggaccggcatctttttaaggttgggggtgtttctccccagcctctcttcaggagggggggaagggtgggagtgtgcatctggtgaactctcctttctcctttcttctcctttctttggccgccgcttttcccatcctggcgtgtagacttctggattggtgcacgtcggtggtcacatccangtgataggtgttgggtttctgtgccccttttctggactggcccagggtcgctcagaaccccagaaatcccttccttacacaaccttctttnnnnnnnnnnnnnnnnnnnnnnnnnnnnnnnnnnnnnnaagggtgaggagggcgccatcaataaaggagggaaacccccaggtctg

SEQ ID NO: 302068 - DNA, 309 bp, Homo Sapiens
gaatttatatggcactaggcctcaactaggatttattttaatagatttagttacccagttcattctttttctacccattaagaaaacatatattgacagcatttagtatgcataaaatattcctgtcctaaagaactacttaaaaatcctaaagaactacttacaaatttcccttctaggtagtttcctttgcacaactaatatgcataatagcaccattgaaatactgtgcttttattttctcaagtgtccatgatttctggatgacgtaattaagtgaattaaacatattttgtacttcttagtttc

SEQ ID NO: 302069 - DNA, 301 bp, Homo Sapiens
  misc_feature (64)..(64): n is a, c, g, or t
  misc_feature (147)..(194): n is a, c, g, or t
gagggggaccgcttttttctcccctcccaacaaagagcgagcgcgagacgggagcgcgaccaangaccaccacacaacacgagcaacagaagaaccacaaagagggagcgacgactccatacaacacaacaccagagaaggagcggnnnnnnnnnnnnnnnnnnnnnnnnnnnnnnnnnnnnnnnnnnnnnnnncacctaaccggcccaaccgagccacgcagccccccacccacacacggacgcgacaagcaccccgccaacaaacgagccgcaagaaacacacccaaacgaaagcgagc

SEQ ID NO: 302070 - DNA, 1100 bp, Homo Sapiens
  misc_feature (262)..(262): n is a, c, g, or t
ccctttgctccagtgaatgttagaagggcatgtacaatctgtcgttctatgcaccaggaagtctatgagatggagactctgcctgagtacaagcgctgaggcttcaactgatcaccgatgtgctgtcctgtccagggaatgtgtgcagctgcgtggtgaagcagattggcgtgggcttgagcgaggccggagactcagtgacaccgacccacactggagagcagagctgcgagttcgaatgtgtcaagcgatgctatagtancatgcatacgcgagtgcccagagccaaacagtgagaagacggccagagacataatgcgcgctcgtgtgcactttgggactctcgggcacaacagcggatcaacaatttgccaatggcaaagggtattgcctagaggcgtgcaagagccacaaagattagcagtcggcacggatgcgatgggataaggacggaagggcgtgggaaatcgacctgcgacgcccataacacctttccgttatggagaaagggtcatggcgtgtgagatgccttagctcgacgttgctctggacctatggtggtctctttcaatggtggggaaaaggggcccgcgacatggttgtgttgctttgtactgaagggcaatcttctgttccacgaaagccttaaattcgccaattccccttgtatatggcgccgcatacccggcgcggtatcttgtggcccagtggatatatacgggtgtaggaatattatattgcaagggtgcatcccagagaaccacggaattttggccagggggttgggagggtaggctcccaagttctcaacaaaagtgccagggtttaggggaacgccaaaaactggaatactagatggcctgttaggccattatggtggtaagaggccttttggcgggccacaaagggggggattaccaagcccagaaaaaatggattccatagggccacccccaagtggacacaatactggccgttctaaactggacaaacagagggccattagagaagacgtctgaaagactcttacactttatgaaatttccgccaccatttaaaaattaacccccgtaggggccccaatgcgcacaccgccgaat

SEQ ID NO: 302071 - DNA, 776 bp, Homo Sapiens
attattatttggggggtatggggctggttggggaaaaaaatttttggaagggcccccttttgtgttataggactgccaattcgtggggttgggccttgagggggggtgagaatttaactcctcgtggtggggataacacagtggagagtgtgcgagaagaagtgcttctgagaaaaggcggcacaccaattgggtggtcgcccatccaggtggaatattacttttaaaattctggtgatatttttaaaagcggttgtgaagaatataagaaatgagggtggattccgatattttttaaaacaggctcacagggttgtgacttttccccacaccacaatgtgtggccccatttgagaaatgtgccatctcccctataatatatctatttagatatatcttggtctctctacaacacataaatgtggtggtggccacatgggggagacaacatctccgcggtatatacttatgtggggagagcgtgtgagacacgcgtggctaaataaagggcgtgtggctatattatttcttatattataagacagggaggaatgttgttttccgtagtagaatggttggcaaagtggtgtgccgctataaaaaggaagaactcctgtgtgtgtgtgggaggagtatcatgacatataatgtgttttggtgtgggtaacaacaccaaaaaatttttaaataatgggggtgggacatatttttttaaccacccaattatgtggtggggcgtcctatttttaaaaaagagaatcacacggtattatagt

SEQ ID NO: 302072 - DNA, 1097 bp, Homo Sapiens
gtcttggagtacgtccattgctcctactggtcgtactattcaaacggaagcagatgaacaagattgatcaggagagtatattggaccaacagtcaacgcgcgatgtcgactggatagcttgcggctcgacttgtcctgtgcattctatcccgctctggcagtccagtgcagagtcacactagacaaatcgactccattgctgacatactacagcatggagactaggaccactcgttgtttttcacgagttagtagtcccttctccatgagctcgccactacaacgtacatacgtagtagtactatacctgtgagtccatttggcgcgtagtgaatgggtgcatgtatgatgtaaggttgacggtgtttcactaggagtacgtgtacagcagccatgaagggcacttcagacgttgctagacattcactaatacgtggtcatccttaatgacttgaagctccatgttccatctgtagtccactagcattgcagctcgacgatctggggcgaacaatcggagcgttaacctagttgcctgatgaacgtcgaatccctctaactaggtcttgcagcttcgctgacagtactatcggtcgcatccacttcgaacttccccagagctggccctttccagtgcatgccactatgagttgcggcaaagggcgtcgcccttatcttgagaaaaacaccctaggggcaaaataccctttcccactccaatttacccacgctcatgggatctttcgtttaaaggttcaccgcattgcagatacttaccctcctactggtccggagggaaggcgtcccgattggccagaacctatcgttatgtgggagtaccagcgtatttgtctcgttagacggtcctagttctttgaaccgacaataccctgttgctttactactaccgaggccccattcgccttcaaagggtaccagctaacttcatggattaggtaatcctgtacggtgtggcctcctattcctgattagctgtgcgttgggcgcaagcttcacttgcatgagagctccaggttcttaaacccgcgcacacccacgtgcattggggttgcgcgtgggcgctgccaggcactccc

SEQ ID NO: 302073 - DNA, 1227 bp, Homo Sapiens
tcccgtcaccgccacctgcgtagtctatgcgtcgccactattgacgtacggctgctctcactgaagtgatccttgaggatgtgtaaacgcatattccttgtgcgctgctgttggcgaacagcaggctcgaaggtgttggagacagtgggagaacagagagactagacgacatgagatgtgaagttaagagaaacgtattgttctgaagccagaagagaacagcaagcaactatcgacacaaaacctcattctgttgaacagatgcttggatagcctggccaacacgtacttaggatggaggagtgcgagcgactcttgcgataccagtgcatatctctacagcccttcctattgagtggggcaagccacttcgtaaacgtccagggtaggtgatacggagtgacctggagcccattgtgttcgtagcatgagtagtagaacagtccaactgcatgtaatgcgtacagcaccactagtggcatagtaagtcattcctataggagagaggcacggatagggacaatgaatggaacgaagacatgcgctcatgttggcatttcgctcgcgaccgagacagtgactcctgggtaaacctacacccgtcgagttactgctcgaccggtctcgatccacggctctatttgcacacgatagccggatctcacggggatgttatttatctaaccatcaaatatcggaaagcgagattgagacttttgcgtgagaacagaatttgcgcccggtatgtaggggcgatccaaatatgtcgcgccgtttgaggcaattcccattcgcgagcgtcatcataggtaggacttccaccccatggtctgtggtgactcgcggttatagtactccgttgacgcccttgcaaggcgtgttggaagcgcgctagacgcgtgatatgcgaggacggggaagcgcaacacagtgacccggggaatctgtttgtcactctcaacaaggcgtcgagtgtcgttaccaaaccttggtgttggattgacctatggaaaggacctaagcgctctaataaatggatccctaagagataccaaagaaccctagcggcaaagagtccgaggcaaagccgagcaactaagaggatgtaaaatacgccacaatgcccctatggcgtggccccccacagcgtttgtccccccacctgttcgaactcctcaagactttggccatctggccccacaactaagggcaagcgggtcacttgca

SEQ ID NO: 302074 - DNA, 977 bp, Homo Sapiens
taagtggataacccgaggttttgagaaacatccttagttaaatctcatcctatgaagtgggtcagttcatgatcctacccagctaaaacagaggccaggagccagggaggaaaagcagtcaggccacgcaacattgtttcgcgaaagtggcacttctctgcaagcctgagctcctgagactgtgcattgtaccctgaaacgcagctttatccatagacttctgtcgataaatggctgtaagtcgttggactccttgctccaaacgcgagcgactctagtcaatagaacctcccagcgtcccacgtcgccttccatatgctgcccatgggctttacataggagcaagagaacatttactccttcgtataattgccatctctttgcatctctcaacatggatgaacaccgatccggactcctgtgtatgtctcgaaattaagcagattccgtcttctgttgcacatatgagaactatgaagagttgtagacggctcttctaaactagctttaaagttgtgatattgacatttatcacaagcatgatgtcagttagagagaatgagattctccactaacatagatgaccctttcatgctgtggcctccatagaagcatgtcccaggccaggtgcccacatggcaggcatttattttctcacagatctggaagctgcaggtccaacttcgaggggtgggtggggttgtatcctctgaggcctgtccttctggctggcagggagtctcttccagccgtgtcctctgttggcctttcctctatgcacacgcacctctgggatctctctggctccaatatcatcttgtggtcaatacaaattaatctatggacgacagagggttagacgatttggtcccgcgcgaactgactgtgggcaattttgggcctcctgtgagcctccgattcccagatttacgagaaccatggggtagaacttcccgatgtcacaggtcgtttacaca

SEQ ID NO: 302075 - DNA, 788 bp, Homo Sapiens
  misc_feature (249)..(681): n is a, c, g, or t
atagtctgctctgagaaaagagccaagttcagggcagagactaccttcctgggtaccccccaagaaggagtcttgatcacttctctaaacatgccctggatgttcccagagctcatgaaaacgctgctctccagtggtgctagcagctctgatgaaggctaagtccaagctctgaattcaggagagcagagctgcctcctgctcccaccaccgtggttctcaggcagtaatggttctattattggccannnnnnnnnnnnnnnnnnnnnnnnnnnnnnnnnnnnnnnnnnnnnnnnnnnnnnnnnnnnnnnnnnnnnnnnnnnnnnnnnnnnnnnnnnnnnnnnnnnnnnnnnnnnnnnnnnnnnnnnnnnnnnnnnnnnnnnnnnnnnnnnnnnnnnnnnnnnnnnnnnnnnnnnnnnnnnnnnnnnnnnnnnnnnnnnnnnnnnnnnnnnnnnnnnnnnnnnnnnnnnnnnnnnnnnnnnnnnnnnnnnnnnnnnnnnnnnnnnnnnnnnnnnnnnnnnnnnnnnnnnnnnnnnnnnnnnnnnnnnnnnnnnnnnnnnnnnnnnnnnnnnnnnnnnnnnnnnnnnnnnnnnnnnnnnnnnnnnnnnnnnnnnnnnnnnnnnnnnnnnnnnnnnnnnnnnnnnnnnnnnnnnnnnnnnnnnnnnnnnnnnnnnnnnnnnnttcctagatggggactcatggggtaatgttcattccatgtcttgaacttgtgcacttgattacacttggtgttgttagcttgctgacactgtatccacctattacac

SEQ ID NO: 302076 - DNA, 1460 bp, Homo Sapiens
  misc_feature (491)..(491): n is a, c, g, or t
  misc_feature (790)..(790): n is a, c, g, or t
acacggaagttcacctattgtaccacgactggaacttccgtccattgcttccattttagaatggatatgaacgctggcagaacttctcgagtgagtctctacagacctctaagagctatcaaagagagatcagggattgccaactgcctatctacaactggcgaccttgctacacgttgatatgccagtgacagcgcgtttccctcctaataagtgataagagatgatggatgaatacttcagtcatttgtcccaggctcagccatccagaagtctagctctgggctggacaagaaacagggtactaatattgagcggaacgagattgaagaactaaagcttagtggcgctggactcggaagacggtgctagatgctaggtcgccctgctagagcgtccggacgtgtgtagtccttgtggatcaactacttttacgcaagaatagtatatctcagccatggagtacgcctcgcttgaaggatcgcttggantcgatctggggacaagccagaccacaaggcatgctgtaggagtgacacatttaacacgccataataccacgggcagctcgtgccatgatcactcaatgaacatgtgacctgtctcctgtgagattagatcttaccggagaatctcacatccctctgagaattacaaccctcacgaagctgagcacatactgtctgtcgaccccttggaaaatcatagttcttcctctccaacatgggcaccccccttaagggccacccatagagtggttcccaagcctatggaatttcgagctccgtcnttgtggcggaagggaagtgaggcaagagacaggcttatctcagtccaatgtaaacccactgtgtaaggaaaaccgcaaaattgggtcctccagggcctcccttcggcttagaggccccaccacggcgttctgggtggcgaagtttcggtccaccgtatggggcacaaccctccatctggcattcgattgtctcccacactttagctagccctctgtctcaccgcggcgccgttaccatagtaggggcggattgcccaaacggaggttgtgagcattgcccttcccccgttgggacgctctttgtgtcttcccctaccccgtgggaatgtgttcccgtcgcggggggttacttttgaacccaggcggtgtagggaccccctggcttgccgaatgcatacctagcaccccgaagggacaatataaaggtgttgtgaattgcgccaacgactttcagtttgagaccctccagtcagacaaacgaaaagtgtgggctgatttacaacagtgtccgccaagtagagctgtagggcgacccccatgggatccgtaggcgataacttaccaaatggggcttgcgccctggagaacgacatctcggagagcgatagaaacgccgtcttacacacccacaacaccctctgtgtgtggcgtacactatcacggctataaa

SEQ ID NO: 302077 - DNA, 666 bp, Homo Sapiens
gggtgggagggacaccggggaccccacacacacttatttatattgtagaagaagaggaggagccagtcactcatcaagatgttgtgggtatatttaataatacaaagaggcgagcgcgcgtggtggattaatatacaaagccaaacaatagaagagcgagaagtcgaacaatatacgttggagaagagatgatgttcatcattgatgagaataaagaatagacagactccctgttatcaccgtgagtgggagaggaccagagagagatatagagagagtgaggtccgatattatgactctagatataagagaatgatagtatctgaccgcacacgctagtcaggagagctatgatatatgtaataaatacaaatataataaaatatagagataaagaaggagatgaagagggggaggttgcactaaacaacaccccctgcatctcggttcttattattgtacttgttaggcagagatcgggtcgtagacacatgagtctaaacctgacagggaggtgttgtaaggtactgagcgaagaaaagaagcatgagatagattttctacactatttacgatcatcagtacgctaacctaattgatgaaaggtatgcaacgcgagcagtgacgagtaagtaaaacataatgactcgaaacccggtgagggga

SEQ ID NO: 302078 - DNA, 176 bp, Homo Sapiens
agacgagaaagtatgggtagcaaataatgtgtgatgagagagagtgttggagagaagagatagttagtgtgatgtagagtgaatagagataatgagtgatagacagaagagatatatgcagcgtgagtaagatagatgtgaaatgagtgtatagagatgcagtagtgtgagtgatg

SEQ ID NO: 302079 - DNA, 128 bp, Homo Sapiens
ggaggcggtaactcctacggtcctcgcctggttagcgacccctcctttcgacacacctcttgccggcagctccatcctccccccagtgtagtagaaagtttctttcttccagcaagaagcgtactgat

SEQ ID NO: 302080 - DNA, 541 bp, Homo Sapiens
aggtggaggcccgatgcagaagatgatcgaccctacggacggttcgtaggcaatcaacgaattggggatagcgtgggttttgtgcattcttctgattattcaggtaatccaggacagctaggagggtaagcagcatgagacagtctgtcacgatggttactggggagcgaacgtggagcctgctatgactgctgcacgctcttacgatagatcctactcccagctttcaacctcatcggtgcaaatcgatgtagatctccgaacattcccgcatgcgagggaaacgaaacacgtgaactcttgcacggacgccttcgtagtgccgcgattccatgtcctgcgtaccttatgtccgtctctatcgtgttgtcatgcttgggatgtgttcgatgagtaacgcctggggagcgctgcgctgctcatgtgctgcttttgactcccacgggatgcgtccaggccagtgacccccccgtgatggcagtcggcttctcgacttgcctagtcttcgggcctacctgctttagctccgttcagcgcgttg

SEQ ID NO: 302081 - DNA, 952 bp, Homo Sapiens
gaataaaagggcaaaaataagaccactctaaaagaacaccaaaaaaccccagcacaaaaccgacgatggagtttggtttcttatgatttctttgccagagtggccagaagatgcaaatgcccatcagcactgaggaattctttggccccctttgttggtgcccgcttgcccccaacctttcaggcttgccgagatgctccccttgattcgaacaccgaggctacaggacgccagactgccagggcctgcccggcctccgtgttcctgcccccaacctcactcactccgtgcccgtggacgagcgaaccgggttcgggtcccgggtgttcggagaaaccgttgccgggttcccagaagtccaaagtccggccctcaagcattcatcacgggggagcctggcgtgatagccacgtttgaaggcagtttccccaccgcgaggtttttcccggaagcgcttcgagaaactcccagcggaggcaatatcggcgacaggtcccccgagccccaaacctctttgaaggatgcaccaggtgcgccttgaacttgtccgcgtgtgccctggggccgttttgccccatttgtggtcccccccctgtgtggcccttcccaggaggctctcccttttcaccattcgttgcgcgccttctctcactagtgtgcacgtgtgcgcgtgttgggcgcacacgcgcgttgtgttgtgtggatgggccccttgggtggtattcccccccgagagcagtgtaccttgcgatgactggctggtcgtatatgcatcgcatgaattcgatgtggtagacgcaacattcgcaaggttgtgcacacctcggtgaggtgtttattccccgccaatacgtctatcctggctcatgtgtgggtcgtcacatatgtggggtgccctcctgtcccccccgggcggtggtgcgccccagcgcccacggaaaatattctcccc

SEQ ID NO: 302082 - DNA, 720 bp, Homo Sapiens
caaaaggtgccaaacaccatattctacaaggttctggatctctagctccttctaaaataccagctctgtcaactgtgttaaatgcccccatctgcctgtgcccactctgttggccagcaagactgtgaaggcatgaagtgtgtgttagtgaccagaaaccctggccagactgcaaaaaccactttcctggacgtcaggctatcacttctctcagctcccagttcctacctggggagtgatgggtgccaagatacagtttgagagaggtgaagtgacatgtacatgacattgcatttatctgctttaactgtggcaaaaactttaacatggcaaatacaaaggtctgtagctctggagttgtcctgcacaccctcaccctgcacagtcccagttgatggggaactatggctattcctttgtccatgatggcatgtgccctagttcaccagtctacccaaatccctggttattacctcacatccagtgtttctctatgcacatagagtcctccatggaccccttctaggtctttgccttggtgaccctgtgactatttcagtgcttgtcgatgacgttcatttcttcctctgggtaaagctctgggccctaacggttacctggacacagggccactatgttcaatccagagcccttccacgtctatcccagtctttcacaccagccaatgcaaccctcgctacaacggacagaccacttacg

SEQ ID NO: 302083 - DNA, 724 bp, Homo Sapiens
ttttgtgttgcaggctgtcgagagataaaaatgattttagagtctgtgtactgatgattctttcggtgttaagaaacacagggttgtgtacttccctttttatgggcttatggattctatttatattaagacctgtttataattgttttctgccaaagggaattgtctaacttcagatttctacattgggttcatacttactgttttatatcagaaataaaaaaatagcttctgctttttcatatgaaatcttggtacatcagaaagaattcctgaaaatttataatagaatgaattttattaatgcagaaaaataccccagggtgttaaaatatatgaagtgtgggatatattcttatagtttgtaaaatgtagtcaaccaatactgtcttctaatttggtaatttatttataaaattacttaaacattaggtaattatatttgttaggatttgaacattatttgtagttaaattgtcatgctgtttgaaataattgatacttgtctacgtaatacattttactgtatgttttgaagatggttataatttcactttcaaaatttaaacaaatcaattttaacatgttttaaaaacatatagcttagggatttttcttaaaaaggttttcttagtaaaaaacataaatttaaaagcccctgagtctaggagagggcttattgaattgctataagaaagctggagtacctttgataagtaataaa

SEQ ID NO: 302084 - DNA, 141 bp, Homo Sapiens
gtgaagaaatgatacagataattcttgctaaaagcttggctgttacaaggaggagagaaacaagactagctgcaaagtgagattgggttgatggagcagttttaaatctcaaaataaagagcttgtgcttttttgattatg

SEQ ID NO: 302085 - DNA, 416 bp, Homo Sapiens
ggaaggcgtaaagccccctggtgctataggagtcgtgacgcatgacctgagttactggctccattggagcctcatcagcgcgccgctgccgctcgagtcgcgtcctgagatccacgtctacctcactacccgcgtgactgtcggcgtcgtgccgtccttgtgactgtccgtaacgcgcacgacggcgtgcactcgggatttcctgagcgcaggctattactccccgtggtcgtatgtgcacggaccgcgtcgagtatcatcgatggcgctataagtgggtccgcgcgtgggcgcgccttcgtcccgtgctctctgctcgggctgctccttcgtcgcctcctcacattggccgtcgtgctagcagcacgtggcgaacgctgtacggtgtacccccacggacgcgttagcggaccccc

SEQ ID NO: 302086 - DNA, 1292 bp, Homo Sapiens
gtctagcgcgccgcacgacttagtgcgcccggccgtatcagtcagcgcgaggccgtggatatatgtatcgtggaacatagtccgtatcatgtgatactgcggaatctctccgaataccagtgctaccatccattgagagtgacgagccagtgttggcgttacctgcgtgtgctatgtgccaaccgagattcgactcggcccgagtcgtgggacgagagagatggggaaggtcgatccaaggaattgaacactgtgaaactcgaatgtctaagggctctggatgcagtactctgccatgtgcacctcattaatcgttgaaaccatgagttgcaggaagctcttgcgtagactcgagatgctggcatgcattgacatgtccatataattgagcgcagacactatgagagtacagcaaattggatacctcctaggatccgggacccatgtgagaagcccatttgagcgtgtactgcttcaatacacttcgaaagacaaaacatggctaggctttcggaaaatatccatggagtggtgggctagaccagggggcgatcaaatgacccgcgcatatcgcttcccggatacacctactttggcaaagcaaactaggcaaccgatccaataagcccgtgacttcgtaattagaacctttggttaagctacgcatacgtcggctactgtggggaaacaactatgttgcttggcacccacttgccttgtccacgcagtattatcgtgtgggcatgcaacctggtgacaattcctaggtggcgtacttccacgcagatgggctccatctcgttacatggaccaaccacaaagctaggccgacacagggaagcatgtcctggccctggggatgaacccgtaagaacagcccggagccgtggcgaccctccaggggaggaaaggcgcaagccttggtaagtcagttttccattccatatagaaagggacaccccaagcacaaagagataggcgcaacgcccaccgggacggggctccttgacatacgttctgcccatgcaatttgttcccacagctcactgggcggctaagaactcgcgatgtcctaagcggcataattgcaattgggcccctccgcaaatattccttgccaaaagcagcccttgcgtgcccacagccactcggaatgtgtcagtcaacgcttcgccagggagaccccatgaaaatgcctccgagaaccaatggggcactatccgcgccaattcaaactctcggagcacacgaccctcacttgataccgccacgtctaacgggtggcgttccaa

SEQ ID NO: 302087 - DNA, 764 bp, Homo Sapiens
ccacgcgtcgcacggtcacactgcagcatcagcacccggtgaatgtggttctcttcccatgtcagaattttgtgagctccacacgggcagggttgcatctgttttattctctgattgattctaagccccatgtccctggcacaggatggctgcttggcagtagggagtggatgaaccagtagtacccaggctgccaggcagggccctgcaggggacagacccaagggctgatatggggacacctgctgagggggggatttaccacggtaagggcagggctgggaggctgggcagccagtttcaccctcgcacaggctgcctggcaagaccagcggctggaggtgatgtcctcagtagagaacggtggccactggaaacgtgtggccagaaggggaaacgctcgggcctctggtgggggccagcctggggtggggtcggccagggtcagctgcctttccttcatgctggggaggagatgttgtgtgcatgtgacgaaagcatttgatagcatgccaaaagtttcctccattatgtgcgtgtcaagtgtttgaccaggtcagaactcttgtctatgcgaatgtgctcacgcagacagaagcggaggggctccgtcgctctgccctcacgccgctgaaccgcgagggtctcccgctcctcaggcttgcggctcggcccgcgaagtgtgtcaggtgtgcatcctggggtgctccttttgtgctctgttcctacggtgacacaggcggcgtggggttagacaggtaccg

SEQ ID NO: 302088 - DNA, 268 bp, Homo Sapiens
ccccttctaagtctttcggttgaccctcttgtaggagaaagtacatacataaaaagccgaccacggaccaacaatgagaagagcagcctccagacggagatcaacacaggcgatgcccccgaccaacgagaagagggaggagcgcgcgggagccgcgcccgcgcgcgcgacgagacagcacggaggaaaggcaaaaagaacagaggagagagccagcacagaccggaggcgagcgcccgaaaaagaacagcccggcgccggagagcgg

SEQ ID NO: 302089 - DNA, 819 bp, Homo Sapiens
gtttaatcttattcaggttacattttagtgaataacattaatatatatattaatatatgtccaaaattgtataagattctaaaattctaatatctgagtatatgatatcaattataattagggttattatgttaagttattgtaaaccacagaaataacgaaatttctttgtcaattgtgttttgactgtgactgtctaaagacatcttgtgattcacagacaatcgtagtcttgttttgatcctcttcaaaaggtggtttataatcagctgtagaacttaggtgctcttaaatgcatatttccaatatctttagattgtgatattagaataaaggaaaaacattcaggactcatgaagagctgaaatattcatgaatatcaagcagagcaagagttaactgaatgggctgaactaatagaagacatgtaatctgtttaactttttgcttaaaactttgctgatgttttgtttttcagagtcaagaaaacttttattttgagctatttacagcttttaacaattgagtaaggtatactcctgtgaacaaaatttggagtgtattttgttcctctgctggtttctctagaattcagaaactatttgtgagtattcttatggcaatgtagtttatttgcataagtgcacaagaatccattttctttttgcaacatgacacaattggagaaactggtggttttaccagtttctgatagaagggtgtgcttcccttttaaggaatcaagcttgacttgcagagccaaaaaaggagaaactggcctcataccttgtctacacagtccttgtcaggcctcctaac

SEQ ID NO: 302090 - DNA, 156 bp, Homo Sapiens
aaacaaaacacccaagggtttttttggatggacctcaaggggaaacgggatggggaaaaatactgtttctgggaaaatcaccccctttcctcctataaggggcagtgctctcgaatctcgagcactcctaattctttaattattctcctagtagag

SEQ ID NO: 302091 - DNA, 573 bp, Homo Sapiens
cttctataggaaatacagggttagatacctataagcctctggtcacactttcatcaactgataaatatataccttattgtatgtgtttgtcttcaagacacccatttaatatatatagttgatttattagcattgaactcatagcccatagcaatataactcatgcctggacaaagctcacctaacgtattttctctgtaaggcacatcacagccttcttgcacatagaagcattagctagcacttaagcactacacttgtgagccattataaataccgaaatcatcaagaaaaatgtgaaaaacataaccttaaatatactgcataaaggacacttttttttacagtgtgagagctaaaggccttgtttaacctcacctaggaatgtcattgggtgactcaaattttttgccattctgtgaatttccatgaatgactatgaaagtgtcatgaatgtcgatttcgggggttacaaataataagaaatgaaatctttaggataatgaccctgggctatgtaagtctaaagactaatctttctacttcctataggatcataaagaattatttttc

SEQ ID NO: 302092 - DNA, 126 bp, Homo Sapiens
tagcattttcctcgtactccggggctggcagcggggccttcccccagcaccacatggctcctggcagccctgccccctgtgccggggtggccgaggcccagccgggcccactggaccgagggacgg

SEQ ID NO: 302093 - DNA, 1044 bp, Homo Sapiens
  misc_feature (577)..(632): n is a, c, g, or t
aatatccccctgagtcgcggggttagaaaaaaccggaaatcttttataaacattataattttcttatacctaatttataggggaaaaaacgggcgctctgtggacctcacctcttggatgtacacttattaaaacgagaattatcttagcgcccaacccaccaaaaacacaacgggggggagacgcagaaaattaagcgcatattaacgcgttaacaacaaacttacgctgttgttctaacacaaagaggttgatactactcaatatagggacctacgatttacgccccacgtgtgggtgttgacaaagactcacagaaaatttctatattctcccataagaagagagagggaacaactatattaaggcgtgaggggaccccttatggaggaaaaccatctatcagagattatctacggagaagaaaatgtctgtcccccgagggggcacacagcaatgcgtgcttttttaaccgaggcagaaagaggaaggggggccgatattgtggctttatatttcaccccaaggccaaccaaataataacattcaaagcgggggtgataacaaccacaagtcnnnnnnnnnnnnnnnnnnnnnnnnnnnnnnnnnnnnnnnnnnnnnnnnnnnnnnnntacgggagggggactacaacgccacagatatgaaccccttggggaagggtcgggagatggggtcaccccccaaaaaaactatttggagacagcaccatcacccacagctcacaggcgggccgggaccaagtaggacaaaagaagagatacaacccccactatctataaaaaaatgccacggagggaccaccaagaaatacactaagagggccagacacatgtacacatatccagaggggatgcccaaaaatggtggtcacaccgcgggataggcaaactaaaaaacacccacttgtagcagccaccccacatataaaaggagtggagggcaaggcgaaaacagccaaaagtgggcgaaaccaccgggggataaacccttcacaagctacaaaatactatgacagagaagaat

SEQ ID NO: 302094 - DNA, 404 bp, Homo Sapiens
  misc_feature (133)..(133): n is a, c, g, or t
aaatccccccgggaaccaaaaagcgggggctatcgtggcaaatgtggctcctttggtgccctccccccacttctactccacgtggcctctgaggctcctccgtgattggccttatatacgcccttatataccncgttgagcaccccaccactcaaaagaatctgtgtgggcacccagcccccttcgacgggccgtggtgtctcttctccccaaacacccctttttaaaagagtgggcggaggggaaaacagagagaggtgacaagaggtgcgagagggagaacacgagtcgcccctaactccgacggggaataatagtggaggaggagcgcgcactaggaccccctggagtggttatacaccctttcccggaggggctactctctgcggcacaactatttggat

SEQ ID NO: 302095 - DNA, 1156 bp, Homo Sapiens
  misc_feature (147)..(239): n is a, c, g, or t
  misc_feature (242)..(250): n is a, c, g, or t
  misc_feature (779)..(866): n is a, c, g, or t
  misc_feature (953)..(1030): n is a, c, g, or t
  misc_feature (1056)..(1078): n is a, c, g, or t
aaagaatatatctggtattccttgggcgtggtttaaaaataaatttgtcctagcggaatatctcgaaaaagcggccctaaaaacaaagaccggtgagtgttaatatctttcccccacaattattagcggataaacgagatagcaccnnnnnnnnnnnnnnnnnnnnnnnnnnnnnnnnnnnnnnnnnnnnnnnnnnnnnnnnnnnnnnnnnnnnnnnnnnnnnnnnnnnnnnnnnnnnngannnnnnnnnccacaaaataaacaccccccgagaggggagaccacaaacaaaccacaacccacccatattttagaaaaaaagaggggcccacaatatgaggagcaaaactaataacaaaaacgaacagcaacggaggaaaactaaaaaacaccatccagtgtaaagaataaaaaaaacaacgctaaataggatgagtcaatcactagaagcagcaagcaaacccaaaaacaacacgggggcgggggagcacaacaaaataggtggcgagaacacaacacaccaaacaaaagaaatataacaacaccaccacaagccaggagacacaaataacaaaaaaagagaggaaaacaacgacgagtgggcaccaccaaaaagacagcgcacgaaaaatattagcgggaagagagagaaataaaatcttagacgcgacagaagaggtgcgtatataataaactaaagacgaaaaataatatatacaaagaggggggccgatcttttttatctatataaaataacaagcactagggacgaactagannnnnnnnnnnnnnnnnnnnnnnnnnnnnnnnnnnnnnnnnnnnnnnnnnnnnnnnnnnnnnnnnnnnnnnnnnnnnnnnnnnnnnnnccgcgaacacgaagcaagataacacaatgacacgacagcagacgaatagaagacgggggcggaaaaaaagaaagacagatagagagnnnnnnnnnnnnnnnnnnnnnnnnnnnnnnnnnnnnnnnnnnnnnnnnnnnnnnnnnnnnnnnnnnnnnnnnnnnnnncgaacagcaggcacccacagcagcgnnnnnnnnnnnnnnnnnnnnnnncagagactgaacaacagagagaagcagcggtgaggagccaaaacaaacagcactagacaacaaagacaacccgcaaac

SEQ ID NO: 302096 - DNA, 958 bp, Homo Sapiens
  misc_feature (309)..(309): n is a, c, g, or t
aagaactagtagctttaactgtgagggcacagacttgaagtgggagtgatgagattctgtaggggacccatgagttgtgatagaggtctcgaggggaattggcgtgagacgaatgggtctcagagacactagtgcctgtagcatgtggatgaagaaaatctggctggttaagaagggcttcccttaagtatctcgccctcatacatctcatggagactgttctggaaatagcttttgtcttaccaaccctgccctggacaaggagcatccagatcacgacatgtgctcttggtgtacttttagcctggnggcaattggagttatccacatggcataatgttgggtggctatgcatagctattaagactcctcgtgttggcatgatgcactactagtcccccaggggtgccactacctaccttaacaatgaagatcgcagcaatggatccctaatggatggcgacatatctttcttttgaagaagtcccaacttgttaacttgcgtcgctgtttaagtgaaggccagtacaggttaaagtgccacggcttggctattaacttgcttgggatgcgtcaccagtattcctataaggtgtgtacttgactctttcacgggggcttccttttaacttacgtcctacaactaaacgttatagtagactggaaggaccctaatctgctattgttgaagggaattaccattgctgcgagatgtcgttgcacctttgggaccaatgagcaccttggacctgggaccataaagcgggagttaagagggggttagatctccattcctgttcaagatattgactccctggtgcaaatatcacctttaagattactcccagtgggtgctttccttgcttgaatgaaattacgggacgaggcattaagtgggatagggacttgaatagaacctttaaagaataccgtcttagtgtctatgaattggacccaa

SEQ ID NO: 302097 - DNA, 1159 bp, Homo Sapiens
  misc_feature (551)..(551): n is a, c, g, or t
cgatgattgcggacttcggaggcgaccactgaggtgtgactacatggtctaacggatgcatattgctcccaggaaatcaggccctagagagacaacgtgcagggtctccttgaattgctgcgggggccgcgggatgatctgtgagactcgagacagaccgcttatgtgggaccagtgatggaatggagaaagtccagaacatgcagtgtaggagctgattgcatagcatgtgacggtaggggtggatagagggacaccttccgccgtgcgggatgtgaggctcggcgagtcagaagtgcaagactagccgcaggcatgtaaggcctacttcaagtacgaagattcgatattggatggcgaggagctgtgcgtcggaccctgtcctctcaagtgatacggataaacaagacgactggagaagactccacacgagagggacgtcggcgaaggtcacgtttccgtggacggggggacatttggggggtagccaatacgcattggttgccacaggcaattgaccctacgcgctccgcccccggtgtccacgaaanccctcaccttcaaaaccctcgaagggttagcgccttcgcgcgcatccgtgagacgtcagaaaggctccaccggttcaaaggcgcggggtcgatgctcgacgcaattgccaatggtcaggtcaagactgggaagagcctcggacattgagaatcacctgggtgaagctccccacatggaacttggtccttgggaaccaggtacgaacccaaggaaccaaggtggaacgggttcgttcgcggtgactaaaggacaaggaactggactttcccgttcgcggccgtgagggatcgccactttggttgaaaagttggccaaggtcgcgtttcgcagagatgaacggcattatccctagttaacattgttgaaacgattttttacatgtccccaggcttaaaagcgtagggctcgtccttgaacttaaatgcgttttttacaaggttaccacttgggtaattgggccccaggggtggatgaaaccttcgtcgtaccgttaagagtaagacacgttggggaactttttgtattcggagatcccttcgttccttgcctcttggagcccagaaccactccaccgtttctcgtgaggataggttatagagcacactga

SEQ ID NO: 302098 - DNA, 924 bp, Homo Sapiens
gaggaaaccaggctgctctaacttctgaagagtgggctctggctcaagactccaatcggccagaagcccacagagatcaaagcactagcaagttcagctgtcctggccctcgggtagaacccacgggcgtgcctgggtgcggctccacccacatgccccactgtcagcccaggcaggagccttcctggccgggctcaggatctgcctgcagcccagacaggccatcacccagccccgatgcatcctggcactgcacgcttactcttcacaagcacttatacgcggatggcctccgagaccctgacctccctggtctgctgaggtcaggcccaggtctcccaaggagccgggcagctccacagcacaacacgctggacacacgtaaaggtttcagatctcccgatgtgcgtgttgatgtcggctatatagtacctacccttgggaagcttgcgataggttatcactcttggtcgtcttaggtaaacagttacatccacatggtatactaaccatcatggcccaacgtctacagctttaggcattacaccaggatagtggaggggatgtaaaacacagcactttaccaaacacaacaggatgtcctccgcccgatccaagaggatggaacggagcaacccggagaggcttgacactcgggcatataacacaccacacaaggggccacagggcgaggaaaccacccctggggacgggaggccacgaagtcgcgccaacaagagacactcacacggcagattgggacatgagagcatcggcaggaaaacgcggcgggacacagtcaaaagggagggcggacgaacgggaaacaggaccagaaagggagaaacaccgggcgaccaagaaaaagggaaacggaggccagaaaagaccacgaccaggaacacgggaagggcaacgacgccc

SEQ ID NO: 302099 - DNA, 672 bp, Homo Sapiens
tggaaaagaaaatccagatgatgaagaaaatatagagaaacacccaaaattttgccatccaccctaagtcagctactttcattgttgtggtgtatattgttccagtcttttctgcctgcctgtgagtgtgtgtatttttataaaaccgagatgattatacttgttattctacagcctgccttttccaacaatatattgtagagagatctccatgcctataagtattgatctgtatcattttcttggctgcgtagtattatattgaacagaatgaggttcgtgcagggaatagccaaaaaatctatcaggtactgtaactacggactaaggaacagaagttaggtgtatagtagattaactcaattatccattgaaacggatgctagtataggacgaattttgacatcgataccttctgaatgaggttataaataatttctaggtggtataatcttcacttatgctagctttctaatcaattatgtagacgtgatctaaatgttcatgtccgactggccgtccaaccagattcatacgatggccactcctcagaactctcaacgaacctgagcgcacagaatcaaagaaaacacgaaaaaacgaacactagaagggccccaacgaaacatcaaaccaacggatccaagagaccagccacgacaccacacaacc

SEQ ID NO: 302100 - DNA, 1047 bp, Homo Sapiens
  misc_feature (1027)..(1027): n is a, c, g, or t
aggaacgtggtggacggacgcgagcggtaagatgccagattgttctaacttcctacgtgatgaacgatctgtgtgacttcatcttagcatatgcgatgcggactacggagcagataggcaaagctactccaaagaacgtcgcttcgaccaggagtcgagatgaaagggagactatggtatcagtgtaccatctgaggcctgcaagggagctcctaccggaatcggcaagggcactgaggaccgggacgggagacgactacctatagggggggtcaacacagaggaccacgacgagagacaggcaactcgcaagagcacacgagatggaaagacctggtgccagcacaggatgcagaatgcatcattcctatcagacctatcagacaaccgacctggaacgaaggcttgcgcataaccggggctgcgagaggcgcgagggaagaggtgccctagtaggtagtgaacttgaaggagaatccctggattggggggacacgtaccaagggaacgtgccaagacggagaacttgaccgcgcgaaactcagagaggtgacgagattgaccgagcgaccttagtgagtgcggagagagatgagccaaatacagagagacgccacgaggagtcgctcgggaccgatgtgctgcgcggcgatccaacactgcgtcgattggcccgcgactgagcgggaggcgaggggtagtcgagtgaaacccgggtctccgacgttccataaacgtgcggggtccaggcaaacacggcaggggaaatttcaattcataaattccccagaaaagagaagaaattccagcagaggaagaatttactggagcaccggcaattcacagacttctttagggaagcgacccagaagtccaataagggctttgttcgggaattgacgaggggtcacgacaattgacaaggggggagaactgtccaacgcttggcaaaagcctatgaaatagggagcgctccctccagagcaatatgtcgggaagagattccccgcgagagggtggagagggnggagaattgggggggcggaa

SEQ ID NO: 302101 - DNA, 1166 bp, Homo Sapiens
  misc_feature (290)..(290): n is a, c, g, or t
ctgaaggcgagctgctctatctcgtttctatcgaactccttcaagtagacgccaccatggttcgtgttctcgctggtatcatgttctacgcccctgctgcctgatcatgttcctggtggttgcctatcatcgatgagattgaccgatgtgcgtttactacttatgctcctgccttggtaatatgctacattcataagtgcctgtctgctgggtcatcgtccggactccataggagccttccctcgtctcctaggcccatcatactacgtttcctctttgaccctgctaanaaaaacctataaacgattcttgtgggggactctttgcacctgcccgttgtggggcaatttgaccttgttgcgtgagcccatcatcttcccaggtttgcacgaccacagacttggtcgcgtctcgaattcaattccgaaaggctgctggttgggcagcgccagaaacttaatggcggcatagtgtccctatagcgacacttcatagaccgtgattcattgcccataggtcccccaggtcaagttggcggcccactcagtttcccaacaagttcgtaccgaagaggtgccaggaaaccctccgttcgcatcgagttggccggatgaggtcacaggcacacgagtttccacttcgtgggtccatatcccttttagggcaaaagaagaaagaaaccattttgggaagggatagcggcgctaggaaagtaagttcacgtccatcccaaattccctttggggtgtcacacagggggaccatatcgacggacagggttccaccggcacagcatagcagcggggagccacaatcgaggagtcaatacccacccttgccttatagggacaacgggttagctcccccttactaggctctggtgtgctccgaaccaatgtgccgaactcaggaaaggcgcataagtgttaacacccaatcgcctccggccgagtgtgagcacccaattaagatttctcccccatatgaacatcgccttggcgcaatgtctgcgtcacccttagagcagctaggttccagacagcctggagtgcccccatgagtcaccctgtgcaccgctctgcaccgggtgtagtcacaagcaggattaacacggcatacaatgtgtggagggccaatgtgcaagttctcctttgacccacacaaat

SEQ ID NO: 302102 - DNA, 882 bp, Homo Sapiens
aacgaataacgtctgttgcctctttacattagatatgaagcctagcagtcttgtctaaaaccagtatttgtgtggtcatgttataacgctaccttgtgctcgatgcgcgcgccaaaagtgcacgcatttacctgttgacattcagcatcttccgagagcactgatggtgatagagagagatacagaaccctagcgaactattgttatcgccggccgattaactgactctacatgtagaccttctctagcttatgctggatgtttcgacaccagaggatactttgacttagttatgtgcaagaatagaaggattcttaatctccattactttgagaataggttcactaatacatgtaacataaacttgccatttgtgccttctgttctctatcgagtaactgtttattcctaggagttaacagtgacagaaatccctgagtgcggaagtagatttctccatatgagaagagtactgattctctcccaaactggtagctttttgctgctgatccattgccgttctatcctgattgacttactgagtttcttacagaacaaattgtcagctgtaaggtggttatcgcatgttagaattctcagacgtaatgattcgacactggggaagggcatccctagtgtattggccatgtctagccccacggaaacatccttgttcttgcctaaaggtttcccctttcccccgaaggtatgagagaggcttggcttataagtctggaacgagtctagagtgagagatagaatatagccaggtggggtgatgttcgtagcgttagagaaatgccctttgcgtgccaggacatatcttgggtgggaccccgtattccttggtttccaagtatgccagtttgtggaccattaaag

SEQ ID NO: 302103 - DNA, 122 bp, Homo Sapiens
gttgtggggcccccccttctcggctttaaaactcctcgcttgacacaggggatttgggttccacaatgggagtattattttctctctatatacaatccccgcgtatatttaacaatataaac

SEQ ID NO: 302104 - DNA, 1119 bp, Homo Sapiens
  misc_feature (251)..(251): n is a, c, g, or t
tatgatccaagaaatttgatcagaagctgtagcgtaaatcctcttactgaagccaacaatggtatatatagatataatacaaatgtgggacttcacatataacgtcgtctccttcttacctctgccgtatataaggatctctatatagaataacgaagagcttaaaacgtgtaatggattgcagttcgcacctaatatatatcgttacaccctttgttagactcaatatgagtacaaagtacggtttatcnggctatctatttactctaactcactgtgtattcgaaaatgtacctttgtcaactatacccacatgacatcaggtcgtgctcttgattgcggcaggtataacatttggcacacgttgaagcgtttccccgtctatatataataatgtaaattttgtttgctcaatggcattcatgaaatctatgtcggaggctcaagcatgtcacgggtaacatcggcacagaatgtgctggagttggacaaatatgcttgccagggtgacaccccaatttccttgtcgtgacgtaaaatttggaagcctctaaatcttggaaagttctccttaacggaaagttcctggatgcgtcgcaaacaccgtaaagtggcaagctctggagttaatccccaagcattttaccactttcacaacgcaaggcgacttttacaaactttgaaccttgactttttaaattcgagctcctttggaacatagggttcctttatcccacgagataacatgcgaagcgttatggtagttcaaggacggtcttgggaatgggtcattcgtgccactaaaaggaacgcggggagcgttatgcgaaacagttaatagggattggtttaatcgttcacttggggtaaggtaagagtaggcccggattatgttcgggtcgacctgaaatgagattccgataggcccgttttaactacggccaagacaacgatacttgggcttaacgagagtctctgagccaaattgacattagggaacaatattaaggggggtatcaccccccgtttaagcacggggcccaatcccagaaatttggcgtcctagacaaatctagggcgacaaattgtttgcggaaacacccaataggaggtaaacca

SEQ ID NO: 302105 - DNA, 558 bp, Homo Sapiens
  misc_feature (52)..(73): n is a, c, g, or t
ataaataacaacaaaaaattttggtgaactataatccccctattgttttgtnnnnnnnnnnnnnnnnnnnnnncatactcaattgtggtattattttaataccccattataatcccagcttctcgtgtctgtgtactcctacctcgcgggctaccctctctgggccacttgggataactcgccaatatcaactcatactctcatatctcacagtgaaacacaggcgtattataagcccccacattattgacatgtgaaaaccatattataatatattgtgggctcttatctcatattggcttgagacctatatctcttttatcctctataacacaatataaatgtgacgcccctcaaaaatatctcacatactcacactctctatgggtgtgcgcgtgaggtgagacacagtatatatttcacatatacacaacttttgggtgggtagagaaaaataatatttatctaccagggagtgagaagaaaaatatttcacgtatcaaccatatttttatcttttaatatctcaccatatttcaaattcacaggagaatgagt

SEQ ID NO: 302106 - DNA, 192 bp, Homo Sapiens
ggaatcccagcatttttatggagcgccccacatcggggaggggcggcaggggttcccaccggaacccaaagtagggttggtgcacttgctgagctcccagaatgcaaattagtaaaagctaaattcaaaagtaaaaggggctaatctccaaagagtacgataaaaacttatttggtatcaaatctggtgatt

SEQ ID NO: 302107 - DNA, 533 bp, Homo Sapiens
  misc_feature (125)..(135): n is a, c, g, or t
acgagcgagcggcgggggggcaaacaacaaaacaacacgcgaggcggcgcggcaaaaaaaacggtaaacagagacgcgggaccgatctctcccccgcggagggcgccgcgcaggcggggcacacnnnnnnnnnnngaaagaggcgcgcccacaccacatattctacctcacctcacacacaggaggaggagagacgtaaggagagagagcacccgccgggggagagaaaaacaaacaacacgtgctgagacagagcaccgacgagaggagagagtgtttctccgccgctggtgagagaacctctaatcttctcctccctccttccaacccaagagagggagggggggtgatgtacactgtgtgtgccgccacccgcggcgtgcgcacgcccgccccgcaccgctatcctcctcgtgctgggagaagaaaacaacaacgcgaggaggggggggcggtagcaaacaagaaacatacgcagcggagagaatacagaagaagacaccgaccacaaaactaaaacacaacacacccat

SEQ ID NO: 302108 - DNA, 605 bp, Homo Sapiens
caaacaggatagttgacttcctctctttctatttgaatgccttaatttctttgtcttgcctgattgctctgtctgggactttcaatactatgttgaataggagtggtgaaagtgggcatccttgtttcttgcttgttttccaagggaatgcttccagcatttgcccatagctataatgttggctgtgggtttttcatggatggctctaattgtttgaagtatgttcctttgatacctagtttatggagaatttttaacgtgaagcagtgttgaattttatcaaaagccttttctgcatctattgagataataatgatgtttttgtctttggttatgtttatgtgatgaatcacatttattaatttatgtatgttgaaccaacgtccgcctcctgggttccagcgattccagtggattagctgtttgatgtgttgctggatttggtttgcaactatttgttgaggatttttgcatcagtatttatcaaagatattgatcctaaagttttcttttttgttgtgtctctgccaggttttggcctcatagaatgagttggggaggcctccctcctcaattttttggaatagtttcagtaggaatagtac

SEQ ID NO: 302109 - DNA, 380 bp, Homo Sapiens
ggtacaggccggaattacgggatatcgtcgacccacgcgtccgcagtggtgcagtctcagctcactacagtctccaccaaccaggttcaagtgattctcctgtcagcctcccaagtagttgggatcatagaccaaaatcttcgaatgcattggaaatacgaaagtagagtgtctcttgccctcctggagttgtgatctagttgctagtgatgaaggcaaagtggatattcagagaacagagtcagaacttcatctgggatcagagcttcttgtgttcactattgctgggcccaattgcaaatgagactagtatgatgtcccggccgcgccactatatgacattggagtgcgctgggggaaagcaagtcactcaggggata

SEQ ID NO: 302110 - DNA, 777 bp, Homo Sapiens
tggtaccggccgggaagtagggatatcgtcgaccacgcgtccgcaaaggtagcttgtgtgtattctgcgaatctcggcagaactgagattttcaagcagcggcactcaacaactaggtgtggtctagagaccaattacaacctccgcgtggtccccgagctctcagggagctgcgcacaggcgttcctagcccaggcggggcgctggcaaccctgcccgaccctctgcctgtgtcgccaccacagcccacagggctcagatgtggtttcacagacccagatgggctgagcaggcggcacacatagtgggtatttcaagccccattctagtagtaattgaatgaacattgtaaaggggttatggggttatagatgcgaacagtttcgttatctaacaaacacattgagagcagtccccatctcctccgagtctgggaccgccagaagaaccactggacagcgtatcacattgcggaccgcccaactactaaagcaacaagctgtgtctatcacaaacatgcaacgtgcacagcatgcacgggtgtgagaaaccaaggccttaagtgaccgagatctcctgaggtgcttgacttccgagtttccaaaaggagttcagcaagcttacagagctcactaatcacagatactttccccactgtgacacgttccgaatatcaacctacctcaccaatgtgagggcacacaagggaagccacaggagggcattctcgtcaacgaaccagaacaactttaccagattgtacacaataaaggaaag

SEQ ID NO: 302111 - DNA, 634 bp, Homo Sapiens
  misc_feature (47)..(126): n is a, c, g, or t
  misc_feature (129)..(157): n is a, c, g, or t
aggctggtaccggtcggaattttgggatatgtcgacccacgcgtcgnnnnnnnnnnnnnnnnnnnnnnnnnnnnnnnnnnnnnnnnnnnnnnnnnnnnnnnnnnnnnnnnnnnnnnnnnnnnnnnnggnnnnnnnnnnnnnnnnnnnnnnnnnnnnncaaaaaatatggatgcgccacagattttgttgtagaaaaagaggggggacaaataatagggagtgttttattatataacgaagagagaagggggaggcggtaatataaaaaagagttttgtgaggggggaaaacgtggagagtggtgggatatgttggagggaaagagagaaccactataatgttgggggggaggaggacaaaatatagggtgggaagaacaacattctcttcgttgagagattatatattaaagctctctggagggagagtatatatattttaattattttaacaggagtatataaaggtaggggtaaaaaacaaacacgggagattaggagtggaggggcgtggagaggaataataatggtgggaaggaggaggataaaagtgatttataggtaaaaaataatattattacaacacgggggggaggtttttattaaatataatagcagaaataaaagataaaatt

SEQ ID NO: 302112 - DNA, 940 bp, Homo Sapiens
  misc_feature (44)..(298): n is a, c, g, or t
  misc_feature (314)..(339): n is a, c, g, or t
tggttaccggctggaagtagggatatcgtcgaccacgcgtcgcnnnnnnnnnnnnnnnnnnnnnnnnnnnnnnnnnnnnnnnnnnnnnnnnnnnnnnnnnnnnnnnnnnnnnnnnnnnnnnnnnnnnnnnnnnnnnnnnnnnnnnnnnnnnnnnnnnnnnnnnnnnnnnnnnnnnnnnnnnnnnnnnnnnnnnnnnnnnnnnnnnnnnnnnnnnnnnnnnnnnnnnnnnnnnnnnnnnnnnnnnnnnnnnnnnnnnnnnnnnnnnnnnnnnnnnnnnnnnnnnnnnnnnnnnnnnnnnatgagaccatggctcnnnnnnnnnnnnnnnnnnnnnnnnnntataaccaggggaggccgaatcagggagggtctgaataccgggctaaggagttcaaggtgtttccaagaaggaacgtgggagcccactgatgggtccaggaggaagaaaagggcgggaccagcttgcttggacaagggaggcgctggtccacgcggtggacggaagaatctcagacaggggcgaagtaaagtacaccttcttccgagcctgcaagaacaggaaaacaaaacgcagaaatcaacagtcgggttcacggcatatgaataatattgctcatttcccaagtgattgtgctaaagctggaagtggaggtacgaggggagaacacagaaggtgagcaggggcggctcattgcagatgtgtcacaccccggggggaccactcaacactggggggcaataatatgctcccaaaattagtgtgcccattcctgtcccttgatacatatagagggaggggcccttgaaaggtggggccacccaagcttcctggaacagggcgacaacagcggatggaacacaggggggcccaacaggggcaggcacccacgaccgggtggcagacaggagcccctgcatgggtggcagggacatccaccac

SEQ ID NO: 302113 - DNA, 585 bp, Homo Sapiens
ccggtcgacttgtgtattgttaagttgggggggcataattgattgcgcccgtcgacgtatatagtgtgtataagaagagggtggcggcgcacacaagaatgaggatgagtgtcatgtatatattagataagagagaaacatcgtagtggtgtacttcatataaagaagggaggcgtgcgcgctgtgtgtaggagaaatatggtggaggaggaaggaaccatatggagtggggcggagagggccgaccttctttgtgttgtgtgaggttgtgtgaggaaggaggagtggtggtgtggtacaatcattccaatgcatgatttattatatattgggtcacatattaagggggggctgtgaatatttcaacggctgctaagctggtgtggggagtagagtatgtggggggataaacggttgtaataaggttggattttgtgtgagggcagaggtggtgtgtgtgatagtagtgggtggggtcttcgactagcgaagagtgatgttattacgtgtgaatgatttatactaaagaacgggcggggggcgataggtggaagacacagagaggacgagagcacggaggaggag

SEQ ID NO: 302114 - DNA, 582 bp, Homo Sapiens
ggtgtcatgccgtccacctcggcagcgccccgttcctgtcgaggtgaggggcgctcgctgctcctgccgggcccgtactttgggtaagatgagcgagcccccctcattgctgcgtgccgaccacaccagtatctgggtgaggttgtaagccatagctagctacattttgaataacgcgggccatgattgacataatggcagtgtacttgggggacatcagaaacgggtggcggaacaggtgagggaaaagatttggaacaaatcggggataggatgcagtgtcttgtcgtaggagatgagtgttagatgtaggggagacttctaatataggtccctaggacctctcggacaaaatttctatccttgacgttgggaatagcatgccagaatacttgtagaaccctttacccacgcaaaccattgtgcctatctggcgagacagaatgtgcttgtatacaactcaagggttgacacgtgggacttaaaggggcgcacgcaaaatgtggctcggataaccagattgcttgaaaggaagcaatgcccctaagaggtatagcactcctaattccagttcccggaaca

SEQ ID NO: 302115 - DNA, 987 bp, Homo Sapiens
  misc_feature (44)..(790): n is a, c, g, or t
ggtaccggccggaattcgggataatgtcgaccacgcgtcggcannnnnnnnnnnnnnnnnnnnnnnnnnnnnnnnnnnnnnnnnnnnnnnnnnnnnnnnnnnnnnnnnnnnnnnnnnnnnnnnnnnnnnnnnnnnnnnnnnnnnnnnnnnnnnnnnnnnnnnnnnnnnnnnnnnnnnnnnnnnnnnnnnnnnnnnnnnnnnnnnnnnnnnnnnnnnnnnnnnnnnnnnnnnnnnnnnnnnnnnnnnnnnnnnnnnnnnnnnnnnnnnnnnnnnnnnnnnnnnnnnnnnnnnnnnnnnnnnnnnnnnnnnnnnnnnnnnnnnnnnnnnnnnnnnnnnnnnnnnnnnnnnnnnnnnnnnnnnnnnnnnnnnnnnnnnnnnnnnnnnnnnnnnnnnnnnnnnnnnnnnnnnnnnnnnnnnnnnnnnnnnnnnnnnnnnnnnnnnnnnnnnnnnnnnnnnnnnnnnnnnnnnnnnnnnnnnnnnnnnnnnnnnnnnnnnnnnnnnnnnnnnnnnnnnnnnnnnnnnnnnnnnnnnnnnnnnnnnnnnnnnnnnnnnnnnnnnnnnnnnnnnnnnnnnnnnnnnnnnnnnnnnnnnnnnnnnnnnnnnnnnnnnnnnnnnnnnnnnnnnnnnnnnnnnnnnnnnnnnnnnnnnnnnnnnnnnnnnnnnnnnnnnnnnnnnnnnnnnnnnnnnnnnnnnnnnnnnnnnnnnnnnnnnnnnnnnnnnnnnnnnnnnnnnnnnnnnnnnnnnnnnnnnnnnnnnnnnnnnnnnnnnnnnnnnnnnnnnnnnnnnnnnncggaggtgaacgcggcccggggccattctacctgaacagcatcgagcacaccgtcaagcccctcctaggaaagccacgggggggcaccactcaaacagtactcaaaaggagaagaaacccacgggaaccagttaggacgcgaaaaggcgaaagcgagagccaaacaaaaagaaatgaaaagaaggacagaaacgcta

SEQ ID NO: 302116 - DNA, 522 bp, Homo Sapiens
ggtaccggccggaatttcgggatatttcgacccacgcgtcgagcaccccctgccccatccctgcagattgggatgaagtgttcagacagccatagaggagtcgggggttgacacggtccctgcctctccgctcagcccaacccacccacagtcgaaagccagtagggagtaggttcagggcattaatgggtggtgcatgcctaatcgaggccccattcgggtactcaatctggagttgtcctcaagttgctgcccatcgtagggtttgctttgagccgcccagaccgtcggcgtgtagagccaaggacgtgaacagcagcggtcagcgatgcccggagagagctccaaggttgttgaatttcagagaacatgggatgcaggagcggagcgccgccctcatgcacgttcttccaaaagaacatcttgtactcaacatggggtcgggacgggaaatccctggctcaattatataatagaccatctgatcctcgggaatgttgcgaggccataactaaccccctc

SEQ ID NO: 302117 - DNA, 673 bp, Homo Sapiens
tacgggtcggaatttccgggatattgtcgagccatgcgtacgagtaaacacctctgcgttgcagctctccctgtgattactctgagatcagaatccgtcagtatgtcatagctgtgtaccactcccagtctttgtcttccccaaatcttacatctagtgagcatgtgtgctgacttggagaagaggaatatattcattcctcagaatgttcagtccttcttctggcagtgcaacagtccaaagcatattcaggcatgtggctgtctgtcaggcacatgaattgttctgtttgcacctcaacatgggcaacagtctctacatctctccctgatatctgtggagcgctgtgtggaacgcctgctaagcaagcaggcctcatggcaactctggctgctcgtacatgctgtcttttcccaacaattctgtcattgccagcagcagcaagaacaacactttgactgcagatcaacattggagccatctgcaaatctcagctggaccatggcacctacaatgatctaatttcgtccaactaggacagacatttgctcttcaacaatttgaacctttggattcagcttgtagcagtagaagaagctccatttcatcacatgaaagtttccagcatcttggactcgtggtatccatcgtatcattagtagtcagcaagagg

SEQ ID NO: 302118 - DNA, 1028 bp, Homo Sapiens
tggtcccggccggaattacgggatatcgtcgaccacgcgttcgatttacaaaattgtggcctcagaggagctgtcttttggaaaataagtttactattcatgcagttagttagacatgcacgatgtacttgaatcaataaactgtggaccagaaaagggctgcttaaatgaattcacgtgttctaattctctttcgaggctgttgatgacctcctggattcatacccccatgatctgtcttgctcttgcctctgttctttgataaagcacatcagactatgtgacacccatcttttcaagaacgacctaaaagcaatgacaacaggcaggagagaattaccactggcctgggcacagtgacagcagaaggcccacctgagcttggagagttggcgagataaggcaaaatcaaggtgcaacagtgggccatgttccaagggtgaatggatctgagagtccgctgatgttccttactgatcagaacagggaccttctaacgaaacagccagagttccttgaatcaggcagaagttctttagagacaggaagccagagctattgataatatccgaacgacagaggaaggaatttcttattagaaattctaacaataaaacaagtggggattggttggatacccttagaagctacattttctctcatccctaagatagatatctcaagtggttatctgacacctctggtttgacacggttctgcttctcaagtgacatttgttctaaagtctgtgtctagaaattcttgtgggggctggactctgaaaaaagatctcactgcagaggcttaatctgggtttttcaatccctcggctggatgattcggaagacttcactaatcagaatatgagggtcagccctagacgaaaaaagacgaccccgacactgccaattgcaaatatgccaattatgaagccaatgtgccacagattcacaaataaaagatcgaataaaaacacgaaacaacacccaaagatagactcatcacaacaatcttccctgttcgctcag

SEQ ID NO: 302119 - DNA, 554 bp, Homo Sapiens
cggtccggaatgtcgggatatcgtcgaccacgcgtccggagacacccgcgagccccgagctctgagaccttcccctgactcggaggcgctaagccgtaccctctcgttcccgcctccgagagctcccaccgtcaaagacccagagatagccggtccgaatccagaaaccccgcctgcccaccctagtttccgaaacctccctcctgaaccactgaaagtccgttccccgtctcggagctcacacagagaatctgtccttcaaggccaaagctctgagacttgcccccagcaccctgtgcttggagctccgacacccgagactgcactgacctccctcgccagctcggagccctcagtcccctccggggcttgagggcccttccatcccattctggactcgaagcacagcacccccatcagaatggttttgtggattttgagccctttgtcccatcccagagctcagagccctccatcctgcatggaggcccaaccctggggctctgaggattgggcaccgtcccctcatctaagaatatatttcatacgctgga

SEQ ID NO: 302120 - DNA, 776 bp, Homo Sapiens
  misc_feature (98)..(119): n is a, c, g, or t
  misc_feature (483)..(525): n is a, c, g, or t
tggtcggtcggaattcgggatatgtgaccacgcgtcgcacaacagttactaccttatctcagctgtggggacgctccaccccagccggacagctggannnnnnnnnnnnnnnnnnnnnnctgcgccccgccctcaattccatcccctctgtcactccgcccatccccggctacctacaacagctaaaaccccagccctcaatgaagcactcgcgtatcgcgttgtaggcctgaacctcattcacggagcctggacgtctgggtggaaccctgccccttaccacgccttgatggccgcgggaatctggtgctggcggcagccggtgcagccccggcgagccctgtgcctggttgacctcgtccggctcttcttgaatcatgctgggctgccacctgctcagccacacccgccttggtgtgacgcctggtctcagcagcggctgcgtgtcgtggcagccatcacatctccagcaagtctcctggnnnnnnnnnnnnnnnnnnnnnnnnnnnnnnnnnnnnnnnnnnnacttgcagcgagaccgcagcacacaacacctggcacggtccggggggcccgaaggccagggtccctgcacctgaacgctgagggccagcccatgccttccactcccagtgcctctgtgtccctgccttggtccccttgcctgcgaagagggcgacgaggccaactgctgggcgacgcacagggttctcacagctaggagtgccactggcagaagactaacacacgctcttccccctaccccccacagcggc

SEQ ID NO: 302121 - DNA, 1050 bp, Homo Sapiens
  misc_feature (81)..(81): n is a, c, g, or t
  misc_feature (145)..(292): n is a, c, g, or t
  misc_feature (320)..(371): n is a, c, g, or t
  misc_feature (971)..(1006): n is a, c, g, or t
agagtaatgaacccacgtgcggtttaaaaaaagcaggctggtccggtccggaataccgggatattcgtcgacccacgcgtncggtttttattacgattataccacaacacgaataatcattccagtactgaaattggttatgctnnnnnnnnnnnnnnnnnnnnnnnnnnnnnnnnnnnnnnnnnnnnnnnnnnnnnnnnnnnnnnnnnnnnnnnnnnnnnnnnnnnnnnnnnnnnnnnnnnnnnnnnnnnnnnnnnnnnnnnnnnnnnnnnnnnnnnnnnnnnnnnnnnnnccttaatttcctggtgttttctaatgtnnnnnnnnnnnnnnnnnnnnnnnnnnnnnnnnnnnnnnnnnnnnnnnnnnnnagagagtgatgttcaaactcatttcagtgtcgacattcaggcattgagatgcaatgttcaagaatatgctgtcctcctatgattgtctgcccagcctggatcccgtgagctgaattcggtaggaagcatggacccgagcggtatctccgtggggagctggttgcccgctgaggcagtgtgaaaaaaaccctggtggatgctgtcgataagcttgcctgcccaaaagacagagggtgcacagaggggtccgggagcaggtgcgcaggtgggcgtgggaagcaagtcaagtgtgtggcgtccgtaggagggaacatcatcagtgccagcccctatctacgaccctcacgccggtgttcatggacagggggcccactctgacaactctgtgttcagagggtgagcctggcgtgaaagcagaggtccagggcacaaggacggggggaagaacacgtctcgccaaataggtcatccgggacaaagagaccacagtccggacccactttcccggatgtggacccgggcgctgacaaaggcctggtcgggacgcgaaggcgaattactggggagagactccggcgaccggcaccggagccacacaannnnnnnnnnnnnnnnnnnnnnnnnnnnnnnnnnnnaccgacatcgagaagtgacagctaaaaccagggacggaagcacc

SEQ ID NO: 302122 - DNA, 730 bp, Homo Sapiens
  misc_feature (313)..(366): n is a, c, g, or t
caggctggtacggctccggaattccgggatatcgtcgacccacgcgttgcgcaagttctgctcccttctagaaacaacatagacaaagaaagcaaaaggaaagaaatgctgacagagacccacaaaggccgctgtgatttggtaaagcaccaagcctgccagcacgtcctatggaaagtgagggcagacacaaccacagttggcagggagaacagccaagccgcagcacagctaatgacagtcaccactctggagaaatgcttcaaagggcagctgcagaggtggcagccagctcactgaggaaaacggtctnnnnnnnnnnnnnnnnnnnnnnnnnnnnnnnnnnnnnnnnnnnnnnnnnnnnnntgggctcaagcaatcctcccatctcagtcttccaagtaattaggactagaagtgtgtattagtctgttctcaagctgctgatgaagacataccctagactgggcaatttgcaaaagaaagaggtttaatggactcacagttccacgtgactgcggatgcctcaccatggcagcagacgagaggagaatgagagccaagtgaaaggggtttccccttataaaacaccagatctcaggagtcttattcactaccacgacaacagtatgggggaaactgcaccccatgattcaattatctcccaccgggtcctcccacaatatgagggaattatggggagctacaattttatgagatttatgagatg

SEQ ID NO: 302123 - DNA, 511 bp, Homo Sapiens
  misc_feature (41)..(246): n is a, c, g, or t
tgtacggccggaattcgggatatgtgaccagcgtcgggttnnnnnnnnnnnnnnnnnnnnnnnnnnnnnnnnnnnnnnnnnnnnnnnnnnnnnnnnnnnnnnnnnnnnnnnnnnnnnnnnnnnnnnnnnnnnnnnnnnnnnnnnnnnnnnnnnnnnnnnnnnnnnnnnnnnnnnnnnnnnnnnnnnnnnnnnnnnnnnnnnnnnnnnnnnnnnnnnnnnnnnnnnnnnnnnnnnnnnnnnnnnnnntgcgatagggtacgggttccgtaggctcggcgttacccgaaggcgcgcgtacggccaggcatcgcttcgcgcaggcgcgccatacgcgcaggcaggcaatagcgcgcgacccccagtccgcgagggcctggatacgggccgggcgccacaggcacgcggccgcaaagggcagggcgggaaaaggcagccgagaagagggaggcgcaggacagcctaccggaggcacaggcagccgacaacagccaggcgagaaagcacgggggcc

SEQ ID NO: 302124 - DNA, 1029 bp, Homo Sapiens
gggtaacccggccgaagttataggatatgtcgatccacgcgtcgagtagtactaagccacagtttccagccttgaccccctatgggatgagatgtagaaattcccgtaaagatacagaggccactccaggtagtgagccttcataggcctccttctttggctttcatgaaagaacctaataacaggggtttaatgctgttcatttcaaggcacaggttagatcgatgtcataatttaccttttctgtgagtagcagagataagctgacagctattagccatgttagcctcatgcttctgtagaaacgtgttacaagtttattttcaagaaagaaggctctaagtcttccggtcggaatttgtggtgtccagttatttgggtaaccaccagttctagtgtcttttttctctcatcctcttgagttggactccagcccggggtgagactggcggtagtacgccctcccacaaaatcaaaaaaggaaaccgcaagaaacgaaaacactatcaacagcaaaaagaagatacactcccaataaaatactcaaaggaattgggaatagagatcgaatataaacacctacaaacacaaacttgtagggataatatacgtagagaggtaacaccaaggtattttaaaagccaatacgaacacaagtactgagaatgaccatcattacatacaataaaacacacacaactgggaggcaataccactatcatcacttatctagaatagcaagacaaatagaaagaataaaaaggacgcaaagcagaacgggacaagcggatagctacagacaccaaaccgtgtagtgaacagactggcactccgagcggcgcgcacacgagccaacagcgacagaagctacggagtagggggacagggaagaccaacagacagacacaacaactgcgtgagtgcacggtgacacgccgtgcagagggaacgagaaagaccggaacgaaggagccgacgaacaaagagtacgacgaaccgagacacggagacaagaacagaaagctccga

SEQ ID NO: 302125 - DNA, 753 bp, Homo Sapiens
  misc_feature (46)..(100): n is a, c, g, or t
ttaccggccggaagttagggatatgtcgaccacgcgtcgcctgatnnnnnnnnnnnnnnnnnnnnnnnnnnnnnnnnnnnnnnnnnnnnnnnnnnnnnnntgagccaccgcacccggccaaattttttatatattctgaatgtaagttccttatcaaatatatgaatcgcaagtattttttcccattatgtgaagtgaagtcttcttatagatatagtatgtgattaataacaaatagttaatttaggagagtagagtacaagctgtagcagtgggagtttgtcagcacacgcttttagaaggtttcttccactgtatgaccgtgtattgatgaaaggaatgtgcctgaaactgtaaccaaaggagacatgcttccagaaaaatctcaaggaaaagtatgtaagcaacagtagatgttggatcagactctaaagtaaagggtggagagttaaccagttaacatgtaagttggagatagagttctcccagaatatgtaggcaccaaagtagttctagacaacaaggattacttctcatttaaagatggtgacattcttgcaaactatatagactgaaataaatcatattgaaatggcatcaacatgaagctgccattctgtaattctgaaatcttctatcatgtaaaataattttcatgtctttctttgtaataaaataatgatatctaaataatgatgcccagtgtttctaaaatttagtttaggtgtatgatataacattctataaatttga

SEQ ID NO: 302126 - DNA, 763 bp, Homo Sapiens
tgtacggccggaattagggatatgtcgaccacgcgtcgagcagttaccgcaggccatggaggaggcgggcacagctgagagcacatctagggcaggtaatggagtcagttagataactacaaacggagagagatacgtatgctgaaaatctgaaaggagggagggccatgtggtgtcagaggaagcaacagatgtcggagcagggccctccaaggtggagcagcagctacaagcagaggctgaccacctgcagaaggagctggagagtctggcagctccgagcccaggagcaagacactgagggcttcagtcacccgaaccaggagtaggaggagaggctgctggagctggagcaggtggccgagctcttgcgggagcaggcagagtcacgcaggcaaatcctggagaccatgcagaacaaatgcaccaccatcagccacgtgctcacccagaaccacgaagctcaaagagcagctgtctccgctgcagaacggattcataaagctggtgcacgggaggcagacaccaagttctggggtctccagctgcagtgggtggcgacaaattgcttctctctgtccagactaatgagaacatggagatcaccagtgcactgcagttggaatagcacgtacagagggagctggaaagagctgggcaaagctaaagggacatggtaacctgcccatccaagaagagctggaaggggggcacagctctggggaggggcaggtgtgaagcagagggcggttcagcctggggc

SEQ ID NO: 302127 - DNA, 1014 bp, Homo Sapiens
  misc_feature (96)..(207): n is a, c, g, or t
  misc_feature (230)..(275): n is a, c, g, or t
  misc_feature (361)..(526): n is a, c, g, or t
  misc_feature (755)..(763): n is a, c, g, or t
tgggtaccggcccggaattacgggatatcgtcgaacccacgcgtcgctcccgagtagctgggacttcaagcttccgccaccacaggcggctaattnnnnnnnnnnnnnnnnnnnnnnnnnnnnnnnnnnnnnnnnnnnnnnnnnnnnnnnnnnnnnnnnnnnnnnnnnnnnnnnnnnnnnnnnnnnnnnnnnnnnnnnnnnnnnnnnatgagccaccgcgcccggccttnnnnnnnnnnnnnnnnnnnnnnnnnnnnnnnnnnnnnnnnnnnnnnagatggagtattagctcttgcccctgtctggagtataatggcaccatctttggctcactgaaaactacgcctcccgggttcaagannnnnnnnnnnnnnnnnnnnnnnnnnnnnnnnnnnnnnnnnnnnnnnnnnnnnnnnnnnnnnnnnnnnnnnnnnnnnnnnnnnnnnnnnnnnnnnnnnnnnnnnnnnnnnnnnnnnnnnnnnnnnnnnnnnnnnnnnnnnnnnnnnnnnnnnnnnnnnnnnnnnnngctggaattacagggtgtgagcccgcgcgtgcggctgtcactaaaagagtattatagagggcactacataaacgtgggcagcgtatttaagacatactgaagtgtctctggagaactggtgtcacgacgagacgaagacacttagtgtcgttggtgtaaaagacccaataaacaatctccttaaaacatggtcgattactacagaagctctacgcgtggagagagatgnnnnnnnnnggggataataaaaacgggctctcgggaaactggtcgtgacgggcctccgaaaaaatcctgacattaaaacaaaggacaaacttcacgaacataccgagacatgaggcgtgtacaaaagggacttaccacactgcacaacatagggaaggcggcaattgaaccatgatgtcccaccaaagacggaaccgagacatagtaacacagctgtaaccacagcaggctccatcgcatatacagctcagccctgcgta

SEQ ID NO: 302128 - DNA, 1066 bp, Homo Sapiens
  misc_feature (51)..(119): n is a, c, g, or t
  misc_feature (121)..(278): n is a, c, g, or t
  misc_feature (294)..(294): n is a, c, g, or t
  misc_feature (358)..(447): n is a, c, g, or t
agggcagtctcagggcccagcttagcgtaccagctttctgtacaaagtggnnnnnnnnnnnnnnnnnnnnnnnnnnnnnnnnnnnnnnnnnnnnnnnnnnnnnnnnnnnnnnnnnnnnntnnnnnnnnnnnnnnnnnnnnnnnnnnnnnnnnnnnnnnnnnnnnnnnnnnnnnnnnnnnnnnnnnnnnnnnnnnnnnnnnnnnnnnnnnnnnnnnnnnnnnnnnnnnnnnnnnnnnnnnnnnnnnnnnnnnnnnnnnnnnnnnnnnnnnnnnnnnnnntacctggaagtatganttttagtgaaacaaatatatataccaccagggagctaggtgaataaaggaaaagaaggagggannnnnnnnnnnnnnnnnnnnnnnnnnnnnnnnnnnnnnnnnnnnnnnnnnnnnnnnnnnnnnnnnnnnnnnnnnnnnnnnnnnnnnnnnncgcgcacacggcagccaaaacgggaagaagggcaagaaaaaagacagagccgagcgaggagacgcaaaaacagggcaagaagagcagacgaccaggcgaacgagaggcgtagcggagcggaggcgaaaggaggagcaaggagaggacacagatcgcgggagccgccacaggagacgcgagagaaagtacgcgcgccccaagcagacacgaagctgggagcagaggcgcaagcagcggccgcgcgaagcacaaccggatcacaactagcgggaagacagtacggaaggcacagagggagctcacgagagacgcgcgacagaaacgagcgaagaaggcgaggacggacgacaacaggactgagcgctacagaggagcgagggaggcgcagagaagagaagcgagccgagagagacacaccgccacggagggagcgcagacgcgagccaacctgcagcagaagcgaaacagaggagagacgaagcagaacatgaaaagaacgaaagggacggcagcggcgacgaagtcgggcacgggaaggcaggcgggacaccgtacggagaagagctggagccatgcgccctgacagcgaggaacaggcacgagggctaaatcgacgggt

SEQ ID NO: 302129 - DNA, 382 bp, Homo Sapiens
  misc_feature (16)..(16): n is a, c, g, or t
  misc_feature (24)..(24): n is a, c, g, or t
  misc_feature (45)..(45): n is a, c, g, or t
  misc_feature (50)..(50): n is a, c, g, or t
  misc_feature (56)..(214): n is a, c, g, or t
  misc_feature (216)..(217): n is a, c, g, or t
  misc_feature (229)..(263): n is a, c, g, or t
  misc_feature (284)..(284): n is a, c, g, or t
ttttttgagacagagntacctctntagcccagggtgaatggagtncagtnacaggnnnnnnnnnnnnnnnnnnnnnnnnnnnnnnnnnnnnnnnnnnnnnnnnnnnnnnnnnnnnnnnnnnnnnnnnnnnnnnnnnnnnnnnnnnnnnnnnnnnnnnnnnnnnnnnnnnnnnnnnnnnnnnnnnnnnnnnnnnnnnnnnnnnnnnnnnnnnnnngnntcaaacgatctnnnnnnnnnnnnnnnnnnnnnnnnnnnnnnnnnnngtgagagccatcatgcctggngctccttctatgtttcatattttgactataaagcccaaaactccagcttgctgagggcagcttaatgtgttagagctattgttcttctgagaagactg

SEQ ID NO: 302130 - DNA, 252 bp, Homo Sapiens
  misc_feature (185)..(185): n is a, c, g, or t
cctgcatcctctttccgaacactgggcctaatgctcctaaatcctaagacaaaaataattactgtatagttaattcatttattttttccacagataatttattgagcatgatttatacaccaagcaatgggccaagcattgaggataaaatatgaaaactcaatctaggggaataagtttagggnattatgctaagctcttcaattaaggaatctcatttttcacaacagtcccatggaaactgtgctctta

SEQ ID NO: 302131 - DNA, 351 bp, Homo Sapiens
  misc_feature (203)..(203): n is a, c, g, or t
  misc_feature (215)..(215): n is a, c, g, or t
  misc_feature (268)..(268): n is a, c, g, or t
  misc_feature (329)..(329): n is a, c, g, or t
tcaaagcaaaacgtttaataattttttttggaaccccagtgtaacagaattcaaatgggaaaagtgagagggagtgtttaaacaaaggcatccccaagtcccttcccagttggtcctgaacaatggaggaggtcaaaccttcttttccacagcatgatggtataaatcagggaagtcctggaaatctattccacaccctaaantacccaaacccnttaaaagcacagatataggcttttacaaacatttactaaataagcaaaaaccntacaaattatgttcccgtcggcattttttcccataccatggacttcaaaatgggttaaaanctccttaatcatcccagaacta

SEQ ID NO: 302132 - DNA, 401 bp, Homo Sapiens
  misc_feature (380)..(380): n is a, c, g, or t
ttccaattttacagacctggtttatcagcaacatttataaaactagacctcaggaaagaactagttctggggatatatgcatggtcttaataaagtgaatggttagcctgtcctgactattacaaaatcaaaacagtgagaatatctgcagaatctatttgactctaaatgactttaagtactccctatcaagtaacgtatctttaacatctcaaacaaatcttcatttctatttttgtactctgcactctaaatctaaaagtttaatacttcttctctagaggatatacatgtaaggcttccatgttaggtacccaaacagcctacctggggaaaaggaggccttaggattaaaaaatggcactggttactgtaggggnctaaattggatccaggtggaa

SEQ ID NO: 302133 - DNA, 410 bp, Homo Sapiens
  misc_feature (366)..(366): n is a, c, g, or t
aagcttcactgaactgtttcttctcagctctcaccctagccatccagttctgccccaccggagataggcagaatttcctgtctcttctatatctgttcagaagtattctggaagataacagtgaagagatagagatgtaggtgtagatgtagttatattgtatttttacttatttttcataattaatgtcagtcaccctttcagacctttcagacactaaccttctgaacactaacctcttgaatattaactaacatatattagaggaggaaggatgtctgtcagatgatcaaaatgtctcgaagcaaaatgagcattttgattgggtgacagtgtgatgttataacaggccagtaaaagtagggntaagtaggaggtcttaaggccgacagtaaccggtccaccttccg

SEQ ID NO: 302134 - DNA, 427 bp, Homo Sapiens
  misc_feature (101)..(101): n is a, c, g, or t
  misc_feature (299)..(299): n is a, c, g, or t
  misc_feature (316)..(316): n is a, c, g, or t
ttgagactgactactgagtctacctttttaatcaagcctaacatgaatgggctccaaaaagtaatgaatgtaattgtactttttgatgtgcctctgcactntggcttggtgagtcatcataaatagctgttaaatatgtgactttacagattttgatatgttcagattgtaaaaaatgaatagtttatttcattaattgatgggcagtcaagaatctccctcccttcagtagggctgacacttaggagttaggtcatggttgtggttacttggcatggctaatcagattttgttctggncagaatttgcccaagancaatacccagcagaaactggagttaggctataaaaaaccattcatgtttccgagtgatccatttcagtccgccgattcatgttttacaggtgtttaggttgttggattatt

SEQ ID NO: 302135 - DNA, 339 bp, Homo Sapiens
  misc_feature (141)..(185): n is a, c, g, or t
  misc_feature (317)..(317): n is a, c, g, or t
agttcaaacaatcctcccacctcagcctcctgagtagttgggattacaggcacatgccactgggcctggctaatttttgtattttttgtagagatgaggttttgtcatgttgccgaggcttgtcttgaactcctggggttnnnnnnnnnnnnnnnnnnnnnnnnnnnnnnnnnnnnnnnnnnnnnggatgagccactgcgcccagcctccccttgattctttaaaccaaaatgtcactgggagaaggcagagctaactttaaaatttgtttaggggatactaatttactttaggaaatggggcctttattttagggnaggcctttatggttttatgggg

SEQ ID NO: 302136 - DNA, 402 bp, Homo Sapiens
  misc_feature (313)..(313): n is a, c, g, or t
  misc_feature (380)..(380): n is a, c, g, or t
cttttcttccacatgaatgtgaaattctggaagtcaagaaccatgtttgttcacatttttatctctagtacacagtacagtgcctggtataagaaaaactcaatgtattttaccatcctaacatattaagtagagctctacggcagataaatgttaactctcatgatcatatcactaagaagatgtggctgtaacagcctgtcgttgctctgaaaataaagagccaaattctcaccgctgctgcaaaggcctgcctgatggggtgcccttccttcctgtctacgttctcgctttgcccatccctcctcccttnttcagcctgggttaccacctaccctttcctttcaaaacctgttggaggccttcatttccccttgggntggtttccctggccaccttgga

SEQ ID NO: 302137 - DNA, 298 bp, Homo Sapiens
ttttaaaacaatttccgctttattccctccttgatgctttttataaataaggtttaatagaaagcatcactattttttatttacttctacagggggaagtagctcttttcctggcaggggtggacacgtagttatgggatgagctcggtggtactcggcctgtccacacgagcgtctctggctttgtcgatatgcttgacaaggaggggaagagacaagagtacgaggcggactcccagtatggccagaactactcctagtaaggttttaaatcccccgagggacgaaaaccaaccac

SEQ ID NO: 302138 - DNA, 265 bp, Homo Sapiens
  misc_feature (101)..(101): n is a, c, g, or t
  misc_feature (115)..(115): n is a, c, g, or t
  misc_feature (207)..(207): n is a, c, g, or t
  misc_feature (214)..(214): n is a, c, g, or t
  misc_feature (223)..(223): n is a, c, g, or t
ataaacagagataagaaaatatactaacagcactttatacaataaaatagcgtattatactgtaaaatgccacgtttatataataaaatactgtataatanggtagtcacatgantttttaactctcattacagacaactcaatttttattctgggattcaggtaacatttttgaaatatattcctttcctccaggtaataacaaangaggggnaatcctgtnggggttcacattctgacagtatttacaggggttaatcccttt

SEQ ID NO: 302139 - DNA, 332 bp, Homo Sapiens
  misc_feature (96)..(208): n is a, c, g, or t
  misc_feature (234)..(234): n is a, c, g, or t
  misc_feature (253)..(253): n is a, c, g, or t
  misc_feature (302)..(302): n is a, c, g, or t
cgtgcctggcctttaacatttacgatatacagacaatgaagtgagtcatgacttgttaaatctctaatatttcaaaaagttgcatgaaaccgatannnnnnnnnnnnnnnnnnnnnnnnnnnnnnnnnnnnnnnnnnnnnnnnnnnnnnnnnnnnnnnnnnnnnnnnnnnnnnnnnnnnnnnnnnnnnnnnnnnnnnnnnnnnnnnnnatctaatccggaaatccaaggatccnaaatacttccaaatggggncttttcctttggaatgtcatggtcaggtggcttcaaaaggtgttcaaantggggggccttttcgggtttttggattttt

SEQ ID NO: 302140 - DNA, 226 bp, Homo Sapiens
  misc_feature (103)..(103): n is a, c, g, or t
agacagggtctcaccatcttgcccaggctggcctcaaactgctggactcacacgatcctctggcctcagcctcccaaagtgttgggactataggcgtgacacncatgctcagctgcattttttcaaatcctagtccttcacctattagctaaggcccttaaacaagtcacttaaccttttaggaatggaaaataatactcattcttgtagggtgttgtcaggattg

SEQ ID NO: 302141 - DNA, 381 bp, Homo Sapiens
  misc_feature (204)..(204): n is a, c, g, or t
  misc_feature (247)..(247): n is a, c, g, or t
  misc_feature (322)..(322): n is a, c, g, or t
  misc_feature (331)..(331): n is a, c, g, or t
  misc_feature (347)..(347): n is a, c, g, or t
  misc_feature (358)..(358): n is a, c, g, or t
ttgcttttatcttctttgatgcccttgcggttttgattgttatataaggtgggttaagttgactgtcttcatttctggaagattttaggagaccaaggatcagctcagcacttctgggctgcatgctataactctagggggctggtatcgggcccctggctttgtcctctggctgctggaggttaggaccactagcaacaatantccaatgggtgatgccagcaaaagtgcttctttggggcagttntagcaggatctatgcttgttcgcatatgccaacaacagtggcagcaaggcgggtccatgctcagcagcttaggtnggggtactngtaggcttgggggcantcgcctttttntacacattcacactggtggtagt

SEQ ID NO: 302142 - DNA, 125 bp, Homo Sapiens
  misc_feature (80)..(80): n is a, c, g, or t
  misc_feature (82)..(82): n is a, c, g, or t
tggccttatcgttttgagttaagcccgtcctaccagaagaagagtgagcccaacgtgccctcagggaagctgaaatggantntagaaggatgcacggggaagaaaggggtaaggcaagaaggtaa

SEQ ID NO: 302143 - DNA, 275 bp, Homo Sapiens
  misc_feature (229)..(229): n is a, c, g, or t
agtatttcccccatgtttttaaaccttgtcaatactatccataacttctctttatgtgatgaattctggagaaattcttcagctggcaactattgtcaggtcaagtcaccctattctacaccagtgcaattaactttctatgcctaaaatcaattccatgtttatccctaacagtttctgaggcttcctatataatcacacctcttatattgggatttacttacatctntccacaattacttggggggaaatttcctttggaaggttaatataca

SEQ ID NO: 302144 - DNA, 339 bp, Homo Sapiens
  misc_feature (50)..(58): n is a, c, g, or t
  misc_feature (276)..(276): n is a, c, g, or t
gccaccgtgcctggcctacattctttttatatatatttaacatttcatcnnnnnnnnngagacagggtcttgctctgttgcccagactggagcacagtggtcgattcttggcccattgcagcctccatctcctgggctcaggcgattctcctacctcagcctctgggagtagctgagactacaggtgcgcaataccccacccagctaatttttgtattttttgtaggagatagtgtcttgtcttgttacccacactgggtctccaactcctggggnctcaaggcaggttctttccacctcgggcctcccaacgtgtttggggatttatttgcggtgagc

SEQ ID NO: 302145 - DNA, 363 bp, Homo Sapiens
cttgttcgtttgttttctttccaagcagaaatctctccactggccatgaaagaaattccttgattagcctcatctgggcccctgggttcaccctctgggaggtttcttccttgtgcattattcttcaggttaaaaattgaagtggatgttggagaatatgttttcctagagactgccttagggatatgaacaatgactgggcatttccaagtcagatttgtgggtttctttaggcaatagaatttcttcaaaaacttaggtacaagggccaagtgtgggtgactcacacctggtaatcccaggcactctggggagggctgagggtgggggcaggatccacctgagggtcagggaggtttcaag

SEQ ID NO: 302146 - DNA, 209 bp, Homo Sapiens
  misc_feature (48)..(81): n is a, c, g, or t
  misc_feature (139)..(139): n is a, c, g, or t
atttctcagccccactgtagtctcaggggattgtacgtgagagcggtnnnnnnnnnnnnnnnnnnnnnnnnnnnnnnnnnntatttctcttctcccgttaaaggctaacaagcctctgactgaacagaatagcttgggnaatcaacttcaaatcactggatacccaatatcaatccccaatattttattaatccttcttcccccctaca

SEQ ID NO: 302147 - DNA, 427 bp, Homo Sapiens
  misc_feature (369)..(369): n is a, c, g, or t
ttgaaggatgaatgtagggttttattgagtagtggaggtggctctcagtaggatggatggggaggtggaagggggatggagtgggaagatgatcgtcccctggagtttggccattcagcagtggaactcctctctgaccactcccagctgaactcttggcattcagatgttcctcctcttctttttctctgctacgccatttgtctgcttgtctccccgtctccttgttggctcatctgcttctggagcccggggtttggggtttctatggggtacaggactgggggagcatcatggggccaaaaggtaacttttgggggcatgaaaacagaaatgcctgttccctacttaggggctgagagtctccanggcttaaggggtaggggccttttcttggggaaccattctcttctaccccctatttccc

SEQ ID NO: 302148 - DNA, 237 bp, Homo Sapiens
  misc_feature (147)..(147): n is a, c, g, or t
  misc_feature (185)..(185): n is a, c, g, or t
ttggctcaaatgagctcttgcctcagccacctcattagtcgggaccacacatgtgcaccaccatgtccagctaacccttgtattcctttgtagagacaggatttctccatgttgtctgggctgatctaaaattcctggggctcaagnaatccacctgccttgggctcccaaactgctagcatcanagggcatgagccaccgtgcctttcctaatgtaattgaaaagtattttttcta

SEQ ID NO: 302149 - DNA, 468 bp, Homo Sapiens
  misc_feature (372)..(372): n is a, c, g, or t
tcctatcagtcattctgaaatgattctaagaagacatagttattggtttgagtgtccctctgtgcagaagatcttgggggacagatgacctaagctgatcggtgaaagcacttttacagactgtaagaagaataagaagcctttggaatgtgcaggatggactgagtccctgagaaggaaagattcagtttagatgtgagagaattccacatgtatcctaagttgaatgtaggacaaacctcagagaagcttgggtgcttttcaggacttcatacaaaatgggctctagaccattgggctcttggggacctcacacctaacctaaaagcttattttacaatataggtcctccagttctggggtaccctttcnacttggggagggaatattcttcaccccctgaggggcaatttccacagggagggctttccaggtttgatccccaggttttaggggggaacttttttg

SEQ ID NO: 302150 - DNA, 327 bp, Homo Sapiens
  misc_feature (266)..(266): n is a, c, g, or t
  misc_feature (301)..(301): n is a, c, g, or t
tttttatgatagcacaaagtagtttttaataaaatctgctttttacttatatttaaataaattgcccagttactgaatcagaagcatttcttacaaagcaaacaaaataagcatcccttctatgttaataacatgttaatagtatgttggcaagttgatttagaacaacttgccaacaatacaaacaggaaaaaggagtggggtcaaggaaatctaggtttgggctttattttcaataggatcatactgtctgttggaaaaggggntaaataattatggggggccctatcctaataatatnctccaataggtttggaaattattggg

SEQ ID NO: 302151 - DNA, 406 bp, Homo Sapiens
  misc_feature (286)..(286): n is a, c, g, or t
  misc_feature (395)..(395): n is a, c, g, or t
tgagccatcgcgcccagaagagcttattctaaaattgaacttcttgcccctctaagtactgtcatgccatgggtggagaaatttaggaaagttctggaaatccctccctaaagaatttcaaatgtgtaagaacatttaaaaagtgttaaggcaatttaagtgagttctgagtaattggtacacaagaagctgttattactgctcatcttgattcaaacattaagccaagaggcttacaagtaaactcagaacagtgagataaatgataggccaaaaattccagggnactgctgagtcagggagagcgttttttcaagacatctggccccaaggaaaatctactttaaagccttaagggaggaactgggctggacaattttcttgaacccctgggnggatttttatt

SEQ ID NO: 302152 - DNA, 409 bp, Homo Sapiens
ggcacgagcaattatgtgttgaatttcctcaagtggacgcttaatgatccttctgaacagattgtttatgctgaatgaagcccttcagagagcatttgctcctccctttctccactgctttttgctggtgcactcagctcacagtttttgactaaatgtttgaattttatccacccagcaggcagaaaaatagaactaaaccctccctcccactctctgaagtgctggggaactatctcactgggctgtgaaaacaaagggctaatggggcaaacaacagcccccatttcagggccccaaaataggggttcaggcaccttgttctgttgtttccctttggttccctaggatgggcttaacagtttgggagttggggtacagtttacccgaggcatggggcacctttacc

SEQ ID NO: 302153 - DNA, 407 bp, Homo Sapiens
  misc_feature (372)..(372): n is a, c, g, or t
acacacatctgtcagtaggaactagagaagaagattccttctagtaaccttctggcaactcagtttacatgtttctcacaaccctcaaatgcccagtcttgccccctaaaatgtaatgtggcttattcattggtgtctctccatgttgttcttcaggaacaggtgttgttgcaaaaataatggcataatggctcaggcaatatttgtgatgatggtaggcctcagctctacccatgtctcctgtagtcccacttaggcttctgtaactaggattagggaattttactccttacaatctcaaggaaaatttcccttgggcttctcttggaatgttccgactcaggaattattaaattggaaagggtatagggncagggggacactgggcttccacaccccgttaaatt

SEQ ID NO: 302154 - DNA, 410 bp, Homo Sapiens
  misc_feature (372)..(372): n is a, c, g, or t
  misc_feature (399)..(399): n is a, c, g, or t
aataataatacccttgtgtcaggcttcctgtggtctagcactgtgtcccgtactttatagtttatttcctttaatactcatgcccatctagggtagtaggtaccatggttgttcccagttgatatatgacggaatcgaggcttagcagaataagaagtcacccaaactcatacccactggtcagcagtacagctagaattcaaagccacacttgtctaggtccaaaatctgcacccctaattaaccactcctggtaaggaagctggttataaggggctgggtcaagtcagctatgggaaggaattcttcaggaaagtgactcttaaagggtgttcttttggaagggttgtgttaggggatttcacccaaaantggggaagggaggacagggcctttccnttgccagggtt

SEQ ID NO: 302155 - DNA, 147 bp, Homo Sapiens
  misc_feature (46)..(46): n is a, c, g, or t
  misc_feature (108)..(108): n is a, c, g, or t
cacacctgcccctgatgtcattgtagccgcacgattgtagtgcccntatccactctattgggaagatggcaaccatggggtgaaggtccttcacaggggagccagggnagcctgagtctccctgagccaagaggctgggtgggggct

SEQ ID NO: 302156 - DNA, 360 bp, Homo Sapiens
  misc_feature (240)..(240): n is a, c, g, or t
  misc_feature (256)..(256): n is a, c, g, or t
  misc_feature (264)..(264): n is a, c, g, or t
  misc_feature (273)..(273): n is a, c, g, or t
  misc_feature (283)..(283): n is a, c, g, or t
  misc_feature (317)..(317): n is a, c, g, or t
gcggtccatatgccttgatttattcaaatagctactatctggaaactcactcccaacctttgggccactgtggtgaagaggcagctgtcccagtggggtactgagcacccacctcctcccttcccttgaatgtgttgaaagtggactctggccaaacgaggaaagatgtcttagaaaaacaccaccacaccggggagattaggaaggaagagaagggcattttgcttccccattccctgnacccctttgattgggngttgattnttatggggnttgaacaccntgtttttacaggttcttagggtttttttcacagnaggaacccttcatttttgggaggttacagcttttttcctcttt

SEQ ID NO: 302157 - DNA, 348 bp, Homo Sapiens
  misc_feature (103)..(103): n is a, c, g, or t
  misc_feature (316)..(316): n is a, c, g, or t
taagtcaacaacttttattatcattcacatatttcataaaagagagacaaatacagtaaatgggtcatggttgcatggaaaaaaattccaagtttatataggncactctttctacatctgtgagcagggctgtcccagcatcaggcacagcagctgcacttatctgatgcccctttgcaaatgcagccttgggcacacttgggcacagcccacaggggtaggcaggagcaggcagtcaggaaagggggatgtggggaagcttgtcactgtcctgctcctgcctgctgaggctcttgggttccctcctctggacttntgcccaggcaccctggatttccgggggaaggg

SEQ ID NO: 302158 - DNA, 177 bp, Homo Sapiens
  misc_feature (166)..(166): n is a, c, g, or t
taagaagctgaactgatcgaagataatgtatgtaaaagagggtacgtgcctagcacacaaatgccacttagtgatgccaccttggatggatctggaggaggctcgaagctctgatactcggtgacatttccactacccggtgacacagaagcctcggagggtagcngccacggggca

SEQ ID NO: 302159 - DNA, 411 bp, Homo Sapiens
  misc_feature (100)..(100): n is a, c, g, or t
  misc_feature (292)..(292): n is a, c, g, or t
  misc_feature (366)..(366): n is a, c, g, or t
  misc_feature (388)..(388): n is a, c, g, or t
  misc_feature (401)..(401): n is a, c, g, or t
atcaagaaaagtaaactggattgtagtttcttaggtcatggtctaccttttgctgttgccttattgagtagtctgaaggttcctgaaaacagcgccttgntggggatggggtagaacaaaggcaggttcggtaagagctgcagcggttgcagcagtgtgtgggtcatggtcccaggttgaccagacatctcagcaagcatctgccttgcttcagaagatcatgttcagctgtagtccaaagtcagggagatggctccagggcagcaggtgtggtgcttgtctgggcaatgtngtggagttactcctttcccgtggttggttcctattttcagatgggagcacctgaaagccttttgcagagatttnccgcccagcgaaccatcaactnggcagaatttttncttcaaagat

SEQ ID NO: 302160 - DNA, 301 bp, Homo Sapiens
gagggtccgcattaacagtgagaggatagggtttttggctggggacagtaagaccatcatcactgcgtgaaaaccttctcaaagagtccatctttcagtcaggccgctataaatttatctctatagatcattcgttgttaaaattaagcccagggggaaaatcagactcattcaggatcaaggaaagtcacagaatctgatccattcctaccagggtcccacgtcttatgaggctccagctttctttactagagggttctgatactttatttaccccgggggaatgtggttttgagtaggg

SEQ ID NO: 302161 - DNA, 379 bp, Homo Sapiens
  misc_feature (339)..(339): n is a, c, g, or t
  misc_feature (359)..(359): n is a, c, g, or t
tgaaaccacaagctgagtacaatcagtcaaggttgattaattccacttaaaccattaacacccttgtcagcagatcagaaccctgaggaaatagggaccctacagtttaatttgtgtttacatggcaagggggaaggagggtgactatcctaacccgtaggcagcaatgaggacacctcaaccgccaagaatctggcgaaagggccacggctaagttgagagagaagttggggagaatcctaccaatggaattacaggcaggcccagacaggagttttaaaaggaacaggaaaagagggtgtagtgttcacagacaattttcatttgcttcagttcagngttttacctggagggccatntttgtttttggccaattggg

SEQ ID NO: 302162 - DNA, 230 bp, Homo Sapiens
  misc_feature (77)..(77): n is a, c, g, or t
  misc_feature (139)..(139): n is a, c, g, or t
  misc_feature (154)..(154): n is a, c, g, or t
  misc_feature (192)..(192): n is a, c, g, or t
  misc_feature (202)..(202): n is a, c, g, or t
aggtccagcctttaaaaactcttattgggccctaaaaatttaaagggttgttgtttccagagactttgtcaacaggnctgggtgaggtcctaaaggaagtaggtgggaaatgtgtgcaacatgcacaccaggggcaggnttttcaaataaagtnaaatgggaacatgtcttagggtcaatgatctctagganaatactaccnttttcaacacctttttgtttagggctac

SEQ ID NO: 302163 - DNA, 259 bp, Homo Sapiens
tttagtattacttaaatgttaatttatgtaataatcccttaaacccgatctgagtccccactcaagtaaattttaatatggcatactactttaaaaaactaattagttcaactttgtagtaaactggcagcttcgacccacatccactctaacacctattgcagaaggaggctggctgtttacactaagcctcctagttgctgcatcccctctgctcatagtccaaggaggtagctcagaaattgagtctgagaacaga

SEQ ID NO: 302164 - DNA, 424 bp, Homo Sapiens
  misc_feature (371)..(371): n is a, c, g, or t
  misc_feature (377)..(377): n is a, c, g, or t
  misc_feature (401)..(401): n is a, c, g, or t
tatcttatgtagtagtgattaacaaataatcaagtattggttaacaactactttctcccgtgcttcttttccataagaactagttaatctaaacaattgtattcatttatttttctattagtcctaccagttcaaaaagtaaaaatagtattttgggacctgtgcctctttatttatgcacacctctagctgtgttttgatgtttgagaaatgttaattatttgaaagttctacacacaaagcactgacagcttcaagtgggtaagctgaatttttaaatgtgaaatgacccttaattctttccttgcttattctcattgtagacaagttttacaactctcctatctggcttgactttcagttgcatgaantaatgntggggcgcttagcacccggggccnttggcattttgggtccccagcct

SEQ ID NO: 302165 - DNA, 161 bp, Homo Sapiens
  misc_feature (102)..(102): n is a, c, g, or t
tgggctaaaatgatcctcccgcttcagtctcccgagaagccagggctacaggtgcgtgccaccatgctcagctaatgaaagggtatttttgaggagaaaatnttaggaagaaagttgctggttactctcaagagttttatttttttaatagtgatggggcc

SEQ ID NO: 302166 - DNA, 264 bp, Homo Sapiens
  misc_feature (79)..(79): n is a, c, g, or t
  misc_feature (107)..(107): n is a, c, g, or t
  misc_feature (128)..(128): n is a, c, g, or t
  misc_feature (158)..(158): n is a, c, g, or t
  misc_feature (189)..(189): n is a, c, g, or t
  misc_feature (201)..(201): n is a, c, g, or t
  misc_feature (232)..(232): n is a, c, g, or t
aggtggccctgcgtcagggtgacctgcctcacccctgggtcatccgtccagggcgctctgggcatgcagcctgaggctnggtgaagctgcttccagcagagaagcgntgagagggcacgtgggctttntggggacgtgggtgggctcaattctctctncaagggttaagtagtacctgggttttccctnggggtctaaaanaagatcacaataattattcttggaatttttntcaattaaagcttagggatggaaaaaatttca

SEQ ID NO: 302167 - DNA, 353 bp, Homo Sapiens
  misc_feature (204)..(204): n is a, c, g, or t
  misc_feature (224)..(224): n is a, c, g, or t
  misc_feature (270)..(270): n is a, c, g, or t
  misc_feature (278)..(278): n is a, c, g, or t
  misc_feature (291)..(291): n is a, c, g, or t
  misc_feature (304)..(304): n is a, c, g, or t
ttaaaggaaagtggatcatctctgatggtctctgcaactctaaggttccgtaagtgaaggcattcaggaccctctagggcagcactgagctcaagcccgtagttggagcccagaaagctgaaatttggcactgcaagtctacaaaacaaatgggctatgcagcaggctaggcagcactggcccagagggctactaagccatggntgcacccccctccgccccgnccccaccagagatggggtccctgggctgctccatcccacagaaaantcccaggnaagtgaggtcttncttcaccaggggnagaggcacatattcttgaacgaggaacgttttgctttccgtttccttaa

SEQ ID NO: 302168 - DNA, 397 bp, Homo Sapiens
  misc_feature (313)..(313): n is a, c, g, or t
ttcacaatagaaagaggtttattggacctacagttccacagagctggggaagcctcacaatcatggcagaaggcaaggaggagcaagtcacatcttacatgtcagcagggaagagagagaacttgtgcagggaaactcccccttaaagaaccatcagatttcatgagacccattcgctaacaggagaacagcacaggaaaagacccgcccccatgatgcaatcacctcccactgggtccctcccacaacacgtggggatttcaagatgagatttggggtggggggacacagccaacccacattcagtgccctnttacagggtgttaccattttttatctgtctttttaccatattttttaccatacccttgctatgttttaggatatgttttggggt

SEQ ID NO: 302169 - DNA, 366 bp, Homo Sapiens
  misc_feature (274)..(274): n is a, c, g, or t
  misc_feature (338)..(338): n is a, c, g, or t
  misc_feature (356)..(356): n is a, c, g, or t
ttacccaatgccctgtaacctactgtattagtctgttctcacttctgtaaagtgagaactatacataaaggactgcccaagacttgataatttataaaggaaagaggtttagttgacatacagttatgcatggctggggaagcctcaggaaacttacaatcacggcagaggggaagcaaacacatccctcttcacatgatgggcaggatagagaagtgccagggcaaaagagggaaaagccccttataaaaccatcagatctcatgggaaactntcacggggaacaggcaacatgggggggtaacttgcccccatggattccaattacctctttactngggtttccttcccacggncacgttgggg

SEQ ID NO: 302170 - DNA, 330 bp, Homo Sapiens
  misc_feature (278)..(278): n is a, c, g, or t
  misc_feature (295)..(295): n is a, c, g, or t
tgacacttgctcccagcctcatacacttcttaatagcagattccttattttaaagaatgggcaactgaatgtatatccaagtaactctgctcagtccaccacatctgggagaaccctggggtcttgggcagtacaaatgatcatcattttgtactttgtgggcgacggccaaaacccaggctgggatttttgctacactggattttaacagctctgcgcttcacgtaattcgggtgctttaaaagggccatgttttatttggggcactgatggctttncaacaaacttacggggnccttgggccccggggggccaaaagctggaacccgt

SEQ ID NO: 302171 - DNA, 302 bp, Homo Sapiens
  misc_feature (185)..(185): n is a, c, g, or t
gttttcttcttgtcaatacttctaacttaagagcaagcaaacatatttcaggtttaattttatggaacaaacactctgcttgtgaattgtccacaatatttccataataactaacacactatcactccatcaggtttcactacacaaagtattgtgaaacagaggtgggaaattttttccagggngtttagacaagtatttaatgaaggctgaagcaatatgttctttgaggcatttaaaaatatttgaggattaatttcaccaggatggatttcttaatcaggtaaactgggcttaggata

SEQ ID NO: 302172 - DNA, 388 bp, Homo Sapiens
  misc_feature (360)..(360): n is a, c, g, or t
  misc_feature (375)..(375): n is a, c, g, or t
agcgtttcaggggcagacaccagcatggataactcaagggcccaagagcaagccagatagactgaagcaggaggtttgtgttggggattagaaagctggctcccaggggtggtgctggcttttggagagctaagccaagagaggagtgggacataatttataagaaacaggggctcattatggtttttggaggcatcgatgaaaatagcatttaaagaagattagtatgagaagtatccacacaaagtggattgggccagggaaaaactggacactctgtcggttttgcaactatccacacatgatatgggtagaagctttgaactaggggagaagaagaaaaagataatttccaagganaaaaacgtgccaganctccttttattac

SEQ ID NO: 302173 - DNA, 390 bp, Homo Sapiens
  misc_feature (81)..(81): n is a, c, g, or t
  misc_feature (254)..(279): n is a, c, g, or t
  misc_feature (304)..(304): n is a, c, g, or t
  misc_feature (373)..(373): n is a, c, g, or t
ttggctggctactagtaaaaactagagaatgggaatcttaaacaatgaaattcttttgactgggtctagccatggtaatgntaaaaaactaaaatgcttgaacggagccaagcatgacaaaatactatgtcatcagctctggcaactactattgtattagctaagtaaaatttagaatgatgggaatgctaggccttgaaaaatccaaagctgtagcctgttcccaaactgaacagggtgttctctgtagggannnnnnnnnnnnnnnnnnnnnnnnnntctctctgcttaatgggttcttacnaaattaaagagtttccagtttggatttgaggaaacactcccccaccatacactgtctggggccttgtgnccaattccaaatgggcc

SEQ ID NO: 302174 - DNA, 264 bp, Homo Sapiens
  misc_feature (42)..(42): n is a, c, g, or t
  misc_feature (128)..(128): n is a, c, g, or t
  misc_feature (130)..(130): n is a, c, g, or t
  misc_feature (167)..(167): n is a, c, g, or t
  misc_feature (177)..(177): n is a, c, g, or t
  misc_feature (184)..(184): n is a, c, g, or t
  misc_feature (192)..(192): n is a, c, g, or t
  misc_feature (200)..(200): n is a, c, g, or t
  misc_feature (244)..(244): n is a, c, g, or t
ttacgaaaaaagttggtggtttaaggggtggtatggaggatntagagaggtgcttgggaaaagtgagtaagattaacaaagataatccaaataaacatgagagattaattctggccaagctttaacantntcttcccctaaaccttcaacagagcagaaacaaattntcccatgctntacaggnttaaggtntagcacgntgccctaaggagaaaaagctctgagccattcaacctggggtttnaaatcccagttctttcatct

SEQ ID NO: 302175 - DNA, 353 bp, Homo Sapiens
  misc_feature (166)..(166): n is a, c, g, or t
  misc_feature (172)..(172): n is a, c, g, or t
  misc_feature (317)..(317): n is a, c, g, or t
  misc_feature (323)..(323): n is a, c, g, or t
ggcacgagacaagttattgaaaatctcatcttcatcagtctctttcatattagaataacactgttttgctttatcagtctttggggttagaattataatattaatttataatatctgatttaaagtgacaatcactgagatttttatttctgatcaaatgccaggntgaaanagtataacgtatcagtcctgttgtgttttatgcagactttcctgaaaatactgtttaaaggtattagccatagtgtatttcttgggagataaattaaactttctataggttctgtttctctaaaatttgtttttctctttacccntatagnccccgcagtattggatggggggggccctta

SEQ ID NO: 302176 - DNA, 367 bp, Homo Sapiens
  misc_feature (156)..(325): n is a, c, g, or t
  misc_feature (329)..(329): n is a, c, g, or t
gaaaacaaaccctgagttttaaacaaattgaaacttgtaaaaatgtagcccatgggtaaactgggcattttctgagaattttgtttcataaaatatgtatataagaacttagagtttcaatttctttaacttgtctgggtatgaagttcagcagtnnnnnnnnnnnnnnnnnnnnnnnnnnnnnnnnnnnnnnnnnnnnnnnnnnnnnnnnnnnnnnnnnnnnnnnnnnnnnnnnnnnnnnnnnnnnnnnnnnnnnnnnnnnnnnnnnnnnnnnnnnnnnnnnnnnnnnnnnnnnnnnnnnnnnnnnnnnnnnnnnnnnnnnnnngccngggcttagtgggcgtgtgcctattagtcctaggctacc

SEQ ID NO: 302177 - DNA, 376 bp, Homo Sapiens
  misc_feature (363)..(363): n is a, c, g, or t
aaatgtaaattaataaaaatcaaaatttataattcagtctttcagccacacagccacatttcaagtgcttcatagcttcctgtggctggcagctaccgtgtccaacagtgcagatctagaacatttccattgccccagaaggctctgttgaacagtgctgttgtgagagctttgtttgtgttgtctcatttacaccaatcctgtgaagtgggattccgttattttatcattttacagataaggtaccaggggcagcaaagagttaatgacttggacaatttataggcttaggtaggatggaaaggaactgggatttccaaacccggggttggatgggctcagagcttttttcttcttaggggncttcgtggcttac

SEQ ID NO: 302178 - DNA, 411 bp, Homo Sapiens
  misc_feature (334)..(334): n is a, c, g, or t
  misc_feature (364)..(364): n is a, c, g, or t
  misc_feature (376)..(376): n is a, c, g, or t
  misc_feature (393)..(393): n is a, c, g, or t
ccagtttatactaggaagtgggattctcttctgcatatggccattccctatacatgcagtcttaaccccagtgaggcagaattcacagtcctcctctgaatgcactcttcagtttccttcacttgaatgttttctccattcccattaggactagccaaagtcacatctctttttgagtcatgccagccccatgtcttgtccatgtcattcatttgcagatagtcatattcccctttggggccaggaaaccatattttaggttatctcaatgcttaggggaaaaccttgtatgtagtggggatacttcaggaatatttttcttgtgtggaattangtatggctttggcatttgtatcttaactcnggaggtaactcnggaggtccttccacccntccaggagggttcacagg

SEQ ID NO: 302179 - DNA, 413 bp, Homo Sapiens
  misc_feature (275)..(275): n is a, c, g, or t
  misc_feature (309)..(364): n is a, c, g, or t
  misc_feature (380)..(380): n is a, c, g, or t
  misc_feature (387)..(387): n is a, c, g, or t
  misc_feature (392)..(392): n is a, c, g, or t
gcataactagtgtgatgtaccatgagcaaaaagggctttagcaagtatttataacagtttgtgggtttgaaggggtgacacggttggagaatgctgagttgctgggtttggttggaaagtggaactttcccaacacttagctaggttatccttgctaaccctgtgtgcctgcccgctcctggccgctcaactgaatcctcctggggagcatttggggaacaatcaatcttgggcatccaaagcttcattacagtctgtttcttaatctttctttnctcttaatctcgtacatccaagacatcttcaatnnnnnnnnnnnnnnnnnnnnnnnnnnnnnnnnnnnnnnnnnnnnnnnnnnnnnnnngaggttcacttacggnccggggnttttnaagacccgccttgaggcaact

SEQ ID NO: 302180 - DNA, 378 bp, Homo Sapiens
  misc_feature (301)..(301): n is a, c, g, or t
  misc_feature (334)..(334): n is a, c, g, or t
tgcttattacttttccaccgtacaaaatgcagttgacctacctcaacgctttgtgcattcacctgaacagaagcattttggataactaacgcgtgcttaagcctctgaggacctcattcactaagaggacgaggcggcgcaagtccagctgtggtcagtctcagtgttcccttcagggtccgccggctcacgctgggagaatgagagggacttcagatgctgcttcagttcccagctgtggctgaagctactgggttcacccagcttcacctacagtttacagaggaaataaaggcaaaantcagatgcatttcaggacaggaaccccaccttngagggggcaggccttcagcttttgatggaggaccaggttgacag

SEQ ID NO: 302181 - DNA, 360 bp, Homo Sapiens
  misc_feature (236)..(236): n is a, c, g, or t
  misc_feature (330)..(330): n is a, c, g, or t
tcaaaatctcatcagatttatgtcgtggtttccgaagatagtaatgatgacatgctttgaaagctaatgttttacatttactcagaaggctttcatgaggttatgacatgggcagatgatttaataagacagttatggtttcatgtgaaactcctttgcagagagatgcccatacacactgatgggcatgctgagtccctgggtctaggtgtgttaaggtaggggtaggggctttncttcccatctgattccctcccatgggaacatgcataagcttctagctgttgcctaagcatggagggagtcccattgtctttcttagggagtccnttgaaggagtttttaaacagcccttttacc

SEQ ID NO: 302182 - DNA, 273 bp, Homo Sapiens
ttttgtaatgcagtactagggtgatgggggaggagaagcattctataggcctaggattaggtctcagtcctctggtgagcccgtgcctctagactgtgaccttccaccagcatttctcaggttttttcctcccttcaaatggaacagggtggctggagagggctgaagttatttcccttcccacaactgggaagtctagagggaggtgggagttagggaatttccttttctccatgtgggaaggctagagttgactgggagctgcatttttcc

SEQ ID NO: 302183 - DNA, 121 bp, Homo Sapiens
  misc_feature (41)..(41): n is a, c, g, or t
  misc_feature (90)..(90): n is a, c, g, or t
agaccaggactggattcaattttcgatttgttgtttgcggngcttgtctagacacagaaatgtccagtaggtacccagaaatgggcaccngagcttcatggcaaaggatgtgggttgaagg

SEQ ID NO: 302184 - DNA, 418 bp, Homo Sapiens
  misc_feature (339)..(377): n is a, c, g, or t
  misc_feature (390)..(390): n is a, c, g, or t
taaaaaaacaaacaagaagcccaacaaacacaactacagatcaacttatttttaagtatctgaagaggcccacggaatgatctaccactccagaccctcaactggattgtctcactgccttaaagaaaaccggtaaattatttcctgaacaaaagcaagaatcttttaggtcctataatctcatttcaaatccttttacccactccctactccactgggccctggatactgcaaccctctttgggggtaatctgagggtccgtgggggtgccagggggccacaggttgcctttaaaggttccctccccgggctttgctggccggttggcttcactgctnnnnnnnnnnnnnnnnnnnnnnnnnnnnnnnnnnnnnnnacccccattaatnggggcttcttgcttcttttacagggggg

SEQ ID NO: 302185 - DNA, 342 bp, Homo Sapiens
gcaatcctttcgcatctgggcagttccaaactagaattcttgcctgccctgcctcccatggaatgcccttaccctactgccaatgtgatctttctgaaacagcatacctgatattgtcattcccaggagcagcttcccacctccctcaggatttaaactttaaactctacagctctccacactcacctcaacaatgagctcctctcatcatttcttctcctttgtcccagtcacaggccacttttggggccatggcaaaccactttagtttctgaaggttctgcccttggacctgttggttccttgactggggggctaaggatgactgcagtcatgcagggg

SEQ ID NO: 302186 - DNA, 452 bp, Homo Sapiens
  misc_feature (39)..(39): n is a, c, g, or t
  misc_feature (47)..(47): n is a, c, g, or t
  misc_feature (157)..(157): n is a, c, g, or t
  misc_feature (170)..(170): n is a, c, g, or t
  misc_feature (252)..(252): n is a, c, g, or t
  misc_feature (265)..(265): n is a, c, g, or t
  misc_feature (273)..(273): n is a, c, g, or t
  misc_feature (276)..(276): n is a, c, g, or t
  misc_feature (367)..(367): n is a, c, g, or t
  misc_feature (389)..(389): n is a, c, g, or t
  misc_feature (395)..(395): n is a, c, g, or t
  misc_feature (405)..(405): n is a, c, g, or t
  misc_feature (421)..(421): n is a, c, g, or t
  misc_feature (429)..(429): n is a, c, g, or t
  misc_feature (438)..(438): n is a, c, g, or t
tggcattttccaagagtaaaacatgcactttccctgctntgcccttnccttctgattataaatggaacataggctctctgtaggaaattcaaagcattacagaaagtgaaacatccccctgtgatctcaccacctagagactccccaaaggtaactnccaataataactnggttcccattcttccagatgttttccaacagggattacttttagacctcaaataatttctctaaaaaataatccacatgatnccatacatatganatggccanacngagaggtgaatgggtgagctgggggcaggagtggggcatgaaggaataacctgcaaatgaatgcaggagggtgttctggggcgtgatgggnaatgttcccaaaattgggattntggggntatgggatgncacaactccggtaaantttccctncaaaatgtnccaaacccgaacta

SEQ ID NO: 302187 - DNA, 388 bp, Homo Sapiens
gagggagctccactcaggcctgtgccagactccgagggggagttcaaagacctaaggtcttgtctttgccccgccatgtccacaataacataacacatgtaccatctactttccctgaagttgtggttttctgttcaggttcctgattccctaattggcctgtagctcccagagcaggcagatctgggctcctccccctcttctctggtgtgtaggcagtgcattgaagaacacaggtgcattggtgttagttctcagctcgtttctaatgtttaacatatacagtgtttcttgaggctattactatgtgtccttacggatggcataccctggctctggatggattccatgcattttaattttccactggctaatttcacagatgagg

SEQ ID NO: 302188 - DNA, 411 bp, Homo Sapiens
  misc_feature (117)..(117): n is a, c, g, or t
  misc_feature (249)..(249): n is a, c, g, or t
  misc_feature (273)..(296): n is a, c, g, or t
  misc_feature (310)..(310): n is a, c, g, or t
  misc_feature (378)..(378): n is a, c, g, or t
  misc_feature (386)..(386): n is a, c, g, or t
  misc_feature (392)..(392): n is a, c, g, or t
cagatttgttcattttcaacagatgactgcaggaccaacgttgtcacaggggccagcattctctcaccaggcaaagcagccgcttctctgcctggtatcaagctgcctgggcagcanattcgtaatcagagtgccaatttataagtgtagaatgagaaatagaactgccacaggaagcagaatcactgcctgggtcggccctgtgggactttctgggagacttctgtcaaatatgctcgtgtaagactngggagccatgaataaatggcacannnnnnnnnnnnnnnnnnnnnnnngaggacagggtccngctcttgttctgctgggagtgctgttgatggcaattctcccaccttcccggggtttcaaagccatccnttttgccntcaagncttcccccgattaggctgg

SEQ ID NO: 302189 - DNA, 308 bp, Homo Sapiens
  misc_feature (250)..(250): n is a, c, g, or t
  misc_feature (256)..(256): n is a, c, g, or t
  misc_feature (262)..(262): n is a, c, g, or t
  misc_feature (282)..(282): n is a, c, g, or t
  misc_feature (291)..(291): n is a, c, g, or t
cactggggagagtcccactaaggggagccccatccctgtaaacaaacttgttcaagtccctatcactgaggccccctccctttggctggggagtgcttcctgcttcctctcccacaaatgccaaaggatgcagcagattgaggcactggggagaaagtgcccagcctgggagattgtgaagtggagtgcaaagccttacctgctagtagaggaccatgggaccttggtcagtttcactgtctgcaaactnagcttntttttnccaccatagtggtgaatctntcagggttnggggcaaaggtcagagg

SEQ ID NO: 302190 - DNA, 400 bp, Homo Sapiens
  misc_feature (370)..(370): n is a, c, g, or t
  misc_feature (387)..(387): n is a, c, g, or t
ctaaacatcccatagaatatcttagacaaagaaaattacagtaagtagagaaatggatcaaagagtggctattcttggactctctactttccaggtctttttggctagagaactctttttctaactttgttgcctggctcttggcagtcaatgtccaaagtagtgcattgagctgccccccaaaagggcacagtttgtaaggaaaccatatgccctatggggacctcatggggatgacactcagttagtacataaggatctcttgggaaggggagctgccttttatgtcctcttaaaccagggtcatctctttattcagtttaaatcctggggtgctggacttaggtacagcttatatggagcctggggnccaaattcactttcttnaggcccgtttttt

SEQ ID NO: 302191 - DNA, 389 bp, Homo Sapiens
  misc_feature (173)..(173): n is a, c, g, or t
  misc_feature (177)..(177): n is a, c, g, or t
  misc_feature (179)..(180): n is a, c, g, or t
  misc_feature (182)..(183): n is a, c, g, or t
  misc_feature (189)..(189): n is a, c, g, or t
  misc_feature (266)..(266): n is a, c, g, or t
  misc_feature (300)..(300): n is a, c, g, or t
  misc_feature (331)..(331): n is a, c, g, or t
  misc_feature (336)..(336): n is a, c, g, or t
  misc_feature (353)..(353): n is a, c, g, or t
tggaagaatatttgaacaactctagcaagaaatgtcagtttagggatgcttcctctaaatggtggcttagaatataacattttgcaggaagtcctttctgatacatagctgactagatgaaggaccagattaacaagttcatgagttgtaaatataaaagttgtgtaccacgntaananngnnaaagangtatggctgcactgttgatggctggtcaaacagcccccaaggaatccgggggtgactccaattactgccaccttttntctgtggggtgcagttgcctgcgggatgtgtgtngcacatctgtgccttcgggtatggcacactnggagnatggcccggttttcatnaggaagggtgtcaggaggcgttcattggcatttccc

SEQ ID NO: 302192 - DNA, 314 bp, Homo Sapiens
  misc_feature (235)..(235): n is a, c, g, or t
  misc_feature (265)..(265): n is a, c, g, or t
  misc_feature (278)..(278): n is a, c, g, or t
  misc_feature (286)..(286): n is a, c, g, or t
  misc_feature (296)..(296): n is a, c, g, or t
agagagctagcaccatgagatttgaaagaccatgctacctaggacacaaaacccagaaacaataagaagttgaaagttttgactacataaaaattgaaaatactacatggtgaaaatgccataaactgaattaaaacacaaacagctaattgggaaaatgtttgcatacttaacagctaaacagccaacactgccaatatattaccaaatttttagggtttgggtaaggtgatgnaggagcgttaagtaaaatcaggcaaagggncatgaatagggcngttttggnccccaaaaangtgttttgggtgaccccc

SEQ ID NO: 302193 - DNA, 326 bp, Homo Sapiens
  misc_feature (176)..(195): n is a, c, g, or t
  misc_feature (236)..(236): n is a, c, g, or t
  misc_feature (300)..(300): n is a, c, g, or t
aacagaatggaggatgcgtggttcccataaaactgagggttgccctgggcctacccttcctgagtcagctcttgcttcaattccttgaagcaccccagcatcctttcaataaatgcctgccctttgtggcctgcaaccagaggaactgcaactaggcacactcactgaaggaatcnnnnnnnnnnnnnnnnnnnnaaaaacaaccgaggtcatgggatgagggggtgggaggatantttcatcccacctccagacttgacaacaaaaagaccttaaagatcttttgtgttacctggggantgtcttaccatttgaagatttaggcc

SEQ ID NO: 302194 - DNA, 278 bp, Homo Sapiens
  misc_feature (63)..(136): n is a, c, g, or t
  misc_feature (181)..(201): n is a, c, g, or t
taaaaatttaaacatttgtgtcaattacatattcatgtaggtaataaaaaaatctcactggcnnnnnnnnnnnnnnnnnnnnnnnnnnnnnnnnnnnnnnnnnnnnnnnnnnnnnnnnnnnnnnnnnnnnnnnnnntttgagaccagcctggaacaacatgggtgaaatcctctgtctacnnnnnnnnnnnnnnnnnnnnnttagccaagtgtgggtccccatgcctgtgggtccgggggccccatgcctgtgggtccccagcttacttgggggaggg

SEQ ID NO: 302195 - DNA, 233 bp, Homo Sapiens
  misc_feature (151)..(151): n is a, c, g, or t
  misc_feature (169)..(169): n is a, c, g, or t
  misc_feature (191)..(191): n is a, c, g, or t
gagaaaggaactggctattagggcaacagtgggagctccacaaaggggctacaacattttctcctctcctctgccctgctggctatcccaatcctttggaggtgcagcagcaagttggtatgcagttggtctccccatgtgggaatggctntaacgagagaaactgctnttaataagtccccaacccatgntaggcatagaagctaggggctcttctggattaaatacagcct

SEQ ID NO: 302196 - DNA, 187 bp, Homo Sapiens
aaattttagcacatgcaatacataagacaatttttttccctcaaaagtaaaaattctcgtggaacttttagatagagaaataaaaatgtaggtttgaaactggctgcaatcttcatgtatttcaggatatccacagaagctgacttataaaaagcatttatattccttaatttcaacatagatgact

SEQ ID NO: 302197 - DNA, 210 bp, Homo Sapiens
  misc_feature (15)..(15): n is a, c, g, or t
  misc_feature (21)..(21): n is a, c, g, or t
  misc_feature (55)..(55): n is a, c, g, or t
  misc_feature (85)..(85): n is a, c, g, or t
  misc_feature (128)..(128): n is a, c, g, or t
  misc_feature (158)..(158): n is a, c, g, or t
cattctgaatgaccngtattnttggtccaagcagggatacatcaaagagactggnggtttattagcattacccagaaggtcagtntcaccactcgggaaggagatatgaagtccccacttccaagttnttaccccagagagagaggctgctgctctgnttgtggatttactactcatctacccagacatgctactccctccccacaaagt

SEQ ID NO: 302198 - DNA, 277 bp, Homo Sapiens
  misc_feature (212)..(212): n is a, c, g, or t
  misc_feature (267)..(267): n is a, c, g, or t
ttggaatctggaaggctcttcttactgcagacaagagcaaaaggttacagcaaatttgtagaaatgtctgcacccaacttgcagaaatttactcattggttttttaaatgaaggcactgtttacagcattaattggagattttaagcagcaggtggtaggatttcattttattttgtaaagttaagtctaacggttgtcaaatggcctgggncgaagtgaattattttgagttttttctcaagctctctgaaatgaagcttttactnccctgcccag

SEQ ID NO: 302199 - DNA, 153 bp, Homo Sapiens
  misc_feature (129)..(129): n is a, c, g, or t
  misc_feature (136)..(136): n is a, c, g, or t
atgatttcttcaaaacctctaatagttaacctggaatctctaaattaatctaattgtcagtatacaaactttgttattttcatcgcatgttatttgcttgagaaatgctagacatcaatagtacatctnatgctgntgtgtattacccgtccc

SEQ ID NO: 302200 - DNA, 305 bp, Homo Sapiens
ctcagtctgtctgtgttccattattaaactcccatgttatgctttttcaatatttcataacttaataacacacgagttgtgtatactatttgcaagttaaatacatgcatctccaacaagtgccatgaaactaaccttttgcggttgtcaccataatccttagcatgatgctaggcacaaaatagtttctcaacaaatacttgatctttcactcctttacttgaggtttcagccagtgataaggaatgctaccactgcaaattaacaaactgtgaggcacagctctccctatggaataatctgtt

SEQ ID NO: 302201 - DNA, 445 bp, Homo Sapiens
  misc_feature (137)..(294): n is a, c, g, or t
tatttttcggcaactataggctttattttcttgccaattctttacagaactgtaaggcagttgcttctttcttccgttgtagatagtcttctgttattgctacaaactgggattaatttttaagcttcaaagttacnnnnnnnnnnnnnnnnnnnnnnnnnnnnnnnnnnnnnnnnnnnnnnnnnnnnnnnnnnnnnnnnnnnnnnnnnnnnnnnnnnnnnnnnnnnnnnnnnnnnnnnnnnnnnnnnnnnnnnnnnnnnnnnnnnnnnnnnnnnnnnnnnnnnnnnnnnnnnngtgggcagggcaccctgttaatctcagcctactccggaggcctgaggacagggaggaattgcttgacccggggagggcaggagggttgcaggtggaactgaggattgtgcccgttgcgctcccagcctgggggcaacagggagccgaaact

SEQ ID NO: 302202 - DNA, 141 bp, Homo Sapiens
atgagccactatgcctggggaatgcattaagcttttaggaagggaaaaatgactttaaacatggaaatttataatcaaaagggaaaggtaaaggtggaaaaggatttggggaaaactcttcaggccctgcccctgttacag

SEQ ID NO: 302203 - DNA, 280 bp, Homo Sapiens
  misc_feature (127)..(127): n is a, c, g, or t
  misc_feature (227)..(227): n is a, c, g, or t
  misc_feature (239)..(239): n is a, c, g, or t
atggcacttagttcaaaggcaattattgaaagaagtttctattcatggtgcagaaccggaaaaagtctctggctcaagcagggcaaactacaaggtcatggctcttcttaaatccatgagagaggtnggggcagccaactagcctgcaatctaagggagagacaggctgatacaggggagagaaaggacagtccttcccttacctgggggcagatgcagcccagatncccagtaagcanttagcctaaaaataggtgaatgggtttggtggggggcccca

SEQ ID NO: 302204 - DNA, 231 bp, Homo Sapiens
atgagccaccagaaagtttgtgtttaatcctgaatatgatcactgtttcacttctaattggagattctgcctaaggaaagaagttagagtaggtaaagactattgtcacccagagtacattcttgggaccctaagcggagaagttgccattaatgaggaaggatgagctcaccaaatagatatgccttgtacatacttaaaattgcatgatcattctgatagttatgaaat

SEQ ID NO: 302205 - DNA, 722 bp, Homo Sapiens
  misc_feature (117)..(154): n is a, c, g, or t
  misc_feature (686)..(686): n is a, c, g, or t
atggtggtggtaatctttaagaagtttggcataaacagtaaccaagtctttggtcttcaatgcattctctagcagcctttcaatgatgtaggtaatacagtaagattttaaactgtnnnnnnnnnnnnnnnnnnnnnnnnnnnnnnnnnnnnnnattacaaaatgccttcggatagatgactagaaataaaaataattccacaacattctaaaagcatctttatcaatatagctaatttaatgaataaatgttatttgccatctgaagtaaaactttgagtttcagagctttactttacatcacaccagctgacctttaagatgttgttgaggacaagtcttaaccaatatcaaatgaataaatttctgctgctattcatcctggagtcagatgtgatgtaattctggccaacagtatatgaaggaatgcagagaaacttctacaagaattttcttactcttaaaagagacacacgaaagagatgccccctttcctgtacctgtaaattaattttggatattatgcctagcattgttactgccatctcgcagccatgatgggatcaagcctgagtataaaacctatacagggaaaaaggccagactagaataaaatattacaaaaaggaggatccacggtttttatcacaacacaatcacaactgtcttacctctgggttctttgntaggtgagttggtaagtttcttattgtttaaaacag

SEQ ID NO: 302206 - DNA, 771 bp, Homo Sapiens
  misc_feature (29)..(29): n is a, c, g, or t
  misc_feature (89)..(171): n is a, c, g, or t
  misc_feature (196)..(380): n is a, c, g, or t
cttctctaagaataagacattttggatcntttgttctaccataacgtaatgaatacaagttgggagcattttgctcttctgttaagcannnnnnnnnnnnnnnnnnnnnnnnnnnnnnnnnnnnnnnnnnnnnnnnnnnnnnnnnnnnnnnnnnnnnnnnnnnnnnnnnnnatacaacaaaaataatatgatcaannnnnnnnnnnnnnnnnnnnnnnnnnnnnnnnnnnnnnnnnnnnnnnnnnnnnnnnnnnnnnnnnnnnnnnnnnnnnnnnnnnnnnnnnnnnnnnnnnnnnnnnnnnnnnnnnnnnnnnnnnnnnnnnnnnnnnnnnnnnnnnnnnnnnnnnnnnnnnnnnnnnnnnnnnnnnnnnnnnnnnnnnttttctactttgtgtgaatttttcattaacaggaagttacagtacttttctggtcacctgagaaacccaccccatatttttattagccaaatatataattctcgaatgcttagaattcatttcttaatgatttcactgttgtgcagtatagactgtgaattgcctactaaggatacagttaattatagtaaactgtggaatctagattaaataattacaccctactttttttcttggcttgtggatgtgtagactacatagtggttttttcaacccaggaacataacagtataatggaggataggaaggcagaagatgtttaaagggttgagaaataatggtatatgtataatggtcagtaagcagaataagccagccaagttggatattc

SEQ ID NO: 302207 - DNA, 172 bp, Homo Sapiens
  misc_feature (41)..(49): n is a, c, g, or t
  misc_feature (97)..(130): n is a, c, g, or t
catttaagaccatgggaaaatgctcaaaatagaataagtgnnnnnnnnngcatgattctacagttattatctctgggtaccaggactactactaatnnnnnnnnnnnnnnnnnnnnnnnnnnnnnnnnnnctgaaatctctgtagtgaattgcatttctagccagcaaaatt

SEQ ID NO: 302208 - DNA, 511 bp, Homo Sapiens
  misc_feature (168)..(447): n is a, c, g, or t
cttaattgtgttgagaatcaatgtttgaggcaaatccatttggattctaattgtatttgggcctcttgccagaaatccgtataacgtgtcatatggtgtctgtccactctagagtgccaagtgtaactctagaaatatctaaatatttccacagtttctggatgggtnnnnnnnnnnnnnnnnnnnnnnnnnnnnnnnnnnnnnnnnnnnnnnnnnnnnnnnnnnnnnnnnnnnnnnnnnnnnnnnnnnnnnnnnnnnnnnnnnnnnnnnnnnnnnnnnnnnnnnnnnnnnnnnnnnnnnnnnnnnnnnnnnnnnnnnnnnnnnnnnnnnnnnnnnnnnnnnnnnnnnnnnnnnnnnnnnnnnnnnnnnnnnnnnnnnnnnnnnnnnnnnnnnnnnnnnnnnnnnnnnnnnnnnnnnnnnnnnnnnnnnnnnnnnnnnnnnnnnnnncttgcatggtattaaatatgtcagaaggtatttgtccatttggttttacttacacaccttgttt

SEQ ID NO: 302209 - DNA, 712 bp, Homo Sapiens
aaggcatgtagtggttacacaactaatggtaaaggtgagatttgaattcagctagtcctaactcctaagtctgtagtttttgagcactatgctgctgccttctactgcttcataagttgttctgaggtgtatgatttccacagcattttagattttaaaattgtgattaagattttatggcctagagattaatttagggaaaattataaatatataattgtccttccttctaaacagttttggtagcttgttagaaatgagagaactataggccctatcccagacacactggatcataatctgcattttaagaaactgtatttaatatccttaaagtttgagaagtattgcagtagatgatcttgagagtttcttccaattcacagttgtgagtgattctgggaccagtcagcatggatatctcaatgttgattattgtatttagcaaagaaaatggtactatattaaagtagcagttcccaacctctgtggcaccagggacccccagtttcatggaagacaatttttccatggcctgcgaggtggaggggatggtttcgagatgaaactctcccacctcagatcatcaggcattagttagattatcataaggaatactcaacctagagccctcacatgcacagttcacaataggtttcacgttcctatgagaatctaatgctgctgctgctctgacaggaggcagagctca

SEQ ID NO: 302210 - DNA, 720 bp, Homo Sapiens
  misc_feature (165)..(222): n is a, c, g, or t
  misc_feature (498)..(498): n is a, c, g, or t
  misc_feature (647)..(648): n is a, c, g, or t
  misc_feature (710)..(710): n is a, c, g, or t
aaggatgatacataccaggtctatagaaatatcataaattattacacagtaatataagtatttttgtcatccatgactaacttttaaaatggcaaaattataaatatctgtaaagtctatgcgcagttgttactgattattgtggcaataatacataaagaacannnnnnnnnnnnnnnnnnnnnnnnnnnnnnnnnnnnnnnnnnnnnnnnnnnnnnnnnngcacaggaggagaattagcaggatgtaaaataaaaatgaaagaccccaatggggagaatattttaaatgtcttgcagggagtggaagaaagctttgcttaaaaatgtcaccatatgctaactatatacagcacttcaagtttatttattgttaaagcctcatgtaaatcacgtcattctgaaaatcatggaaactgcacatttgtgcattaaactatgtaaacaacaaaaactggtcatccgtccaattgttgcttcacttattttgaattatagngcaattttgtggagggtgaaatggggattacacaatatagcgatttcctgttaacacctacatttttgctgatcaagcaaggtctgttggtgcgagagcttaacctttattttatttccaaatgtgttttttattccgagtcccgttgnngtctatggtttcacttttctccatgagccacatgttaaagcctgcccctgactaaaatgaangagtgtaagc

SEQ ID NO: 302211 - DNA, 691 bp, Homo Sapiens
gaagtctagcttctcattagtaggacagcgttctcattttataagaccttaatacccaataggaaatggccgtcaattctgttcatttcatattctcacagcctgtctctcaggtgggagaacacagctaattcttagggtaagtgtcctcttttagaataaaaccttaccaaaggagagctgaaatgggttgtcccccaaggctgggagatgtgtttggttccctttgcctcacttcgacctttctgaaatcaagaaacaaacaaaatgaaatcgacttgtgaaaggatgtcaaaacgacatggcaaattcagttggtttgttcagaattttcttcctgtatttcctttttgaagttacaacagtcattcaggagcacgtccagaggagaagagctgggagggaggacgggtggcttctagagtcaaggctgggtttgcctaaccctgagcctcacgggggtgatgcggatgttccgaagaatgcattagcctttgactttaaggaccgcgaggagagttttcttccgaatcaagtgaatgcgggtgcatcaccctgtcttcctcattccctgtgtcagggaatgcatcggtagcctaaatgactttccctggaactgaagcatgtgttggctctactgtggtgctttaatgtttcctgaaatcctccatttggaggatagagtgcccag

SEQ ID NO: 302212 - DNA, 449 bp, Homo Sapiens
  misc_feature (142)..(151): n is a, c, g, or t
aatacatcaaaccttaggttcattgctgtgtgaatcagggacctctatgttaaaaggcacagtatgggagaagcattgtgatctggcccagggtcaggatgttgaggcttttactggctctagaactgagtcaattcaatcnnnnnnnnnnaagctttagacacttcctctgcaaaagacgataacttaatcacagcctctgacaggtttgtggagttgaggcttgacaagggtgttaggtaaaaactgcagtcttgcatatgtgaagccaaaggtctgagctgtgagcaaacctatcatcaccgctattgagtgacagcagtcactcggcctttcacattccaacttaaaaagcagatgcatattcctatggcttttctttgtataaacactatccataaagcaatggcagaaaagtttctggtttctttaaagtgggagtgaaaact

SEQ ID NO: 302213 - DNA, 743 bp, Homo Sapiens
  misc_feature (18)..(18): n is a, c, g, or t
attggccctcgggccagnaattcccgactacgtagtcggaaaaatgttacatagtaccctcacataatagaagaaagcaaaccatagatataaaactgcaaatttgcaatggtagaacaaactgtattattgagtaaaaattagcttggtgagctagagtagtgcctaacaaaatcacagagtcatttttaatagggaggactagcgagtaggcattcttggtaggcttttgagctggcgtgtataatgataaaaatcatgatttgaagctgatgtttctgcagaagaacagtcactgcctgtttgtcctactgttctcttcaaaagattgtgcttgccactctcacttacctgagatttgacttcatctggggccctagaccctgagggctgtcttctctaaaacttcaaagccttactttatctcagctcctcaacagctgtgagctgactgaagcctgactgggttgtcagccctgtgtgactcagtacttctggggacagcctcagctgtgctgagcaggcagtgctgtgcctcgccagtctcacaggcctgagctgctttcctaaaccccctcctcgacccctgcccctcactctcagcaaatttctttgcttccagcttcattgagaaaatagaacctgacgggaattcacattcttattatgtttccctccagccttcaagctggtcatttccatcctcctctccctccataagtttgaagaagagggtgtttctc

SEQ ID NO: 302214 - DNA, 194 bp, Homo Sapiens
  misc_feature (176)..(176): n is a, c, g, or t
cagccgggcatagtggaaatatgtaccttttttgtagactaagctccaggatagcagaaacacatttattttgtttaccactgtaacactaccatctagcacagaaatactcaaagtttttgttgaatgaatcattcatgtcttttttcctacctaactaccagggtcttgacagnggttcttaaaattagtct

SEQ ID NO: 302215 - DNA, 172 bp, Homo Sapiens
  misc_feature (62)..(62): n is a, c, g, or t
  misc_feature (111)..(111): n is a, c, g, or t
  misc_feature (128)..(128): n is a, c, g, or t
tttttttagtagagacggagtttaaccgtgtatggacatgctggttgagaactcctgacctnaagtgattcacctacctgggcctcgccaaagtgctgggattacaggcgngagccaccacgcccggntctaattgttgtatttttagtagagacagagtttcgccatgttg

SEQ ID NO: 302216 - DNA, 436 bp, Homo Sapiens
tatataaattagtgctattaagtgcagtgaaaattgaaccagggcaagagaggatgccaagagaggatgatttcctctgtagaaccaggcaaagcaaaggaagaagctttctctcaagaaagtgacacaccccgaggacaaaaccagtaatccccatgcatggatggcaaagttggatatatgtatgttgggctccctgagtggcaggagaggtggggctgagttgcaaactgtgcagtcctaccagttttgtaggaagttcagagtggaggagaaactggcagcaagcagcctttcagctcctgatcttggtcatgtgaagagaagtaaagcctaaattatcaccccacccccaaatctatgccatgtgggctcctgtgagttagggaacatagtccagcatggagtcaagcctcaagggaaagtgaaaaaatag

SEQ ID NO: 302217 - DNA, 533 bp, Homo Sapiens
taacctggttgttggcagataattctattgagtatataactggggatagctcatttttgaaatcagtttagaacatttaaaatgtgggaaattcaaataaaaatgcaaattttcactgttttctaaaaagtcagatcaacattgctggcccaccactgatataatactctatatcaatactcagctaatattctttagaccctccagactattttactcacttacattaaatgcctgactcctatggacatttaagtaactgatttctgccctaattctctgttatctaatttctcctcccttataacatgtttgtttggggatttattctcatttgttagtgaagcagaattttgagacttcaaataaaagacaattcctttacacccttttctaatgagaaaggcactacctagtatgggaaagaatttaatattttgatgaaactaaaattacacaataaagcattttaactatttttggtctataacttattttcaatagttttcctctgatgttctgctgggtatgta

SEQ ID NO: 302218 - DNA, 233 bp, Homo Sapiens
  misc_feature (196)..(196): n is a, c, g, or t
  misc_feature (198)..(198): n is a, c, g, or t
ctatctgaaagtaatcacaaaagttaataattacaataaactcatattcagtatttctaaagcacttcttccaaagagcatgtgtaatttaaaactttactaaaaaactgaaaggtaacaaattgaaaacaatgattacctctaagaaatgaaacggagaaaggagggctttctttcatgttttacttggtacagngnggcctaaacttttaacaatacccattttacatttg

SEQ ID NO: 302219 - DNA, 666 bp, Homo Sapiens
  misc_feature (47)..(250): n is a, c, g, or t
agggagagccgacccaccccttcgaggggtccgtcatcgttcagagnnnnnnnnnnnnnnnnnnnnnnnnnnnnnnnnnnnnnnnnnnnnnnnnnnnnnnnnnnnnnnnnnnnnnnnnnnnnnnnnnnnnnnnnnnnnnnnnnnnnnnnnnnnnnnnnnnnnnnnnnnnnnnnnnnnnnnnnnnnnnnnnnnnnnnnnnnnnnnnnnnnnnnnnnnnnnnnnnnnnnnnnnnnnnnnnnnnnnnnnnnnntagcatgggtctagatgtttgatccatggttccacatccccaggtcctggagtctctgtggggctcctctggaagcattttgggagatagtttaaggagaccactagtgctcacgcctggcccttgggcatgtattgtgtcctgattctgggaagagcgtgggccttgatgtcagacctgaggtctcatcccagcctggctaagtcatagctaggaaatttcagattcttgtcctctccacattttggattccccttctgggaatacgtgggggacaagggagtgcagtagctcatgttgactggcaagcccctggcgtagggaaaggtgtctcctttctgctgggagcgctctccagccactcggtccccgggacagtccatctcagcctctatactcacacctcagcggtcgcg

SEQ ID NO: 302220 - DNA, 146 bp, Homo Sapiens
tatttctctgagtgtattaccagacggatagcacatttatatgtcagacatcttaacatctgtgttatctgtagcaggtgtgtagctcagcagatacgtgtcattgtgtatatagctagtgtgtgagggtgtctgtgtttctgcag

SEQ ID NO: 302221 - DNA, 686 bp, Homo Sapiens
  misc_feature (53)..(98): n is a, c, g, or t
  misc_feature (173)..(216): n is a, c, g, or t
  misc_feature (629)..(629): n is a, c, g, or t
atgatcctgaccctggtctaggcctagcctaatgtgcgtgtccgtttttaacnnnnnnnnnnnnnnnnnnnnnnnnnnnnnnnnnnnnnnnnnnnnnngctatagaataaagataataaaaagcatttttgtacatctatcaaatgcgtttgttttgagctaagtgttattannnnnnnnnnnnnnnnnnnnnnnnnnnnnnnnnnnnnnnnnnnngttataataaggtaagattaatttattttgaagaaagaactattgtttaaataaatttagtgtagcctaagtgtacagtgtttataaagtctacagtagtgcacaataatcctagaccttcacattcactcactgctcactcactcactcgcccagagccacttccaggctccattcataagtgccctagacaggtgtaccattttttttcctgtataccttaccttatatttttctgtaccttttatatgtttagatacaaaaatacttaacattgtgttataattgcctgcagtattcagtacagcaccatgctatacaggtttgtagcctaggagtaacagactataccatacagcttagatgtgtagtaggcggtaccatgtagtttgtataagtacactctatgatgnttgcactatgatgaaattgcgtaacaacacattcctctgaatgtatcattgttgtta

SEQ ID NO: 302222 - DNA, 759 bp, Homo Sapiens
ctgagccggtggagccctactttcctctcctgctttctgcctgtgactagcgccgtcccctaccgcccgtcgaccccacttccatgtctggcggacacagctccccggaacctccacgcccatggccactagacagagggagtcttccttcacctcctgcttttccacctggaattgcgacgcgggcgacgagggcgtgggctgcacctgcgaagatgcttccttgtgcaagaagcgcctgtcgggcgcgggattcggggctggcatctgggacgcgggctgaggtgggaggcgggcctgcatctgaagaatacgctcggaggctggcaggttgctgcccccgcctcgcacgaccctcgcttcccacctgtgaaatgcacagaacagggcttcatttatttaacgaatcgtttctgagctcctgctgtgagccaggcttggagcaagcctgggtactgtggatgggagcaggcccctgaaccaggcgggcggggtcttggcgttctcggagctaaacgctgctagaaagacaaacatgatgcacctaactactgtctccgtagattatgaggatgagaggtggaggttctctctcttttaggtatgatccccgttgtgcacctgaaactcaggcgatgactttcagtgaaggaaatgacctgtctagggccacataatacctgtttgaaaagccagtaccacactaagtctccactattaagggtgtgatggtgaagggtgggggtccgtagggagcac

SEQ ID NO: 302223 - DNA, 447 bp, Homo Sapiens
tgttaggctggtcaggcagggtccagccataagacaggtgcatcttcttcttgggccagtgagtgtcccagggaaggcacctccagtctcctgtctagaaatattgagcccaaataatggggtggggctgagcacctcattgtgttgactttcactaagtacccactttagttaagtgccttagtcctgccctttgctgggcctgttcttccatttctccagaataaatcttatttcccacctgagagaggggcaaatagtaaactggctacagggggaggagagagaatctggccttttataaagcatgtaaccagccctgttttcactcccctaagcccttatccaagggtgcctggctctgtggcatggcctgactcacttcttgatggcctctaccctcttcccgtgaccacccatgatgggggacgcaggaggccggctctc

SEQ ID NO: 302224 - DNA, 669 bp, Homo Sapiens
  misc_feature (20)..(20): n is a, c, g, or t
  misc_feature (227)..(425): n is a, c, g, or t
taaaacaccagcacatcagnattcttgtgagagagtagaatctagaattgtccttcctaactttttctcagaagtttggctgaaagaagtattattgcagaaggtcatttaaagactgtgcagtccattcatcactccctatggatcaagctggaccactcagacttatgtacttggactatattacattaattacttaaagcattagtttcagtgagtcatgccannnnnnnnnnnnnnnnnnnnnnnnnnnnnnnnnnnnnnnnnnnnnnnnnnnnnnnnnnnnnnnnnnnnnnnnnnnnnnnnnnnnnnnnnnnnnnnnnnnnnnnnnnnnnnnnnnnnnnnnnnnnnnnnnnnnnnnnnnnnnnnnnnnnnnnnnnnnnnnnnnnnnnnnnnnnnnnnnnnnnnnnnnnnnnnnnnnnnnnatttagatggtcaaggagcctaaggaaaggtacaagacacagaaagaggaacgaacttaaggtatttgttggactgtaaggagagctgccggactggagagtgtttccaggtgggatctgtggtgaaaggtaagactcaatatatggataagtctgtgtgtatacggccttaaagaatcacagtagatttgaagtttatcctgtaatgacagtagcatttacagaaagtttctgttggaaatag

SEQ ID NO: 302225 - DNA, 781 bp, Homo Sapiens
  misc_feature (102)..(113): n is a, c, g, or t
  misc_feature (146)..(175): n is a, c, g, or t
  misc_feature (194)..(301): n is a, c, g, or t
  misc_feature (317)..(453): n is a, c, g, or t
tgaatgactaaattattattatcttcctttttttcccttctgatataccaattttattaggtgatatctccgaaaaacccaattttgttaggtgatctcatnnnnnnnnnnnncccagcattgactgaggttgttcaaagtaaagnnnnnnnnnnnnnnnnnnnnnnnnnnnnnngagacagagtttcgctctnnnnnnnnnnnnnnnnnnnnnnnnnnnnnnnnnnnnnnnnnnnnnnnnnnnnnnnnnnnnnnnnnnnnnnnnnnnnnnnnnnnnnnnnnnnnnnnnnnnnnnnnnnnngtgcatgccaccatgnnnnnnnnnnnnnnnnnnnnnnnnnnnnnnnnnnnnnnnnnnnnnnnnnnnnnnnnnnnnnnnnnnnnnnnnnnnnnnnnnnnnnnnnnnnnnnnnnnnnnnnnnnnnnnnnnnnnnnnnnnnnnnnnnnnnnnnnnggcaaagtaaagtaatttaaatagtgcctctttaacatgacacacagtaaagtaatttaaatagtacctctttaacatgacacacattataaggacttgttatatcccttctctttctggggaataatttttggaaaacttactgccttgtatttgggcatatatgacatgtgggttgggaccccaggatcatggtttccaactctcttgtccctgttgtttcaagcacataaactgaattcacagtcctatccaggacccttggagaagattttcctgcaggagcatttgagctaagagactggctggctggagggtaaattcatca

SEQ ID NO: 302226 - DNA, 737 bp, Homo Sapiens
  misc_feature (175)..(216): n is a, c, g, or t
  misc_feature (700)..(700): n is a, c, g, or t
aaataattgaaatttttgatatgttctaatcttctttgcatttttgagatctgtgtgagagcccaaccccactccaggagcatctgtacagcttccatctgccatcgaccaggtcctctcatcaaattaaatggaacagaaaatgctctagtgaaacaaaggaaatgtgcaagcnnnnnnnnnnnnnnnnnnnnnnnnnnnnnnnnnnnnnnnnnnggcccccttataatccaaaccccagctgaaaggctgcaacaacaccaggttggggagcaggtcaccaggatcatagttcagtcaaaatgacatcactccctggaactagatttcaactcactagtcccctggcctcataacaggaacttatgcaggtgagacacaagaatgacttcctgtgtaggactagtaggaaatctgcaagtacttagagctggccattacagaacttccttccagaagtgccctgtgacatgaaagtaggacttcacaactaaggtgaagatccctgccctaccacatgatttgagtctcttggattcaaaggacattaatgtcaacagatggttgccatgtcagtctgttgacacaattccattgcttcagtttctcccctttctctctatatgtttggttggagcttgtgcctaatgtaaatacatcattcataattagaatggacattaattattttagtaataancacaggataaatagctttggggtgatgaaccagagtc

SEQ ID NO: 302227 - DNA, 613 bp, Homo Sapiens
  misc_feature (45)..(53): n is a, c, g, or t
  misc_feature (184)..(236): n is a, c, g, or t
ctttggatgttattatttctcattattttaagcattgaaaggagnnnnnnnnngctactctggtgtcaataaataagagcaacactccttcatgggttttcctccttaagatttcttacttctacaatctcaccagacctcttggcaaatggtcccaccttgccccaacttatcctcatttcannnnnnnnnnnnnnnnnnnnnnnnnnnnnnnnnnnnnnnnnnnnnnnnnnnnnggttggattaggagcaagatgggtaactggtagcctaggggcagtattctggacagcagatatttgttagtctcacaaatgtatatgtatgtttaaagttgtttgccaatatgtaatagtcaagatagttctcataacatctcaggcttggatcttgggcttctcctgacacatcagaacactgacatcatgttctggcatggcacgaagtcaggcggcaagtgacagcagctgcccctttacccctgggacataccttccaggacaccatggtcctctcccactgggcccactgctccagtgggttatctatgtgacctctggaagcatccgcgtttaccacccttgctctggcctccctcttagctctaatattc

SEQ ID NO: 302228 - DNA, 602 bp, Homo Sapiens
  misc_feature (279)..(287): n is a, c, g, or t
  misc_feature (394)..(451): n is a, c, g, or t
  misc_feature (558)..(558): n is a, c, g, or t
tatactgagtttctgtagttggttgtttttttcttaaagaggatgggttattcactctatccatgtatagcctcatggtaccttctacagggtcctgtgggctgtgggagctttgcagaatgaatgcattcaaccatggtctgtgcagccataacaatgtaaagtaattttttttgactgttgtagagctcataatttaggtgttctccttaatacaatacagatttttaaacagggttcttggtatatattaaaattgtattcaagccacagaaaccnnnnnnnnnaggtgaaaaaattgtgaaatttttagcaaagcttttgacacctatttatatagttatttagcctttgaaataaatcagaaaagtagtacagtaagatcagaatactnnnnnnnnnnnnnnnnnnnnnnnnnnnnnnnnnnnnnnnnnnnnnnnnnnnnnnnnnngagatagggttttgctctgttgcccaggctggagttcaattgtgctgtcatagtgaactgcagcctggacttcatgggcttaagcagtccttccgcctcagcctctncagtagctggggctacaggtacacgtcaccatgccccggctaat

SEQ ID NO: 302229 - DNA, 766 bp, Homo Sapiens
  misc_feature (23)..(23): n is a, c, g, or t
  misc_feature (480)..(553): n is a, c, g, or t
ctgaacaaagaaaaatactaatnctctcccaaggttatggtttaaacctattttactattttgttatgagtattatgagggtcatgccaaaaaccttgtaaaaccaagatatctgacttcattttttcctctacattgataagtctgtcactgggtaaaaaggaatttgattgtactggtgtgatttgttgtcactgaatttatggtggttatcaccctgcctcctgtacttagtagccctttgcaaattgcttgctgtgggatttgttctaatatcaggaaagatactgaagttaaaacaaactgttctctaatttcaaaagtgtcatcatatcccgcctcattcttcaaatgctcaccttcaacctcagcctcttagaaaaattgagatatatttaaactgctcaattttcagattatttggctatgatgtctgaaaacacacatagcttatagctgttaacgattttagtgaaatgnnnnnnnnnnnnnnnnnnnnnnnnnnnnnnnnnnnnnnnnnnnnnnnnnnnnnnnnnnnnnnnnnnnnnnnnnnttcttatataaaatggtggagtacagtatttagttaatgcaagtcacatattattaaatagtttatatttccaagtatctggctttttgaagtgatttggaccattttaatctgtattctattatatcatagatgtttaggacaaattttagtctgtttttgtaattgtgattgaccttgagcaatttccttgaaaaagcacttgaaagtctt

SEQ ID NO: 302230 - DNA, 473 bp, Homo Sapiens
  misc_feature (311)..(311): n is a, c, g, or t
  misc_feature (387)..(387): n is a, c, g, or t
ggctttatgggactatattggtgaactctagagcatccagtgaggggctgtgggatgagtgaaagctaatttctaagaatcacgaggtgtgctctgaggacaaagaggaaaccttagggaagtggcaccaagtgaaaccagaaaggagactgggatcatattgtggttgaccttaaatattaccttagtgttgaggagtcacctgtgtaactgaggagagaggaggaggtgtgcatgactccagcaggttggaaaaagccagtgcctctgccagacaggaatgtggaacgggtggaaagtggtgtgatctntagatgtgtagagtgtgatattttggaaatcctattggaaacagtcagtcaggaaggatgtcctagctaagaaganttttgaagttttgaaagtggctcatctatttcctgattgatacataccattagttcagtttgggtctattattttttgggtccagg

SEQ ID NO: 302231 - DNA, 396 bp, Homo Sapiens
  misc_feature (17)..(17): n is a, c, g, or t
ttttgctgtggatagtnttcttttaatcccatcttttaagatccagctcaaaaactatcagtactttgacacttttgcccaattgcctttcatgtactgactttatttaacacatggcatttaattaaacttaatttaattaacaaaaatttatctctactacagcccttcaggatggtttggacatgggagctcaggcatatttatctttatatatccctggccccccttttaaagtttggtacaaagtagaagcacaagaaatacacgggaactgaatgaataagaggaaaattgaattacgatcaaagaagagggacaggggaagtagggaaagaaggaagaacatagcacaatcctaaatgcaaactgcggtttccatagccgctggtagag

SEQ ID NO: 302232 - DNA, 176 bp, Homo Sapiens
ggaaataattttcttagggcttaaaggaatcttaaaatcactgctcctgtttttaaacttgacacattcaaagcactttcactgagacatgaactctgatactcttagtaagatttgctagaactctcctactctcaagatacatttacctttccagagcaattgatcttgacaca

SEQ ID NO: 302233 - DNA, 467 bp, Homo Sapiens
ataatacggaagaagtatgcatagacagttgaaaacaccaagaaaagtcacttagcatagaggagtgacagggggaattggcatagctgataacaaaaattcttttggaagggcagaagggagtcaagatttctcttaggggtaaaataggcaaaattcacctggctgttgaacattagattagaaaaaatcttagatactttctaagtgggccttttggatctttagtatagcaggtccatgaccactgttaatatttgccaaggctaggaagtgaaaaatgcaactttggatgcactggtaagaaggagggctcatcaaaaagtctgatttccagtgaatatttcccaccttaaaagaagaaatctgaaacagataaggataatcaaatctaaactgtgtaattttaaagtataaggaaagattttccagtagctatagattaaattacactataaattctatct

SEQ ID NO: 302234 - DNA, 455 bp, Homo Sapiens
  misc_feature (66)..(170): n is a, c, g, or t
  misc_feature (177)..(334): n is a, c, g, or t
  misc_feature (364)..(364): n is a, c, g, or t
  misc_feature (367)..(367): n is a, c, g, or t
  misc_feature (393)..(393): n is a, c, g, or t
gataacagatgagtgatggtcaggggatggggagaggcagggatatggttataaagaagtaagaannnnnnnnnnnnnnnnnnnnnnnnnnnnnnnnnnnnnnnnnnnnnnnnnnnnnnnnnnnnnnnnnnnnnnnnnnnnnnnnnnnnnnnnnnnnnnnnnnnnnnnnntatgtgnnnnnnnnnnnnnnnnnnnnnnnnnnnnnnnnnnnnnnnnnnnnnnnnnnnnnnnnnnnnnnnnnnnnnnnnnnnnnnnnnnnnnnnnnnnnnnnnnnnnnnnnnnnnnnnnnnnnnnnnnnnnnnnnnnnnnnnnnnnnnnnnnnnnnnnnnnnnnnatagatacagggcagctaacacaaatttancancattatctttattaatattccaaagnatacatctttccaaagacaagctacctcaaatttgtacaataaaaaattttctcccaaataa

SEQ ID NO: 302235 - DNA, 450 bp, Homo Sapiens
  misc_feature (66)..(66): n is a, c, g, or t
  misc_feature (70)..(70): n is a, c, g, or t
  misc_feature (89)..(89): n is a, c, g, or t
  misc_feature (92)..(92): n is a, c, g, or t
  misc_feature (126)..(126): n is a, c, g, or t
  misc_feature (131)..(131): n is a, c, g, or t
  misc_feature (170)..(170): n is a, c, g, or t
  misc_feature (172)..(172): n is a, c, g, or t
  misc_feature (182)..(182): n is a, c, g, or t
  misc_feature (204)..(204): n is a, c, g, or t
  misc_feature (222)..(222): n is a, c, g, or t
  misc_feature (254)..(254): n is a, c, g, or t
  misc_feature (338)..(338): n is a, c, g, or t
  misc_feature (349)..(349): n is a, c, g, or t
  misc_feature (375)..(375): n is a, c, g, or t
  misc_feature (402)..(402): n is a, c, g, or t
  misc_feature (412)..(412): n is a, c, g, or t
  misc_feature (421)..(421): n is a, c, g, or t
caggacagattttcaagcagtcacgtgagacccatatgacaagcctgtgcccggagaacatgtgcncagncctcgagcttcaacagagntgnggaagggtattcagagtcctctcagggtacccgngctgngtgacacgtgtgacactgcatgacatgccctttgtgtgncnatacaagtgngtctacccctcttctgtcaagngacttttgcgtctgcagntgtggacaacccaacaaagggtcaaggtcagntgtgcagtaaggtgtgcccctagcatctccctacttaagtcaagggtcactagccatgaactgactgctgccgagggccaaggncatttgatcgngaatgcccctggttttccatccgaangactttgctgctccttgttgggccagngactagaatnataccctgncaaaggattcattaagcaacctgtttgcg

SEQ ID NO: 302236 - DNA, 705 bp, Homo Sapiens
agtgccatgaggcttcctattgtttgggcagtgtttgatgttcttaagaatgtatacagaattaactttgatcaacgatagtagcttcaatctggtggctccatcggccaatggaaagtgagtagtattttatacatggcaaggacacagccaagaaaatgaaatgatcagttttgtgtgtatcccactttacttttcgagtgctttccttcacagacaagctctaactgaatcctcacaaagatcctacaaggcaggatttgcccattagacagactggaaaactgatgcctcaaaagaaaaggggcgcattgtgggttagtgaagacacctaaagaacaaaaaagcggagctccatgggactgttgtatttcaccctcctcttggctgccagcatcttagtactaagtctatcgccatgccgtgtcacgtgggcaggtcttcttggcattcatcttgaacatgacccaaatcctggctccatcttccctcttacttttcctttgccccatttttcttccttattttttatgtatgtttaccttgccctgtaggcgcatttgtaagctggctcaaatccttttgggaacaaggtgggttataaatgcacacgttcctacacaggatgttgttagtcatttcataaggtctcttgtggaggagattagccaatagcttcttttgtaaccttaggcacaccctcct

SEQ ID NO: 302237 - DNA, 115 bp, Homo Sapiens
cagaagttgtgcttaaaacatcttgatctaataaagcttctactttttaactgacagatttgtgtttaggtgaagatcacatgcagtgtacaggcagtttacaagtctaccctgc

SEQ ID NO: 302238 - DNA, 362 bp, Homo Sapiens
  misc_feature (348)..(348): n is a, c, g, or t
ccgcagctgtgaaagaaataaaataaattgaggtattgagagaacacatagaaagtggagaggctatttttctgttacctgtttttgtcttccttaattgtctagtttagcaccaaccttgaaaaaattgcgttacatttaagtttgatgagctccttgtgaacatgtgaatcagtagtttctcgaggtgctgctgggttcggtgacacaatacagaacacaaagccagaaaccagcctagaaaccagacagagggctttgtcccagagtcctgcttaaccttattacagctaagtgtcgaaatccagcccgtggttctcccccagaatactggggggcaaatctcgntcaataatagaaag

SEQ ID NO: 302239 - DNA, 209 bp, Homo Sapiens
gtaagtattaatgcctccatttttctgatgacaaaactaagtttcaaagattgagtaactttacaaaaaccatgactaagtaactggcacaggcaggactggaacctaggccagtgtaactcttagaccagactctttcaacagcagtaatagttggcatttgtagaacaccaaccaggtaggaagcaggctgtggtctatgcactcta

SEQ ID NO: 302240 - DNA, 652 bp, Homo Sapiens
  misc_feature (22)..(22): n is a, c, g, or t
  misc_feature (333)..(433): n is a, c, g, or t
catgagccccgcacctggccgnattttacttgttttaagctaacaatctacctgcattgtttaatctataacatggcaattttaaataggtttacttatctaaaaagaaaaagaattgttcttcattgttcttccaggctaaaaatcttataaaattccattaactttttcatttgtatgttgttacactgcctccctctgtatatagcatatacatatattttcagctctctctttgactttccacttaaatgtttcacaggtacctaaaatttaatgtacttattactgaaccctttgatcttccctttctgtctcatcctggcatacttnnnnnnnnnnnnnnnnnnnnnnnnnnnnnnnnnnnnnnnnnnnnnnnnnnnnnnnnnnnnnnnnnnnnnnnnnnnnnnnnnnnnnnnnnnnnnnnnnnnnnctccaaatggtaccaccataccatttaccatttggtcaagtcttcagttttttccaccctcatcctctcacattatattgacaaatatctaacatgtctcttaaatccacccgtttttctctatttccattgttaccatcctaatctagtatgctgatatgactggtattccagaaccaacttttgctgtctttggaataatcttccttcctcagcaaa

SEQ ID NO: 302241 - DNA, 820 bp, Homo Sapiens
  misc_feature (75)..(75): n is a, c, g, or t
  misc_feature (810)..(810): n is a, c, g, or t
atccgcatagagtcaaaagaacacaaactccaacaaccaccatcttttatcactctttcttaaaaagaaagaccntttcactatcaaaaaaattagaagtacataatcgaacttaattttttgacaaatccatggcacctatttttctgctgacacagtggtgatcatctttccccaggttagtttttgtgaaaccctgctctgcagcaccctccctgacccaggctagttctgctagaaaacttctagtgactgcaaacactcgactccagttcttggaaaggcctgctttatagtctttccttttctaggtaagcatcggtaagaacttcaactgttccttccttgtaggatgtgatttctagctctttgtttatggtgcttactctcttctgaaagagctcagaagaccaggttaaaggagatgtttagaataattgcattcaatgtagaaaacacttcatgaaaacaggctgtcttatttatttattcctccactcctttcttctgaatgtcaaatgtttattattttcaggcactatgctgaggcctcatatacgaggaggaaaacacacagtccaagggcacacaccttatggggatgacagccatgcagataatgtagcagtgtgctgattgctgcaccaagatgctgcgtggacaggatgccatgggcagagtgcagagacagcactcagctcagccagggaaggtcggaaaatgctagagaatgccattaaactgagtcttgcagaaagatgctaaatttccctggtgaaggaaaatcttaaagggcagggaaattaaggnggagcagggc

SEQ ID NO: 302242 - DNA, 420 bp, Homo Sapiens
taatttatgtctttggtaatcttaagtattatataagaaataaaaagtatttttgagagaacctaattggttgctgttattttctaaaacacaagccttagcttcatcacaaaaaagaaacctaagttaagaaaggtgtgtaaggtttcagatctcattttcatgtatgtatccatttaggccttctcaacacatccagaaaaggtatggaaagctaattcaagagtataggttgttttaatgtttgtagaaagcccggtgttaaccagtatagatttactcttgcagatacttcggtttacatcctttctagagatggataccaagttcttttcaattatatggaaactgccatttatcagttattttcctgtatttcatatttgagtcacaaaacagtactgtgagtcatagatgttc

SEQ ID NO: 302243 - DNA, 802 bp, Homo Sapiens
  misc_feature (698)..(698): n is a, c, g, or t
  misc_feature (720)..(720): n is a, c, g, or t
aagaattaatatttattctgttctgtccctaatgaaaacaaattgtcaacagttgttcggtaactgactaaattaaaatctgtaattagtcaattagattaaagagttggcacaacctgattgtatcatgctggttaggttattaagagaaagggtgtgatttttaattactgaatgctaattttgacagtttcaaatagaaacagacgtgtttttcccctctttccctaattctgaatggtttggaaagtaaagacactcaatgtgtaaatgatgtttttttgaagaaaaataatccgagaaggcccttctgtagagtaggagggatttcagcaaagagcccacgttggatttagttgaaagggttagttggaaatccttcctttcttgaagaggcatggcttggtttttggcagcttcgtttttgctgtcaatgagaggttggatttcagctttaagcagtcgaatcattgagttctttttaagggtctccccgattctctcaacttcaggcttttttctggccagtgccctggaaactataagcaatagtaaacgatccagggaggaatcccctgcgaaggaagcccagtgggcgctttgggacactagcacgtgtgagtaatcatacccagtgttgtatgaagtgtcttctcatacactggcatcccaggaagacagacggatgtaacggatgntcttacttcatggaataaaagntttgctgactgcctgaggaaagctgagagcagggaatgaggtgccccggtggtggagggtcaggggggagaatgtacctcgg

SEQ ID NO: 302244 - DNA, 695 bp, Homo Sapiens
  misc_feature (185)..(185): n is a, c, g, or t
ccatgttctcaccacctctgtggcagtgatttgctgggggcccctctgggctggcctagctctctgcacttggccacagtcccttccagtccctacagaacccatggtgaggcggagcgtgtatgctgtttgtcccttggcatgagagtctatgtttcctgtgcccacctgtctcccacatttgngtgacttgtatgacctctgctgggatttgaacttgtgacctttgacaaagagatgctcttttgctcccagtgaacctcatccccactcccatcaaaatttgggaatcctggacacttctctgttagcaatctcaagatccacatgatgccttttagcccaaaagaggtgctggacatccagcgatacctgggctgatgggatttctccccagacacaaataaatctgagcgtgcatgcgtgtgtcatctgcgtcccttcccctggcttctccaaaatcctttccacacagcctggagagtacaggtctggctggccaaggcacaatctctgtggtccttgtaatttggggcactcctttgagactaccaagttcaagtctctgcctgagccccactggatgaccacattgagctgactcaagcccacctggtgaagtggcgcgtctgaccctcgccaggagtcctggtgctcctttcagggtatctcagcagaaggctgaaacaacctag

SEQ ID NO: 302245 - DNA, 702 bp, Homo Sapiens
  misc_feature (670)..(670): n is a, c, g, or t
agaaagtacacactgaaataaacatatagtcatctactgccgtaaaagatgttcatctgtagagcacccacaatcctctggccaccaccagcttgtggctcccccttccctgcctgttccctcctgcctgtgtctttctgtcttacctttcagggcttggccctatcccgtcttcaccgccaagcttcctttgactactgctggccttcgtacccgtctccctgtccattcattcaaagagacattgattaatattgtgtgcccagcttgggggtgggcatgaaaaggtacttgccgtcgctatatggagaccattggtgggagccagtcagacagacggacagacttgtagaatggaagataattgctgtcaggggctgtgtctgagtgcagccgtacattgaaggaggcgtctcgctgagagattcaaggcacgggtcccaggggaccgattttgttgaagtggaggtgagagggctcatttgccaggaggaggagaggtgggcccagagacatggcaggcagagagacggcgtgtgccgactcagtggcccaggagggcatggcgggtgctggggaaatgactaatttaaactcagaggagccagaagagtgaggggtgggagagctttcaaagcagctgggtgggaggcagggccatgctgagaangaagtcctgggtggaaggaggctctgatttac

SEQ ID NO: 302246 - DNA, 777 bp, Homo Sapiens
acttatgatggccttatccagatgtagccgcattataggttggggagcatctgcactactgaggctaaactgctcattttagattttatcagttgaagagaatttaagataccattaaattattttgcaagagttgcagaaacattgataagtgatttttgtaattcaaacactcccatttgagggcagaattctctagtaagagaataagatccagaacttcttcatataatgaggttttgaggctaatgagaaacttatgggggcgggagggttctgtgtacaaatgatcctgttaagaatttgactatcatttagaagtcgtatttagttaattggggtgagaacccaaatcacagtgtccagatcattcgagtggaaaacatttataggtgttattaccacacagaataaaaaacccagtattactgagataaagtattaagacagatcccactacccacaaatcaggagtgagatgaatgtcgtgattattttttggcatgttggcgtgtgcacattgtcagtttgaatgattgtggtttaaaccaggataggagcaaaaaacacttctttgaattggataaataatctatgcattcagtcataaattaaatatgattaactccctttcttggtatgtcctgtatattgatctatccagcatccaaaactgttatctaccttacatagtggtacgtttgaggcattccatttacctacagtttccattgagccaatgtatgggtttcagtaggttccttaatgatgtaacat

SEQ ID NO: 302247 - DNA, 471 bp, Homo Sapiens
  misc_feature (398)..(398): n is a, c, g, or t
  misc_feature (433)..(433): n is a, c, g, or t
cagcaaaaaactggaaccttaaaaaatggcaaattcaaaatttaacactccaagttcaggaacaactacaagattcataatgatttatttgaggcctgactgcaaaatatactttctgatataataaaaggcaaaaattcctaattaaaatttttgaaaccatgctaaaatatattaatatatgttagtatcaggcatattaaatgatagtatttaattatgtttgtaaactacactacacttcgcagagcctcaattagtaaataatagtctatatatccatacatctgaaaaagtaatactataaaagttgaatactataaatggtttatagaaaccaattctattatataatcacaccacacatgctcaattttttcctcatctgatacatctgntgtcaacttaaaatcgatctaattaaataacttgntactgggaggtgcttgattaaaaattgtgggggagaag

SEQ ID NO: 302248 - DNA, 367 bp, Homo Sapiens
tttggccaaaaagcaggataatcattttaggcccatagaatgcagagttcttcaatcatttaaaatcagttccctgtaacgtttctcactttatcttttgcttattctcattaaagctaagatttttgttgaactttactttctctggtttgtaaaatgaaactcaaagtttattttctgaggtttatataataaaagcaatacatgtatttcaatcgcttatttcatgtaactagagagatctgggaaccccttcccaccttactctctacctcactgtagtttcagatctcctgcctccattcaacaggtttttcttgagtacctgctacaaacccagtactcagtaaaaatgatgagtgaggtg

SEQ ID NO: 302249 - DNA, 543 bp, Homo Sapiens
  misc_feature (146)..(146): n is a, c, g, or t
  misc_feature (266)..(266): n is a, c, g, or t
  misc_feature (393)..(432): n is a, c, g, or t
gagcgagagagagattttgattatctgttatgttgttatgtttacgaagtcagattttatagggagtactcaataactccgtggatgctttctatttcttaaagtaccatctaaatatttatatgcacatgcatttgattcttttntcttttaccatgggagctagaattgggctattattattattgaactcaaagctttcatctccccactttcccttttagagtaagacctatttaaaatttgagagcaaccatgctatttgnttcctgaagtaatcagtccaattatattgcctcaaccaataccaccaacaaaatgctcattatcaacagaaaatctttattaagcccactgctaggtgtgtactttctctcactttctggtcgctgnnnnnnnnnnnnnnnnnnnnnnnnnnnnnnnnnnnnnnnnatcctaatctatctagttgggaagaactaacacatgtaatgataccagatagtatataatagatgttgaataagtggtacagacagcaagtacagccagaattctgagtat

SEQ ID NO: 302250 - DNA, 395 bp, Homo Sapiens
  misc_feature (124)..(124): n is a, c, g, or t
  misc_feature (317)..(346): n is a, c, g, or t
tggggttttagaacccagtagcatagaggaggagccccacagagctggtagtaatacctctgagggtatggtgaagctagttctaggggtgggatggtagccgagagctggtaacaacggcggntgctcctttctcctgcctttcattcgtctaatgcttctaagaggaaggaagccatctggctaaatagagagtaatttgcactgtcccagctctagcatcacagagcggactatcaaagggtgggactgggactgagaaaacagctcgctaagccttcacgcgtgctatcgtcaaactatttgtgatgggtcannnnnnnnnnnnnnnnnnnnnnnnnnnnnnccaagtagggaagggaggatgaggccaagtggggagaagggggggcaaa

SEQ ID NO: 302251 - DNA, 319 bp, Homo Sapiens
  misc_feature (55)..(93): n is a, c, g, or t
caccccattcaatgtaagagaatagtaccttatcctgtaggctgcctgaatttannnnnnnnnnnnnnnnnnnnnnnnnnnnnnnnnnnnnnnaagcagagtatacaaaccaatttctaaggaagttcatcacagcaaaaattattggggatttacattgtcaagaatagcgacatcttcagtaatttttctcaagatcatatattgccatatcttggtctccataagcagatgaagcatgacttttggatatgaggataagtgtccagatttggagataggttgatcccctgtcgcaccatttgtcattactacactg

SEQ ID NO: 302252 - DNA, 681 bp, Homo Sapiens
  misc_feature (659)..(659): n is a, c, g, or t
  misc_feature (661)..(661): n is a, c, g, or t
cacagtgggtcttggtcttctgttggtctgctgtagtggatgaaaagagggtctgtggtctatccctatgtagcaaatttgcatactcaagatagaataggaaatttttctccagagattagaaggaaaatatattttttacttaaaagcaaaccagtattatatgtgataggtgacttagtaagatttttggtgcatatcttctaaagatttagaaatattgatctgaaataggaacagagcaatagcatccttcacattttttattaatataaattatactgttataagttattaatcaaatatattaatttggattgtccagcacatttttattagtgtttccatatagaatatgactcttgaaaataaaaagaatgtttgttagccccataaagagtatttgttttactaacaattcagtatcctaaaattttccgtagaaaatataattttctaattgtcatgtttcttgagagaattaatatgtgaaataacagtgaagagaaatttttataataagtgtaatttatagatgctacagaataaaaatgatccatgaagttaaaaagtaagtaacagtcacaaagtagttacctaagaaatacatgtatcatgttggccatgtggcagtttctgtcctagctggtttttaatgngntagcttttaaaattaccaca

SEQ ID NO: 302253 - DNA, 351 bp, Homo Sapiens
  misc_feature (200)..(200): n is a, c, g, or t
  misc_feature (209)..(209): n is a, c, g, or t
  misc_feature (233)..(233): n is a, c, g, or t
  misc_feature (239)..(239): n is a, c, g, or t
  misc_feature (253)..(253): n is a, c, g, or t
  misc_feature (276)..(276): n is a, c, g, or t
  misc_feature (301)..(301): n is a, c, g, or t
  misc_feature (306)..(306): n is a, c, g, or t
  misc_feature (326)..(326): n is a, c, g, or t
attttaatttactttatttctaatagttcatgactcaaaaattcaaagggtattcaaaattcaaagtttccctcccttcccaccccgagatatccatttcctttctctgaaagcaacgttgccagtttcctaaatattcttccagagatactttgcaagtttgagcaaataagccagtttttacttaacaaccaaatagnctaacaaanttcacttatcaacactttaaaagngaaagnttaactaaaagganatgtttacattagtctgtaagtnatccataaaagttcagtgtcagggnctctnatataagtgccttgaaacancagggtttaaggctatttgcttcta

SEQ ID NO: 302254 - DNA, 433 bp, Homo Sapiens
  misc_feature (265)..(265): n is a, c, g, or t
  misc_feature (379)..(379): n is a, c, g, or t
  misc_feature (397)..(397): n is a, c, g, or t
  misc_feature (410)..(410): n is a, c, g, or t
gtagaatcaaaattttaactaagggacatttatattatatcttagtatcctgtagcaattttggttctgggtcaagaggggtatgtacaagaccagtttgacacccttaactctgctcaattggggagggtctattttcctttaagaggcaaagctttggagaaggaaattgaggggactaaatgatttctgtctttcaagctccctcttcttgagatagagcaagctgaatccttgtttttaatttgctaatctggaaccattnaagtgtttgactggttataccagtttgcctacaaagagttgtcctgacataggcattttctcaactgatagttgaagctgtttaacctactttctcattccctgggtgccagtnaaagtagggagccctccntaatttccatggnctcttagctctagggaaaaaggg

SEQ ID NO: 302255 - DNA, 508 bp, Homo Sapiens
  misc_feature (332)..(340): n is a, c, g, or t
gtcctacgtgaaaatcaaaccatccaatggtacacaatttcattcatttgggcttgattagcctgaccagtattactcacgataaccagcacaatggaacccaagtataatccctgaaccccacttaaccttattcagtgcatccaagcttgttttcctccagtattttcatccaactctcttcttccaccccttcaatccttagcatctatatgtatttgaagagtaatttgccatatgttatttgtgattttacaataatctgattttgatgattcagttaactttttgcattttcatttctcaaagtgtttccagatattccagagggnnnnnnnnnccatgtgagcaaacttgggggaaaaaaatgcagcaggataaaaatttctggaacatccaccccggtttttaatttttataaaatgggagctaagtggaaactagggttaaatgaagggaaatgtaggtggaacacatggtgttttgtggcttaaaggattatttgttt

SEQ ID NO: 302256 - DNA, 173 bp, Homo Sapiens
gtatttaagaaagtttgcaagcaaattaacacaataaatttaattcaattactcagcaaaaaaattttttagcacgtattatatgccaggtcctgtactagacagcagtcttcagctgagggcaactttccccaccccccaccctgtcccacaagggtgtggttgacaatgtc

SEQ ID NO: 302257 - DNA, 533 bp, Homo Sapiens
  misc_feature (482)..(482): n is a, c, g, or t
  misc_feature (503)..(503): n is a, c, g, or t
ttgaaggacccatattaactaaaaacaaattgccaagacaattattcatctctccctcccacctaatcaagaattatgtgaaagttctaagtgcctctgtccctcctctttctctctgtctggattccttgggactgacatcatagacatggaggagtctctgactttttaaagtttttgacagtcttgaatgttgtggttttccagtgagttatgggaagagttggagaggactcaaatgcagctctaatgcttcagtggaatcaggagacggttagagagtgaaactctggaagctttgggggatgttgtaaatgagagaatgtacggtcagtagtttctctggcattttaatagagggttattatccatggtctttaaattttggggtcatttttctctgttattaagtaagttggacacttgggaatatgcagactgatttttaatattactctggagctaaaacaatgttttagggnagaggaaatttgttgccaatnaagtcgtataaccatccttaaacctatgtc

SEQ ID NO: 302258 - DNA, 106 bp, Homo Sapiens
  misc_feature (40)..(40): n is a, c, g, or t
  misc_feature (42)..(42): n is a, c, g, or t
  misc_feature (64)..(64): n is a, c, g, or t
  misc_feature (86)..(86): n is a, c, g, or t
ccccctctttaagaagctgaacttcaagcggctgggactngnatgcttgaagccgccttcaagncttaaccccagggcatttactncaaggattttcttggacatt

SEQ ID NO: 302259 - DNA, 411 bp, Homo Sapiens
agacagagttcacttaaaatgcatttaacaatttacagataactggaaagtaattcattcatcttagaaccctggtagggacattctattaaaatatttgtgtactagttaaagtcaaaatagaaatacagcctatcacacggtatttatactatgcattatgattaataaagccacctaaggtcgttactccatgatcatgggaagttgttagtcattaagagttcgggtttagcaacaaaaatcttgcgtttgaatctaaacacattacatgattttaagcatgttcatcattctgagattaaataaaaattaaggaaatatatgaaaaatgcttaataagtacccaaaaggtaatatggtgtagcaacttaggaatgtagacttcagagccagtcagctagggtttaa

SEQ ID NO: 302260 - DNA, 454 bp, Homo Sapiens
  misc_feature (188)..(188): n is a, c, g, or t
  misc_feature (315)..(315): n is a, c, g, or t
  misc_feature (345)..(345): n is a, c, g, or t
  misc_feature (377)..(377): n is a, c, g, or t
  misc_feature (430)..(430): n is a, c, g, or t
  misc_feature (435)..(435): n is a, c, g, or t
attatattgagaagtccacagcaaagaatcacagtgatgaaccagttgctgtgttgagtcaacaacttaagagcagctaaggccaagcagcagctgcttgctgcagcactccatcatatgctaaattggaattgagcaaagtgtctgggaagagacagtaaagagaggattcatgttgaaaagagaantaaatatttatttattgcatggggatgcagccagatgatttaggtcattaatgagttgaggaagtaaactttaaactatcaaacataagaataataccattgaagactctatttaagaggttattantctgggctaaggaattgtatttaggataanaatgaagggccgaagatgagctagggtaggtncttgggttaggtacttttggaccatctccaggtggagggtgattccaagcttnggatnggggaggaagggaaaattt

SEQ ID NO: 302261 - DNA, 499 bp, Homo Sapiens
  misc_feature (320)..(320): n is a, c, g, or t
  misc_feature (327)..(327): n is a, c, g, or t
  misc_feature (404)..(404): n is a, c, g, or t
  misc_feature (418)..(418): n is a, c, g, or t
  misc_feature (423)..(423): n is a, c, g, or t
  misc_feature (428)..(428): n is a, c, g, or t
  misc_feature (438)..(438): n is a, c, g, or t
  misc_feature (444)..(444): n is a, c, g, or t
  misc_feature (461)..(461): n is a, c, g, or t
  misc_feature (481)..(481): n is a, c, g, or t
ttggtgattatactaaaaaccaattttcttatgcttcagttattacatgtgatcaaagagttatcacacaggttcaactttggctttctaagtcaaacaaacaagctttatcttggctaaaattctttataaggcaaaacatattgactggtagctcattgcctaattgataacacatatgtcatggcattattttaatatgactctttaacaataaaacagttaatatttcctattggatcgtgtaacatcttaaaatattggtaataacagttccaaatggttataaatgtatttgaagtatttgaacaggaaatagngactaantatatacataaataatttgttacatttagatttctttggaatggcataatgttggaaattagtttttcctttggctnctttaattccccgnaaganggacntaggatggcntttagngctcaagcgttcattancctttctttaattatttatntctatgtggtgggtgctc

SEQ ID NO: 302262 - DNA, 440 bp, Homo Sapiens
  misc_feature (328)..(342): n is a, c, g, or t
  misc_feature (412)..(412): n is a, c, g, or t
  misc_feature (429)..(429): n is a, c, g, or t
tttcgtttttgttgcttgcaccaaaagataccaaacatgcaatattaagaaatacggaacgaattggctttcagcagacaatacttgcatcattatccactagctttaaccattacctctgtccctgtgatataatatgaaatacaaggtctttctctccagttcctgtcacagtcctcctaaaactcttggaattttctaataggagtgtctttggttatttatgagccactatttttgatcaaacctgattatgctaatgaagtgatttagggtggggccagtcaccagaaagaccatgtgacaagagggttgaactctcagcctnnnnnnnnnnnnnnnctctatgggagggggatgggagatgaaggtctataaaaaccgttggaataaggtttgttgagcttctggntgaaaacactgggaggngctagtgaggc

SEQ ID NO: 302263 - DNA, 358 bp, Homo Sapiens
  misc_feature (140)..(140): n is a, c, g, or t
  misc_feature (219)..(219): n is a, c, g, or t
  misc_feature (332)..(332): n is a, c, g, or t
  misc_feature (342)..(342): n is a, c, g, or t
tagagagagagagggagaaatggatataaagatatgtatttattataaggaattggctcaggccgttatggagacttaagtttcaagatctgtaggatgagttggcaagctggagacccaggagagcccatggtgtaganccagtctgaatctgaaggcctgagaactcagagagccattgatgtagttttaatccaaaggcttgagacccacaaaganccagtgtttcagtttgaaggcaagaaaagctgatgtccctgttagcagtcagacaggagggaattctctcttagtgtttattttagtgttcatttgtgtgccctgtcttaccngctagtaggnaaagcatctgagggca

SEQ ID NO: 302264 - DNA, 426 bp, Homo Sapiens
  misc_feature (378)..(378): n is a, c, g, or t
  misc_feature (392)..(392): n is a, c, g, or t
aattttatgtagcaggttgagaaagctaccttatgctacaatagactatatatcaaaaattttgataatgagttctaggatgtatttttcttgtatcttttcctttctaccatgatactagtgatgtataaggggtctgtgtagtttgaacgtatctgaataacttcagtatacttcagctctactgcttaatttgactcgaagccaagaggacataagcatccccatgtgttttagaagcccaaagccagtgagatgaaacccaacaccgaggaatttgaaggcaaagtcacttgtgggggtaaaggaaaggcattggggtaggtttgggctacagcgtaataataagggaaaatttggggtttgccataggggggnaaccttgtggcccntttttaccatttttagggaccaattaaagggggt

SEQ ID NO: 302265 - DNA, 297 bp, Homo Sapiens
  misc_feature (238)..(238): n is a, c, g, or t
  misc_feature (254)..(254): n is a, c, g, or t
tcagggtgtgaagaaagattttcaggaataattatctgagttacttggagtaaaagtagcaggaggaggaaaagagatatggcctgtgggtctctgacttgccaaacttcttattcattttacaaatcatgatttctagagcatcttaatctttgaggcccagctgcttgggaagttgcataatctctatacttcagttcccccctataaaatgggggaatatgataggaatctaccntgtatttgaggagggnctaaataaatataaagtgcttaggaaaagtaaggggctccact

SEQ ID NO: 302266 - DNA, 198 bp, Homo Sapiens
  misc_feature (80)..(80): n is a, c, g, or t
  misc_feature (86)..(86): n is a, c, g, or t
  misc_feature (94)..(94): n is a, c, g, or t
  misc_feature (104)..(104): n is a, c, g, or t
  misc_feature (109)..(109): n is a, c, g, or t
  misc_feature (124)..(124): n is a, c, g, or t
tataatttcccccttctgggcgtgaggctcaatccaggatgatgtgttacatgtaattgtcacatcccttcagtgtcctntaattnggcacagntccttgcctnttctntctttcatgaccttngcatttttcaatagaataggctaataattttgtagactgtccctgtccctcaattttgggttttcaaggtgtct

SEQ ID NO: 302267 - DNA, 211 bp, Homo Sapiens
  misc_feature (193)..(193): n is a, c, g, or t
gagatttcataataccatagccttctctctggacctcttctatatctgtacttgctgctctatcttactagacttacttccctatctacactctctctctaggttgatctcttccagcttccggggtctaaaaaacaatccatatactaggacacggtatgggtgattgctggaacaactctatgggatatantaaaaccatttggattgg

SEQ ID NO: 302268 - DNA, 362 bp, Homo Sapiens
  misc_feature (63)..(63): n is a, c, g, or t
  misc_feature (66)..(66): n is a, c, g, or t
  misc_feature (277)..(277): n is a, c, g, or t
  misc_feature (287)..(287): n is a, c, g, or t
  misc_feature (343)..(343): n is a, c, g, or t
agcagtgtactcatatgaggcttttattcatctcttagtccatggcagatcaaacagacaaantangaatacagaaataagatacaaaaccacatttatctctggactctgaaaataaagcaaatacgttctttcttacatggtcgtgaaacattcataaaagcaatcattatgccacaaaggtctataactcaatacattcatttgaaaataactgtgaagagaagtacaaaagagatgaggtgataatggaatgcagatctttgaagcaactttntgtaattaantttaggctgtgatacacaagggggcaaaaactttcagttcctaccgtagtttattntggtccccttttttccagg

SEQ ID NO: 302269 - DNA, 399 bp, Homo Sapiens
  misc_feature (67)..(277): n is a, c, g, or t
  misc_feature (315)..(315): n is a, c, g, or t
  misc_feature (334)..(334): n is a, c, g, or t
  misc_feature (345)..(345): n is a, c, g, or t
  misc_feature (368)..(368): n is a, c, g, or t
  misc_feature (388)..(388): n is a, c, g, or t
aacattccttcaaacatttagcctttgtgtttcaaataatctaattgtactcattaagtaattttgnnnnnnnnnnnnnnnnnnnnnnnnnnnnnnnnnnnnnnnnnnnnnnnnnnnnnnnnnnnnnnnnnnnnnnnnnnnnnnnnnnnnnnnnnnnnnnnnnnnnnnnnnnnnnnnnnnnnnnnnnnnnnnnnnnnnnnnnnnnnnnnnnnnnnnnnnnnnnnnnnnnnnnnnnnnnnnnnnnnnnnnnnnnnnnnnnnnnnnnnnnnnnnnnnnngtgggatccacctgaagggtagggagtttcaaggaccngcctgggggaaccatgggntgaaaaccccntctccatttaaaaattaccaaantttttcccgggcttgggggntgcatgcccgt

SEQ ID NO: 302270 - DNA, 196 bp, Homo Sapiens
  misc_feature (16)..(16): n is a, c, g, or t
  misc_feature (67)..(67): n is a, c, g, or t
  misc_feature (134)..(134): n is a, c, g, or t
  misc_feature (171)..(171): n is a, c, g, or t
tgaaaatagaagtggnttattgcaatatgtcagagaagtattctactgataaccacccatacatganatcttaaagaagtagttatgagttggaaatttctaggttgtaatcagaagagggagcaaattacagnatacagctgtgcattgtttggaagtgggctggaaagnattcattgcctctttaattgaagaa

SEQ ID NO: 302271 - DNA, 400 bp, Homo Sapiens
  misc_feature (191)..(191): n is a, c, g, or t
  misc_feature (360)..(360): n is a, c, g, or t
  misc_feature (374)..(374): n is a, c, g, or t
gccttccctgagatcccatgtgaaatatagtcagggattacttccctgggcttgcgctggagactgggagtacctacaaggctgttcctgctgttgcttctacttttacattttacgtggccccctaaatccattccacctctaggtaaggttaaatcctccaactgtgatctggattctcagattcactnagggggtatgtgttcgaaggcaggtcttcccccctcacactttgggaattcacagtttttcacctaactcacagagtttgcagtgatcctttcaaaagatctgtgaattcgtttggttttcctggtactttccttgtggtggtttttggaatgattagttcacattgtngaatctgcacacantagttctgtccatccacgtggaagtt

SEQ ID NO: 302272 - DNA, 402 bp, Homo Sapiens
  misc_feature (48)..(67): n is a, c, g, or t
  misc_feature (79)..(300): n is a, c, g, or t
  misc_feature (312)..(312): n is a, c, g, or t
  misc_feature (328)..(328): n is a, c, g, or t
  misc_feature (358)..(358): n is a, c, g, or t
  misc_feature (379)..(379): n is a, c, g, or t
taaaataatagaattttattgaaaaaaataacacgtacttactgaagnnnnnnnnnnnnnnnnnnnngaaaccaagtcnnnnnnnnnnnnnnnnnnnnnnnnnnnnnnnnnnnnnnnnnnnnnnnnnnnnnnnnnnnnnnnnnnnnnnnnnnnnnnnnnnnnnnnnnnnnnnnnnnnnnnnnnnnnnnnnnnnnnnnnnnnnnnnnnnnnnnnnnnnnnnnnnnnnnnnnnnnnnnnnnnnnnnnnnnnnnnnnnnnnnnnnnnnnnnnnnnnnnnnnnnnnnnnnnnnnnnnnnnnnnngttcccaaaatnttgggattacagggtntgagccactgcaccaggggaaactgcgatnttttagtgggggccccttctntcttttgacttaagggtgtttgt

SEQ ID NO: 302273 - DNA, 295 bp, Homo Sapiens
  misc_feature (48)..(48): n is a, c, g, or t
  misc_feature (75)..(75): n is a, c, g, or t
  misc_feature (103)..(103): n is a, c, g, or t
  misc_feature (112)..(238): n is a, c, g, or t
tcacccagactggagtacagtggtacaatctcagctcactgcagcctngacctcccgggctcaagccatcctccngcctcccaagtagttgggactacaggcntgggtcatnnnnnnnnnnnnnnnnnnnnnnnnnnnnnnnnnnnnnnnnnnnnnnnnnnnnnnnnnnnnnnnnnnnnnnnnnnnnnnnnnnnnnnnnnnnnnnnnnnnnnnnnnnnnnnnnnnnnnnnnnnnnnnnatgagccactgcaccaggccacatttcactttttagcctctctctggtgtctagcaa

SEQ ID NO: 302274 - DNA, 400 bp, Homo Sapiens
  misc_feature (219)..(219): n is a, c, g, or t
  misc_feature (226)..(226): n is a, c, g, or t
  misc_feature (271)..(271): n is a, c, g, or t
  misc_feature (309)..(309): n is a, c, g, or t
  misc_feature (320)..(320): n is a, c, g, or t
  misc_feature (330)..(330): n is a, c, g, or t
  misc_feature (339)..(339): n is a, c, g, or t
  misc_feature (364)..(364): n is a, c, g, or t
  misc_feature (390)..(390): n is a, c, g, or t
tattttggtgaactaaataaaaccagtttgctttcttgtcaccaaaaggactctctttcccactcctcaccaattcaaagcaacacacctgtactcatgatagaggtgaaggaagggagaggaggggtgagcacacaggtgtacatgtgccaatgcacactcaatcacaagcgtttgtgttatgtgtgttgggggatcctatactccattttatctttntagctgncccctcagggactcacaattaatgttatgggagtgtcatacttancttttagggtttaggttattttttttcttggaatttgncattaggatgnacttgtaagngttcaggantatgaggttcaccctttctgtccangttgttccattcttcctcatttaaanaatggctgcc

SEQ ID NO: 302275 - DNA, 384 bp, Homo Sapiens
  misc_feature (275)..(275): n is a, c, g, or t
  misc_feature (282)..(282): n is a, c, g, or t
  misc_feature (292)..(292): n is a, c, g, or t
  misc_feature (326)..(326): n is a, c, g, or t
ccaagttgttacggcagaagattgaacagcactcacacatccctttctccatttcacacacaggaaaaaagagacaaatgtagagattactggtgattttagctttcatcttcacaatttccaaattttctataggtaaacatgcattgctcttatgatcataaaaatctcttacattcacacaagtctaggcctacacctttttaaatatccgtggaaactcttggcaaaaatatctattggtcttaaattggaacaggtttatggaccttacnttttttntccggggggntaaaatatactgggggtaaccttttgggggtccnttttccatctgggggaggggcctttccccggttggcggggcgtgtccggggggcttgg

SEQ ID NO: 302276 - DNA, 244 bp, Homo Sapiens
ctttcaccattgtacttggtaactttgctaactcattatttgaatatacttatattcttttggggagttgggaacaccttaatgttggagacctccttaaattttgacaaggtctaaattcaactttgctgttgtcttcatccctaaaaatgtcatttaatgctcaatatctgaaagctgattaataggctttcatattataagttaaatattgctccctatagaggcctaaaaatgatttttt

SEQ ID NO: 302277 - DNA, 481 bp, Homo Sapiens
  misc_feature (342)..(342): n is a, c, g, or t
  misc_feature (356)..(356): n is a, c, g, or t
  misc_feature (424)..(424): n is a, c, g, or t
  misc_feature (463)..(463): n is a, c, g, or t
tgggaagataaaactagtatgcatcaaataacatacagatgtatatagatctgcaagaaataattgatagtgtctgttatagtggagattttaacatacttcagtaatttattaggtcagacacacaaaaaaatcagtaaagacttatttttgagtagcagaattaacaagctcaactcaaagattgtacccaatatgaaagcacactcatttcaagcatgcatggaatatttatggagtttgccttgtgctaggccataaaggctaggcttaagaaatttcaaaaggctagtgtcgtataggcattggcaagaggatttccagcggtgggactaactaganacccaaagaccttnaaactccatatagcatgatgggaaagttagaggggaggagttggtgtgagggaagtgaggggttagtngggagaaccaagctgggagagtttggtaggaacccgggngctgctttcacagggagc

SEQ ID NO: 302278 - DNA, 417 bp, Homo Sapiens
ttgctggtaaaatgatgtctgctgagacaatcggagcctaaagggggctaattctctctagacagggggtattggagatcatctaaaaatggaacctggcagccacacggcacactaggaaaccttggcttggcctacgtaataggctgcaagatgcataaaatcatcaggatgccatgagcccctccccaccaaattaataactccatatttagtaagctaagtactgatttgcttttgaataaaacttatgctaaacatataatttgcataaaatgtttatcaacttatattattcacagggtgggggaagatcagtgatattactgattgcacaaaaaccagaaggaataagtgtgctgaagaagtatccagcatctattttcgaaagtttgttacttcatttttaggatattc

SEQ ID NO: 302279 - DNA, 303 bp, Homo Sapiens
gagtatttgccattagtagatgaagtcagcatactatttttataggaattgaactacattaactaattgcttttctatttttgattttgatactgtttccgtttgattctgtttgatcaaatctgctgcagtcattttttagtttgaaagatcctaatacttctccctagctccacatttggaagactgtcaactcctgtggagtaatttgtcaagaatgtagagttcatgaaggtggacaacatctttataaagaccaagaacctagctcagtgccttcctttcagacgacaggcttaaagg

SEQ ID NO: 302280 - DNA, 485 bp, Homo Sapiens
  misc_feature (156)..(156): n is a, c, g, or t
  misc_feature (420)..(420): n is a, c, g, or t
  misc_feature (467)..(467): n is a, c, g, or t
cttaacgtcttcagtaaaccatgattttaaaagatgtgctgtcatccaggcatagtttttctatctatagagtctatagagcacaggcagagtacatttagcaaaattcttaaggaccctaggatttttggaattgtaaatgagcattggcttcanctttaagtcaccagctgcagtacccctaacaagatagcctgtcctttgaagcttggaagccaggcattgattcccgttctacagctatgaaaatcctagatggcatcttctttgaatataaggctattttatgtacactgaaaatctgttgtttagtgtttagtgcatccatcttatctagatcttctggataacttacagcttcatcttgcacttttatgttatgggagatggcttctttccttaaacctcatgagccaaccntgctaccttcccactgcagtttcccactggcagtttccctctgcggnttctctcagccttcgttt

SEQ ID NO: 302281 - DNA, 222 bp, Homo Sapiens
atgtgcaagttgtatgcatttaattctttgaagtccaaacacattcttgcttgaaagaaaagctctggaggatgaaataagagtatacaattattgcaaaatggtaataaaatcacctccccacgcttcccttgagaaccatggtcaaggaagatctggctgagagggctgaaacagactgtcaacttgacttttaattttatgaactatgagaatttggac

SEQ ID NO: 302282 - DNA, 424 bp, Homo Sapiens
  misc_feature (155)..(155): n is a, c, g, or t
  misc_feature (210)..(210): n is a, c, g, or t
aaaacggattcagtagtaccaaaatactcataatgtgcagacagacaaaagaactggaaggagtcgtgttttcagacacaggaagcttttcacgtgctccacctggacctcatctctcagcctcacactccgatcttcagcagcccccgctatgncccgagtcttgggacgtcatcccggagctcctagcctgcccgggagcagagcatncagattctcctcttggccccttatcccaactaaacacatcaccactgaggacctgtccaggggtttagctcctgatgaagagacagagaaaaggtcagagaaaggaagggtgacgctccatccaagatgactacagcgctatggatttccagatgggggaaggtcacggatgctgggacgcaacagattttcaacagggacccgagagagagaa

SEQ ID NO: 302283 - DNA, 444 bp, Homo Sapiens
ttttttccaccaccacccctaacctttcctttttaaacctgccggtccacctggacacttcacagggtcagaccaggtctagcccttgctggcactggggacacagagaccccctggccccagttcctgggaatgggccctgccttaactcttggcgctgcggggaggcgggtagctcagggacctggagccttttggcttctgggagtttacctctgagggaggagggcgcttctgatcttagggagcgagaggccggggctggctgtgaccagatgtgggtcctggctgggtgcgcagccctggttccttgttacccctgatgtgatgggggcgctgtgggggtctggagagggcctctggagtcctgcagggaggggttcccttcggcaggcagggcacgtgctggctcaacccacttccctgtaaccctttgcagagatt

SEQ ID NO: 302284 - DNA, 410 bp, Homo Sapiens
  misc_feature (27)..(27): n is a, c, g, or t
  misc_feature (35)..(35): n is a, c, g, or t
  misc_feature (52)..(52): n is a, c, g, or t
  misc_feature (149)..(150): n is a, c, g, or t
  misc_feature (199)..(199): n is a, c, g, or t
  misc_feature (225)..(225): n is a, c, g, or t
  misc_feature (259)..(259): n is a, c, g, or t
  misc_feature (290)..(290): n is a, c, g, or t
  misc_feature (300)..(300): n is a, c, g, or t
  misc_feature (316)..(316): n is a, c, g, or t
  misc_feature (362)..(362): n is a, c, g, or t
  misc_feature (384)..(384): n is a, c, g, or t
  misc_feature (393)..(393): n is a, c, g, or t
ctttaaaggtggatggtactccaagtncctagttnctaaatgcttttagctnttgaatcaataagacaatcacagttctgcattagctttagtgacataaagggctgattcagctgctatacacatttaaggaagccaagagtataaanncaagcctaaacatgttgctccttcttgagaatgcacagagcatctcccnatactgttttaaagtgacaacatccngggcactataattaagagtcgagctctattaatnttcttgtggaaataaaggcggggggtgattntccacttttntctggcgttttatttntaggttatccatgtttgggttttttaaaagttcctttggtgggggnggggtgcgggtggctcacggcngttaagggntgagggcaggcggattc

SEQ ID NO: 302285 - DNA, 476 bp, Homo Sapiens
  misc_feature (411)..(411): n is a, c, g, or t
  misc_feature (420)..(420): n is a, c, g, or t
  misc_feature (430)..(430): n is a, c, g, or t
  misc_feature (454)..(454): n is a, c, g, or t
aaaactggcctcaagaccacaaggagtgattataaactgccttaaatcacactgagcaaagtgtctagtagaaatgcccagagagtattagattggttataatccagtatttccattagtgcttgagaaagtaaagagtaagttagttagtgtttagtagactttaactagaagggatttctgaaaaccggtatggcctaaactgtagaagacttagaaaaatggaaaagatatacttttttcaaaaggcaaaccctttccctttactatgaataattaatttaaagagtaattttcacctaatgatcatgaaatctccatatgcatatgggaactacataaaatagtgaaaaattaaaggtttttaaatctaggctaaggaacggcagcaaccttggggacctaattccntttagtctnttaggggttntaaactcccatagggagaagggtnttgggccctaaataatcctttt

SEQ ID NO: 302286 - DNA, 405 bp, Homo Sapiens
  misc_feature (324)..(324): n is a, c, g, or t
  misc_feature (330)..(330): n is a, c, g, or t
  misc_feature (340)..(340): n is a, c, g, or t
  misc_feature (369)..(369): n is a, c, g, or t
  misc_feature (390)..(390): n is a, c, g, or t
cgcgtccggcccatgatctatatcttaacccttcacctccgacctttttggccgtatctacaacctctttcatgatttttgtgattggctctgttgtcaatcctgtgaagttatgcaggacatctggacaattttctctagcaggagtctattgtttcaggcttgatggctttcaggactttttctataacaatggaatcttcaatagtgtaatccttccagactttcatgatgttctatcagggttctcttgcatagtgttgacagtcctttccataaagggaatgtgtgttaatgaggccttaaaggcccttatggaggctnctgganctagggggantgaattaggaggacattgtgtttgggggngcaagtaggacggcctttcanccagttttgggtgtt

SEQ ID NO: 302287 - DNA, 432 bp, Homo Sapiens
  misc_feature (296)..(296): n is a, c, g, or t
atttctgaagtcagtggatatatcatatattggacagttgaatcacttttatattagtttgctcaaaaacatttattaagctcattctccatgccaagcatcatgtttggtgctaagattacatctttgaacaaactgtcctcatattgttcaggaaaacccctaagtagataggcagccatatatggtagaagacaggaactgtgacaagaaatatatttttataaatcccacattgagagttcagctggcagtaaataggagtagggtggggtttgtgcaggttaaagtctatnaaaatgccatggcaaggaggttgaattaggagcctgattatggaagttagggaggccccaaaacacagtggggcacatatttcacagatctttgtttggagggaaccagatgggaggggttccaactgttgtttca

SEQ ID NO: 302288 - DNA, 400 bp, Homo Sapiens
  misc_feature (162)..(162): n is a, c, g, or t
  misc_feature (197)..(197): n is a, c, g, or t
  misc_feature (241)..(241): n is a, c, g, or t
  misc_feature (269)..(269): n is a, c, g, or t
  misc_feature (305)..(305): n is a, c, g, or t
  misc_feature (315)..(315): n is a, c, g, or t
  misc_feature (328)..(328): n is a, c, g, or t
  misc_feature (361)..(361): n is a, c, g, or t
  misc_feature (381)..(381): n is a, c, g, or t
attcggcacagagtttacagatggttttatattcatgatctcccttattttctccatttccccaaagaagaagctgggcataaagagtgattttctcagggtctcataatcagtaacggagcagaattcaactacaggacctccctgggaacctgttctctntccttgtcctgatgtgttactcttataggccaatntttgcctttgtgttgtgcctaaatggtgtaattaccccgttttnggaaggtggtattatcccgttttatctngcggaaactgagggttaagaggaatgttatgatttngtgactattngtgacagcttttngaatattaggtcacttttgaaacctataagctnctctctttctagaccacatnggttggagaaaggagaaag

SEQ ID NO: 302289 - DNA, 298 bp, Homo Sapiens
  misc_feature (145)..(145): n is a, c, g, or t
  misc_feature (193)..(193): n is a, c, g, or t
  misc_feature (241)..(241): n is a, c, g, or t
  misc_feature (253)..(253): n is a, c, g, or t
  misc_feature (274)..(274): n is a, c, g, or t
aaaatagggtagtaacagtgagtcctgggggaggacgtgttctgttagccagatccactctccaacctgctgtctgtcctttggagccttaactcaagagactttctttccctctagcttccagttgagtgaaggcactagggangcaacagcgattggaacaaaagaggaagggagtatgggttatttattnccccctgggctccccttactattggcacccattgcaaggctgggttgncctcccctcaancaaaggaaggcagccagtatnccttcctaagggtgaaccaggagt

SEQ ID NO: 302290 - DNA, 473 bp, Homo Sapiens
  misc_feature (11)..(11): n is a, c, g, or t
  misc_feature (388)..(388): n is a, c, g, or t
  misc_feature (405)..(405): n is a, c, g, or t
  misc_feature (422)..(422): n is a, c, g, or t
  misc_feature (451)..(451): n is a, c, g, or t
caagtaggaanccattatttgattaatgtcagattcatttactacttcatatataagccatcagtattaattttatggcagaaaactttgtccactctcaaatataaatgtgaatcacttaaaagacatttgttttcctgtaataaataaaagattagtaattagttttacgtttgctttcaagggattctggttgtatttattgtcaactaaataactttgatcaaatagccaagactctaacatataggcaagagtttgtagggaatcgtgagttgcttggcttatactgtgttcttggtgttaagtattaacaggaatatggcctgggtaattagaacttgtccatcagaattgccaaaagtggggattccgggggtctctgccnatgggaggatgtggttncagaaataaagaatttngaattagggataagccgtagggaggatcntaagtatgaggatgagtatccg

SEQ ID NO: 302291 - DNA, 414 bp, Homo Sapiens
  misc_feature (272)..(272): n is a, c, g, or t
  misc_feature (287)..(287): n is a, c, g, or t
  misc_feature (302)..(302): n is a, c, g, or t
tggaagataacataagagtatttgaagagaggatataacagaaaacaggagagaagtatagtttagtaggagaaaagagattgagacagaagtaaaatccaggaggcattgcataacattacaatgtagctctttaagatgacaataaaatgggcataaaagtaccacccatattgatatgtaaggacccaatgtaccatactgtatacaggacaaatgagagtacaactattaattctacctcattaaaagtaacacagtatccataaagntaaacaaatattcancaaatctgcttacanagttatgtaccttgtaaataaaatattaatgaatgagtaaaactgggggaggggttattaagaaaaattagggtgttcaagtccaccaaaaagtttaatttggataagtttc

SEQ ID NO: 302292 - DNA, 275 bp, Homo Sapiens
  misc_feature (43)..(112): n is a, c, g, or t
  misc_feature (115)..(115): n is a, c, g, or t
  misc_feature (119)..(119): n is a, c, g, or t
  misc_feature (122)..(122): n is a, c, g, or t
  misc_feature (125)..(125): n is a, c, g, or t
  misc_feature (130)..(130): n is a, c, g, or t
  misc_feature (156)..(156): n is a, c, g, or t
  misc_feature (170)..(170): n is a, c, g, or t
  misc_feature (174)..(174): n is a, c, g, or t
  misc_feature (195)..(195): n is a, c, g, or t
  misc_feature (202)..(202): n is a, c, g, or t
  misc_feature (206)..(206): n is a, c, g, or t
  misc_feature (240)..(240): n is a, c, g, or t
tgggcatgttttctaatggttgaacaccattccctctgggtgnnnnnnnnnnnnnnnnnnnnnnnnnnnnnnnnnnnnnnnnnnnnnnnnnnnnnnnnnnnnnnnnnnnnnnttncatnttnccnggtgnttccaaacatgctaagtggccaggtntattccttgcaccntgtngccatggattttaaagttttnctatggnctgncccagaaggaaaagatcccaggcattcatggttncctgttacagcctgtgggaaatgttgaggccaatt

SEQ ID NO: 302293 - DNA, 274 bp, Homo Sapiens
taaactgatgtggcacactgatgggcgtgtcttatggaaagctgcttctgccccgccctgttttagctagtcctcagtttggtccggtgtctgagtcccgcttcctgagtcccacctcctgccttactttgctcctttgtaattaatagatcttgtttggtgatctttgaggctatgcaaaaatctgttttctcatacccctttcacctgacagttttggcatccattggcctttcttgccagaattaatgctattatggttgctaaatggaga

SEQ ID NO: 302294 - DNA, 373 bp, Homo Sapiens
  misc_feature (11)..(11): n is a, c, g, or t
  misc_feature (343)..(343): n is a, c, g, or t
ggcacgagatntggttttctatatcacatcaattgaaaagataatatgaaaattatataattcagagcaatacactttctcctagaacatgatctgtaggcctctatttgttttaagaaaacctcagtactttatgaattcaagtattagatataagttagaagcataaataactttgaacactgtatgccatcctcttgcttattagaatactatatccctttcaaagaacatctagaataccacctcttccagggaatgtttttgtgttcatcccatccattcaccagggcccctgatacctgccagggccctgaggttataatgatgaacagaaaatctncttctgtcctttggcctttgtttctctctg

SEQ ID NO: 302295 - DNA, 441 bp, Homo Sapiens
  misc_feature (11)..(11): n is a, c, g, or t
  misc_feature (98)..(98): n is a, c, g, or t
  misc_feature (344)..(344): n is a, c, g, or t
  misc_feature (363)..(363): n is a, c, g, or t
  misc_feature (390)..(390): n is a, c, g, or t
  misc_feature (414)..(414): n is a, c, g, or t
  misc_feature (425)..(425): n is a, c, g, or t
atgtttccttnacctgccttctcagtcttggtagccagttctctctctctgttcagtacatgttcatagagcagtaagtaagagctgagctagctctnggggaccagcagagcatgcctgccctcagtgagtgcaagtgccgtggaagaaaggtacagtgagaaaagttacagtgcagtgcaaatgccctaagagagagttccgaatcactgctttagaaggcagtgggaaaaacacaacttcaatcttgcttacagcaaatatttcagagacacttggtttcctatagtgaattcagtaaagtctgaaccttaaaaggggggtaagcacattattatcttttnctatttcatattttagggncattcatagaacacccgaaatgatgantattgatgtggaaattgattgttnaatgggtttcntttaggaattttccta

SEQ ID NO: 302296 - DNA, 297 bp, Homo Sapiens
  misc_feature (23)..(23): n is a, c, g, or t
  misc_feature (62)..(62): n is a, c, g, or t
  misc_feature (73)..(73): n is a, c, g, or t
  misc_feature (102)..(102): n is a, c, g, or t
  misc_feature (131)..(131): n is a, c, g, or t
cccaagaacaaaaggcgatagcnaacgcccaaaatcggaaattagacaactatataaaaacnatacccacccnaagagtctaaagcgtaaacatagtaagcnagcctataaagccctaagacatagccccnaacgataacggaaacccgacacataaaaacggaagggcaaacagaaacaaagtcttctaacccccaaaaaaacctaagcaacccgaaaagttcccagatcaaaacatcttatccatacttacctagaaacgttagcatcgtatcgtaactaagaagggtctcctaa

SEQ ID NO: 302297 - DNA, 142 bp, Homo Sapiens
  misc_feature (55)..(55): n is a, c, g, or t
  misc_feature (71)..(71): n is a, c, g, or t
  misc_feature (103)..(103): n is a, c, g, or t
  misc_feature (119)..(119): n is a, c, g, or t
ctgtgattctttatggcaaattttcaatttcagggcagcttctccttttctaccnaacacacttgtaatanttttaaccccactgtcccgtgggtggggatcntcaaaaggagttttanaattgaacccaatgaagggagag

SEQ ID NO: 302298 - DNA, 160 bp, Homo Sapiens
  misc_feature (12)..(12): n is a, c, g, or t
tcctgaaggttnagtggattgtgtgattctgagttgtgtaattgatcgttttcctatcctcacagtacagttgtcattagtaaataattggctaactcttataagacagaacagaaataattcattcttttaagcatttaaattaatttacataggattt

SEQ ID NO: 302299 - DNA, 352 bp, Homo Sapiens
  misc_feature (76)..(76): n is a, c, g, or t
  misc_feature (79)..(79): n is a, c, g, or t
  misc_feature (193)..(193): n is a, c, g, or t
  misc_feature (337)..(337): n is a, c, g, or t
taatatgtaatttttgaactaaagttacgttttaaaattgaatagagaaagaattataaaatgttaagtttaatanttnttatataaatataaaagtgtgaaaattattctgatattactcattttgaaaagaacaagaagtaatgagaattttcaaacactgctcctagaagtataaattaatataattctntggcttagtatggcattatctgatgaagatgaaggagcacatcttaagactcagtacaggtactcttaccagaaaatgtatacacacacatgaatatcactgtgttttcatagctaaagttgagaagtttctcaaatgtttatncagtgataaaataga

SEQ ID NO: 302300 - DNA, 403 bp, Homo Sapiens
  misc_feature (150)..(150): n is a, c, g, or t
  misc_feature (154)..(154): n is a, c, g, or t
  misc_feature (182)..(182): n is a, c, g, or t
  misc_feature (206)..(206): n is a, c, g, or t
  misc_feature (355)..(355): n is a, c, g, or t
  misc_feature (385)..(385): n is a, c, g, or t
agatggattggatttttcaacctcattggaagccagaagacaatggggtggatttcctgtttcagtgacatggtagcttgagctaaagttagaaccgctcccattacaatcacttaaaatgctatataagctataacaacagaataaganaganaaacagagaaccgaaagcaaagcaggantataaagccagagcagagtaggcngctctggggaggggcaaggtgggttcattggaccctgaaatcgaccctaacaataatagaggtttggatttgcatgaacacgtgaagcatggagttgaaacagaaatccccttcaaaagagccattcccaggtaaaagggatgcaaganaatttcccccatgggatgcagagaattgtncaagggagctggttcttt

SEQ ID NO: 302301 - DNA, 390 bp, Homo Sapiens
  misc_feature (348)..(348): n is a, c, g, or t
gtccttatttgttcccattattgaacgataatttaagctggttgctgaaaactaagccaacaactgattttccttagcacactgaagattttacttccttatggcctctactgttgctacttggcatttcctgagtttcactgttgaacctggggagtaatctgcctttcttctcaagctgcctttaggaatgctatttttcccactgggccctcataccaccatccatgtttgtaatgtctcttcctcacaaggcatctcttttatctctgcagaattctaactaacttctgcaggatctgttttccagttcccataggttctctcttgaggaatttatggctattnggctgtttaacatttccacggggggttttaacccaatgtttt

SEQ ID NO: 302302 - DNA, 444 bp, Homo Sapiens
  misc_feature (73)..(73): n is a, c, g, or t
  misc_feature (354)..(354): n is a, c, g, or t
  misc_feature (374)..(374): n is a, c, g, or t
  misc_feature (420)..(420): n is a, c, g, or t
tttttcttaatggctatttaatccttccatcccacgaaaaacagctgctgagtccaagggagcagcagagctnggtccggcaggcctgttgtggcctcgccacccccctcaccggaccgactgacctgtctttggaaccagaacatcccaagggaactccttcgcactggcgttgagtgggaccccgggatccaggctggcccagggcggcaccctcagggctgtgcgcttggagtgctaggtggaggcagcacagacgccacggtggcccaagagcccctttgcttcttgctgggggaccaggggctgtggtgctggcccactttccctcggccagggaatccagggtccttngggcccagggggtctttgtntttgttttcatttttaaggcaatttttcaccagagagatgaacagnacaagatttgtttttgggatagaa

SEQ ID NO: 302303 - DNA, 457 bp, Homo Sapiens
  misc_feature (367)..(367): n is a, c, g, or t
  misc_feature (387)..(387): n is a, c, g, or t
  misc_feature (413)..(413): n is a, c, g, or t
  misc_feature (432)..(432): n is a, c, g, or t
agttctttaaacagaaatacagttaactttactaacaacaatgaagcaacacataaagttctgaaaaggcagtcaggagtccccggagtgttaacagaaagaacacaggacttaaatacagaactcaggtccaaatagcagatcgaaccacctgccaggtagacggcatcaaaaaggtaatttaaattctctcattctgttttttcacttataaaattaggttaaaaaatagctgtcacagaaagcatggccagcaggtcctccacaggacctttccgttctgtgcctaaaattctgaactgtgttttacaataagcctggaaagttcgttcaccgcaatatagtatttggcaatccaaagtcaatntttccaacacaaattgggcngggcgggaagggggggagagtctttncgctaaggtctaggtaggngtctgacttctcactgggggctgtc

SEQ ID NO: 302304 - DNA, 407 bp, Homo Sapiens
  misc_feature (144)..(246): n is a, c, g, or t
gaccaagattcaggttggagatggacatagggtccgactccattgagtcacatgggctgcagtgagggagagaagagaactctgagtaaaatttaggtccttttttggaaggaagagttgaatatgtaggtcttctgtatcctnnnnnnnnnnnnnnnnnnnnnnnnnnnnnnnnnnnnnnnnnnnnnnnnnnnnnnnnnnnnnnnnnnnnnnnnnnnnnnnnnnnnnnnnnnnnnnnnnnnnnnntttgcaacttaggcagaattttcagctgtttaccccatggtttgggcttaaagacttgcaatttgagagacctgggatttccagtctggggtgtgccactaaccaactctaagtgaattatgcaacttacttcagcttctctaagttttcattttcccacc

SEQ ID NO: 302305 - DNA, 133 bp, Homo Sapiens
ttcactaaagaagaaattggcaagaggaaacctgtaaaggaaactacaattttatgttgttgatagtgaaatggaatggttctgaagtactgacccgtaagaaatagccctatgcactgattagtaaggagga

SEQ ID NO: 302306 - DNA, 374 bp, Homo Sapiens
  misc_feature (88)..(88): n is a, c, g, or t
  misc_feature (240)..(240): n is a, c, g, or t
  misc_feature (289)..(289): n is a, c, g, or t
  misc_feature (318)..(318): n is a, c, g, or t
  misc_feature (333)..(333): n is a, c, g, or t
  misc_feature (340)..(340): n is a, c, g, or t
ccaaagctgccagattacaacctctaatgaaaaataatcacctacatagactcttttaccatcatggacagagagccttggaaaaganagctctaaactcaactgctaacaggttgatgagtagaccctgaggaagtcccagtgtgtgtggcttctttgtccatgggattccgtggattacgggctgaggtggcttatgacacctctgcactgtaattgcatgaagttactgcacacatntgtttgtgtgaccacttgatcacatggagcttttcgagtgagggaggtnttggaaatatttttgacccttgaacaaancaggttttcaaactncactagntcatgtatacacggggttttttcaataatcatat

SEQ ID NO: 302307 - DNA, 161 bp, Homo Sapiens
  misc_feature (66)..(66): n is a, c, g, or t
  misc_feature (118)..(118): n is a, c, g, or t
  misc_feature (128)..(128): n is a, c, g, or t
  misc_feature (142)..(142): n is a, c, g, or t
ctacgtcactctaaaatgttacaaataggtcatcttcttagtatgcattgccttgtaaaaacattngtcaagtcgggatgtagtcggccaccaactagaaatgtgttaagattttttntgcagacttncttaataaggcaangagggggtcaggttgttct

SEQ ID NO: 302308 - DNA, 281 bp, Homo Sapiens
  misc_feature (50)..(50): n is a, c, g, or t
  misc_feature (61)..(61): n is a, c, g, or t
  misc_feature (195)..(195): n is a, c, g, or t
  misc_feature (237)..(237): n is a, c, g, or t
  misc_feature (253)..(253): n is a, c, g, or t
  misc_feature (271)..(271): n is a, c, g, or t
gtgtaccaagaagagggtcactttttccccttcatcctgcacctatcacnctccactgctnataccgctaagctctttcatcatccgacattgacttgtaatttaacagaggccatgtgctaagcaggacattgcagtattggctggccagtttgactcagctgtcttcccactgcaagtcaattgtttttgccnaaaattatttcagcaagctttgtgctgtaatctgtgtcacantttttgggccagtttngttaatgtaagtgctccntggtagtagg

SEQ ID NO: 302309 - DNA, 344 bp, Homo Sapiens
  misc_feature (97)..(97): n is a, c, g, or t
  misc_feature (160)..(160): n is a, c, g, or t
  misc_feature (210)..(210): n is a, c, g, or t
  misc_feature (232)..(232): n is a, c, g, or t
cgcctgtccctgctaaaatcagagctttgtgagggcagagatggattctgtgcacaggtatcttctgagtctctgattcagtgcctgaaacacagtngctcccgagacaatctacctcagtgcctgttttacaggcttcacctgtgacacatgactgggncatatgttattcatgatgacatgcaagagtctctgtgtaggtgtctactngtcttcatcatcaaacagagcnagaactccaagtcaggaggcagacatatctttggggcaagaagacacctagaaattttttcttcaacccgtagactttcggatttgggtagaaggatttgtttaaggaggtt

SEQ ID NO: 302310 - DNA, 192 bp, Homo Sapiens
  misc_feature (108)..(108): n is a, c, g, or t
  misc_feature (132)..(132): n is a, c, g, or t
  misc_feature (162)..(162): n is a, c, g, or t
atgagccaccatgcaggaccacacatttgtacttataattttattttcagtacactcttggggaaaagatgacagaccttcacttgatcaataatgaaattgaggctncagtttggctaaggtaggtttgtnctaaatgggcccgttcactaggcaacttgnattcaaaatctctggatggattttgtaatt

SEQ ID NO: 302311 - DNA, 501 bp, Homo Sapiens
  misc_feature (45)..(45): n is a, c, g, or t
  misc_feature (49)..(49): n is a, c, g, or t
  misc_feature (138)..(138): n is a, c, g, or t
  misc_feature (374)..(374): n is a, c, g, or t
  misc_feature (471)..(471): n is a, c, g, or t
  misc_feature (477)..(477): n is a, c, g, or t
ttgccaacctaagagtttgttccttgaagcaagaagtttgtccantggnttttaaaacatcttaaaacaacatgaatggcaggatactgatgtttccatgtgagaaccttcagggcatatcaaagaaccataccaggntggaactgaggcaggaaccatactctttaagaagacaacgccagttctggatttcaaattccagttttgcccagaagcaccaagaggaaagaaggcaatgctgctacgtcacaggtggagagaagcgcaagagtccttgatggatgggtataaaaatgggagcagccaagatgaacattgctttccccacaccccactgctccctgaagccagaccccgttgctctgggaggggcnggggcactttcttcacagggcagggagttcctttgccccacagataggagccaccagaaacttgcaggaaggaggctaagggcgagtgggtttagtnggtttnattgaaagaacggtttttttgggt

SEQ ID NO: 302312 - DNA, 408 bp, Homo Sapiens
  misc_feature (55)..(55): n is a, c, g, or t
  misc_feature (88)..(89): n is a, c, g, or t
  misc_feature (182)..(182): n is a, c, g, or t
  misc_feature (209)..(209): n is a, c, g, or t
  misc_feature (214)..(214): n is a, c, g, or t
  misc_feature (233)..(233): n is a, c, g, or t
  misc_feature (291)..(291): n is a, c, g, or t
  misc_feature (333)..(333): n is a, c, g, or t
  misc_feature (345)..(345): n is a, c, g, or t
tttatcaacccagaatctataatgtatgaaataaattaatagagaacccaacagntcatgttatgttgtaaatataacatctatcttnnggttaaagtaacatagcaaaattatatatttatgggtgcaggacacatacataatttgtaccaatctcacagacctaattcaattcaaaccancaaaaacttactctattatctaatggntgcantaaaaattaaccatttganggtaagttctcttgcacttcccctacttacgtttttccgggcacctgctatactgtgnatgtatttcttcaccgctttactgcctgactcccctactagntcataggttccnaggggggcaagccctctggaaacactgctatggtctccggcacctgggactgggcctgtggtg

SEQ ID NO: 302313 - DNA, 453 bp, Homo Sapiens
  misc_feature (330)..(330): n is a, c, g, or t
  misc_feature (338)..(338): n is a, c, g, or t
  misc_feature (409)..(409): n is a, c, g, or t
  misc_feature (434)..(434): n is a, c, g, or t
tattgattaaatgcttttgttcacagaacatatctgcctaaacttaaaaccagaaaagtccttttacaaggtcagattattgttgcacagtcatagtatttttttaaaatacaattacaaagcaagtacatgctagcactatcaaagaccccacgaaacagaaaactcactaacaaccacattgaaaatgtacaacagcaatgtcttgtcaacacttctgtacagaggcacagacatgacagctaaaacagacaggaaaagaaggatgcttttgacagccagtgtgtgtgaatgattctttgaggtcagatgggcggcaacaagttaccnactagggngatctgcatggacaactaaccatccatctggtattcaaacaccatctgggcccaggtggactctgggcttnctgtgtatttggacactccttcccnttttccaagggttgggcaa

SEQ ID NO: 302314 - DNA, 467 bp, Homo Sapiens
  misc_feature (212)..(212): n is a, c, g, or t
  misc_feature (236)..(236): n is a, c, g, or t
  misc_feature (365)..(365): n is a, c, g, or t
  misc_feature (373)..(373): n is a, c, g, or t
  misc_feature (401)..(401): n is a, c, g, or t
  misc_feature (408)..(408): n is a, c, g, or t
  misc_feature (416)..(416): n is a, c, g, or t
  misc_feature (426)..(426): n is a, c, g, or t
gacacaaacacagttcactgcagtctcaacctcctggggtcaagccatcctcctacacagcctcctgagtagccaggactacaggtgtacactaccacgcccagctaatttttatagagacggagttttgccacgttgtccaggctagtcttaaacacttcgctcaggccatccacccatcttggcctcctaaagtcctaggattacaggtntgagccaccatacccggccaaaantaagtcttcaaaacatatttcatgctctgtccagtcaagttagtgtttatcaatacaggtatctggacaaactctgaatttattaggtccattatctcagtttcaaaggagggaaatgggacaaaaganttaaaaantatacagctctgaggaacagggcccttngggggtntaaaaagnctctaaaggnattctaattcctatggtttctggacataaaggggtgaggtt

SEQ ID NO: 302315 - DNA, 126 bp, Homo Sapiens
  misc_feature (103)..(103): n is a, c, g, or t
accacacccagccaaaattctattttcttgggttagtaacttatgaatgtataaacaaaaattgaggcaaacaagtttgataaagggtaaatttatggaaatnctatatcccggctattatggcta

SEQ ID NO: 302316 - DNA, 147 bp, Homo Sapiens
  misc_feature (27)..(27): n is a, c, g, or t
  misc_feature (57)..(57): n is a, c, g, or t
  misc_feature (91)..(91): n is a, c, g, or t
  misc_feature (135)..(135): n is a, c, g, or t
tgtcgtgcaggtagagttttaaggcanggagtgacgcgcccagggctcgcagctggnccagtatagaagagtcaacccaacctctttgcangacttgaaacactggtgcaatgccagcctgctagggcgccaganccagggggctgg

SEQ ID NO: 302317 - DNA, 145 bp, Homo Sapiens
  misc_feature (48)..(48): n is a, c, g, or t
  misc_feature (85)..(85): n is a, c, g, or t
  misc_feature (92)..(92): n is a, c, g, or t
  misc_feature (104)..(104): n is a, c, g, or t
  misc_feature (118)..(118): n is a, c, g, or t
ttgtttttttatatattcttacactttattgagacgagggtttgctangtcacccggggcagtcttgaacttttgggggttaagngatcccnttaacctggggntcccaaagtgctangggttacaaggatggggccactttaat

SEQ ID NO: 302318 - DNA, 135 bp, Homo Sapiens
  misc_feature (93)..(93): n is a, c, g, or t
  misc_feature (109)..(109): n is a, c, g, or t
  misc_feature (114)..(114): n is a, c, g, or t
tacacatccacaatctgggttaaaacttctcggggaataaacataattaatcgttgggcgaacacatttcacataaagtgcttgtggtttccnactttcagcacaggcnggtcntctccagggtttcttggcccc

SEQ ID NO: 302319 - DNA, 324 bp, Homo Sapiens
  misc_feature (290)..(290): n is a, c, g, or t
ttacatgtttcattcagttcccttatgagctcttaaactctgtatcatctactcaagaacaatgacatgttttgagcacttttatgtgtcaagtactggggaaacagattggacatgatatctactctcagaatttcacagactagaaggagacaagttcaatgagatgtgttaagttctgttgcaatattatagtattataagaatattacaagtatataatagagacagaaaagtagtagttggggagtaattagcatgaccatataatttatcacttgagaataganatgggtgctcttaaaaaggggtgctgcaacaata

SEQ ID NO: 302320 - DNA, 118 bp, Homo Sapiens
  misc_feature (57)..(57): n is a, c, g, or t
aattgttggcctcttctatgcttaagagcttttccaatctcaaaacagttgaccttngggagtgcatatccgagaatgcagtgatcactggcttattcctgacgaacaggtagtattt

SEQ ID NO: 302321 - DNA, 106 bp, Homo Sapiens
  misc_feature (57)..(57): n is a, c, g, or t
  misc_feature (96)..(96): n is a, c, g, or t
tcaaaatcctgatgtttaaaacattgggagtagtaaaaaatctattcataatgtccnacatttatcaaaaataggtaaacaggggtttaaaagggngtcaacattg

SEQ ID NO: 302322 - DNA, 498 bp, Homo Sapiens
  misc_feature (129)..(129): n is a, c, g, or t
  misc_feature (446)..(446): n is a, c, g, or t
  misc_feature (454)..(454): n is a, c, g, or t
  misc_feature (460)..(460): n is a, c, g, or t
  misc_feature (480)..(480): n is a, c, g, or t
aaatattgctacctgatcctttctctggaagctacatctcagaggggcacccacctgtatgaggtgtctgtcagcccctactgggaggtgtcttccagttaggctacacggggctcagagacccacttnaggaggcagtctgttcgttctcagagctgaaatgaaatgctgggagaaccactgctctctttagagctatcagacagggacgtttaagtctgcagaagtttctgctgccttttgttcagctatgccctccccacagaggtggagtttgtagaggcagtaggccttgctgagctgcggtgggctccacccagttcgagcttcccagccacttcgtttacctattcaagcctcagcaatggtggacgccccttcccgcaccagggtgcagcttcgcaggttgattttcagactgctgcgttaattagtgagcaagggtncatgggtnttgganctgccgagccagggattggnagagaattttcttggttt

SEQ ID NO: 302323 - DNA, 409 bp, Homo Sapiens
  misc_feature (81)..(81): n is a, c, g, or t
  misc_feature (317)..(317): n is a, c, g, or t
  misc_feature (340)..(340): n is a, c, g, or t
  misc_feature (363)..(363): n is a, c, g, or t
  misc_feature (376)..(376): n is a, c, g, or t
aaaccagcacaccctagtcactctgaccagcagcagcacagatccccaagtcccccttctgttcctgcagcctatgccttntggcccagattagttcccagttgctgcctggggtgctctagcattgccttgtagggtgcacaggactgtggaaaggcgggaaagggacaattagagtcatctccacttcatgcttacagcactctcactagatttcaagtggaagcctagaaggtatgttagttactttggaacacccactctgtggaacgtgaaagaggtatttctgcagctcactgatagggaaatgtgctaancaaaactaaccagatctcttgtnaaagcaggaactttttcagagtncccgtttgcgttnattacaggggaacttgttacgaggggctatttt

SEQ ID NO: 302324 - DNA, 410 bp, Homo Sapiens
  misc_feature (136)..(136): n is a, c, g, or t
ttcctgagaccacttaatttcagctctcacttcccacccccttgaaatatccatggataatctacgcacaagtcaccaaggactccccaagccaagaacattgggatcaaactggtcagagttaaactaaccaggnttcttctggctctgctctgcccagccccattggcaccctcaaatcaaagaaatcttcacttccccataattcctccctactagttgacattcatttcctgaattcttcctctccattctcgggttaagagaagggaactaaaagtctttcactcacaaatgaattatgttatttggggtgtatttcatgtattattgcccgatggtctaaaatcccactaggggacagggctgggatataaaatatccaattacatttaaatacagacgtgata

SEQ ID NO: 302325 - DNA, 245 bp, Homo Sapiens
  misc_feature (136)..(136): n is a, c, g, or t
  misc_feature (149)..(149): n is a, c, g, or t
  misc_feature (177)..(177): n is a, c, g, or t
gcagtctagcagggaagctgatgatgactcatagtgtagtaaatgccgtaatatcctcaaagtgaaaaggagaaaacatacagtttttccagggcctgcctcacaggaagggtactatttgtgctgtctttaaggnttataacataggntttacggagggactataaggagagagantattctaggggatttctattcaggtattactgtaaaaagtccattttcaccatatgttgctatgcagt

SEQ ID NO: 302326 - DNA, 263 bp, Homo Sapiens
  misc_feature (229)..(229): n is a, c, g, or t
ttgaaacctcttgggctcagacagtccacctaccttggcttcttaaagtactgggattataggcatgagccaccttgcccagcctgttttttctatctctgtgaaaaatgtcattggtattttgatagggattacgttgaatctacagactgctttgggcaatatgaacattttcacaatattgattcttttagttcatgaacgtgaaatatctttccattttttgggngtcttccctcaatttctttcatgaggtgttttat

SEQ ID NO: 302327 - DNA, 290 bp, Homo Sapiens
  misc_feature (88)..(88): n is a, c, g, or t
  misc_feature (140)..(140): n is a, c, g, or t
  misc_feature (239)..(239): n is a, c, g, or t
ttgttgcagtgtgaaatctgaaaccgtatcccagaacacccgttccattaaaatcattggtctatcttagcttttaaatgtatgtttnacccatgcatacttttgtagtatatatactagttatgtggaaaatactagtntcactgaattacacaggtcttccaaatggtgacataattcattacacaatattttaaaaatcattatttatgaacaccaccacccatcagaaaactctnattcaaaagctgccaagatcacggtggcaaatgagttttccaaaattctaa

SEQ ID NO: 302328 - DNA, 196 bp, Homo Sapiens
  misc_feature (64)..(64): n is a, c, g, or t
  misc_feature (181)..(181): n is a, c, g, or t
aaaaaaagtaagagccatgcatgggtacaaaatgctgtagggaattctgtaggtcctcagggantaacacacaaaggggcagcatggggactggcatctaggacaggatacaaaaatttgggatgggggcattggatactgggcaacaggaggtattcttggccaggggctggcaaatatnactttctaggacaat

SEQ ID NO: 302329 - DNA, 200 bp, Homo Sapiens
  misc_feature (11)..(11): n is a, c, g, or t
tagcatttccngcccccaagaatccctcttcctgtcctcttccagtaactgctcccttcctctctcaggggtaatcactatcccaacttgtaccatcacagattacttacaatttttttcttcttagatgtttttctactttttaattgaagtatgacttagtttactgcaaacatttcaagtgtgtactttggtagatt

SEQ ID NO: 302330 - DNA, 235 bp, Homo Sapiens
  misc_feature (60)..(60): n is a, c, g, or t
  misc_feature (109)..(109): n is a, c, g, or t
tgaggatatgggcttaaagatattgagctatgtgcccaagattgccacagctcatgagtnccaaagtcagaaatttcctaaattggatccttaatcaccagacatggtncttaattaccatgctggacaggattctgttacttgaaaacctgtgtagctctcagaccactggctgtgcacagtaggcacttaaatatttaatttgaggtttatgattcttgctgattttcagagt

SEQ ID NO: 302331 - DNA, 402 bp, Homo Sapiens
  misc_feature (293)..(293): n is a, c, g, or t
  misc_feature (320)..(320): n is a, c, g, or t
  misc_feature (380)..(380): n is a, c, g, or t
aacaatgtgagatggagattctgtgtccgtgttctcattttctgggagagctgagtgacaagagaagagttagggacagagaagaccaatgacttctcttacactgacagccccagttgggaaacactgtaataactgccagttttactttcctggacaaagccacttgagaattctgcagcccaagaattattttactcactgactccaccaaaacccaggtagaacacaaacagtgaccccagtgcaaaacctgtgtgtacgttatatacctgcatgcatgcatccacttntacatcccagcctctgtgttgcaactncctggggtctctggtcattccagagtaactcttgaagttctcaaaagcccttaacctctnaaatttaatttctaaatgtagt

SEQ ID NO: 302332 - DNA, 479 bp, Homo Sapiens
  misc_feature (157)..(157): n is a, c, g, or t
  misc_feature (236)..(245): n is a, c, g, or t
  misc_feature (367)..(367): n is a, c, g, or t
  misc_feature (418)..(418): n is a, c, g, or t
aaataaatattgtaaatttttaatagtgactttaggaagcaacataataaatttgcttcataacattgcaatatgagagcacatactcatttgggttaagaaatttaggaaaagtaaagtttcctagcataaattcttctttttaaaaaaataatanttttatttgcctttgacagagttttttatggtgctgtcctgtcttaaacctattatgctgagctcaatttgaaccttannnnnnnnnngaatacagaaacatcattatgaatacaaattgttggactttgctactatacatgagccctcagaaattgcagaggtgtatacagtattttaccactaaatagcccaggattgggccattttngtatctttctgtgtacccgcatttgctgccgctttggaatttgttgtgggngaatcctttggccgcatttttacatttcactcgttgaagtgtgagcctcagggtgtttcca

SEQ ID NO: 302333 - DNA, 363 bp, Homo Sapiens
  misc_feature (138)..(182): n is a, c, g, or t
  misc_feature (284)..(284): n is a, c, g, or t
  misc_feature (299)..(299): n is a, c, g, or t
  misc_feature (337)..(337): n is a, c, g, or t
  misc_feature (345)..(345): n is a, c, g, or t
agcaatattcccacctcaaccttttcagtagctgggattacaggtgtgcaccactgtgcccagcctaatgtttgtattcttttgtagaaatgaggttttgccaagttgctcaggcaggactcgaactcctgggctgannnnnnnnnnnnnnnnnnnnnnnnnnnnnnnnnnnnnnnnnnnnntgagccaccacacctgggcccatcattgaatttaatgtatgacatatcactgtctactatcttgtattcatcaggttttatacaatgacacaaagggcgccngggcttgggttgccnggaaattattggcttttatttgttaacccctctggggntgtctggntaggcggtttaaaccggg

SEQ ID NO: 302334 - DNA, 334 bp, Homo Sapiens
  misc_feature (137)..(209): n is a, c, g, or t
  misc_feature (224)..(224): n is a, c, g, or t
  misc_feature (241)..(241): n is a, c, g, or t
  misc_feature (291)..(291): n is a, c, g, or t
  misc_feature (322)..(322): n is a, c, g, or t
taataacctgtagcttctcaccattttgtttctcatttcacctgttcctcttctgataaattgtcaaatatctaagcaaactacagggatgagcaaacttaaatatggaacacctgagcttcacaaactaccacccnnnnnnnnnnnnnnnnnnnnnnnnnnnnnnnnnnnnnnnnnnnnnnnnnnnnnnnnnnnnnnnnnnnnnnnnncctgccatggaccangatggttactgtggaanttctagttaggcacatgtaaaatgcataatgtataggtaggcccaggcanttcttcactaaatatccattttttaaaaaantcaggacattcc

SEQ ID NO: 302335 - DNA, 363 bp, Homo Sapiens
  misc_feature (76)..(76): n is a, c, g, or t
  misc_feature (113)..(113): n is a, c, g, or t
  misc_feature (301)..(301): n is a, c, g, or t
  misc_feature (307)..(307): n is a, c, g, or t
  misc_feature (321)..(321): n is a, c, g, or t
  misc_feature (337)..(337): n is a, c, g, or t
tccttaagcaaatgaattttcttgtcactacttctgcctgtccgctgctgtgttcccagttagcgagtttcaggantctggcatcatctttgagtccttccttaaatccagtngcctgaaccttcctaaattcttgaatactgtcatttcctatgcctgccctatttaggacctgactgcctcactcctggtcttttgacccctagtctctccccattctctccccaaatgctgactgaatacccaccacatgccaccctggtccatactgtatatactgacatgcggaggaagcttcctnaatcantttctgatccaatncttgcaccatctgctncagaaatattcgtgcattcttcattg

SEQ ID NO: 302336 - DNA, 408 bp, Homo Sapiens
  misc_feature (85)..(122): n is a, c, g, or t
  misc_feature (275)..(275): n is a, c, g, or t
  misc_feature (292)..(292): n is a, c, g, or t
  misc_feature (322)..(322): n is a, c, g, or t
  misc_feature (360)..(360): n is a, c, g, or t
  misc_feature (379)..(379): n is a, c, g, or t
taatgcaggaaaggcaagactttgaatctaccgatgagaccagagaagtgaagtaactttattatgtcacccacctgattaagannnnnnnnnnnnnnnnnnnnnnnnnnnnnnnnnnnnnntttggagtccctcagcagaaacattgccaggcaggggacaaagtcaggcagttttcaataaatgaagagggtgaagcaatgacactgacaatccaaaggtcatatccattttgctttcaaatttcattttgggaaaacacttaacaccttccnaagtacacgcaacaggnaataggcattaagggtgagttttatctgancacaaggttaacctctggctgaacatgctggggtggcntgggccaaattcagtttcnggtttaatttttgggtttgtttttcccaa

SEQ ID NO: 302337 - DNA, 413 bp, Homo Sapiens
  misc_feature (19)..(19): n is a, c, g, or t
  misc_feature (300)..(300): n is a, c, g, or t
  misc_feature (352)..(352): n is a, c, g, or t
  misc_feature (380)..(380): n is a, c, g, or t
gtgtgacaggtactctggnaggtcttggaggtataacaatggacaaaatatacagagtccctcatcttatgatgcttacatagtagaaggaggccggtcacaaataaacaagtaaacagacatatgaataataaggcatttatcagtactaatgcagaaatgcaaatcagagtaaagagttaaagattaatgggctgagtgttttagacagttatgagggaaggcctgtctgatgacacttgagcagatgtgggtggtgggaaagggagacattcaagtttttgcagaacaggcattccngactgagctaacagcaaacgcaaagaccctgaggtgaaagtatgtttggggntgttttgatgaacaactctcagggtccngggtcaaccacaggttcacacccattcaggttt

SEQ ID NO: 302338 - DNA, 345 bp, Homo Sapiens
  misc_feature (102)..(102): n is a, c, g, or t
  misc_feature (174)..(174): n is a, c, g, or t
  misc_feature (322)..(322): n is a, c, g, or t
  misc_feature (329)..(329): n is a, c, g, or t
ttctagtagaagagatgtatttatttcagcaaaattataaagtaaaaaatcaaagaaacaataatatttggcactcgctgagacataattttgtaaagaagnaaacagtaatcagcataagtataatgaattataaagatctattgatcttttaatgggggcaaataaccagangaaacacaaaaagacttaaaatacagcatcattgtcacatctcatggaaacattcccataaaaaattaacaatttccacttggaacatgtatttcagccctctttgaacttattctgaaatcttgatgctctactgacgtttataggnctagccnttttctcactccctgg

SEQ ID NO: 302339 - DNA, 145 bp, Homo Sapiens
  misc_feature (109)..(109): n is a, c, g, or t
tgaaccaccgcacctaggctcattaatttttcatgttattaatatttggtaacatggcaataaaacactaaaagcttttttgttttgaggggtaattagggaaaatccntttccttacattaaggcaaaacagggctttattcgg

SEQ ID NO: 302340 - DNA, 203 bp, Homo Sapiens
  misc_feature (99)..(99): n is a, c, g, or t
  misc_feature (118)..(118): n is a, c, g, or t
  misc_feature (154)..(154): n is a, c, g, or t
  misc_feature (187)..(187): n is a, c, g, or t
ggcgtgacaacttgcgccgggccttgtagggacctaatttttaaagactattgtacggtttatgggtttttatttttaatgaaactattatgttagggnaattgatcataatttgggncatttacttgaaaggaaacaggcaacagggtaaccntttgaaaactactgggaagggggaatccatctnttccctttcaacattt

SEQ ID NO: 302341 - DNA, 199 bp, Homo Sapiens
  misc_feature (22)..(22): n is a, c, g, or t
  misc_feature (35)..(35): n is a, c, g, or t
  misc_feature (45)..(45): n is a, c, g, or t
  misc_feature (56)..(56): n is a, c, g, or t
  misc_feature (62)..(62): n is a, c, g, or t
  misc_feature (84)..(84): n is a, c, g, or t
  misc_feature (131)..(131): n is a, c, g, or t
  misc_feature (136)..(136): n is a, c, g, or t
  misc_feature (146)..(146): n is a, c, g, or t
  misc_feature (148)..(148): n is a, c, g, or t
  misc_feature (184)..(184): n is a, c, g, or t
ggggggacaagacccaaacccnccccacaccaggnaaagcagaangggacaggagngggcanggggccgggcccacggcccaancccccagggcccgaggggagaccacccgcggaggaaaaccaaccccnaggcnaccacccggnanccaccaggggaggggaaaaaaccccacaggcaaganggaaccccggccccc

SEQ ID NO: 302342 - DNA, 125 bp, Homo Sapiens
  misc_feature (20)..(20): n is a, c, g, or t
  misc_feature (63)..(63): n is a, c, g, or t
  misc_feature (105)..(105): n is a, c, g, or t
gttattagatacggtcagantcttcataatcattgagtctctctgtgaaacctacagcagctntcggcattcaccttcatagctgttagcttcagagttaaggantgtacattagagttacctta

SEQ ID NO: 302343 - DNA, 321 bp, Homo Sapiens
  misc_feature (24)..(24): n is a, c, g, or t
  misc_feature (28)..(28): n is a, c, g, or t
  misc_feature (41)..(41): n is a, c, g, or t
  misc_feature (44)..(44): n is a, c, g, or t
  misc_feature (48)..(80): n is a, c, g, or t
  misc_feature (88)..(88): n is a, c, g, or t
  misc_feature (115)..(115): n is a, c, g, or t
  misc_feature (224)..(224): n is a, c, g, or t
  misc_feature (237)..(237): n is a, c, g, or t
  misc_feature (249)..(249): n is a, c, g, or t
  misc_feature (260)..(260): n is a, c, g, or t
  misc_feature (279)..(279): n is a, c, g, or t
cccatgttgcctacgctggtcgcnaatncctgacctcaagngancctnnnnnnnnnnnnnnnnnnnnnnnnnnnnnnnnnagcgtgancaccatgcctggcccagaatttatttnaacatacagataactgtttgaatattgaaaaaatatatttagctctgcctaaagtttgagaagagtttgctttctacagcaatttctagacaggattgaacattatttnacatcaaaaaggnttactaaacagntgaggtaaaanccaaatgtcactgtcagantaaacacttttcattctttcagcccaaaaccgggggatcaaa

SEQ ID NO: 302344 - DNA, 364 bp, Homo Sapiens
  misc_feature (279)..(279): n is a, c, g, or t
  misc_feature (328)..(328): n is a, c, g, or t
  misc_feature (351)..(351): n is a, c, g, or t
tcattcaccagccatgtgaggacctatacgaaacaccagagatctggtgatgaataagagaagaaatggtttctgcctttgcattacctatagcatccaaagtctaatctgaatcacttaagaatttcagaataccctaaaagtacaaaatttcaatttagaatacaatgaaactcaaaatatactccatgaccttactacaaataaaaaagcacctgtttaatattttctcaaaagtgacataaacatctcccaataaatcatggttttgtgagtttnagttttatgggcttgccagtggttcctcctctgagttagtagttcagcntataacagtacatttggatgttnctctttggctttt

SEQ ID NO: 302345 - DNA, 430 bp, Homo Sapiens
  misc_feature (92)..(92): n is a, c, g, or t
  misc_feature (353)..(353): n is a, c, g, or t
  misc_feature (379)..(379): n is a, c, g, or t
  misc_feature (384)..(384): n is a, c, g, or t
  misc_feature (403)..(403): n is a, c, g, or t
  misc_feature (408)..(408): n is a, c, g, or t
gtaaaatcattttattctatttgagatacaatgttaaatatgtttgtttctatgagttagctcccattgatgaattctgatgagttcctggntacagtagagtaattcttctggaaacaacaagtttggcatgaggagaagagtctaaggggaatgtaagagagttgaatggaatgttttggtccctgaggggttatgagttcctaaaaatactagggctaaaatatgctataaaaagctctagagggcagggtgctatacccacacctgcataaaatgggatttgcccatgtctaaccaaaggttattaccatcatcactgggattattctctaaaactacatttcttttcnttttactaggataggattacagctanttccngctttaaaggacaggttanttggnattaggaaacatatcccatttc

SEQ ID NO: 302346 - DNA, 352 bp, Homo Sapiens
aaacaaacttgattctggcaatagagggatagaggattaattctttgaagtttttgacatataaaagggattgtggggtctccttttattggaaagacagagaattaacaccttaactgaatccatattgtaataaaccctaggacttggaaacaatgttgcaaatattaagtatcgtataaatttatctctatggaaaacatcttcaacttcattaaatgttctgtatgatgccacttatctatttcatgcacccccataccttctccaaaagttctctagacaatgttgcactgagaccacagagatgggcatttttaatgtcaaaacaaaataacgtagccaggaaacc

SEQ ID NO: 302347 - DNA, 361 bp, Homo Sapiens
  misc_feature (260)..(260): n is a, c, g, or t
  misc_feature (309)..(309): n is a, c, g, or t
  misc_feature (324)..(324): n is a, c, g, or t
  misc_feature (338)..(338): n is a, c, g, or t
acacacaacatatccactctaataattctgggtcgtatccctggattatggatccctgtcaatttgtgcaaaccttgggctgccacccctgctttacattttgtaaaactccttcttacccagctcactcatcgtgcacgtaaagccttaaacatagtaatttttactgtaatctccttagtcacactaataacctcggttgtagtgtcctcagtagcactacatagttctattcaaacagcccaatatgtagaaaattngacatgtacagccaaccagggatgggatgcttcaaaataaaattaatanccgaattacaaacanaggtagcaatgttnaagggtacttgtttctgtggctg

SEQ ID NO: 302348 - DNA, 146 bp, Homo Sapiens
  misc_feature (15)..(15): n is a, c, g, or t
  misc_feature (21)..(21): n is a, c, g, or t
  misc_feature (42)..(42): n is a, c, g, or t
  misc_feature (49)..(49): n is a, c, g, or t
  misc_feature (54)..(54): n is a, c, g, or t
  misc_feature (62)..(62): n is a, c, g, or t
  misc_feature (98)..(98): n is a, c, g, or t
  misc_feature (101)..(101): n is a, c, g, or t
  misc_feature (103)..(103): n is a, c, g, or t
  misc_feature (106)..(106): n is a, c, g, or t
  misc_feature (117)..(118): n is a, c, g, or t
cagaaccgagccccncggaanggaccaccccaaagagccagnagcagcngccangcaaaggnccaaggcccgagccaaaacccgggcaacaccccagnggngnggnagggcacgggnnccagcgcgggcgcaagaaagaacaggaa

SEQ ID NO: 302349 - DNA, 422 bp, Homo Sapiens
  misc_feature (349)..(349): n is a, c, g, or t
  misc_feature (380)..(380): n is a, c, g, or t
  misc_feature (391)..(391): n is a, c, g, or t
gaaatgcatctcttaaataagttatctctgttggtgtcctaaggtttattacacctttctacctcagcagggcagcacaatgtagtaagatttaggatgtgccaggggggagaggagccattatgaaatgccaggtgggcctggactgcaggagtcctcagacagatcacttttagaagagttgggatctgaaaactgaatcccttgaaactcctcatgaccacgtgtccatattctcagggatacgcatgcctccatttgaagattgtttttacagaaataattgggggtaagggaaagggagacaagggtgctaggggattgagtctgggaaagatagggcaagganccagatggacagcaggggtttttgggggggncacataagggnttttaggaattttattccccaaagggcccag

SEQ ID NO: 302350 - DNA, 385 bp, Homo Sapiens
  misc_feature (367)..(367): n is a, c, g, or t
aaccaccattcctggtgataggatagagcccagcacaaactaatctgggcaacaaatcaaagggcacaagtcgcatgtaggttccaaactcagtacattttagagaaaaggagtttgattatgtagtagaaggaagaactgcctgggtgggactcatgatcttcctttaagagcaaggctcaaagacctgggggagttttgatttgatgctatgatgtctcctgggggctcagaatattatgaaatgagggagtgaatctctgaggtgaaaagaacttcaagctgcttgttgcattgcgggaatgttcttctaagggggtaggagaggcgtctgtttaagtgggcttgtattgaaggtttttccagnaggttaaggttgaggccc

SEQ ID NO: 302351 - DNA, 400 bp, Homo Sapiens
  misc_feature (372)..(372): n is a, c, g, or t
tctcctctccttttcactggaagttccctccacttccttgccctaactgaatgccagcaaatcccctgtgagcacttgccatcaagcagaaggtatttattttcacacattcttaaaagctcacacctggcatgtgaagtgggcaacttcctgctttccacaggcgctacacgcgtcattacctctccgttactcctctagaaggtttcactacttgagatccattccattaacatttaacactttgctccctcatcattactggcttttactgaactccttgtcatttcctttctgttattgatgttttaaagacctggggtcacgatctcctcatcacacttttcatgacaggatgttggagttattttnaatattttacaagaacagtcctccgata

SEQ ID NO: 302352 - DNA, 447 bp, Homo Sapiens
  misc_feature (19)..(19): n is a, c, g, or t
  misc_feature (21)..(21): n is a, c, g, or t
  misc_feature (295)..(295): n is a, c, g, or t
  misc_feature (423)..(423): n is a, c, g, or t
tttccagccagacacaganantaagtttgggtacaactggggacaagatacacgtgcagcccttatcaagtggcttacagatctaacaagtcagtgtaataaaatgctacctgcactggcacataaatatagatgtgatactgagagtccaaaggaagaggtcatcaattctggagaggaggtaatcaggaaaagcttcatagaagaggtagcttttgagccaggtcttaacaaatgagcaagtatctaccaaaccaggggaggtacagatagggcagcattccagggcacaganaacaaccaaacaagggcacaacggcattttggggaaatgcaaggaagttcagcctgggctggggaagcacactgggataggggaatggggacaacggttgaagccagattttcaaaggacgctttgantgtattgcgttgttgaggggtttt

SEQ ID NO: 302353 - DNA, 419 bp, Homo Sapiens
  misc_feature (377)..(377): n is a, c, g, or t
  misc_feature (396)..(396): n is a, c, g, or t
  misc_feature (404)..(404): n is a, c, g, or t
aataagtaaagcatttacaagacacaaaatccaaaaggtatacaaagttttccaatgaagactgccaaccctcatgtccccagacccctgtttctcctccctgggacacagttgttgcaggtttcttgctccttcttcctgaaagagtctgtgcattattgaaaagaagatgtgtgtccatgagtacatctacagacgagtgttgagcacctgttgtgcacagtggtgggggcagtgtgatgggagtacacagggcagggagacacgggtctgggctcccctgaagtttgcagccgtattaagggctcggccttacagtgcgtgggggcctcggcttcagagggaagggctgatcttggggctggctgctgcttganttgggagtacctgcctccntttgggcntcctgttgaggcagc

SEQ ID NO: 302354 - DNA, 323 bp, Homo Sapiens
  misc_feature (94)..(94): n is a, c, g, or t
  misc_feature (107)..(107): n is a, c, g, or t
  misc_feature (131)..(131): n is a, c, g, or t
  misc_feature (186)..(186): n is a, c, g, or t
  misc_feature (215)..(215): n is a, c, g, or t
  misc_feature (311)..(311): n is a, c, g, or t
atattatggtaactgacacacacttaaggtgttggatgcctgccccatcacgctgcactgtctgctgtcacatgtgtcctgaactcaccctgtntttcccctgggtntcccggataccaagcccctgaggntggagatgatgcaacaaacctcagctttgcttggattgtgacttgaaccctattnctcaatggtgaaaggctagcctgcaatanaagctgcttttaaaacagaagtaaagcagctttatatatgggactcactagatatgagggtaagtagccccaccacatgtaaaacttggtcctcanacgtttctgcag

SEQ ID NO: 302355 - DNA, 262 bp, Homo Sapiens
agagctagatgagcaagatgcatctgcttggtctctctgtctcctccattgcccctctcaaggccattttccactgagctgtagagccattcgtttatagccctgcttagccccctcaagtggccccctgttttgtctgtacaaatgaagtccaaattcctcagcacgcatacagtcaagcgtctttgagatctggcttcaccgttgtcccattccctatccagtgtgcttcccagccaggctgaacttcttgcatttccaa

SEQ ID NO: 302356 - DNA, 247 bp, Homo Sapiens
  misc_feature (72)..(72): n is a, c, g, or t
  misc_feature (121)..(121): n is a, c, g, or t
  misc_feature (141)..(141): n is a, c, g, or t
  misc_feature (215)..(215): n is a, c, g, or t
catatctcttagtgtctccagagctgcagtacaagttggggggatggactgtaaaagccagaaatcccaagncacaagcacgctgcaggtagcaaccccacacccagcaaaacaccgcttnttcctgcccactttcccctntgcgccaactgtacacaccataccctatgcttgtccatttgggaaactggcttccaggacagcatctttcctgngaaagacagcaggaagctgatggtcacttcct

SEQ ID NO: 302357 - DNA, 301 bp, Homo Sapiens
cattctttagtaaatattcatcaagtacccactcattcctagagactgtgttaacagtaataatacgacactaaatgggctttgttcatagaactagagtctactgcctagcattttgtcagacttcattagctggtagaaatagactactattcaaatgtctatgtcatagagtctcctcccgatcaaatgcagaaagaaaaatcctttcaattcttttaatgattgttgggtaggcagaaatattgtaggagatgggtgtacagacaaacaactcggaatctgaaagtattacacatat

SEQ ID NO: 302358 - DNA, 444 bp, Homo Sapiens
  misc_feature (243)..(243): n is a, c, g, or t
  misc_feature (427)..(427): n is a, c, g, or t
gggaaggaaattaatcttcatagagttctacttcagttctgggagctgaggtactacaagctcagcttacctctcactctccttaggaccagatttttaaccctattttactaatgagaaaattgaagcccatagaggttaagtaatttgcccaatactacatagtttatacccaacagagccagaatgaaaagccaggtctctgtacaattctcttaggttcacacctccttctctaatcanctcccaaccccacaccccataaggtcaagccagggataaccaaaccaacctcctaccagggtaccccaccttgggaaatctctgcaagtcaggccacctctacatcaccactagattgtttttctcagaacccccttatttaaaaatagtcagaatgttgtatagggtagaagtagggtaatantgtaggacttttgtgtc

SEQ ID NO: 302359 - DNA, 467 bp, Homo Sapiens
  misc_feature (61)..(61): n is a, c, g, or t
  misc_feature (63)..(63): n is a, c, g, or t
  misc_feature (302)..(302): n is a, c, g, or t
  misc_feature (367)..(367): n is a, c, g, or t
  misc_feature (398)..(398): n is a, c, g, or t
  misc_feature (433)..(433): n is a, c, g, or t
  misc_feature (445)..(445): n is a, c, g, or t
aaataattgccccaacttttgttttatgaactcaaattattcattatattcttagagatgnangagtaaagggagttgatttactgggacaatccaaaagaaatacaagcttaattatttgatgaccatttctcacctcacttgctcattgtgaaggaaggtgtttcttacattgttgatgcaggctcccttttacttcccttttgtaatcctcaaataaagagctatcttttcttttacagtatggcagttctcaaaagcatggtccacgcacccctgggttggtctctgagattccttanggggagtacatgaggcctatattatttttcacaaaaatagtttgcttttctcatgtgtagtagtnggacataactactgggcaccttaattacatntcaaggacagtgggcaccaaaatacattaggtaantcatttacccangtgaggccattggtaaaattgt

SEQ ID NO: 302360 - DNA, 462 bp, Homo Sapiens
  misc_feature (50)..(50): n is a, c, g, or t
  misc_feature (94)..(94): n is a, c, g, or t
  misc_feature (123)..(123): n is a, c, g, or t
  misc_feature (163)..(163): n is a, c, g, or t
  misc_feature (384)..(384): n is a, c, g, or t
  misc_feature (390)..(390): n is a, c, g, or t
  misc_feature (416)..(416): n is a, c, g, or t
  misc_feature (429)..(429): n is a, c, g, or t
gataattggtcaggtgcaaaacatttaaaactttgtatttaggtatatanatgtggctttttaagtctaaatttgactgtggagtgacccaganattggcaaatcttattacagactcctgangggaaaagaagccaattctgaagtaacaagttagttgtangtttaacactgagagtcatctggcccatgctgtttaaagctttcttaattttgtgcctttcttagccttgatcttctacaagtcgttcatatttactcttgtacttgtaaatatcttgacatttttattgaggcacaatgttttgttttaagtttattaaggagttgtgtataggccggtaaaattatggaactgctaaggaaaaatatttctaatggaantgtacntgtggagccagtaagtggaggttggnttttgggggtacnttgaccatgggtatagtgaagtttgttattgcc

SEQ ID NO: 302361 - DNA, 308 bp, Homo Sapiens
atgaataaggtatgtaagaaatcttcctttctgttatgaggtaagagaaaaatgaggttatttaaacaatccatgtttatatgatggccatcttttaacaaaaattcttttcaatacattaaaaatgatcattgaatcatcaaatgtagttttgtcctctgatagacaaaagagtagtgtctagactgtctgatgaatctatttgactgaaagataaaaacaaatgtgggtcttgttgtcatctctgtgggccttctgaaagcccagtgtacagaggtcacacagggagccccaagagggtgggtcag

SEQ ID NO: 302362 - DNA, 273 bp, Homo Sapiens
  misc_feature (246)..(246): n is a, c, g, or t
tttaattttctatttaagaggcaataagcaagacgtaatttctttcaagagcacagtgatcattcatggaactgaataatgatcaatgaaatgataacccaagacctgaataaacatagcattaatgctagaaaatgtcagtgctgtcacttcaaaagggcacagtgtcactagaccagggctgttattttttattttgttcaatgggacttatcttgaaattctccaaaaatttatttaattccnactaagggggggatgttggtaaataac

SEQ ID NO: 302363 - DNA, 167 bp, Homo Sapiens
  misc_feature (113)..(113): n is a, c, g, or t
  misc_feature (115)..(115): n is a, c, g, or t
caagtaactgtcaaatattgcaacccttcatcctaaatgaagacatcacctgaacaaggacattctcctacctaaaccactataatattatcatgcctaagactacaaatagnanttcaaactaccatctattaaaatttcttcaaccatctttaaaatgtcttcct

SEQ ID NO: 302364 - DNA, 253 bp, Homo Sapiens
  misc_feature (45)..(45): n is a, c, g, or t
  misc_feature (60)..(60): n is a, c, g, or t
  misc_feature (188)..(188): n is a, c, g, or t
  misc_feature (193)..(193): n is a, c, g, or t
  misc_feature (230)..(230): n is a, c, g, or t
  misc_feature (235)..(235): n is a, c, g, or t
caagtttttgtagagatggggcctcactatgttgtctggactggnctcaaactcctgggnctcaagcgatgctctcacctgaggcctcccaaagtgctggggattacaaggcgtaagcccctggcacccgggcctattttcctccattttcatatccatttaaaagggctgtaggatttttacttttncattngggaggacttttccaggaagggatattatcaggtttnaaccnactagggtaaccagggtt

SEQ ID NO: 302365 - DNA, 321 bp, Homo Sapiens
atctctttttaataccaagtttatcagttatcagcattgaatagttgttcctccattttttattcatttatccaacatgtcttgagtgactaatattctgcactaatatgtgcagaagatttttttaaacacatctaaatattttttgctttgccacaattaaaaacagtgactattagctgtcctgtctctttcttacctttgacctcttacctctctccaggcaaagatctcttctttacaaaaacttgtacctgaccctgctattctcactttattttattttccctattatacccataagggaaactgagggcttag

SEQ ID NO: 302366 - DNA, 155 bp, Homo Sapiens
  misc_feature (45)..(45): n is a, c, g, or t
  misc_feature (105)..(105): n is a, c, g, or t
  misc_feature (111)..(111): n is a, c, g, or t
  misc_feature (118)..(118): n is a, c, g, or t
  misc_feature (124)..(124): n is a, c, g, or t
  misc_feature (132)..(132): n is a, c, g, or t
aaagtccttgtattttacaagatatacaatgaccgctttaagggntgaaataacaggattggcttcaaaataatggggagggggtacagagggggaataatattngactanggggccnaaaatngccaaatngggggcagggggacaagggggga

SEQ ID NO: 302367 - DNA, 388 bp, Homo Sapiens
  misc_feature (256)..(256): n is a, c, g, or t
tcatgtgtttgaggtttgaaaatcctttgtcccaagcctttctaaccacagctcagttgctgagcagaagagtaggttaccatcaagtacaaaacatgtagcacggaaacatcactgtggatccagcttttaacttcccagaactctttatcagttgctcccacgttgaaaatttggattgagtggtgctcgtcttccaaaacaaacttgggaaactgagccagagcacgcctcttgggagagctcaatgtagganaaagggcattgagctttgcagtttgcaaagtttgttccagaaagtgctgagctggcaaagtgtgaaggaaatgatacttggaaacagagggtaggaaatgtggcctcatttggggattaaaggcctgttctt

SEQ ID NO: 302368 - DNA, 309 bp, Homo Sapiens
gaacttcctgataaatcccccagtatttgccaagtagccacctctttaattgtgtggttaccctcttcaccctgttaaaatgctgcatgccagattgcacccttccatggatgcctttctgacattctgcttgggctccaacacatctgtgtcaggctgccactcttcataaatgcccttattacgatgcttgggccaggtctccccaagcacatgaaaaactgcactgttttcgtgggtttggataccaaagaaaattgaatgactgaaaagtactgaagagtttaccttaaagggaggaaactagag

SEQ ID NO: 302369 - DNA, 376 bp, Homo Sapiens
  misc_feature (323)..(323): n is a, c, g, or t
  misc_feature (344)..(344): n is a, c, g, or t
tccctagaggattgggttttccacggatggtgggttgaactggataattattccagtcttgatccatatgggaggacttcatttctaggatggctccaaagccctaaaaaattgtaccaagaccttgacaaccagggagtcttcattatgccagagataacctagatgcaggatagaatactaagttgagactctatctctcctttgggatagaggggtctcaaacactaggtatggtgccagaattccctaggaaaggcttgtttaaaggcacaaatttgctgggggccccataaccaggagttttctggattcaggatctnaggatggggggcctaagggantctggcattttcccagggaggtttccccgggg

SEQ ID NO: 302370 - DNA, 420 bp, Homo Sapiens
  misc_feature (120)..(120): n is a, c, g, or t
  misc_feature (135)..(135): n is a, c, g, or t
  misc_feature (180)..(180): n is a, c, g, or t
  misc_feature (207)..(207): n is a, c, g, or t
  misc_feature (237)..(237): n is a, c, g, or t
  misc_feature (258)..(258): n is a, c, g, or t
  misc_feature (303)..(303): n is a, c, g, or t
  misc_feature (341)..(341): n is a, c, g, or t
  misc_feature (389)..(389): n is a, c, g, or t
  misc_feature (399)..(399): n is a, c, g, or t
atatataattaccactgtcactattctctacagaaaaaaagggaaataaaaatttaaccccataacttacattacctcattgcccatcattaacgtttaaaaccctgcccttattttccnatggatcccctcagnaaaaccacacagcacacacaatgctacctaagaggcttcacagancaaattcatcatgtatttcatacgtangaatgttagtctaagaatggagtgacacanaatattaggggtattgtaacngctaagaaagagtaagatgaagtgatgatgcctccactagggagnggtggccctaaggatccctgtcatccctcatgaacaangtcattaactcaacccaggctttagccaacaggtgggacactgtttangggctatatnaacgggcttgttttcatgggg

SEQ ID NO: 302371 - DNA, 177 bp, Homo Sapiens
  misc_feature (23)..(23): n is a, c, g, or t
gaaggacaagtgatattaatttnctggttatttttgttaacattatgttatctgctggttagctctgtgaatgaacagacattaagcggttatacaattcaaagctgtggtatagtcaacagataagatacactgctgtaacaaaccagttcttaatgacttttttaaaacttgttt

SEQ ID NO: 302372 - DNA, 325 bp, Homo Sapiens
  misc_feature (188)..(188): n is a, c, g, or t
taaactatagacttccaatagcaagcctctgtgccttcctcttaccactaagcaagcatgggtattaattcctactgaaaggcttatgctatcttttttccagaaatggaagaaaaatgaactatgaaaaagatcattttataggtcagctaccattatgaggattgttgagggaaatgatataaaanacaatttttatcaaattatctttaggggcatttatatgtttattttcttactgtgttgatttagggtgactataaggaaggttgtatcagaggcaactggattctgggtggaattaaaggcaaggtatttctaaggg

SEQ ID NO: 302373 - DNA, 413 bp, Homo Sapiens
  misc_feature (345)..(345): n is a, c, g, or t
  misc_feature (392)..(392): n is a, c, g, or t
ttaatgatttataattgcctctattaccttaaccttttgcttaagtcatcctcccttttctgttcaaaataccactagaaacaagagttttcattcaagtatagtctctctccagtaaccagggtttgggtaaggggaggtagttctcacagccaagttgtatgtgcccactaaaggagtggttttaaaaatgacttaagaattccttgaaatctaaatctctagagtttaaatttaataattctgctgtcaaagttctccctgaggtactgattagggttgagttctactaaaacaagggttaaggaacaggataaggtgacataggaacaggcaatcccgganaaaaaacttgattaaatatcctatcctactttggtacatggtgtggnaccccatgtttggcttggcac

SEQ ID NO: 302374 - DNA, 279 bp, Homo Sapiens
  misc_feature (222)..(222): n is a, c, g, or t
tcatcagacctcactgtgtctgcagtagaaaacatccctttagtgattatttttgtgggtcctacagcttcgttgcccttttttcctgaacagtactgaatgcatattgtaagtttgccctcaatcctttatttttaggtttaccaccttctttctgttgaggtattattgttactattacacgtgttaatgggattaaactacttcttacttatttttccnagggctgaaaaatttcaggattcttctctttgtgtgtaaaattaattaggcttaacc

SEQ ID NO: 302375 - DNA, 471 bp, Homo Sapiens
  misc_feature (209)..(234): n is a, c, g, or t
  misc_feature (335)..(335): n is a, c, g, or t
  misc_feature (381)..(381): n is a, c, g, or t
  misc_feature (391)..(391): n is a, c, g, or t
  misc_feature (420)..(420): n is a, c, g, or t
  misc_feature (425)..(425): n is a, c, g, or t
ttttttatgggccatgggaccaagctagaacataccaattatactatattcaaactttgattctcaagtcaaaatctgttacagaaatactgttgctgtgggtgcaagcaacctaataaatactttcaacttcatttcacaaaaagtgacctagaatgctgatttagaaaaaatataagcttaaaaatgacgctatctgcttgtatgtnnnnnnnnnnnnnnnnnnnnnnnnnncagacgatgggcggaggggaggaaagagctaggtagaatgataaatgaaaatctaaaaaggcgggcttcatttcactggtattaatttggtaaattatccntatttattagagcttgtaaacattgttggccaaaattttttgcccngttcagtaantgaatttgccaccatccattaattttgtncaaanggttccagggaaccaccattgccgaggctccaagggaacccccagg

SEQ ID NO: 302376 - DNA, 362 bp, Homo Sapiens
  misc_feature (306)..(306): n is a, c, g, or t
  misc_feature (315)..(315): n is a, c, g, or t
agagagctgcaccatgataccctgagcacatgaacgaggcctggcatctaatgtgtgtgttctgaataaacaactatgttttaaaaacccttaacaaaacagagtaagtggaaacttcctcataccaaatcctgcagcagatgtatatgtaaatgctaaattaattgcatataagatctattaacactaccagtgtctgacataaaaaggcagtgcaggtgacaccaaagggaaagaacaatgtgagggtcaaactgttcccacctgcatctgacacaatcatttacttaaaaacagactcaattngcaactaanacacaagagtacaaccagacttgcttgaatttggaaatcatgtttac

SEQ ID NO: 302377 - DNA, 286 bp, Homo Sapiens
  misc_feature (104)..(104): n is a, c, g, or t
  misc_feature (115)..(115): n is a, c, g, or t
ctgacaggtgcggccccgtggccgcgcgctgggccaggcaggaagtgggggaaggagagagtcagggcggcgggaagacatttctccgagttctcccgaagacncagggcgcgangcgacctggggaaagtccagagtgccagccacggggaagggcgggcagtgcagagtggaagagaagccagcaagttagacacagcccctctctgggaggccgcctctaaaatggaactagcggacgtaccttggtttgtacatttgaccatggacacacgtaaagattttg

SEQ ID NO: 302378 - DNA, 408 bp, Homo Sapiens
  misc_feature (110)..(110): n is a, c, g, or t
  misc_feature (267)..(267): n is a, c, g, or t
  misc_feature (301)..(301): n is a, c, g, or t
  misc_feature (342)..(342): n is a, c, g, or t
ggcacgagaactggattcagtagcaggcaggaaatgtggctctgtcaggatagcagcaccacctcagctcctcaaggtttgcagaatgaccaaaaggcctacaaggcagnggtgatctcagtcattttagggtattcccagtcacttataacaacaatccttcactgtgtataagatgtttaccaagtgtttccaattatattaacttgtttgatcctcttaatatctcttaagaagacagtactctgaattcaaaaccaaacaaanagaactgtaaatctccattcattatatttccttntctaattggggatatgtaagcttttatctgtaaaattaaanaaaaaaatctgtggcaagtagccaacattctaaaggcacttcaagtaccagttcgggtaccagggc

SEQ ID NO: 302379 - DNA, 374 bp, Homo Sapiens
  misc_feature (168)..(168): n is a, c, g, or t
  misc_feature (292)..(292): n is a, c, g, or t
  misc_feature (305)..(305): n is a, c, g, or t
  misc_feature (344)..(344): n is a, c, g, or t
  misc_feature (363)..(363): n is a, c, g, or t
ccttgcatttgctgtggcaggagaaaacagctagagaatcaaagaggattcctcaatgcctcagcctagaagtgacatgcatcccttctgcttattgaccatgtccaagtcacatggcccagcccaattcaaggaggctgggacatacagattccagtatgcccaggngtgaaaggagaaccagtgattagtgagctcataatgtttaccataatatctattttatgttactctagatggctgccagggtcatctaacattacttattgcataacctatttttttctcattngattttgggaatngctaatcttggggtatacactgaaagcttctgtatcttntccattttcccctgaggtncattggacttt

SEQ ID NO: 302380 - DNA, 146 bp, Homo Sapiens
  misc_feature (84)..(84): n is a, c, g, or t
  misc_feature (115)..(115): n is a, c, g, or t
  misc_feature (123)..(123): n is a, c, g, or t
atgagccaccatgcggggtctattgttcctaaatttcctacagacagtgaactctctcattgcctggtaaagaggagctaaggnactcccaccgcccccaatgcccttcgaaggnggaacagnttacatgggggccataaattggt

SEQ ID NO: 302381 - DNA, 361 bp, Homo Sapiens
  misc_feature (324)..(324): n is a, c, g, or t
  misc_feature (337)..(337): n is a, c, g, or t
cctttttccttgacagtggaactgatttgcttgccaacaagtacatatgtagtgggatcaggaggggaggatggaagttagaggtggaagggaaggagacaccacctaggggaggacataattgaaagggtgtccagcatggagaacatggctgtccatgtggttcgggaaggtctcgacccctgggttgtatttttaactttgaaattgttcagcaacaatctggttctcccggggcttttaaaactctcctctaaagtatttctgggcaacagtctgggaaatcctgggtgacaggtaaaagcacactatgtttttaagccngggtaaggtaacnttggtgtaatattaaccagtgtgt

SEQ ID NO: 302382 - DNA, 406 bp, Homo Sapiens
  misc_feature (43)..(44): n is a, c, g, or t
  misc_feature (68)..(68): n is a, c, g, or t
  misc_feature (157)..(349): n is a, c, g, or t
  misc_feature (370)..(370): n is a, c, g, or t
  misc_feature (382)..(382): n is a, c, g, or t
  misc_feature (387)..(387): n is a, c, g, or t
ggcacgagcattcagaacttagagacaaacgctcatagttttnnggcttcgtattgctcccttctttngaaagttaaaagatagtcttcacttaaattacttaaagaggtaactgccctattattttaactcagtgaagctcaaccagggaggattnnnnnnnnnnnnnnnnnnnnnnnnnnnnnnnnnnnnnnnnnnnnnnnnnnnnnnnnnnnnnnnnnnnnnnnnnnnnnnnnnnnnnnnnnnnnnnnnnnnnnnnnnnnnnnnnnnnnnnnnnnnnnnnnnnnnnnnnnnnnnnnnnnnnnnnnnnnnnnnnnnnnnnnnnnnnnnnnnnnnnnnnnnnnnnnnnaactctgcttttaactgaggngcagggcaattnggggncagacccctgttggtcaag

SEQ ID NO: 302383 - DNA, 292 bp, Homo Sapiens
tatcaggtttcataattttactttagccttcgcaatggaatttaaattgtgccagccatcttttatctgtcagacccaggggatttttattgtcattttgaaccagatctatttttgcttaattctatggggaaccacacatagtttgtacatttgccagaaatttgttttccagtgaatattactcaattctaagtaagtacattccgcattttcatactggggacatagtagggggtgaggttcaatttagggaccatcccttttttaaatttattatggatgttagggg

SEQ ID NO: 302384 - DNA, 438 bp, Homo Sapiens
  misc_feature (411)..(411): n is a, c, g, or t
gtatttctctcaaagaactactttttcatttttctcctagagtgataagcattatttggcaaacctgtgcacaattgtgtctgcaaacctcttgagtgtagcagtgtagtttgaacaagctgtcatttagcaaaagcagggagatgtattgtacatgagatgaaagaaacctgcctctggaattattctggggtatgcaatgtttgtcagttaaaatggagctgtttaaaagctgttttttatagtaatctacgtatctaatagattactagaccagattatcagtctttgaaatgaagcttcattaaaacagaattcgttgctgaattaggccaagataaatagctattctcttgcattttccaacttctactcccgttcagagcagagtttaaaaaccaatcttttagntctatggggggatgataggcccccctt

SEQ ID NO: 302385 - DNA, 265 bp, Homo Sapiens
  misc_feature (96)..(96): n is a, c, g, or t
  misc_feature (106)..(106): n is a, c, g, or t
  misc_feature (133)..(133): n is a, c, g, or t
  misc_feature (152)..(152): n is a, c, g, or t
  misc_feature (176)..(176): n is a, c, g, or t
  misc_feature (196)..(196): n is a, c, g, or t
  misc_feature (252)..(252): n is a, c, g, or t
agcttcaataccctgataaatttccttagtatgaatttttttaattataccaaataacaagagaggaaaagataaaacattttgatgacctctaanatgtagtcancaactgctaaatgtttaaaaatagtgntttgtcatcatcagaaagncttcatgttaatacaaatacatgncatacaagtatacatctaantatacatgatatttataacataaatatacatctaaatatacatcatatttataatntagatataacatt

SEQ ID NO: 302386 - DNA, 389 bp, Homo Sapiens
  misc_feature (28)..(28): n is a, c, g, or t
  misc_feature (48)..(48): n is a, c, g, or t
  misc_feature (226)..(226): n is a, c, g, or t
  misc_feature (325)..(325): n is a, c, g, or t
  misc_feature (337)..(337): n is a, c, g, or t
ggaggaaaggaaagcaaatccacagctngggagaaaacaaaactatantctacactaactgcccacataaaagatttaaggtcttctgaagattttagatgagaagaccttattcaacaacttgactacaggctatacaaaggggtggtttacttttagaggacagaggagcataatggttcaaaagagaacaggttttagcatcattggaattatcatttactgnactctacgtgtcaggtgcttagccaagcactatgtctatattatctcacttaagaaaactaaggtttaagtgttaggtaacgtgtttaaattcacactngccataggcatnggggatgggattggcaaatcaaggtctatctcaggcagtttctccaaccagg

SEQ ID NO: 302387 - DNA, 226 bp, Homo Sapiens
attgtataaaaggaggaatataaatgcatgagattaagtttaaaaaacacgtgccacacatttagctagagatcctagttcaaactcactcccccagtcggccccattcacacgtttcagtgccaccttctttgttaaagacgataggactacacttctttggaattagtttaagaggtagtttataagccagtcaagaaaattgacctcatgttcatgctctcaa

SEQ ID NO: 302388 - DNA, 382 bp, Homo Sapiens
  misc_feature (311)..(311): n is a, c, g, or t
  misc_feature (357)..(357): n is a, c, g, or t
atcattcccaaagaataaatatttcctgtgtattttactatactactacttccttgacaacaaataaacatgacaatgcattttcatgccttcaagtcaagtggacttttcaaatgtgaggcaatattacatagttgacatttattcatatcattccacatatgtacatcttaattcaaaaatccatgacaaaaactaatttatatgcttccttttacctcaatattaactaaggtaaaatgagaattatactcttgtgatgttacatgaaaaatattagacccaagtgccccagagaaattgggtaggangaaatgcccacaggctaccaattttcttatacttacatgggactgnggtctctaggtgcctgggtgtccaa

SEQ ID NO: 302389 - DNA, 407 bp, Homo Sapiens
  misc_feature (86)..(86): n is a, c, g, or t
  misc_feature (93)..(93): n is a, c, g, or t
  misc_feature (96)..(96): n is a, c, g, or t
  misc_feature (326)..(326): n is a, c, g, or t
tttccaacccccagtatccatatactgctctctatcagggttattttaactttgtaaaatcagctgagatgctttccatgtttttnttttttnaanttctgccacatttgaatagcataggagttaccaccatcaaccttggattatttaagcattcacgattccacgtgtggattttttattcagagtctttcttgtcattcctgctatcagcacagaacccaatctcagctttccagctatactctcaccccatggaatttgcagatgaagttcaaaaggacctttgcattatcctgcctcgccctcttcccccttcatttagncatcaccttcttctaggaacgtcttacctgacatgccctgctcccaacccctgctggcccaattgtgtgctctcccgtcta

SEQ ID NO: 302390 - DNA, 358 bp, Homo Sapiens
  misc_feature (19)..(19): n is a, c, g, or t
  misc_feature (113)..(113): n is a, c, g, or t
  misc_feature (269)..(269): n is a, c, g, or t
  misc_feature (323)..(323): n is a, c, g, or t
  misc_feature (330)..(330): n is a, c, g, or t
tttaaatttctaatacggncaatattaataaatatatagcctacataaaagaaaagctctttagggtcctaataattttgaagagcatgaaggggtccctgagaccacgaagntgcagaacttgatgcacccggctgtgagccccctgaggccagggcaggtcagcctcatcccgcccagtgcacctgcagacagaggaagcacgcagccaacctttattatgctgctcagaggagcttcaagcaggctgggatatacacgccattggnaagtgaaaaagacttgattaaatggcgcaaatgtttgaattctaataaacaggncacagtnggcaaggcagtcatcgttccttccacaa

SEQ ID NO: 302391 - DNA, 421 bp, Homo Sapiens
  misc_feature (41)..(41): n is a, c, g, or t
  misc_feature (96)..(97): n is a, c, g, or t
  misc_feature (99)..(99): n is a, c, g, or t
  misc_feature (108)..(108): n is a, c, g, or t
  misc_feature (116)..(116): n is a, c, g, or t
  misc_feature (172)..(172): n is a, c, g, or t
  misc_feature (260)..(260): n is a, c, g, or t
  misc_feature (265)..(265): n is a, c, g, or t
  misc_feature (271)..(271): n is a, c, g, or t
  misc_feature (278)..(278): n is a, c, g, or t
  misc_feature (315)..(315): n is a, c, g, or t
  misc_feature (369)..(369): n is a, c, g, or t
  misc_feature (401)..(401): n is a, c, g, or t
atttaaacagaaagatttcaggtacagcatctcctgtttgnccctggaagtgtattgtgcagtacagtaaggggttgaagtacaccaagccccttnntnttgtatgancagattgncccatcttaggctgtgtgatgggtgtcctcgtgaggcagctctgtgaggatatctncaagaattttggcaaagggaaatggaccatggcagtctgtcctgactcgaaatagggatgtttacgttgaacatgctcagcttcttgnctggnactganctctgancaattataagtcaatgaggcgagggagacaacgtgtnctctgcggtacctgtgagccctgaaagtattccaggggacaccctggcaatttnaggtgcccctattcagggtctatggggggaantgttctgttcaggggcgtgc

SEQ ID NO: 302392 - DNA, 466 bp, Homo Sapiens
  misc_feature (268)..(268): n is a, c, g, or t
  misc_feature (291)..(291): n is a, c, g, or t
  misc_feature (324)..(324): n is a, c, g, or t
  misc_feature (398)..(398): n is a, c, g, or t
  misc_feature (438)..(438): n is a, c, g, or t
ctagttcagaagaacatggggtgggtggtttgatattagtgttagtactaatctcatttaaaaattttcacctatatgggtacttcttttcatgtgatgtgacttgccgaagatcacacaacttaccgcaaattcaggttttaggagttatgactccagatccctctcctaggtcacaagcacgtgtcagttttgggtagcaactaaatggtagtgggtctgttctgaggcaacaggtgggctgactcatgtgggctatgggtggccngaggctccttgggagaccgtttntcccccagccattccagctctctacttcaacantaacctgcctctcaagagtgactgggctccctaatgtccataggaataaagtaaattcaaatcttttagggggntgtgtttagtcccccaaagtttcagggcttccagcatttnaacagtggcataacagatgcttagtttt

SEQ ID NO: 302393 - DNA, 442 bp, Homo Sapiens
  misc_feature (47)..(62): n is a, c, g, or t
  misc_feature (316)..(316): n is a, c, g, or t
  misc_feature (348)..(348): n is a, c, g, or t
  misc_feature (396)..(396): n is a, c, g, or t
  misc_feature (404)..(404): n is a, c, g, or t
  misc_feature (413)..(413): n is a, c, g, or t
  misc_feature (424)..(424): n is a, c, g, or t
agagtttgctttgtatatttatatattaagagtaaaaccagctgcannnnnnnnnnnnnnnnaccatttggctcatgactaacatttgcttttatagcagagaaaacataattttattttgaccaacatacttgttgcagagttattgtttatcttgctgcccaatattcatatatacttgcttctgataatagtaccctgattccccactctatccatatgttttggatgggagttgccctgcttctggctccaggaatagggcagtactcagccatgggccaaagtcatgggtgaatgggctcagggactaccntagggcatgtgggggcaattcaggggggtccngaggatggcataggggcagcttgcaggaaaccacaggggacacagggnttgaaccnaaggggganttttaaggccngggggcttgctaggggga

SEQ ID NO: 302394 - DNA, 445 bp, Homo Sapiens
  misc_feature (386)..(386): n is a, c, g, or t
  misc_feature (396)..(396): n is a, c, g, or t
  misc_feature (423)..(423): n is a, c, g, or t
ctagccccttaaaagtttgttggaattagcatctttttcacatacctgagtcttaaggttcattcgtgtttctccctggaccgtccactcctgctccaacttctcactaacaaaactattgtctgtgacctttctaacccccagaacagcataaggtacacaaacttctgctctgccttaggtgttagggacgtcattaatgcttactggaaaagcacaccccagagagctgggttttggctgtggcaggtaaaaaaatctttcagatcttgcaatgctggaaaccttaaaccttttggttttttagctaaagtgattgggcaacagaatgtgacatctggaggttgcatgggcctgcaatagccataatttaaccacatggaggntcacattttncccactgggagatttcagtgggtcttnggggttgatggaaagtggactt

SEQ ID NO: 302395 - DNA, 479 bp, Homo Sapiens
  misc_feature (302)..(410): n is a, c, g, or t
  misc_feature (465)..(465): n is a, c, g, or t
tcaatgttttttctgaaagtcttaatgctggaatgaggcccagataaccatgggcggaaattaaactgatgttaatttagtattgacactctgcctgtccttcccaaacttcccctaaagacatagctcacaggagtcttaaaattatgccataaaataaaatagacgaaagagtattaccagtaccttagaaagctggaatggttgacttctgtgtttgcttaagagaaacttccactttcattgcctcattgttcactttcattccacgtaagattttaagatcaaaaaacactttttcnnnnnnnnnnnnnnnnnnnnnnnnnnnnnnnnnnnnnnnnnnnnnnnnnnnnnnnnnnnnnnnnnnnnnnnnnnnnnnnnnnnnnnnnnnnnnnnnnnnnnnnnnnnnnacccccgttcttttaccaaaccatcacaaatggaaaaaatttggccaggggcttnggttggttgccccg

SEQ ID NO: 302396 - DNA, 320 bp, Homo Sapiens
  misc_feature (91)..(91): n is a, c, g, or t
aaaagttaacctctttataaaaagtattaataaaccaagatgtgcctaaatattagggtacttcaagctaaaggtcatagtttatatatanaaagtacgagattcaaggaagtaatgtatctgatgctttgcttaataagattcactagtgcttgcccttaattcatagagcagtattgtttaggttacattagcctgaaatttaaagcataattattagggattccggcctataaatacaataattaaaatctatactatattattgctaccctggaaagtcttatcttggcctgttttttcaagtaggaaaaggtaag

SEQ ID NO: 302397 - DNA, 300 bp, Homo Sapiens
ttatttgtgatgaattcagccaagaggactgtaaatctcttgttacttctttttgccaagagtaaccagtagctaaggagcaaatagttgtcagtttactaacaattacagaactgagccaaaccaaaagcttagagttgtccagttaggaagaacattgtctctgtgttttctaattagtaggagatatgtcctcagatgtctcatttaggattaattccatgaatgggagggcaaatctcccctacaaggaaggctctgtgggcagttacaaggtaaggggatttcagagggccaggg

SEQ ID NO: 302398 - DNA, 341 bp, Homo Sapiens
  misc_feature (166)..(166): n is a, c, g, or t
  misc_feature (241)..(241): n is a, c, g, or t
  misc_feature (310)..(310): n is a, c, g, or t
  misc_feature (324)..(324): n is a, c, g, or t
atctaattatatcctgatagggagaaggatagattcttactgagacaatgcaaataattacattgtcatgtaaaataaaagaactcaataaaggcatgttgtagaatatttggccattgctttgattagttttacagacaaggccaatcaatatgtgttgtatttnctatataattaacatctttaaatttatctaatgatttaccagtttatatttcaggctactgttgcagcgtaacanaccaccccaaacttattgtggggtaaaggggacaaccattttaggatggctcacaggtttttctggggncggggattttgtcnggggcttgggccatccc

SEQ ID NO: 302399 - DNA, 469 bp, Homo Sapiens
  misc_feature (305)..(368): n is a, c, g, or t
  misc_feature (413)..(413): n is a, c, g, or t
ttagaaaattggaaataggaaatactaaaaaagaccaacgacacaaccgcactgtgctggaaccgggcacacaaggcagaaattcaacctctctgtgccttggtctatttctaataaaaaaattcctgctacaaagatcctttccaaccacagagatattaagaaaaaaattaaatattgtctgcaaatacctaaaagtcactgtagtgttcttagctgcccactggaactaccaaaggagttttttttaaagctgatgccttggttccactacctgagattctgatttttggtctgagaagcannnnnnnnnnnnnnnnnnnnnnnnnnnnnnnnnnnnnnnnnnnnnnnnnnnnnnnnnnnnnnnnactcctgccttcagagggtggggagtttttggagtgtgaaggggntaaacttactctaatggtcaacctccaaatacaattttcttggcctttcactttcc

SEQ ID NO: 302400 - DNA, 421 bp, Homo Sapiens
  misc_feature (142)..(329): n is a, c, g, or t
  misc_feature (379)..(379): n is a, c, g, or t
ggcacgagttgtccaatcctcatttggttgaaaaccacctcttttcctggttttccttttctattcctattttattttccccataccatactgacagtatgggagaattcaaaacattgttgttatttgatagagtttttannnnnnnnnnnnnnnnnnnnnnnnnnnnnnnnnnnnnnnnnnnnnnnnnnnnnnnnnnnnnnnnnnnnnnnnnnnnnnnnnnnnnnnnnnnnnnnnnnnnnnnnnnnnnnnnnnnnnnnnnnnnnnnnnnnnnnnnnnnnnnnnnnnnnnnnnnnnnnnnnnnnnnnnnnnnnnnnnnnnnnnnnnnnggtactcagggagggttgagggcagggagaattcgcttggaaccgggggngggcaggaggtttgcagttgaggcccaattcgttggcccatt

SEQ ID NO: 302401 - DNA, 352 bp, Homo Sapiens
gaccctgctgaaatattgtcctactgggtagaagtctgaatcataaaaattccaaaagttgcccctaacccttcccttcggctcccctctcacttgttagagcaacccagtacactgctttcctaatggatctagactggaaatctgactaaccatcaccttcacagtgaatatccttcaacagggccctcctgtcctcaagaaaaactcaagcctctgtgaccagactctgccagctactgcagcctcctctctctctctgccaccagcttcaattgtgtcagggtctaaggaagatgggagtatagcttattaaagagccaggggacattcattactgttttctgtatgg

SEQ ID NO: 302402 - DNA, 416 bp, Homo Sapiens
  misc_feature (259)..(319): n is a, c, g, or t
  misc_feature (390)..(390): n is a, c, g, or t
tagaggcagggtcttgtgatgttgctcaggctggagttcagtggctatttacaagcacagtcatagcacgctgcagccttaaactcctggcctcaagagatcttccctcctcagccacctgagtagccaaaaccataagtgcatgccaccatgtaccacttcctaccaagaatttttcaaaaaactagggaggcatttactactacaggccatgggaattttaagattgacttatgttacttgggatcctttgaaagcnnnnnnnnnnnnnnnnnnnnnnnnnnnnnnnnnnnnnnnnnnnnnnnnnnnnnnnnnnnnnttcattttaggatggacacctgggggaaagccacagggagttaaccacctttttttccaacttttgtttgnatagttaaaccaaaggaacgtacttt

SEQ ID NO: 302403 - DNA, 268 bp, Homo Sapiens
  misc_feature (216)..(216): n is a, c, g, or t
  misc_feature (237)..(237): n is a, c, g, or t
cttgcgcccagccatcttctgcattttttgaacagccacctaactcgttttccttatctgatctcactctaggcctgctcttatactgatactgctaacagagtatcatcctaaaacagagatcttatttaaattagttatctctgtaaagtactatcactgttccaccattaccaatgattaagatctaaagttcttcatatgggcatttcactnagcctctatacggtgggcctncaatgtttccccttttggcacccaaaacctt

SEQ ID NO: 302404 - DNA, 445 bp, Homo Sapiens
  misc_feature (380)..(380): n is a, c, g, or t
  misc_feature (390)..(390): n is a, c, g, or t
  misc_feature (401)..(401): n is a, c, g, or t
  misc_feature (406)..(406): n is a, c, g, or t
  misc_feature (428)..(428): n is a, c, g, or t
agaaatatggctaagtgcagaataaaaaaggctataaaacatggaccttcttaaatgaagttaattcagacgtaacaaaaattcatatattatgttccttgaaacttaaaaaaatgcgactttaaatttaacactctcaattctaatggggatatgagttaattttcaagtatattttagagctcaagtttagttaaccaataacttgctgaattatgcaaaaagctttggctttcaaaatcttattgcttttcccctgtcaagatttaataatttttagtaagggtttgaactttttaaccagatatgcccaaatctcccaaatgcatgtataaggatgttattatgttaataggccatggtattaattaccaatatcntggcacaccntggggaaaatnttatntgtggtggttgtttttaggggnaaggtggttggagtggc

SEQ ID NO: 302405 - DNA, 107 bp, Homo Sapiens
taaacaaatgaggtaatgggccattctaaccaagtgcttgtgggaaaaagcatatccaccaaagacttttatatgaatacataattacctcaaaaattttctatttt

SEQ ID NO: 302406 - DNA, 405 bp, Homo Sapiens
taaagttacagataacagaattatatggtctaacatgcagctcacttaggcagtcctacctttccaaatgttttcttcaatgccatattcccagggaaaattgctgctgggtagttgaaactaggtgcctcactggacttcttcctattatttgggcaacttgtaaaagcttacaaactttctagaaagtagccctgaaaacagttccttcgttatgtttttagcaataccacagaatacatggttctatgttatagcttagaattgctactactcttacaaaattgggaacataggaaaagatgggacaaaaacctagtattaatgtatcattatttccatttcaagatgggcgttttgaacttcatctcttttccttcccaaaatcctaggtggaaattatcc

SEQ ID NO: 302407 - DNA, 333 bp, Homo Sapiens
  misc_feature (100)..(100): n is a, c, g, or t
  misc_feature (117)..(117): n is a, c, g, or t
  misc_feature (149)..(149): n is a, c, g, or t
  misc_feature (169)..(169): n is a, c, g, or t
  misc_feature (275)..(275): n is a, c, g, or t
  misc_feature (306)..(306): n is a, c, g, or t
  misc_feature (315)..(315): n is a, c, g, or t
tttttagatacaggttcgatggtcattataatatactctaaggaggggtctaattattataggggatttcaaatttgcagtccaacaggcagagtagaantcattcaattctagaanttggtatcattagcattcttatagaagaaaantttaatgagatttgacaggnttaaacatatacaccacaggctggggtgctatgtgaacaatattcaacccttcaaaggggggaaccgttttactaggggaacaagatttgcttgcactgtgagganataggtgccaaaactaaccccaaaaacaccngccggattntttaacggtcttttgggg

SEQ ID NO: 302408 - DNA, 135 bp, Homo Sapiens
actggagaaagtgtgccttcgaaatgaggacagtaaggagagataacgacatgggaaccagggatataccacaggaaaggagccagggagaacaatttattaacaatttcttgcaactatccagggaaaatataa

SEQ ID NO: 302409 - DNA, 421 bp, Homo Sapiens
  misc_feature (71)..(71): n is a, c, g, or t
  misc_feature (156)..(156): n is a, c, g, or t
  misc_feature (342)..(342): n is a, c, g, or t
gtggctcctgtgttagcttctcttggctctgacttttggtggggggctggatgctctccctcccactcttngcctggctaatgtcttctcatccttcagaactcagggctccaggagaccttcccatacccaagtgaggtgaggactccaggcttntgatcttggagctccctgtgcttatcctcagtccttgccccaggggtgaggttcttgttggggtgatcagtaactcaatgtctgtctctcccagcaagctccctgaggccaggaaccatgtctttcggtcactgctgtatctccagtgcccaccataaatgtctggctcatagtacatgctcaatnaaatgttcacaggattaaatgagcccttcttcctaggctgtggctggatatcctagaaagagttccttctgttcctgct

SEQ ID NO: 302410 - DNA, 245 bp, Homo Sapiens
  misc_feature (189)..(189): n is a, c, g, or t
  misc_feature (199)..(199): n is a, c, g, or t
  misc_feature (224)..(224): n is a, c, g, or t
  misc_feature (232)..(232): n is a, c, g, or t
gtccataattccactctctagacataaccattactaataacttgtggatcccctttgaacttttgtttatataagttatcttcttatattatatatttatcatagggtagtataaaaattcttattttagggttcaagttttaccacttaggaccctgacattaggtggtggttaaattgggcagcccntattttaacnataaaatggtttcctaaattaaatnaaaatccnaaaattaataccc

SEQ ID NO: 302411 - DNA, 257 bp, Homo Sapiens
cttgcctcattcttcttgtttgcttctggaggcgaaaatgccaaacagtagaggttttgatagtttgttagtaaatttatgctgatgacaatacagaaggtgtttcacgatgtgggctgttactctccctccaactttgtctttactgttgtctttcttccacctaatattttaggcaacattggaactaaaaggttggaaaggaggatctctggacccttggtcatactatcctcatggtcttacttggtatttat

SEQ ID NO: 302412 - DNA, 173 bp, Homo Sapiens
  misc_feature (52)..(52): n is a, c, g, or t
  misc_feature (65)..(65): n is a, c, g, or t
  misc_feature (87)..(87): n is a, c, g, or t
  misc_feature (161)..(161): n is a, c, g, or t
ctttaatcttgtgaacagtgctacaatcaacatacaaatgtaggtatctttntgacataataatncatcccctttccgatatatacncagtaggccactactcaattttgagggaagcacaaaggaaacaaatcactccaggataaaaataaaggcttatncccctaatcaat

SEQ ID NO: 302413 - DNA, 408 bp, Homo Sapiens
  misc_feature (339)..(339): n is a, c, g, or t
  misc_feature (396)..(396): n is a, c, g, or t
cccaagagactagtgtaataaccttatgcccccaaagacagcccagaactgagtatcttcagtgttcctgagtgtaaatcagtgaatctgttatatagaaagttaacatttcaggagcacaattatttcctgatttcaaatatgaacagaagactaaatgtcatttttttaaatcataaatttggtatccatagttactttacacattccagagtctaagcatggaatttaagttttgtattttgaacaaaaatagcaacatctgttttctgtatgggcaaagaaaaactaaatcccaggacttttatttttaaccacaggaaaccattcacttctttntaaaattatttgcttgcctgctcatttaccccgaaacatctctgtttatgccatggntttttaaatcca

SEQ ID NO: 302414 - DNA, 361 bp, Homo Sapiens
  misc_feature (309)..(309): n is a, c, g, or t
cttatgatgatgatgttagatgataaaatgcttatgtgatgtgatgaaggtaggtgaattatgttaggcattgtaatgcagcatgaagctactattgaccttctggtgttacatcagaaggaggatcatctgcttgggtggtcctgaatcatcacgtcctgatgatgtctgttgctggttgtcaggagcagacagtgtccatgactaatggggcaggcagcgtatatagccatgtatacactgggacaaaggggatgtctccatgtccacggctgggacagagccagggagagtgccaaggtttttgtncacactacttcaggattcgtggcagttttaaagcttacccattgttttattt

SEQ ID NO: 302415 - DNA, 184 bp, Homo Sapiens
tataagcttgcccttcctgacaacgttggccaaattaaattcaattcaattttcgaagcttaagaacatttaaaaagttaaaacaagaaaatacttatccttatctagttttttcgatcactctaacgtggccctagatgtacaattccatggagcctaaagggagccagctgtggaattgcct

SEQ ID NO: 302416 - DNA, 144 bp, Homo Sapiens
  misc_feature (86)..(86): n is a, c, g, or t
  misc_feature (125)..(125): n is a, c, g, or t
gccacatctaaaccttgacaagttcagctcctgagtattctgggaacttgaagtgacttttcatctgtcccttccttctcctgggnacagagggagagcctttttcgagaagcctcagggttttntgaagggactgatgtgttc

SEQ ID NO: 302417 - DNA, 148 bp, Homo Sapiens
  misc_feature (15)..(15): n is a, c, g, or t
  misc_feature (44)..(44): n is a, c, g, or t
  misc_feature (108)..(108): n is a, c, g, or t
taaaagaagtttctncagataggcattaaactggaatataaaanggcaatatttattgttttaatgtgttaaacctcaacatttatcacttgtatttatggataattntcccaaaatgtggtcaaaacaagcttattgaactcagttt

SEQ ID NO: 302418 - DNA, 208 bp, Homo Sapiens
  misc_feature (188)..(188): n is a, c, g, or t
attacaggctattcatgggttttaaggataaggacctgtgtatgactgggggctgttattcagcatcccgcagcattgttttgtgggatgcactctgggctacaattccaaggaagggcagcatgaggaaatttcacagccaccctccagcaggggagttgacagggcacagtccagcccggggcatncctactgggcagggggagcc

SEQ ID NO: 302419 - DNA, 343 bp, Homo Sapiens
  misc_feature (187)..(187): n is a, c, g, or t
tcttcaataccctgcttattcctgtgactcaagtggtaatcttctgcagcttggaagaaagaaaaagggatgggtaatgtaaaaatctgaatcactatactaattgtgggaaattatcctgcaaattctgccaggtaataaaagtaagtagggtatccataacccgaaggttttctttgtttagganaataaaaccaaagcttcatagaccaccaaagggaaattatcttggcaagtaaaattttagatgggaaattatctactacaccacacttgtggggaattgctatactcactctactgtttgcaataggggatacacacggtagcaccttctaactgg

SEQ ID NO: 302420 - DNA, 176 bp, Homo Sapiens
  misc_feature (86)..(86): n is a, c, g, or t
  misc_feature (103)..(103): n is a, c, g, or t
  misc_feature (155)..(155): n is a, c, g, or t
gacttctttaaataaccatagtacaggcagttacttttgttatataacagtatagttgtctctgaagaaaacctgaagctctgcanaatcgggccctgaaatncggtttctgagtggcttgttcctgtgtaaacttgtaatctctgtagtaacgnaaccagtacccattctgaata

SEQ ID NO: 302421 - DNA, 404 bp, Homo Sapiens
  misc_feature (217)..(237): n is a, c, g, or t
  misc_feature (374)..(374): n is a, c, g, or t
  misc_feature (391)..(391): n is a, c, g, or t
ttaaatttctggacatactagttctaaactaagcataaatagcaaatgtatcatacagcctttaaaatttggaaatctagtggtacttttgcgtattgtctgccttttttttaactcttttagtcaattgggtatgaagctgcattcttgtatagttaaatgcatgtgatataattctactatacaaattcacatacgttcttgaatacaacaagtnnnnnnnnnnnnnnnnnnnnngcacaccccccctttacattacttattctatgtagggctcctaataaggcagtaagggtcactctatattaagtttctggggtatgtctatttgacaactatgtgctccctcccgcctctctgcacggggcctgtgngtaaggtgcaccaccgngcacgggtgaccg

SEQ ID NO: 302422 - DNA, 422 bp, Homo Sapiens
  misc_feature (65)..(65): n is a, c, g, or t
  misc_feature (389)..(389): n is a, c, g, or t
  misc_feature (401)..(401): n is a, c, g, or t
acaatgattgagtgttcttgaagaaatacaagataagaacatgttggttttctccattatttttnaatttcacaggcaaacacaactcatgtacgttggctcttatcagagatgtttcaagatttacaacttgtcatgttctagaaaggaattttcaactttttttacataggtgaaaaagaccattaacctgttctcaattctgtctggtagaataaaatgagagcttataaaaatgggctgtgaaggccatttctccttccccttgaaggctgagagctagggtaatatgacttgatttgaccaatgggaactacaggcaaatacttcactgggaggaaagggttcttgtacattgtgtcttgccttctcttgctgagttggggacncgaggaccaacngggggacccgtctgaactagg

SEQ ID NO: 302423 - DNA, 315 bp, Homo Sapiens
cttccatatcaaaacatcaaacaatttgatgatcataccaatgggctgtaaaaataatggcacaaaactatcttcccatggacttttaaaaagaaccaaggcaagaaagtactagtttacaaccagaacccattctcttgtaaaagagacttttgcgggagggagggagtgtgtgtaagaagtaggcatttcccattttacagcaaggctcaattaatattatacctgggctaatggaattgtaaataaggtgggtcatctgatcatgattaggaatgagttgtcaggggtctaaggtaaaaaaatcagacaccc

SEQ ID NO: 302424 - DNA, 314 bp, Homo Sapiens
  misc_feature (18)..(18): n is a, c, g, or t
  misc_feature (79)..(79): n is a, c, g, or t
  misc_feature (108)..(108): n is a, c, g, or t
  misc_feature (138)..(138): n is a, c, g, or t
  misc_feature (153)..(153): n is a, c, g, or t
  misc_feature (179)..(179): n is a, c, g, or t
  misc_feature (207)..(207): n is a, c, g, or t
  misc_feature (212)..(212): n is a, c, g, or t
  misc_feature (234)..(234): n is a, c, g, or t
  misc_feature (246)..(246): n is a, c, g, or t
  misc_feature (253)..(253): n is a, c, g, or t
  misc_feature (284)..(284): n is a, c, g, or t
  misc_feature (300)..(300): n is a, c, g, or t
aaacaacactgctgaaanagtttttggagctagataatagattgtaatacagactagaaggaattgcagtacatttctncagggcagaaagcaggtgcagttatatcnctgcatgtgcatccgatgcttatgtatttnaaatgtaaattgttncttttaagagaaaatattatattgancattgatgcaaaggcattatgtgtttgngtttnatttccccgaggatataaaacncatacttcaccnataatgnggacttcggtgaaatattccaaagggtttgnaaccaaatctgggcanttaaggggaggcgg

SEQ ID NO: 302425 - DNA, 411 bp, Homo Sapiens
  misc_feature (129)..(129): n is a, c, g, or t
  misc_feature (279)..(279): n is a, c, g, or t
  misc_feature (312)..(312): n is a, c, g, or t
gcatttattaatgacctttaatggactatcatcaaggcagaagtaatagtaataaaacacaattaattagcttgttggaagtataactataatataattcatgaaattttactcattggaaaccatttncccagcagggaaaagcaaccataaagatgtacccaagtaatatatgggattcatgtaattgattgaaacaggacattttcctcagcttaactggagctgggtgcttgtcagccctaggcgggagcactctgctttctataccagggcctnatagaagcaggcaactgcacagggcacctaggntggggaatgcaccagcccaccctcataggtcactctacaaaggaccggggctccctatggcacttgttgttacaagtgctttgtcggggctctgtcccc

SEQ ID NO: 302426 - DNA, 509 bp, Homo Sapiens
  misc_feature (82)..(91): n is a, c, g, or t
  misc_feature (383)..(383): n is a, c, g, or t
  misc_feature (398)..(398): n is a, c, g, or t
  misc_feature (403)..(403): n is a, c, g, or t
  misc_feature (430)..(430): n is a, c, g, or t
  misc_feature (435)..(435): n is a, c, g, or t
  misc_feature (472)..(472): n is a, c, g, or t
  misc_feature (487)..(487): n is a, c, g, or t
tctagtagtcctgtgtattagtttcttaggcctgtcataacaaataaccacaaaatatgtgtcttaaaacaacaaatacagnnnnnnnnnnattcacagttttggaggctagaagtctgagatcaagatgtcatctgggccacactccttttgaaggctgtagggaagaatctttccttgcctcttcctagcatctggtggtgcttggcaatccttggcattctttggcttatagtgagaccctggtctgtctcatagtgagatccagcctctgcttctatcttcacttggccttctttactgtttgtctgtgtctgtctccaaatctccttcttcttttcttttagggaaaacgccagtcattggttttaggggcttagggngaattcatctggcangtccntaactgatcacatctggcaatgaaccnatttnccaaatatgggccccatttttgaggttccagggggancatgtaactttattntattattattattttgaggaca

SEQ ID NO: 302427 - DNA, 412 bp, Homo Sapiens
  misc_feature (218)..(218): n is a, c, g, or t
  misc_feature (401)..(401): n is a, c, g, or t
tagataaagtctcagataacaaccccaagaagaatagttgaacagtctgtccagtaggcatggtaatgacctttagtttcttctttggtgattaatctttgcaggttactgagatttcagacaggggatttaaggcaattgtgtttcttttggaagaacttttctcagtcagataaggaaacttcagagagcttccctctctgttcttggggcaagtngaggggagaaacaaaggaatgtcagagagacattgatgttaaggaagtttctaatgacttacaatttcctttagttcaaagtgctcagaaagccaaagcaccacattttggggatatcgttttcttgagccccaacaccagtcttcactattgaacactgtggagatctacattacccaaagngagttttgttc

SEQ ID NO: 302428 - DNA, 303 bp, Homo Sapiens
  misc_feature (135)..(135): n is a, c, g, or t
  misc_feature (228)..(228): n is a, c, g, or t
  misc_feature (288)..(288): n is a, c, g, or t
gtgtgtggttctggcactgaaatggggctgtttcctaaggctctgtccatggccacctctgtctatttctgcattctgtcttgcattgcttctgttgcctatatcctggtcagcacagtttatggtgaatcattncttattgaaatagagacggcaataatgaagccagctattataaattagagcaaatatacacatccaatacgttttaaacgcatgtgatctctnggagtagtatcactaggtagcttccatttcagttcggcttttgtatattactgtactccnaaggaatatcatttt

SEQ ID NO: 302429 - DNA, 304 bp, Homo Sapiens
  misc_feature (99)..(159): n is a, c, g, or t
  misc_feature (265)..(265): n is a, c, g, or t
  misc_feature (283)..(283): n is a, c, g, or t
ggcactagggaaggtaactatattcatttgttaaattcagtaaggaagcaaaagagtatgttgtgcaaacagtgttgtataaaaataggagaaaagagnnnnnnnnnnnnnnnnnnnnnnnnnnnnnnnnnnnnnnnnnnnnnnnnnnnnnnnnnnnnncaagtcctatcagtagttataataactgtagtcagtatatttaacaaaagacatgctgatttgattaaacccagctatactacattgtttacaagcatcatactanaataacagtgtgaaagtnagtttaaagccacaagaggtg

SEQ ID NO: 302430 - DNA, 459 bp, Homo Sapiens
  misc_feature (368)..(368): n is a, c, g, or t
  misc_feature (378)..(378): n is a, c, g, or t
  misc_feature (391)..(391): n is a, c, g, or t
  misc_feature (399)..(399): n is a, c, g, or t
  misc_feature (439)..(439): n is a, c, g, or t
aaggagggtacgccaaatgggaagcaattatgctgagacttgggctaaggaagagtctgttgttacaagactacccagagaagccaaatactcttccaccactgtttgaattctattcaaccaaggcaatctcaatgtaatactgaggagctgctcaaagtcttttgccaagtacatgatagaagagcaaaattttcacagccagttcaagatctggtcatcctttatgtttgaatctcacaactgggctcttcaacagctcaaagttaaatttgtttcactctttgtccttcggcaagacttctgtccccgttccatcaagatgaacaatttttctttgggggagagctgggaaaaatcattcttgnattgcaagcntatctggaaatantgggtccntggacatacccaggcttcttggaccacagaggctggaggnctttggtttcccccgggcaa

SEQ ID NO: 302431 - DNA, 338 bp, Homo Sapiens
  misc_feature (306)..(306): n is a, c, g, or t
ttggagatgaaaaagggagacagtctggtttcccactctcctcttcccacccatgctccttctaaagtgccaagaattccacacaccatgactttaaaaccacttgtcagtgagatctgcaatgacctctttcaaatcgaaagttacatgattctaaaatatatcagtatttctgagtatgcagttacctagaaaagcaaggctaaacagtgaactctctatgttgtaaatttctagaggaatatgaaaagtttgtgggtgtaatacagtacagggtatgttttaaatgactacaattacggaggngagatttctgggacactgttataggattaggt

SEQ ID NO: 302432 - DNA, 415 bp, Homo Sapiens
  misc_feature (397)..(397): n is a, c, g, or t
ggcacgaggtatttatcatggaagttttgtgctcatataactttaggaaatgcagggttgaaaaagttaaacattttaaattctagatttctcagaagttttaatacgttaccttctgaatctttaagacagagctgtagtatacagtgactctgaccatggaactcttttccccgtggcctgtacttccatgaatagtcatctaagcagataaataaatctctaacagcatctaaaaattataatggaatattttaaagatgctcaataatcttaatgtaaaaacattatttatataggatataattttatcacttatagttactagatctgtattttgtatttatatgttgaacttttgggaaattaatttatacataatggaaaggaacaaacnctcccttgctgcccttct

SEQ ID NO: 302433 - DNA, 236 bp, Homo Sapiens
  misc_feature (159)..(159): n is a, c, g, or t
  misc_feature (216)..(216): n is a, c, g, or t
aaggataatgttttgaatctagacttacaaagagttacagtacaaataggtaacattagcatggtaatatcgctttaagttttttgaagccttgaagtattgttggctttgatggaatagtattcttctctctaggattacagcctagtctacattttnatgatgaattatgcattggaaatagtgttcaaaaattgctggtctactgtaatcccnggggacattttttttaaagc

SEQ ID NO: 302434 - DNA, 311 bp, Homo Sapiens
  misc_feature (65)..(65): n is a, c, g, or t
  misc_feature (83)..(83): n is a, c, g, or t
  misc_feature (90)..(90): n is a, c, g, or t
  misc_feature (100)..(100): n is a, c, g, or t
  misc_feature (111)..(111): n is a, c, g, or t
  misc_feature (119)..(119): n is a, c, g, or t
  misc_feature (123)..(123): n is a, c, g, or t
  misc_feature (125)..(126): n is a, c, g, or t
  misc_feature (200)..(200): n is a, c, g, or t
  misc_feature (208)..(208): n is a, c, g, or t
  misc_feature (251)..(251): n is a, c, g, or t
  misc_feature (267)..(267): n is a, c, g, or t
gcaaaagaagtgctgtataaagctgttaaaaagaatattatgcttttatttattatttataaatngtggtatacatatctttnataattnataataaagntaaatgtatantatacatnattntnnagagaacagttaccagcacactgctggtacagatctaggtttaagttacaagaattttaggtaagtaatttatnctttctangccacagtgtctgtccacatttgtactctattataggcaagangttactaatattattnattaggataagggggtaggtgatatgggtttgggccatggcccc

SEQ ID NO: 302435 - DNA, 436 bp, Homo Sapiens
  misc_feature (97)..(97): n is a, c, g, or t
  misc_feature (382)..(382): n is a, c, g, or t
  misc_feature (413)..(413): n is a, c, g, or t
atgttcccgaccctcagagggatagacccttccctgctgcggctttaagctcccaccaggtgggaatgtgctgggcagggaacaaagactgtctgtncaaattgtccccaaacctagctctgagcacatttcctgatttggagggaggatgggaggaggtgcttccactgcaggacttgatctggaaggctgctttggacctcctgacttatccggcccaggcggcttcaaaaacgccaagttcttaccagggaattaccagctgactcagtcatagggttctggacagcttaggatcctccaaccctcgatttcttgatttcagcaggaagatagttcttttgttacccttctctaaaagaatgggaaaatgtaacactgncgtttccatgggggcctttaaagaaagaccnttctcctttaggaaggagcatcc

SEQ ID NO: 302436 - DNA, 301 bp, Homo Sapiens
  misc_feature (64)..(134): n is a, c, g, or t
  misc_feature (291)..(291): n is a, c, g, or t
aaacaggctagaacaattttaaagggagtcaaatgtatagcccaaatatgtggaagacttgtannnnnnnnnnnnnnnnnnnnnnnnnnnnnnnnnnnnnnnnnnnnnnnnnnnnnnnnnnnnnnnnnnnnnnntgacacccgtgtgaagccccacctaggtttttaatcaggttcatttatgtaaataaaaaatggaaacacgtttagttgtgattggtgagtgtagttgatttctcattgggctggcaaaaatgaggttcttggttgggtcaatacagctgaacccctnattgaattga

SEQ ID NO: 302437 - DNA, 229 bp, Homo Sapiens
  misc_feature (209)..(209): n is a, c, g, or t
ccctccatgtggcccctgaacaggctgctgctggcccaccacggtgcctctagtttgtgtaaaatgcatatgttaatttataatatatgaggcttttttagctctaaaaggctattattcactagttgctgtgtgaatcagtatttctgggtgcagttagaaattattagagttgatgcccaagactcatctccatcagcacgggggangcatcttctccgtttatggg

SEQ ID NO: 302438 - DNA, 409 bp, Homo Sapiens
  misc_feature (320)..(328): n is a, c, g, or t
  misc_feature (394)..(394): n is a, c, g, or t
tcccttgaaaaggtcagattttgaccaaagtccttgactgattcagaagcatgccctgaccattagcccttgaaacctacagttttttttatttgtagccaggtctgatgacaccctaattttcttgataactgagctggggtattggcaggtggcaacggcctgcctctcctgaactcttccatttgttgaatcaggaccaggtgatgccatggactccagcctattccctagaagtaggacagaattcgtttgaactctcagaatcaaaccatttcatgctttctctgtttcataccccttcttcccttgggctctannnnnnnnnctgggatttgcttacaaaatatggttttcaactttataaattgggagagcaaacagacgtctgggnatttgtttatctccc

SEQ ID NO: 302439 - DNA, 162 bp, Homo Sapiens
  misc_feature (11)..(11): n is a, c, g, or t
  misc_feature (108)..(108): n is a, c, g, or t
  misc_feature (140)..(140): n is a, c, g, or t
aatcttgaaanggttatccctagatctagtagcagtttatttccaggtcatatatgagaactggtctggggaaagggcccagttcctttctccacctccaggggcatngatttggaggccaatgtatatccagttgtctnagcatacctccctgaggctagg

SEQ ID NO: 302440 - DNA, 453 bp, Homo Sapiens
  misc_feature (349)..(349): n is a, c, g, or t
  misc_feature (400)..(400): n is a, c, g, or t
  misc_feature (413)..(413): n is a, c, g, or t
  misc_feature (430)..(430): n is a, c, g, or t
ttcctacattccaaactacctagtcattacaaatttacagtaacgtgaaaatcaaacaaatcatgaactatgtaatatgaatgtgagtatagtatgagattatctttcaaagatcttaatactcttgagggagatggcaataacagctaatatatggggcagtaatataatgaagcccgtgatgatttgggtgttgtaggctagcccatgtgtgctaaatgagcggggaggggactaaagtgatagaggtttttaggggaaagttgtgggggtggggttcgtgagagggtggcgaactctgttgggtacacacttgttttgggtgttacggggaaagggcaggataacntggaggatgttgccgcagaaggctatggatgatgtaggtgcgtcacactcntgcccggggcccntttaaatatatttgccnttccccgtcctccattaaacctc

SEQ ID NO: 302441 - DNA, 103 bp, Homo Sapiens
taaaaaagatactgtacataacctctcacggccaacttaaatccttgctcctcaacataaatttctgactatctgataacattatatttgaaccgaaagtgtt

SEQ ID NO: 302442 - DNA, 345 bp, Homo Sapiens
  misc_feature (34)..(34): n is a, c, g, or t
  misc_feature (86)..(241): n is a, c, g, or t
  misc_feature (271)..(271): n is a, c, g, or t
  misc_feature (309)..(309): n is a, c, g, or t
  misc_feature (322)..(322): n is a, c, g, or t
actggaagaaacaacaaagacactagatcagctnccagaactagattaacttcaaagaaaagagtaaatttaaacaaaaggctatnnnnnnnnnnnnnnnnnnnnnnnnnnnnnnnnnnnnnnnnnnnnnnnnnnnnnnnnnnnnnnnnnnnnnnnnnnnnnnnnnnnnnnnnnnnnnnnnnnnnnnnnnnnnnnnnnnnnnnnnnnnnnnnnnnnnnnnnnnnnnnnnnnnnnnnnnnnngctacttacttgttggtaagaacaaaggtnattatagtaaatatagttttaattggattcctacacanagcactagagganggagataaggattgggacacctt

SEQ ID NO: 302443 - DNA, 333 bp, Homo Sapiens
  misc_feature (21)..(21): n is a, c, g, or t
  misc_feature (57)..(57): n is a, c, g, or t
  misc_feature (276)..(276): n is a, c, g, or t
  misc_feature (301)..(301): n is a, c, g, or t
  misc_feature (308)..(308): n is a, c, g, or t
actaaggctcaagtaggagancttacttgtttagtaagatcatacagctaggaagtnggagaggcaagagttgaacccagatcttcctagctcctagtccattgttctgtctactgggtcacactggaccagccaggaggcaggaaaatcagctggggaatgtggtgccaacgtgtgatgtttgcctaaatgtgtgcatccttgctggaagccagccatgattcatgctgcataagtattcattaatgtttcatttcatttatttggctatccatnatgctttccagggcgaaggcaaagnctagggncaagggcagacaagcagccttaaag

SEQ ID NO: 302444 - DNA, 388 bp, Homo Sapiens
  misc_feature (58)..(58): n is a, c, g, or t
  misc_feature (109)..(109): n is a, c, g, or t
  misc_feature (239)..(239): n is a, c, g, or t
  misc_feature (266)..(266): n is a, c, g, or t
  misc_feature (304)..(304): n is a, c, g, or t
  misc_feature (372)..(372): n is a, c, g, or t
gatgctcttagaacactgaaaaatcttagaaaattttgttaaataataattaaaattntcttaaattagtgtgacatctatgttaaaggcaatataattagatagcgtncttcttcaagtgcttagggttaggagaagtatttcaccatcttcattcatcaagcatttaacaattttatatgatgtgccagatatcatgttataccttggtgataatacatgcctaagacaaatttccngtctatgaagtttggaatctagttganggagacaggcgtgatgaaagaaataaagcactgtagangtaggataaaaatccgcatttagggggactgctggcagctcaaagcagactgggagatatggggaganagagaagctgatgaag

SEQ ID NO: 302445 - DNA, 147 bp, Homo Sapiens
  misc_feature (51)..(55): n is a, c, g, or t
  misc_feature (79)..(79): n is a, c, g, or t
  misc_feature (82)..(82): n is a, c, g, or t
  misc_feature (90)..(90): n is a, c, g, or t
  misc_feature (104)..(106): n is a, c, g, or t
  misc_feature (108)..(108): n is a, c, g, or t
  misc_feature (115)..(115): n is a, c, g, or t
  misc_feature (136)..(136): n is a, c, g, or t
cctagccaaaagcctcattaaacttagactaagcaaccaatgtcaataatnnnnnaaaggaaagcactgactatgatantanctagaaangtccttcatttaannnantcaacanatcaacatgagtcagtaaggnttgagagacta

SEQ ID NO: 302446 - DNA, 511 bp, Homo Sapiens
  misc_feature (46)..(46): n is a, c, g, or t
  misc_feature (321)..(321): n is a, c, g, or t
  misc_feature (374)..(374): n is a, c, g, or t
  misc_feature (409)..(409): n is a, c, g, or t
  misc_feature (429)..(429): n is a, c, g, or t
  misc_feature (435)..(435): n is a, c, g, or t
  misc_feature (444)..(444): n is a, c, g, or t
  misc_feature (473)..(473): n is a, c, g, or t
  misc_feature (489)..(489): n is a, c, g, or t
ttaaagttgttcattggttccatgtaaacatttaacataacgtttnccccaccccccactttttcttaaataaatgggagcttcaaccacggggagaggccctggctctctaagcctcccctaggccctgctctggctggaggtcagagggccataggtgcactcttcaccactttcagactcttcctcataccgccccgttccatgtgtggcctgggagagacagaggagagggtgaaacacagagcaaatggaagccttatcttcccttgtgttcggggaggctgagtctgggtcccacagtccgagcccgggcggggntgctggggatgcacgtgactcaagagagccggcaaatgcaggcagagcaggtnatcgccgataaggacttgcagcttttccgaggctnggagagggctcgcccagggnaggctnggagttttnttcacttaagggacattttcaccaagggnttaaaaataggttttnttttcaaaggcccaaagccagg

SEQ ID NO: 302447 - DNA, 301 bp, Homo Sapiens
  misc_feature (154)..(154): n is a, c, g, or t
  misc_feature (258)..(258): n is a, c, g, or t
  misc_feature (265)..(265): n is a, c, g, or t
tttgtatgagccataaatgttcttcattttaacttatgagagtaaaactctacattggaggctatgaattacatatcacacaactacaaatcactaggcatgctaaggtagtttagctaaatcacacagtatatgctcaacaaatgcaactganttaagcagggggcatcacatatttgaaagtaaaatttggcataattattagtgattgacaattccattcaagatctttggtgtgtctagcgtttcctgtcagantctctanaagagacacagtttatcttttcattgtcttctaact

SEQ ID NO: 302448 - DNA, 352 bp, Homo Sapiens
  misc_feature (167)..(167): n is a, c, g, or t
  misc_feature (211)..(211): n is a, c, g, or t
  misc_feature (284)..(284): n is a, c, g, or t
  misc_feature (326)..(326): n is a, c, g, or t
tggaagagatgttggctagatcacagtaatgagaaaactttctttaaagtaactggaataacatcaagacaaggtgaagatcacacatgaccaggcttcccagaaaacctgggagacagaggcccagctacatagcaaagaattcattaactttattcatgatggancctcaaacttagccctgtatttcctatgtagcttttgttatgantaagtaatgatttggtctgttatatagtgttcttttcacattttattatgaacttcataccatagctccattntgatttatgctaagttctcttttgtggtaaaaatctttaagnctctatttttaggtagcagatgtacc

SEQ ID NO: 302449 - DNA, 279 bp, Homo Sapiens
ctgccatgtatttcttttatacaacaatgaatatacaacctcagattttttgatagtgatgtttataataaaagtaacatattctttgaagaagataatgtaattttattactgtgatcaacaacataatccaaaaagactattatttagtacaggatttctcaaccttggcacactactgacatgttgggttcagataatgctttgttgtaggagctgccatgtgcactgtatgatgagcagccttcctgggctttaccccattcgatgctggggagc

SEQ ID NO: 302450 - DNA, 422 bp, Homo Sapiens
  misc_feature (67)..(120): n is a, c, g, or t
  misc_feature (334)..(342): n is a, c, g, or t
  misc_feature (377)..(377): n is a, c, g, or t
gtgtttttttgggggggcggggttttaaatttatctatattttgagatccagtctcgttctgtcatnnnnnnnnnnnnnnnnnnnnnnnnnnnnnnnnnnnnnnnnnnnnnnnnnnnnnngggtcccgcaatcctcccaccccagcctcctaagtagttgggaccacaggcacatgccaccacgcccactaatttttgtatttctgatagagacaggactttgccatgttgcccagggtggtctcgaactcctgagctcaggcaatctaccgcttcagcatcccaaagtgctgagattacagacatgttgccactgcatggcagcctgaagtannnnnnnnnaaacttttctatgtatccatatgattatttaccanttttttcaacataagtgacagccattactggggacaagcctggtt

SEQ ID NO: 302451 - DNA, 301 bp, Homo Sapiens
  misc_feature (42)..(42): n is a, c, g, or t
  misc_feature (156)..(156): n is a, c, g, or t
  misc_feature (186)..(186): n is a, c, g, or t
  misc_feature (188)..(188): n is a, c, g, or t
  misc_feature (225)..(233): n is a, c, g, or t
gccttctatggcaagtgcacaccagtaacaagtttaggcttnttggtgtgatgggctttgtagcttgaaatcagtaggtgctacttacttccttttttacacatgaggaaccaagtatattttaatattaaacctctttatagaagaaccaagcangttggtttggctgtatcaatgcacagtggngngtgttgattatcgtttgcctctttggcagagaagaannnnnnnnnctctttagttcatttaagttgatttgttgaatgtttccatctatacaaaaaaagaattgctttgtata

SEQ ID NO: 302452 - DNA, 417 bp, Homo Sapiens
  misc_feature (397)..(397): n is a, c, g, or t
tctgcaaggtgtttattaccaaagaggtttgtaaaccagatgtctcttctcttgaacactaatgaataaaatcttgtattttttggctttctcagctaatcattacttaaaccttcagcttaaaaactggggaattgaaatccctgtggctggctagtcctctgaaggctttgtgatgatgtcactctcagatcgggacagaagcattcaagagagggataatactcttgcttatgtgacagctgtatgtgtccaagagcatttggctacattcagtgatttgatggccttgttctgattacagagctctttgctatcttcttcctttgccattgaattttgtcaaatttgctcaggtattctctggaaggaaagttcctctttagtttgttcaatncaccacctgtcccttcaggg

SEQ ID NO: 302453 - DNA, 498 bp, Homo Sapiens
  misc_feature (44)..(44): n is a, c, g, or t
  misc_feature (374)..(374): n is a, c, g, or t
  misc_feature (396)..(396): n is a, c, g, or t
  misc_feature (406)..(418): n is a, c, g, or t
  misc_feature (430)..(430): n is a, c, g, or t
  misc_feature (449)..(449): n is a, c, g, or t
  misc_feature (475)..(475): n is a, c, g, or t
aggggatggtgccttaaaattcactagactcccaggtagttgancttcgtgaagaaagtggtaacctgagatgaggattgatgcctcctttactgggatgtacttctgagagccagacttaccttcgcacagccatagctccccaagaatagcattccctctcccaccaaaaaaacatccggatctcaattttcataccaggatgcttactgcagactgtaatcagtttcctggttgcaagatttctctctgctcgttggcaagtcagcctctcagaagatatgataactacatctgtagatgatttgtacaatgttgggggtgggcagtggaccccagtggtttatgctcatgcttgccatttctgtccctgnaaggacacagtttccttgagtnccagaaggannnnnnnnnnnnngtggacattccnttttaaaaatgggctgtanttccggggaggggtcacccggggagncagtttaccaacccaatttttat

SEQ ID NO: 302454 - DNA, 284 bp, Homo Sapiens
  misc_feature (59)..(59): n is a, c, g, or t
  misc_feature (77)..(77): n is a, c, g, or t
ttcccatatccctatatccccattttcaatcaactcatttcgttgtgtacaagagaaantacaggaccctggctgantggggttggtgtagcgggatgggatgccaggttctgagcaagctaaagcagaaagagccataagattgcctttcaatagctgcctcacccgaggacatgtaacacccaccttgcacacccaggcacactctttatccaaacaaaacatgggaagaggttctttccgaaggaacataacataggggctctactgggcttgtaggaaaa

SEQ ID NO: 302455 - DNA, 475 bp, Homo Sapiens
  misc_feature (39)..(39): n is a, c, g, or t
  misc_feature (215)..(215): n is a, c, g, or t
  misc_feature (385)..(385): n is a, c, g, or t
  misc_feature (390)..(390): n is a, c, g, or t
  misc_feature (398)..(398): n is a, c, g, or t
  misc_feature (422)..(422): n is a, c, g, or t
  misc_feature (447)..(447): n is a, c, g, or t
  misc_feature (453)..(453): n is a, c, g, or t
ttaactaattcatggtcactacatgtgggttaccctggnattactctttcagtacagacacaaactattttgccacaattaatgttttggtcaacaatgtgcagacttaaagccctgagttatatgactaggcaaataaaaccagaccacaaaatttggtctaccctggttggctatgattcacccatatgggcaagccagcagcaggcttgctnttattcccaacaaccctagggaaaatcagactgtcatattatacttctttgtccctttatacagatggcagagtcagtctgtttgaaattgtgggagctcaaatatttaacttggtgtaatgcaggtggggacaatttcaacagggtggaggattaggtcaagtggtccnaactngaaaaacntttcacacatcacttggaggaagntgtgagggttccgggccctttttcngcgggnagggggagcagctttgggggat

SEQ ID NO: 302456 - DNA, 382 bp, Homo Sapiens
atatcatcaacatccttaacttttcgacttgacctgtcattttctgagagagctgctttagagctctattgtattggtagattatcagtatttgcttttagttgtatcagttttcccttaatatgtttcaaggctatgtttcagatgcataatggttagcaagttattcacttgttataaagctaggtacaagatcattgttgtactttaaaaaccagatagaatgtcatagccccatgcagtacggaatcatgggatgtctcatgttcttaacatctgtaggctgatgatcaacttgggataggacccaccagagggcttgctcaggggaccatctctaatagggcacgggaaaggactgtcacctaaaatgtccaaaagg

SEQ ID NO: 302457 - DNA, 419 bp, Homo Sapiens
  misc_feature (326)..(326): n is a, c, g, or t
  misc_feature (346)..(346): n is a, c, g, or t
  misc_feature (356)..(356): n is a, c, g, or t
  misc_feature (361)..(361): n is a, c, g, or t
  misc_feature (400)..(400): n is a, c, g, or t
ttcactcttacattcttcttctaatatacacatgaaaacatttgttttatcaaaaataagtaagaatgcttaaaaaacttgacaattaaaatctagaattgtctgtctgaatgtttcataagtggtctgttcgttagattgaaatttgtgaaaacaggcctctcactaactcatttgcaaatggtaacaatagggatctagtgagtattttgtaaatatttcttaatgagctatgtgatttatgattatgccttaactgatgttagtgttgggtgccagttatatttataaaaatcctgggattttatattaggcaaaattttatnatggagtagggcataaaatnaggggcgtangtttnattatttaggagtgtattagggctttaccttaatttttnccaatttatgagggggagc

SEQ ID NO: 302458 - DNA, 300 bp, Homo Sapiens
gaattgataggactaccataaaattactttttgatttctggaacataacagcagaaaatgtattgaccttttgcaatttgaaacaatactttgttgcctcatattcaaaatgcagtcttggtttctagcatacctggaaatgtcagtttaccttatttgtgtctttctgtgttccaaaaaaggatttatgttcagctgaataagccgatattattctaaactatggaaatcaaatgacctgagttctattctagcattctaatgaatcatttgaatgaagcctgaaaaatgaacattaac

SEQ ID NO: 302459 - DNA, 487 bp, Homo Sapiens
  misc_feature (350)..(350): n is a, c, g, or t
  misc_feature (390)..(390): n is a, c, g, or t
  misc_feature (398)..(398): n is a, c, g, or t
  misc_feature (445)..(445): n is a, c, g, or t
  misc_feature (465)..(465): n is a, c, g, or t
tcaactcattgaaaagttgtgttgccaagagtgtgagtatggttggaaagattaatgaaaggtttgtgtttcggtttgtggctttggtcactgcttgcctctatgcctcttaagctgcccattcgattcaaattaagcagtgtttctcagactgtgcctgccagcatgctgtacatgcagctgctgccttccatccatcacagcctaacttacccccgctccaagttccagggtcagcctttcctgattgcattccttgtccctgtcatgcttcaagctgccctccttctgggctattcatcacccaggcaattgttgctgttagctgtctttctcacatgaccagtccnggcaaaggtgtgccagacaggggatgccagtggggttggntggcatgnccggggtgtttgcccggggatttgttaggggctctttaaggaccctngggtaaattgccgttggggnaaaccttgtgttgaagggcaaa

SEQ ID NO: 302460 - DNA, 128 bp, Homo Sapiens
  misc_feature (70)..(70): n is a, c, g, or t
  misc_feature (76)..(76): n is a, c, g, or t
tcatcaagatggggttttgctatgttgcccggctgatgtcaaactcccggactcaagcaatctacctgtntcggtntcccaaagtgctgtaattacaggcgtgacacttgtgcctggccaaaaaattt

SEQ ID NO: 302461 - DNA, 269 bp, Homo Sapiens
  misc_feature (32)..(32): n is a, c, g, or t
  misc_feature (108)..(108): n is a, c, g, or t
  misc_feature (113)..(113): n is a, c, g, or t
  misc_feature (209)..(209): n is a, c, g, or t
  misc_feature (216)..(216): n is a, c, g, or t
  misc_feature (232)..(232): n is a, c, g, or t
  misc_feature (251)..(251): n is a, c, g, or t
tcaggtgatttccaaaaccaaagccagaagtntgccagatgtttctttcaaatggccaatgggcagggggtgtgttcaagccacagtttatcttcgcagtggtttganttgantgtacaaagggagatcctgtgacacttttacaacatctttccaagaacacaaggtatgtgacatttcccttacccaaccacggccagttgggttgngttttanctttgcgcacctcagntagccatgggaagttcatnttgtctgtcagccagggg

SEQ ID NO: 302462 - DNA, 182 bp, Homo Sapiens
attcggcacagctgggatataaaaagcaatgagtataaaatctgtagtttgatgacattttttcccttaagaaatttatggatgtgttagcagaatatagcatgatctcctgaactctctgtagttaatatttcagtcagtattaggagttgcttcattgaccttgaaaattttcttgttca

SEQ ID NO: 302463 - DNA, 351 bp, Homo Sapiens
aaaagcctaccctgcctacttttaggggttgttattaaaaaccaaagcactttgtaaatggtaacacacaatgtaagtgtaaatggttttctttgtaattatactacagaattaacattagtataataaagaactttgtccatatccacattaagattttgagtgaagctataatatacatatttatgaaactgaaactcaagcatattttctattactggcaaatatctgtcagacagaacgtctctacttaacaagaactaagtcatcagtaactaattgtcaatacagtaaggtggctatgattcaagcaagcacttaacagatgtatggagtcacaataatttcact

SEQ ID NO: 302464 - DNA, 344 bp, Homo Sapiens
  misc_feature (145)..(145): n is a, c, g, or t
  misc_feature (164)..(165): n is a, c, g, or t
  misc_feature (175)..(175): n is a, c, g, or t
  misc_feature (245)..(245): n is a, c, g, or t
  misc_feature (308)..(308): n is a, c, g, or t
  misc_feature (325)..(325): n is a, c, g, or t
agcaaaaagcatacatcctttggggaccgtccccttcctccctcccgtcctgccttcccagcttggctgtgtgtttgaagctccggtgaaagtgtcatatggtttgcgtcgggattctggagccagttgcctcaaaccttgtttnctcattattagactatttnncttgtttgtnttaagtacatacttctgccaccttctctccctaccttgatgccttcaaccaaaaaatgaaaggaaaggantgttttcctgcaggtgatttagaaggtgtgcaaggccagatgttttggtgaattttagcagantttgcctgcatgccctncttctcctgggagcagctg

SEQ ID NO: 302465 - DNA, 427 bp, Homo Sapiens
  misc_feature (136)..(136): n is a, c, g, or t
  misc_feature (277)..(277): n is a, c, g, or t
  misc_feature (345)..(345): n is a, c, g, or t
  misc_feature (356)..(356): n is a, c, g, or t
  misc_feature (383)..(383): n is a, c, g, or t
  misc_feature (416)..(416): n is a, c, g, or t
tgtctgtaagatctgctccaacatagaaaagcttccttctttggttcaatggtggttgctgcaatgggatcaaatgtcttaactctcaaggctgtctcataactacagcacaactgaaaaaagaacactcaggctngaaagcctcctattctcaacggccatgttcattttgtcattttcacctcctgtacccggaaatgcaagtgggcagcattccttttaggccttttcctccccaccactacttctgttattgaaaacttgacctcactttctncaccactatttacagggaaaggttaggtaccttgccaggcatcccatgcacctccctctccagggttnaaccattattntggattttctatagtcatctaatcatncttccttggctccatctgtgggagatttttccntgaaaaatagg

SEQ ID NO: 302466 - DNA, 485 bp, Homo Sapiens
  misc_feature (290)..(290): n is a, c, g, or t
  misc_feature (368)..(368): n is a, c, g, or t
  misc_feature (407)..(407): n is a, c, g, or t
  misc_feature (415)..(415): n is a, c, g, or t
tggaagagtctccaaaggctagcaaaatgcccatcctttaaacagaataattagcaaagagaaattggagcagagttcgtttagaaaacagttggtttttggtatgaatttgtcacttttctaatgtgaaaaatataagatgccaacgccaaaactgaaagtcaggactcaagatacttgtatccatttagaaattactatagccctgttattcagtacttctgccaatatcaacttctaatgcaagggaacttggaacaatggagaaaacagtggaaaagttggaattnggataacctgggtcagagtccttgccctgttcctatagctctttagcctttaaggatgtgtcctaaccttttccagtnccagttgactttgtccatcttaatgggggatggaaaagnggattttntcttcaaggacatttttgttaggttcaatttgggccaattcccttgttatgtgttttaggcataggtgcc

SEQ ID NO: 302467 - DNA, 149 bp, Homo Sapiens
ccctgtggcttcctgttaaaatgactgtgttacatgccttatttttattaaagtggaatttaacaaatacttttattattttgaagcatttcatcaattctcggtggaagcactacatcatcgaatgggaaatcaacaaatgaaaaatg

SEQ ID NO: 302468 - DNA, 393 bp, Homo Sapiens
  misc_feature (15)..(15): n is a, c, g, or t
  misc_feature (229)..(229): n is a, c, g, or t
  misc_feature (267)..(267): n is a, c, g, or t
  misc_feature (288)..(288): n is a, c, g, or t
  misc_feature (316)..(316): n is a, c, g, or t
  misc_feature (329)..(329): n is a, c, g, or t
  misc_feature (346)..(346): n is a, c, g, or t
gtttcctgtaagctnggccttgtgcagggtgtcagagatgccaagtaggtttgacacggcccatgccccagtgatctcacaagctcagggggaaagatccacatagccacgctgtgtagtaaccctgccttagagaagagggcgggtagctggacactcaggcagacacattcacccctgccaccaaggtcagggaggacttctgctctggagctgtgtcctgagggtnaatgaaatgggctgttgtatgtgtggttccccctacancccttccctatagcacttccnaccaggaatagacctactgctgtgggtnccttagcatggangaccagggatacaaggnctgattaaggtatcctacaaaacagattgattaattccctaaaattt

SEQ ID NO: 302469 - DNA, 544 bp, Homo Sapiens
  misc_feature (231)..(269): n is a, c, g, or t
  misc_feature (356)..(356): n is a, c, g, or t
  misc_feature (400)..(400): n is a, c, g, or t
  misc_feature (456)..(456): n is a, c, g, or t
  misc_feature (484)..(484): n is a, c, g, or t
  misc_feature (508)..(508): n is a, c, g, or t
  misc_feature (521)..(521): n is a, c, g, or t
ggcacgagcaccgtagcttatctttctttcattagctctagaagtgtttcacctttccatgtgcattttaagttgctaaggaagcaagttggattgtcaggaaactgcaagtttgatgtgagaagtcaggcccattcccattctgaccctctatagagcgcgatgtgatgattgatagccaagctgaccagagaactttagagcttaaagaattttataagcaataacaannnnnnnnnnnnnnnnnnnnnnnnnnnnnnnnnnnnnnngccagacagtctgagtatgtttatatcatcattatttttgatgctacctgtcaggtagctttccaaagtgataatatttttattatnaaaatatttaaataatcatattggataaaattggaatgtttccntggacccttcccatggccagtcttcaatctttgtccccactgggtaaccattgttnaccatgggggtttaagggtatacactanactgggtaacagtttacccgtttnggatatattcttnccggaccgtttaggggtaccttt

SEQ ID NO: 302470 - DNA, 347 bp, Homo Sapiens
  misc_feature (311)..(311): n is a, c, g, or t
ttaaatgaagcttagtccatctcaggtagacactggtagttactgacaaggtaatgagactcttaggcactgggacagagagggtggggggaccacagacacaataaatgtagggagcttttcctttagggattaaagcaagccaaacagtcaggtggaccccagcatccattcccgagagcaagtgctcatccttggcaataaacgaagactgagtccagggccagaggcgaggggtcctatggctcccatctgggaagcagcccctcagaaatggcagtaattcacagtctggactgaactccccaggncttggaggtaaatggtgaacccaccaaggtaggttt

SEQ ID NO: 302471 - DNA, 560 bp, Homo Sapiens
  misc_feature (21)..(21): n is a, c, g, or t
  misc_feature (28)..(28): n is a, c, g, or t
  misc_feature (38)..(38): n is a, c, g, or t
  misc_feature (41)..(41): n is a, c, g, or t
  misc_feature (44)..(44): n is a, c, g, or t
  misc_feature (52)..(53): n is a, c, g, or t
  misc_feature (57)..(57): n is a, c, g, or t
  misc_feature (63)..(63): n is a, c, g, or t
  misc_feature (69)..(69): n is a, c, g, or t
  misc_feature (83)..(83): n is a, c, g, or t
  misc_feature (85)..(85): n is a, c, g, or t
  misc_feature (87)..(87): n is a, c, g, or t
  misc_feature (92)..(92): n is a, c, g, or t
  misc_feature (363)..(363): n is a, c, g, or t
  misc_feature (379)..(379): n is a, c, g, or t
  misc_feature (386)..(386): n is a, c, g, or t
  misc_feature (408)..(408): n is a, c, g, or t
  misc_feature (415)..(415): n is a, c, g, or t
  misc_feature (425)..(425): n is a, c, g, or t
  misc_feature (452)..(452): n is a, c, g, or t
  misc_feature (471)..(471): n is a, c, g, or t
  misc_feature (485)..(485): n is a, c, g, or t
aaaatggcccattcacacagntggcaanaaaacccccnccnctngcaccccnnaccngctccncccaanccccacccccccanangnatagntgagtgtcctcatgatgtggcccctggcttcccctgaagcaaatgatccaagagagcacaggtggagccatgatgtcttttattaactagtctcagaagtcacactgcatcatttgggcaccatcttattgagttacacaggtcagccctgctccctatggaaagagacagagggtgttagatgcccagaggtgaacctcattgggtaccatcctgcaggtgggctgccactctgctcaatccaaatcacagctctcccgtttctcaactnccaacagttgctgttnctcaggncaaagttcacattctgcacagntcagctncggctggacntttgaggttaaatgatgggcctttatngtgaactggggttttggtncagccttgttattntttaaggttcttcagtgtgttgaggaagtttgggcctgtatgttgtttgttgaatggggtttttttggacatgat

SEQ ID NO: 302472 - DNA, 131 bp, Homo Sapiens
  misc_feature (57)..(57): n is a, c, g, or t
  misc_feature (68)..(68): n is a, c, g, or t
gtattttttgtagaaacaggcttttgccatgttgcccagggttagtcttgaactccnggggttcaagngatctgcccacctcagcctcccaaaggtgctggggattacagggcctgagccaccgtgcccgg

SEQ ID NO: 302473 - DNA, 108 bp, Homo Sapiens
  misc_feature (48)..(48): n is a, c, g, or t
  misc_feature (59)..(59): n is a, c, g, or t
tatgaataaaactctccataaaataggattattgagtatactgtaccnttataactttnacttgggtaaaataaggccggtaattggtctactgaaaatttaaatttc

SEQ ID NO: 302474 - DNA, 294 bp, Homo Sapiens
  misc_feature (190)..(190): n is a, c, g, or t
  misc_feature (253)..(253): n is a, c, g, or t
tgacatgagaatctcgttctgtggagagtgatgtccatacttggtttgagtggctattagagctgcaaacgatacctcacaaagatttgtaaattcaaatggaagaagtgccatatgctgtgctttctaaatattaatatcaatactcgtattttaatcccattcaccaaatagggaactattttttggngaaattgactagtactgtatacatccatcttccgggatagccctcatttcatcttgaaaaganttcaggaaaattggggatttgcaggatttgtaataaatggg

SEQ ID NO: 302475 - DNA, 337 bp, Homo Sapiens
  misc_feature (89)..(89): n is a, c, g, or t
  misc_feature (113)..(113): n is a, c, g, or t
  misc_feature (136)..(136): n is a, c, g, or t
  misc_feature (182)..(182): n is a, c, g, or t
ctagcctcatctgtgggcgatttaacttagttgaaattgtaatacattatttgtatattgtttatgtgctgttatcctttaagtatttncttgtgttgctacattgccctttngttgctacattgctacatttaangaatggggtggaagatcgtcataacctttggaaaatgagacctggnctcccgcatgttttgctttcatgcacagggctgagtcccaactgctgacagtgctggttcattccctgggtaataaaatgagaaaaataagggatatgactagaagttttttaagggaagcttaaatatattcagttgaaagcaccatccatccc

SEQ ID NO: 302476 - DNA, 129 bp, Homo Sapiens
tctagatttaaaaaggacagtgtctaaaatttgactcttttaagttgctaatacatatctgcgttgtgccttgatgcctttattatggttagtactcaaacaagcactaatattagccttctattactc

SEQ ID NO: 302477 - DNA, 373 bp, Homo Sapiens
  misc_feature (49)..(51): n is a, c, g, or t
  misc_feature (53)..(53): n is a, c, g, or t
  misc_feature (354)..(354): n is a, c, g, or t
ctgataattctagagggaaggagcattaccaccaccatgtaagcgaatnnnanactgctctcttcagatctcgaggcacagctgtcaagggttttatcatgctgttgccatttgtcaggcatgctggccacccagcatctgagcctcttcctatggatgggaaatggtccactcttgaggaaaagcaagtggcccagacgaggggctgaaagcaccaggaaacttgctctcccagcctctcctggcatctgctgggtgacaacctcgggagcacagacattacggggggaaatggggggcccggctaggcagggcctggggcttaaccagttgttccttccaaacctggggttnttccacctttcccagagga

SEQ ID NO: 302478 - DNA, 444 bp, Homo Sapiens
  misc_feature (421)..(421): n is a, c, g, or t
taaaattaagaggcctgagttttaggctgtcttagtggtgggacctcagacccatagtttgcgtgttttctggatatgttctctcatagataaaatgagaggcttggagtagatgggcctgagcctaggggtttgtccaggtgtaacatcttattatagtattgccaggactcttagaatcatggagggtgaggagagagaacatttgcagttgagaattacaggggaatttctttttctctttttctacacttttctccactagcatcttgtttgtgactagaattaaatggggggacatgggaggtttgttctctgcctccttgagtagggatgacagaggtgctttcttcgaaagtgctgtgtgttcaaagttttattttcagcactagcctcttgtgaattggccagttcacctgtnctgtttcccggtaggtaggggca

SEQ ID NO: 302479 - DNA, 428 bp, Homo Sapiens
  misc_feature (347)..(347): n is a, c, g, or t
  misc_feature (382)..(382): n is a, c, g, or t
  misc_feature (404)..(404): n is a, c, g, or t
gatgtctcactaagattgcctagggctgctttattgctcacctacttcaaagtattgggaaaacatgattatgggtacaggtgatgctgtgttgcccccagacaggtttcttttgtcaggttcttttgatggattaggaacctacaagtggggagattttagggaaatagcccctccacttggatttcaccaaaacgtctttagggttctcttaccccaagaaacacgcattcctctttagtgtggcagcccactctattggcaaagttaaggcagaccagttttactaaaaaggagccacccagaaacttagacagaaaatacttgagggcacagatgaggaatgnaggcacaaatgtgcattaggcaaggtgccagtttncccgggcccttaaactgaaggngccagggttcagtcttgttcctcc

SEQ ID NO: 302480 - DNA, 421 bp, Homo Sapiens
  misc_feature (54)..(127): n is a, c, g, or t
  misc_feature (348)..(348): n is a, c, g, or t
  misc_feature (369)..(369): n is a, c, g, or t
  misc_feature (377)..(377): n is a, c, g, or t
aagagcctccaggacagtaattccctgtttaaagcttccctcttgatgagacannnnnnnnnnnnnnnnnnnnnnnnnnnnnnnnnnnnnnnnnnnnnnnnnnnnnnnnnnnnnnnnnnnnnnnnnnagaggattgtaggaagatggcagagtagcaagcaccagggaacttttctccttacctagacaataattgcacgggcagaatctgtctgatacaactattttggagttcaggagtctattgaaggcttgcaaatttcagggacagcttgggacaataaagtacagttaatttcagtcagtttcaggccttaggcacagtaacaggcttctccattcttcccngccaaccagccctggacaggngctgtgcnatgttttccccgaaaaacttgcacacagctttaggggccgggtt

SEQ ID NO: 302481 - DNA, 384 bp, Homo Sapiens
  misc_feature (143)..(143): n is a, c, g, or t
  misc_feature (321)..(321): n is a, c, g, or t
  misc_feature (329)..(329): n is a, c, g, or t
  misc_feature (334)..(334): n is a, c, g, or t
  misc_feature (340)..(340): n is a, c, g, or t
  misc_feature (371)..(371): n is a, c, g, or t
ttcctctaacccttcagattctgtctcttgttattaatcaaaaaactaacatcacctgtatgtttgccaccttgtcaattttgcaaagtatcgttttatgacgtgaatcctatttccattatttacctaaatgtttgtgtttnctctgttccttctaaattgaactaagaggaaagcccaaggaataatgcagaagttatctttgaagccagtgaatttaaagacatcttcaaaacaaaatactttataacaaaacagtatctaaggactataagtattttaaaagatacaattctattgaactgaataaacaaaattatntttaatanttaanggcagncacaaataattccttagggtgtccttagggncaaaaattactgg

SEQ ID NO: 302482 - DNA, 241 bp, Homo Sapiens
atgagccaacgcgctcagccatgttaggctttatggggcataccaatgtggtcggtaaggtctacctcctggctcctgggagtttctgttaatctccaagggtatgcctggcacccaagcgaggcctttatgtataggacatatataccctttgactcagcagaaccactcatggctattaaggacagatgcctccagaatatgagtacaagggttatgaatacagcactgtttataacag

SEQ ID NO: 302483 - DNA, 350 bp, Homo Sapiens
  misc_feature (58)..(129): n is a, c, g, or t
  misc_feature (231)..(231): n is a, c, g, or t
  misc_feature (309)..(309): n is a, c, g, or t
  misc_feature (315)..(315): n is a, c, g, or t
  misc_feature (328)..(328): n is a, c, g, or t
  misc_feature (336)..(336): n is a, c, g, or t
aaaccaaaccccttactcaactgaatgccaacaaatatgcgccttctcctttagctcnnnnnnnnnnnnnnnnnnnnnnnnnnnnnnnnnnnnnnnnnnnnnnnnnnnnnnnnnnnnnnnnnnnnnnnnagtgcacatgcatttgagtcattttctccttttgtttcatatccttaagatccaaagcttcaaagacagaatgtcaggcatgcaggtcgatttatgactganctcttgaagaggacactggaggaattaccttgtccaatcaccccagggactctggaagggccttcagctcctcgggcngggctncttaggggttccnaagggggnccttggaacttagg

SEQ ID NO: 302484 - DNA, 446 bp, Homo Sapiens
  misc_feature (350)..(350): n is a, c, g, or t
  misc_feature (382)..(382): n is a, c, g, or t
ataaagaagagaggtttaatagactcacagttccacgtggctggggaggccttaccatcatggcagaaggcaaggaggcacaacgtcatgtcttacatggatggcggcaggagagaatgagggccaagcgaaaggggtttccccttacaaaaccatcctatctcgtgagactgattcactaccatgagaacagtgtggggaaaaccgtcgccatgattcaattatctcccaccagggtcccttccacaatacatggggaattacaagagctacaattcaagatgaggaattggggtgggggatacatccaaaccctatcacatgggggtgtctgctttgtaatgattctnccgagagctaggtttgtgttgtgtcttgccantttcacagctttaaatgtaaaaaccaggcaacaacggaaaccccttgcaatttttccgggaaaa

SEQ ID NO: 302485 - DNA, 259 bp, Homo Sapiens
taactagacttgaaaacaagatcaggaatggaatagacattcaaggtagtgaactctggtatctgggtgtttaggctgttaaggacaatgaattgtttcaaatgtgttccatgaaagccagagcaagatttcttgctcaagtccctccttataacaggatgctggggaaaatctgccaacctgggtatctacagtaaagttttctaaaaagttgtgggacttggatatggggggaggacaaaaacgttgccttacaata

SEQ ID NO: 302486 - DNA, 445 bp, Homo Sapiens
  misc_feature (235)..(250): n is a, c, g, or t
  misc_feature (410)..(410): n is a, c, g, or t
  misc_feature (424)..(424): n is a, c, g, or t
aagcaagagagagaatcatgcctattaagtccagcacatacagatggaccagcaggtcacacatgggactaatctgattcattttaaaaataaatgcatacattattgaatcattttctacttgcaagatctgttgtgtgcaatattcgaaagagatttaatgttgtttttttcattgctgttttagcaggttctcttccccactccccctgcccactttaatttaacaaccttnnnnnnnnnnnnnnnnatggtgctttgaaatgatttttctaatatctgtcattcagtgttgagatccaagctctgggagattaattaggtcatgaggctttttctcctcccttctttgtaaaaggggttttatctccattcttctttgtggaaggaggcatggaactcaatgttcntgggaaaggggaangggcctttaggaaacagggga

SEQ ID NO: 302487 - DNA, 286 bp, Homo Sapiens
tgaatttgaatggaccagtccctctgaaaacacataatacataaagtaacaattatagaactgtagctttatgatgagagagaatggcttgtgcccctccctccccatgtgtgcttattattatattgttttttagttcccccacttccaaattactcttgaggtgtctgggttaaatataagactgggattgattgttggcccagttatccatttgttacaaagttttatgatagctgtatggtctgaattgaattattgctctaggaaactgccagctcattaa

SEQ ID NO: 302488 - DNA, 472 bp, Homo Sapiens
  misc_feature (367)..(414): n is a, c, g, or t
  misc_feature (424)..(424): n is a, c, g, or t
  misc_feature (456)..(456): n is a, c, g, or t
tagaaaaagactgatgatatatatccgtagtatgcgctaccaaagcaaatggcagggacaactaagacccaaccttcatcaccaaagacaagtgtgaatgacacgctggttcacctaggcaaggcggattcagattcctcagcatgcggagttcctggaaattgataaaaatgggcacagcacagaaaatgggcagttcacaaaagtggtgcaggtgacccatgagaagttcacatcaccaatggttacagaaatgaaaatcattcaccagccacttgcccccaccagggctgggctgcgtgaccttggggctgtgtctatgatcatctgttatggcaggcaattacaaaacaaataccctctctcnnnnnnnnnnnnnnnnnnnnnnnnnnnnnnnnnnnnnnnnnnnnnnnncgttgttggncgtttttaacattttaagctgtgaagttggcnggacacaacacaaacc

SEQ ID NO: 302489 - DNA, 142 bp, Homo Sapiens
  misc_feature (46)..(46): n is a, c, g, or t
acaacttgcgcccggccttaacatagggattttcatcctaggaatngacttttccccaaaaagattcaatcttagggcctcttgctgtagggcaagttccatggggatttcacaaaagagggcaggggaaacagttcccctg

SEQ ID NO: 302490 - DNA, 236 bp, Homo Sapiens
aattactaactgaattcagcaaagactgatgaataaagtttgaaatgaaacacaagtaagtaataagtaatatttctcttatcttactgtggtttcttatacagatcaagctaaaatgtaactaagtgtctatttaaagatgataataacataaagttcattacttgggtataaacacagctgaggtaggtgctgaggataggaaatggaaagagcgaccatctgagaattagaca

SEQ ID NO: 302491 - DNA, 327 bp, Homo Sapiens
  misc_feature (133)..(134): n is a, c, g, or t
  misc_feature (141)..(141): n is a, c, g, or t
  misc_feature (189)..(189): n is a, c, g, or t
  misc_feature (218)..(283): n is a, c, g, or t
  misc_feature (311)..(311): n is a, c, g, or t
cttctggacttgacattctaaagcaatgatacatggacaacttagtaaaatgaaaagaggtcatttaactaagaaaatctcaaattcaccaatattgccaggaaactatgtggagttgattgaaccatatttnnatctttngtttatttttatttagagatgaggccttgtcctggcactcaggcaggngtcagtggccaatcataactcacttgcannnnnnnnnnnnnnnnnnnnnnnnnnnnnnnnnnnnnnnnnnnnnnnnnnnnnnnnnnnnnnnnnnatgagccactgcgcctgggatcatgganccaccatttttaagat

SEQ ID NO: 302492 - DNA, 326 bp, Homo Sapiens
aaactgcaaactgaacaatgctgcagtcagatacacacacatatttcaactgcataacttcctttaataatacttttatttttccaaatttgaagactgtccctaagtcatttcttctaaaagttagtaataatcccaccaactcacatttacatagaagttacagtttaaagtttgcatctcgtaataacttggtgagatagggcaagcattatttctaatttgcatatgagaaaaaactaaggctcggatgagttatgtgacttccctgagtcatgttagagtaactaactcctgatttgtaaactgaaggtcccaaatccggg

SEQ ID NO: 302493 - DNA, 314 bp, Homo Sapiens
  misc_feature (261)..(261): n is a, c, g, or t
aagtgtccttaataaattttatcaatgatgtgactgaaattcatgaactcaagtctaaaatgatactgtaatattgggacatgtgttggagacactctgactctcggaatagagaatcccattctcctaacaagttaaaaaatatcattgaaagcatttgccaaaatcccttgtcagcttggctgcttccattaatatattagatgccattagcacctgagtgtgaatgtgccagtgcgtcagatgggctctcctgacctnggctaggctctgagtttcacttttagagaagaggtggggctagtggcaagact

SEQ ID NO: 302494 - DNA, 257 bp, Homo Sapiens
cacaaagctgggcgtcatctttcattcctcccctcttccacagccagtcatttctatctggcaatggtttgtccttaaattcttttccagtcttcttttctacatctccattgcaataactaattgcccttttcttgcttaacttgtgtactgtcttattctaggtcctctggaacagtgctgtccaatagaaatattatgttattttaaattttctagtagctacgttaaaaaagataaaaagaagcaagtgagac

SEQ ID NO: 302495 - DNA, 543 bp, Homo Sapiens
  misc_feature (188)..(188): n is a, c, g, or t
  misc_feature (241)..(317): n is a, c, g, or t
  misc_feature (326)..(404): n is a, c, g, or t
  misc_feature (416)..(416): n is a, c, g, or t
  misc_feature (437)..(437): n is a, c, g, or t
  misc_feature (455)..(455): n is a, c, g, or t
  misc_feature (481)..(481): n is a, c, g, or t
  misc_feature (487)..(487): n is a, c, g, or t
  misc_feature (502)..(502): n is a, c, g, or t
  misc_feature (510)..(510): n is a, c, g, or t
  misc_feature (521)..(521): n is a, c, g, or t
aaggggagagctacagagtgattaccccccaaacccccacccaatagggtttagaagcttaaataccacctaaaggttacaaaaagagtgtgggctcggatcagtggcataacatgttcggggagctggagaaggggaagcctggctagcaaaggtggtcttgttatgtaaatgaagccccacaggtngcagccctcaaaagaatagatggtaaatgttttagaccttttttgttgtatgnnnnnnnnnnnnnnnnnnnnnnnnnnnnnnnnnnnnnnnnnnnnnnnnnnnnnnnnnnnnnnnnnnnnnnnnnnnnngttcaagcnnnnnnnnnnnnnnnnnnnnnnnnnnnnnnnnnnnnnnnnnnnnnnnnnnnnnnnnnnnnnnnnnnnnnnnnnnnnnnnttgggtggaganggggttttcaccatgtttggnccaggttggttttcgaantcccgaacctcaggtgaatctgggcntcttcnggcctcccaaaagtnctgggganttacagatgtnaagccaccatgttccagcatgt

SEQ ID NO: 302496 - DNA, 140 bp, Homo Sapiens
  misc_feature (52)..(52): n is a, c, g, or t
  misc_feature (66)..(66): n is a, c, g, or t
  misc_feature (79)..(79): n is a, c, g, or t
  misc_feature (108)..(108): n is a, c, g, or t
  misc_feature (122)..(122): n is a, c, g, or t
caaagaccaaaatttaatgctataaaacacttaaatattaaatgctataaanctcttagaggaaancatactgaaaaancttcatgaccttgggtttgacaacggttncttaaatataacancaaaagtacaagtgatga

SEQ ID NO: 302497 - DNA, 274 bp, Homo Sapiens
  misc_feature (247)..(247): n is a, c, g, or t
gttacttgtttaagaagagctgcttggaggggaatctctaagatgatggtgaagggaaatcctgagatgtcagtgagaacctctcttcttccctcccccaacccagcgttcagtctagattggagcctggcaggaggctgcaggacaacttctaggagaagagaaagtgatagactgtaaagtgtgtttgcacatattgaatgaagatctgcacatcagggggagaatttgtgggtaggattatccntaggattggaaagctgagtaaggtcag

SEQ ID NO: 302498 - DNA, 258 bp, Homo Sapiens
  misc_feature (40)..(40): n is a, c, g, or t
  misc_feature (46)..(46): n is a, c, g, or t
ttcggcacaggcatttcacgctgagccatctgaggatgantcaggnaagcagccccggcactctctctttatggatgcccacttccagtttaaccgtggcatccctggggcaagggcgccctccaagctgtgcttcactaattccctcagggtttggaactatttgcccagttcccacgatgggcctttaagctctcgtccttcctaacctaaggcaacttcaaccatctgataaatctaataataagttacaatcga

SEQ ID NO: 302499 - DNA, 420 bp, Homo Sapiens
  misc_feature (333)..(333): n is a, c, g, or t
  misc_feature (355)..(355): n is a, c, g, or t
  misc_feature (388)..(388): n is a, c, g, or t
  misc_feature (398)..(398): n is a, c, g, or t
ggtgtacctactgtactgcacatgtcaactgccttcagccaaatagacagaatctggttcaagcatttattttgctcctcatgtctcttgtctctttgccgtcactgctacttctttctctggaaaaagacggaaagagcagcagagaggctgaacatggccatgcaaacattttggtcttgtgagatattattatacttgaaaaaatcaatctggtttaaactaattttaaaaaaatctttagttaggttttagggaaaatacagattgtctcagggtgtttattatttcaaggcaagggcagtttatatcctctgttttggctcataagancccaaaattaaactgggacccnaaaggatcaggccagagggtcataaatggcacnttttatgttnctggggattatgggctcattct

SEQ ID NO: 302500 - DNA, 404 bp, Homo Sapiens
  misc_feature (359)..(359): n is a, c, g, or t
attcggcacaggtttatttgtaaatgaaaataaaaatttgaatttcaaaggctaatcattccataaaagtttccatttctattcgtaatttaaattttattttgaaaaagtgatagtctaaggaactcatttaatttttggcctaaatgtgaaatatagaataaaaaacacacatatctattacagaaatacttgagatcctatatgtactatacaaatcctatatgtactgttatctacaaccatttgaacacttatccataaacccctaataagtaccttttgcttcaagacctatattccttagacccaccattagaaaattggatgttcactccagctatatggatatttaaganaaaatggattcagctggggagcagtggctcacacttggtaattcc

SEQ ID NO: 302501 - DNA, 421 bp, Homo Sapiens
  misc_feature (18)..(18): n is a, c, g, or t
  misc_feature (172)..(172): n is a, c, g, or t
  misc_feature (240)..(240): n is a, c, g, or t
  misc_feature (274)..(306): n is a, c, g, or t
  misc_feature (397)..(397): n is a, c, g, or t
ctgtatgtatcaattacntatttaaccttactctctgatttgtccatttctgatgtgcatgttaaaatatactatgattatggctttgacaatttctcctagtatttgtattgttttctgctttataaattacaaaagtgcatggtttaatggtttgtaacaattgtatttncttggaggattacaatgaacacaaaatattttattattactttttacctaaaatacttcttaattttnctagttttaggcacatctatctgataaatgcatnnnnnnnnnnnnnnnnnnnnnnnnnnnnnnnnnttcatctatctaatctcaacttttctgtggccattctctcttggggagggtttctcataaatggcatatggttaaattttgttttttaccngtttaggtaaaggtggggtttaat

SEQ ID NO: 302502 - DNA, 407 bp, Homo Sapiens
  misc_feature (331)..(331): n is a, c, g, or t
  misc_feature (386)..(386): n is a, c, g, or t
aataagcagaattgttacagaagtggcaagctgccaagcaattctacttatttaaaatcattttatcttgaatgtgtttagaaccaaaaagacatctcagcaacttaatttacttctcactactcttggttatagacaaagtctaatgagcaaatgtgacgtaggaactaaatgattgtatgattgatgtagtgagccttactttcttttaaaatgtactaaatatgtgtatatttctgtctatacataatgctctggtttgaatatgttttctaaatatcatgctttgggagacttaatccccaaattcttggattggagggtgggcccnttggggaaggaggtccggcctttaggttaaaggtcatcaagggcaggaccccccncggtaggcaccgggccggctt

SEQ ID NO: 302503 - DNA, 447 bp, Homo Sapiens
  misc_feature (281)..(281): n is a, c, g, or t
  misc_feature (361)..(361): n is a, c, g, or t
tgaaaattgcgcacatcctaccagactaatatgtgtacacagtacactattacctcacctttaatattcattgtgtccacagctgggataaatacttgcgttgggtgaccatggggcagagcagcctgtgctttgtgtatatgaagagttttctagaaggtgaactcatcccaataaaaaactgagtcaaacaggcaagttcagccttatcttatctaagaataaagcctcagatagaggagatgggcaattctgagtgtagcacaatggagcaaagcatntgttcaaaacgtttatctttgggcaatctcaggaaaatgccatgggaaaataaccgggagcagaagagggggaaggaagnctggagcatgtggattgttaaatgaggacacatcccagttggccttacataaattttacaccgggggtaggaactgttaggacatg

SEQ ID NO: 302504 - DNA, 337 bp, Homo Sapiens
  misc_feature (81)..(81): n is a, c, g, or t
  misc_feature (132)..(132): n is a, c, g, or t
  misc_feature (139)..(139): n is a, c, g, or t
  misc_feature (259)..(259): n is a, c, g, or t
  misc_feature (277)..(277): n is a, c, g, or t
  misc_feature (304)..(304): n is a, c, g, or t
  misc_feature (327)..(327): n is a, c, g, or t
ctgaattgtctgaaatgacattcagcacctgaactctttgacactttggcacctccataaatctagaaatttctctgagtngtggtgcataggaaaccttgagggacaacccaggagtaactgtgagaaaangggtgtnccagggagtaaatagatctcacagctcagaactgtagggacaggatgtcattttgcaccacagcaagtaggggaaagcagctctcaagcctaactgtgaaacgcccccacaaaccacctnctcctcccactccctcantggctgcctgccatggcttacctctancggcaggcaaagcaaaactacangacatctctc

SEQ ID NO: 302505 - DNA, 404 bp, Homo Sapiens
  misc_feature (315)..(315): n is a, c, g, or t
  misc_feature (338)..(338): n is a, c, g, or t
  misc_feature (340)..(340): n is a, c, g, or t
  misc_feature (354)..(354): n is a, c, g, or t
  misc_feature (364)..(364): n is a, c, g, or t
  misc_feature (375)..(375): n is a, c, g, or t
  misc_feature (383)..(383): n is a, c, g, or t
cttaccacataggactggtgagagctgtggtgcagagaataagccttcaaggccggacagaggacaagtagctctggatgcccaggaccatgctaggtgggggagtccaggcaggtcaagatgccaggctgccaagtgcaagaccttgggcttctggtcttgcctctgtcactttccctgtaagtcctaggagaagccagttcccctctctgagtcctgggcctcagaccagcaggcataggaacatccagggccggattgtccttatcattctcatcgacacacggccccttacccaatgctatgcctagccgnattcaggggtccatggccagcantntgccaatcagaggnttcttctggntttccttcagntggaagtngtagaaaggttgttggaaatt

SEQ ID NO: 302506 - DNA, 289 bp, Homo Sapiens
  misc_feature (115)..(194): n is a, c, g, or t
tccccttctgattttaagtgaaattaaaacgtttttatgggtccttaaaagtattatggtctgtaatcactgtgcctattgtacctactggggaagttggcctagtgtttgggtnnnnnnnnnnnnnnnnnnnnnnnnnnnnnnnnnnnnnnnnnnnnnnnnnnnnnnnnnnnnnnnnnnnnnnnnnnnnnnnngttttaatccgtagcaagtgactagcagagaggcagctttgtggctgttagtatctagttagggctcaatcagtaaagctatctacactaccctt

SEQ ID NO: 302507 - DNA, 415 bp, Homo Sapiens
  misc_feature (19)..(19): n is a, c, g, or t
  misc_feature (211)..(211): n is a, c, g, or t
  misc_feature (232)..(232): n is a, c, g, or t
  misc_feature (340)..(340): n is a, c, g, or t
  misc_feature (346)..(346): n is a, c, g, or t
  misc_feature (364)..(364): n is a, c, g, or t
  misc_feature (377)..(377): n is a, c, g, or t
  misc_feature (388)..(388): n is a, c, g, or t
ggttttaaaaacataattnccttgctacccactaagagtcccagttctctccacgtaccaaggagtcactgctgctgattcacgtgtggccatcagagcagtggaactaggcctcatctgtgccacaggagcacagcctggaagagatacatggcctgaaaatggtaatgggagcaccaagatctccaggatgtccctgagccacgcactngcgaggtacctgaaaagagtnatctccaattatacgatgacaccgtgagcactgtatggttcacgactctcagcactttacagttcacgacttttcagccttgcagggagttttccacccttgctcttngggttncgggtacactaaagaggnttcctgggtggcntggaaattttnttacaaattcacttttccacaggttac

SEQ ID NO: 302508 - DNA, 356 bp, Homo Sapiens
  misc_feature (82)..(82): n is a, c, g, or t
  misc_feature (127)..(127): n is a, c, g, or t
  misc_feature (283)..(283): n is a, c, g, or t
  misc_feature (289)..(289): n is a, c, g, or t
  misc_feature (294)..(294): n is a, c, g, or t
  misc_feature (330)..(330): n is a, c, g, or t
ggcaggagggtatagttagcaacaggaaggggtgagttactcatacagaacaacaaacaagggtgaagctcaagagaatttnctgaatgaaggaagccagaggaaaaagaagactcactgtatattnccatatatacagtgaaactcagaaatgcggtagaaagcaggtcagcagtggctcatgggggctggggaaagggaagagtgacaggaagggttacaaaggggcaggaggacaccgtcagggaggggacgtgcccactgtccccatcatgggtgaccntttttnagggncatgagtgggacacaagttttcgcgtttttaaaatnttttcaaactgttactttttaggttt

SEQ ID NO: 302509 - DNA, 327 bp, Homo Sapiens
ctagtaaaccatcatccatgttaattccaaaacccttacaaagctcaaaatacccacaacccaagccaggacaatagcctttcctctagactttttaagatggtggtttgcaaacagttttttttaactataggaagaagtttcctttaaataaaatgtgactgaaatccatgaatgaacaggtacatatttaaagcatagggatgtcctccttcagaactgcccttggctactagggcaaggcgacatacatgtgttactgaggcgttttttaacacatttaattcaacttaaggcaaacagggccatctgcagctggcaccttct

SEQ ID NO: 302510 - DNA, 205 bp, Homo Sapiens
ttaaatgattatgggtgtactgcctagaccccattagggtatttatgtaatatgcagtatatgtaccaaataaccttttaagtatctgaaaaattaattctaaaacaatctggtccaaaggatttcatataaggatttacgggacccataattacagttaatagcgtgaacttgggtactactgttctaaggtacttgtattggt

SEQ ID NO: 302511 - DNA, 216 bp, Homo Sapiens
  misc_feature (57)..(57): n is a, c, g, or t
  misc_feature (161)..(161): n is a, c, g, or t
acgtggttagatactagtgcatatacagttgcatatttgcaggtaggctatgtttanctgtttaaaatgcaagaaaatcctaggaaatattacaaggacatacttgagttgttctgtttaaattctgtgcttcaatttggggtaaaaaataataaagatancaaaggaatcatcaaaaactttggggctatactccggggctttaaacttggtcct

SEQ ID NO: 302512 - DNA, 466 bp, Homo Sapiens
  misc_feature (13)..(13): n is a, c, g, or t
  misc_feature (383)..(383): n is a, c, g, or t
  misc_feature (404)..(404): n is a, c, g, or t
  misc_feature (418)..(418): n is a, c, g, or t
  misc_feature (438)..(438): n is a, c, g, or t
aaaaataaggcanttcaatataaacaagtttaggataaaaacctcttattaaaaatgtgccttggctgatgggagctgaggtactcggtctgctcagagaggagccagctgtctggtcacattccaggtgcatcagtcagtatgatttacaaggggaatggagctcattggttaatctggacagttggttaagcggaagttggttaaaaggattctaccatatttatcagattgctgctaaaaggatgttttatctctgttacatggcattttggtaactagaagagcttaatacaaacttgcctactttcctgtataccccttccctgacatcatttataaaaatgttaaataagaccattttgagcacctgtctcctgggnagtgtgcatgcttatatatcncgtttctctgtccnttatccactgcttttcaccntggcaaaatgtattttttaaaactaaaa

SEQ ID NO: 302513 - DNA, 443 bp, Homo Sapiens
  misc_feature (90)..(90): n is a, c, g, or t
  misc_feature (270)..(270): n is a, c, g, or t
  misc_feature (337)..(337): n is a, c, g, or t
  misc_feature (379)..(379): n is a, c, g, or t
  misc_feature (411)..(411): n is a, c, g, or t
  misc_feature (431)..(431): n is a, c, g, or t
gcccaagtagctcttaccttaaaagacagacttctcacacccttatggacacatcactcttcaccctcagccttatttctaaaaactttnctatactgactctagttcctctccttccattcgcagggcttccaatagcctatgagaaagttgtattcaaattagaaaagggagtcctcctgcatggagatgcagttgcagagtggtaagacttggaggatttctgcctccatctcctgtgcccttggctgggtcactctgtgcagtgcnacactgcacgaaccacacgtggaggctctgcaggatttcagatatttccactggtttttaatttatnatatttgggtaggaatcatcattaaaactctgttaaatgggntaaatgggactaaaattacaggggactggggnttgcccctcaatccttatgnaattgccgggct

SEQ ID NO: 302514 - DNA, 433 bp, Homo Sapiens
  misc_feature (288)..(298): n is a, c, g, or t
  misc_feature (363)..(363): n is a, c, g, or t
  misc_feature (404)..(404): n is a, c, g, or t
  misc_feature (419)..(419): n is a, c, g, or t
gggggactgaacatgattacttgtctgcctagagcttcttgtaaagaagtcacaaacttagtgcctccaggggcttggctgtgtgataatgaggatagaggattacttgtgaggcaatgtggcatggtggggattgtggcaaactagaattcacatcacccaccatatagggcttgcattaccacgaggcagaaagcacctagtgttgctgcatcttcttacgcaaaaaagacaaaatccagacttctaaaatgtaaaatcactgattttcgatattggcagcttacnnnnnnnnnnnaaacaaccatgcaggccaaatgacttgtaatcttgtcaccatttttagggtaaactgtggacttngaaaaagtctgggagcaaacaaaccatgctttttcctttanttctgttgggaaccngttttctttgtggt

SEQ ID NO: 302515 - DNA, 385 bp, Homo Sapiens
  misc_feature (78)..(78): n is a, c, g, or t
  misc_feature (138)..(138): n is a, c, g, or t
  misc_feature (348)..(348): n is a, c, g, or t
aacaatggcagtcctgcagataggagatgggtgctttccataaagccactggaaactatgaaagctcagcaaacattngaaggaggtagtattatcttctcaacatgacactcatttctttccgagtgcttatacttngtcctcactgcccccaaatcaacttttttccttttttcatccaactaatgtttatttagcacatgccacatagagaaaagatatatatacttcatattctcagtacagggaataaaaataaaattcagtttgccttgaattatcaattgcatcaaattgtttgggctgtcttccggaccagagggagggaaaaatgggtgaaaacattgnttcaagaacatagtgggccagggcgcagtgggcttca

SEQ ID NO: 302516 - DNA, 498 bp, Homo Sapiens
  misc_feature (361)..(361): n is a, c, g, or t
  misc_feature (404)..(404): n is a, c, g, or t
  misc_feature (419)..(419): n is a, c, g, or t
  misc_feature (431)..(431): n is a, c, g, or t
  misc_feature (470)..(470): n is a, c, g, or t
  misc_feature (479)..(479): n is a, c, g, or t
gatcttcctggattttgcttaacatttaaatatcaaagatagctgtctttgatagtcctcccaaactgggcagcaccatcactctggccttcgaagggagctataaagctcactagtagtcaactcttaaaaatggggcattattcctaaaaaggaaatatacagctttaagcaaataaacaataggtactttgaagaccattttaaagaacttacccatagcccaagataaacatctgctaaggatcaaaaagatcaggccctgggcaggggcttggggacagtgtggacagggacacacatagctaactgcttttcaaaaattgggaaaattaaagccctccttaccaagggtttacanggataacccttcaaagtttaggcaggttcaagttacaaacttnttaagcagggcctgnccaaggaaaggnattttggaaccaacctttgccaaagtttttcccaaggtnaatttaaantgtttgctttaatcaggtt

SEQ ID NO: 302517 - DNA, 406 bp, Homo Sapiens
  misc_feature (368)..(368): n is a, c, g, or t
  misc_feature (382)..(382): n is a, c, g, or t
  misc_feature (387)..(387): n is a, c, g, or t
atgacttcttacggcagtaccccataatgcttaacacagtactgaaatcagaacttctacttgggactgttcaacaccatggcagccaaaccactgccaaatagcactttttcaaattacattctcagctgtccctctcacagtcaggtcaaagccctgcctatcttgcttgcctaagagcagtatgttattttaggcaactgtagatagtaaacaaaattgaagacttttgccaggggatgttcacagacatttctccagaagacaacttttgctatccattcctagagatcataggaatatgaaatgttaagtacaaaataggatttcatggggttaatattttgacctttttttggattttcttntttaattcaaaggnaaatntggttggccagtccaggat

SEQ ID NO: 302518 - DNA, 254 bp, Homo Sapiens
  misc_feature (24)..(24): n is a, c, g, or t
  misc_feature (187)..(187): n is a, c, g, or t
atgtttttattataacagtaattnacatttaactttaaagttagtgaagcatactaccataaatgcacaattatgaaaaattagaagctaaattacagattcattgatggagtcaattatgcaaagtggtcagtggttgttgaagcatgcattgcttcaacagggatttgcgtgcatttcccatgancctgcattcttgtgttcttgataggcatacagacttactcaggaatcaacaggttgctggcttaatt

SEQ ID NO: 302519 - DNA, 110 bp, Homo Sapiens
ccagggttaagccgggggtattgtgataaacagcttcactctctgtttctcactacaagcacttcccggggggagaaatgaccccgaaatgctctcggggcgatggggca

SEQ ID NO: 302520 - DNA, 167 bp, Homo Sapiens
  misc_feature (21)..(21): n is a, c, g, or t
atttcctttcatttatttgtnctaaatgtacttaaaatgaggctgtcattgttatccatgaggtggggaatggataggttcccttttcactacatgcacccttctataccttttgaattttgtaccagcttgagtgcattgtccatttgaaggttagggtaaaacag

SEQ ID NO: 302521 - DNA, 321 bp, Homo Sapiens
  misc_feature (35)..(35): n is a, c, g, or t
  misc_feature (107)..(107): n is a, c, g, or t
  misc_feature (148)..(148): n is a, c, g, or t
  misc_feature (158)..(158): n is a, c, g, or t
  misc_feature (213)..(213): n is a, c, g, or t
  misc_feature (242)..(242): n is a, c, g, or t
  misc_feature (268)..(268): n is a, c, g, or t
gccctgttaccagagtaattggtatagtggaaaanataatggacttcaagccaaaaagagcggtggtctcccaaatactggccaaataattttccctagtctctganatgtagacaaagatatgtattctactttcctcccgggaaanactatatcanttgctgccatttatatggcaaccacagtacaaatgccttacattaggtattattntgaggtttttaataacaacaatggctttngtgtaattcctttactgtaggtccgnttggtatccctcattactgctctgtaacaggggggccacaaattctcggtggg

SEQ ID NO: 302522 - DNA, 317 bp, Homo Sapiens
  misc_feature (49)..(49): n is a, c, g, or t
  misc_feature (140)..(140): n is a, c, g, or t
  misc_feature (185)..(185): n is a, c, g, or t
  misc_feature (235)..(235): n is a, c, g, or t
  misc_feature (247)..(247): n is a, c, g, or t
gaagtttattaagaggttttaggctttaagcatatgtgaaaagcaaaanttacattttaaagtatataatttgcattttccaccttctcaatgccaatgaaatattctaggagactctataagataaccaattgattttntactactcccaaattttaactttgtaatttaaagaggtaataggncaaatagtagctgctgtgggttctgggttctccctgcagggatgaagggnggcctgcaaaangtctcctacttccattctaggtcattcaggcaagggtgccttcctctgggatggcactgtctggtatact

SEQ ID NO: 302523 - DNA, 373 bp, Homo Sapiens
  misc_feature (342)..(342): n is a, c, g, or t
  misc_feature (353)..(353): n is a, c, g, or t
  misc_feature (359)..(359): n is a, c, g, or t
tcaagtctctggggcaaacggacaaagcagatgatgtctgcaggaggaaattagataggagctctggctgacctttaggctggggggcggggaatcaacatcgtggcacacctgaaaagcatttgatggcacaccaattgggaagttctgaattagaaagcctgtgttccgcttaaaagagccgaagctattcaattctttctgagcattgctatatgacaatgcaagcccaggggttgctaaatcttacatttttcatgagaagatagaagattgttatgtaaaaaacactgggcagataatttctttcaggaattccgtgacagggctaaccaaaacccntatgttgaccngttctntcccacagtccacc

SEQ ID NO: 302524 - DNA, 114 bp, Homo Sapiens
  misc_feature (47)..(47): n is a, c, g, or t
  misc_feature (81)..(81): n is a, c, g, or t
ggtatcagccactgcacctggggcctaatcttcatctttgtatgggnaattttaacctgtaccttttatgaccacgtgggngtttaattcaaataaatgtcattgggggtttca

SEQ ID NO: 302525 - DNA, 167 bp, Homo Sapiens
  misc_feature (55)..(55): n is a, c, g, or t
  misc_feature (109)..(109): n is a, c, g, or t
  misc_feature (155)..(155): n is a, c, g, or t
gacccatataataacaaatctaggtaagttggctttatgttacagcatatttgtntttcccatttcaaaatgttatttattaagcacggtgtcgttctataaccatttnctgaacatttccccaaatctttaccaaaacaaagctctcttaaatnctttctccatta

SEQ ID NO: 302526 - DNA, 422 bp, Homo Sapiens
  misc_feature (28)..(28): n is a, c, g, or t
  misc_feature (30)..(30): n is a, c, g, or t
  misc_feature (241)..(241): n is a, c, g, or t
  misc_feature (277)..(277): n is a, c, g, or t
  misc_feature (320)..(320): n is a, c, g, or t
  misc_feature (340)..(351): n is a, c, g, or t
tgctagcttatactgcagcttccagctntnttaagtagactgtgagcaagtgattctcattcttgtagattctgccttctcatttctgttctgcctgctgtgctgttgtcctccctaggttattcatacagttaagatattgtattcagttgctgctgagtgtgctcagagatagcttcaaatatgaatttttatctgggagaattccagttctcctcccatttgctcctatgtgtttctnttcttccttttgttctccagagccagttgtacaagnttaaactactgaagtgatcaaactgtagtaccaattattcagncagtatttattcagagggcnnnnnnnnnnnnaaaagaaacagagtctcatttctgttggcccggggtggagttgcagtggggacaattcttttaggcacaaa

SEQ ID NO: 302527 - DNA, 163 bp, Homo Sapiens
  misc_feature (17)..(17): n is a, c, g, or t
  misc_feature (125)..(125): n is a, c, g, or t
agaacccgttgggtganttacagtatgccaaaaagactttgccaaggtttagcaaatgactatcaattaaaagcaattacactttaacttagagacagcttgtttactgatatactcagaaaggnctggggaaattagagtattgtttattttaatacaccac

SEQ ID NO: 302528 - DNA, 380 bp, Homo Sapiens
  misc_feature (42)..(42): n is a, c, g, or t
  misc_feature (44)..(44): n is a, c, g, or t
  misc_feature (302)..(302): n is a, c, g, or t
aaatagacactcaaatccaacaaaatttgattctgctttgcnantggtgtactttgagcagcacgacacttctggagccactttcacttggtatgtctgtagacaactacttctcaaaggccaacaagaaaagactatacaagaagaactacacaaacaggaaggactacacaaccccagttagagggagacccttgccaccactcagacaatatgccttgttctgagcatcctaaacatcctggggactaagtgggatagcatgtaaaatgactccaccctacccgggtacagaaaaggantgcagagctatcagagtgtcgcaaggaaggcactgtccttgggagcagggtggggctgagggtgacatcttccaagga

SEQ ID NO: 302529 - DNA, 289 bp, Homo Sapiens
  misc_feature (248)..(248): n is a, c, g, or t
  misc_feature (257)..(257): n is a, c, g, or t
  misc_feature (273)..(273): n is a, c, g, or t
ctacctcctacttattttaaaagagttcaatccaggctctactgttctcaagggacttttctccatactaggaactctaaaatctgacaatggtctggatctctgagataggcaaggcatcttgtaggtacagggtcctctcttctgccagggggctaactgtgctgtagtctcagagggatttcatcaggggatcccagtaaggttgtaaaatgaataatgatcttgggtgggcaccacaccatctntgtgtagtnagggaaaacttatgtnaaaactgggaacgggt

SEQ ID NO: 302530 - DNA, 285 bp, Homo Sapiens
  misc_feature (92)..(92): n is a, c, g, or t
  misc_feature (192)..(192): n is a, c, g, or t
  misc_feature (268)..(268): n is a, c, g, or t
ctctgaatatttttaccttaaaaacatgggggagatgaagacgcatttctgagtcctaatctactgctgccttggttgtgctctattaattnctgagattcttagtcctgtttactaaggaatcgtagaacatgcaagttgtattgtactatagttgatgggcaagcttgctaaccattcctctggggtttncttgctgtgtaggaataaaaggggccaaaggcaaaagagtctcatgggtgttcatgaggacaggaaaggggatttngattccccctatatatc

SEQ ID NO: 302531 - DNA, 279 bp, Homo Sapiens
  misc_feature (144)..(179): n is a, c, g, or t
  misc_feature (207)..(207): n is a, c, g, or t
  misc_feature (233)..(233): n is a, c, g, or t
  misc_feature (242)..(242): n is a, c, g, or t
tctcctaactcatctccctgctgttaatatggcctcactcaagttcttcctccacgcactgccagtgatcttgtgataggaaaatgctatcagttaggtgacttctaaaaaaggctaacagctaagaaaacacacgtgtgcgtnnnnnnnnnnnnnnnnnnnnnnnnnnnnnnnnnnnncctgggataggcaagtacctttaggganaatatggtcttatatatactctacancataaaagnaccagagtatctttgatgtttaaatgttaggtaacag

SEQ ID NO: 302532 - DNA, 259 bp, Homo Sapiens
  misc_feature (20)..(20): n is a, c, g, or t
  misc_feature (192)..(192): n is a, c, g, or t
  misc_feature (231)..(231): n is a, c, g, or t
gtttctgtgagtggtagtcnaatctgacccactgttagctaatttgctttataattctgcagcaattggctacttaatgcactattttcattaaaggcaaaagggaaatttgctcacagtcgacagaaaatgcactttacggtgtcaaaaatggaaaataaggcatgggaatttactaaacaagttacaagngcttttgttgtttaggatttataatataggacttcatgnttcttaaggtggagctcaaaatattttc

SEQ ID NO: 302533 - DNA, 327 bp, Homo Sapiens
  misc_feature (201)..(201): n is a, c, g, or t
  misc_feature (275)..(275): n is a, c, g, or t
agttaaaatgcttaatgaataaactcttaagaactttaactttttttagtatcattcatttgcaaaagaacaaacttatatattaaagaaaattctgaataataaattttttgccaggtgatctgatactacaagttttgaaaaaataactcaaatgtcatttattaaaaattaaatttgtgttggacttctcactgatgnggagagcttcaagatacatctgtatttactgtaaatttttaaaagactctcaaggactaccctaaaggatgganaacaattaaaacataaacaccttaggcctggcttaaatccggtccggcggta

SEQ ID NO: 302534 - DNA, 395 bp, Homo Sapiens
  misc_feature (217)..(217): n is a, c, g, or t
tccaatcagctgagctgctgccatggagattttctacaacaaaaagcagaaactgtcaccttcctgtttagaacccttcattcgttcagaagtttaaaccctgtattttagaatacagaacacaattttagcatctgccttctactcacttcccccacagataccattcagcctatctgggctctcccggcagtttctcacatgttgtgcgtgagtncacagggctccggggaccctagctgacaatgttccccccatgacacttgagtgtcctgcatttgctttcctagctcctcttctggatccatcaccgagagcactcattcacactccacagtaattgttgggtttacttctcaggattatcaagatggggactgtaggattaaggtctg

SEQ ID NO: 302535 - DNA, 351 bp, Homo Sapiens
gtcagcacaaggtgagggtgtgctgatggattataatatcctttcttagagaatcaattaaacttgcttagggtcttttatcgattttggcttataactggactaggataggtcaaagtattcaaggagtagaggcatagctggctaaaaatagtgaagcaagtatggaatcctgtctttctgagatggctgtgaaatgttttagttttgatatactgcatgacttttacagaattaattggcattgtgattaggttgttttatttcttcactcaaacatgttggaagccgattctaatatgcggtagtaatggaaaatagagtaatgctgtaataatagtgccattgtaa

SEQ ID NO: 302536 - DNA, 413 bp, Homo Sapiens
  misc_feature (289)..(289): n is a, c, g, or t
  misc_feature (325)..(325): n is a, c, g, or t
  misc_feature (330)..(330): n is a, c, g, or t
  misc_feature (362)..(362): n is a, c, g, or t
  misc_feature (379)..(379): n is a, c, g, or t
  misc_feature (389)..(389): n is a, c, g, or t
ttgcttgcgcccatgcgtgcatatcgtgggggggaacctgaaaagatatatagtatttgcgagaagtgtaacactgggctgcaaattcacacatttgcacatttctcttattattaacaatgatacttagacctttgatttactaatggatgagaattgttggaacaaagacttggtgctgatttcctgatggattaactttatcagtctgcctctctcaagcctcacatctatattactcaggaaccctcatgtacagatacacccctcctgggtccctgagttattnctaggaataggagtgggaaagcagatttaaaccctncaacnctttccacatgggagttttggaaatttggccncgccatttgggaatttnggcttcaacntcataggaggctgggtgtagggac

SEQ ID NO: 302537 - DNA, 415 bp, Homo Sapiens
ctggaggaacacaatccaatagtcctagcatttctctaataaatgcactcctagagtggcagggaatgatttagtaatagttatattctgtcacatgcattttactgttacccaaaaatggggaggtcttaaatggacatgagtctccactttccttcagtgtgagaagggctggttctaaaaaatttatctttaattctcagcaagagacaacctaggtgaagaaaaacgtaccttaatccaagagctttggtctgagacctcaaggaatttaaataatctctacaaaatgaggtattatcaagcacacacaactcatccaacaggttttaaaaaattgaaatgacaccctgaggggaggataaataaaacaggttacgtgtttgttttactcttcttcttattcttctttccc

SEQ ID NO: 302538 - DNA, 397 bp, Homo Sapiens
attagtgttacacagttattgtgattgtgtgctaaaaattataaacattcatctgcaaaacagaatgaaatgtccagtacagagcttcgttcaaaatcaatgctcagtgaacatcatttcccctcctctcccacttatggctcaggctattactgtcattgtagactagcattaaaaacagtgctatattagtgctatatgaggaggtgcaaaagaaggatattggtctaaatttatactgagctaccttacacatcactgtcagattaatctgtgtaaaatatagctattttgtttctctacttacagctttcaaaggcttcctactatctgcaaaataggacacaattccttgggcctacttctccagtaggtattcaaattactttttccccaa

SEQ ID NO: 302539 - DNA, 283 bp, Homo Sapiens
  misc_feature (82)..(147): n is a, c, g, or t
  misc_feature (153)..(153): n is a, c, g, or t
  misc_feature (181)..(181): n is a, c, g, or t
  misc_feature (206)..(206): n is a, c, g, or t
  misc_feature (255)..(255): n is a, c, g, or t
ttacaggtgcataccaccatgcccggctaatgtttttgttgttgttgtagagacggagttttaccatgttgcccaggggtannnnnnnnnnnnnnnnnnnnnnnnnnnnnnnnnnnnnnnnnnnnnnnnnnnnnnnnnnnnnnnnnnataagncatcatgcctgggcctttcatcagattnttaagaaggttcttgaaaaaaggtntttaaaaattactggcttcatgatttacaaaggcagggtacacttcatnatcttatttgatccatacaacaaaggcc

SEQ ID NO: 302540 - DNA, 442 bp, Homo Sapiens
atgcgtctgtattatgaaagcagtaccagagtcccgaaaagagacagggataatccttattggtacagaatccccatcatgtaatcaatattaatatgccttggaattaacgtacctttaaatttgatgttcttgatggggatggaaaactcatgacatgacatgtatgttctgggaaagtaaacatttgaattgataacaaacataagaaattatttgtaagacccaaatggtgtttactgaccgtataatgggctagatttttctgcttatcagttcaagatgtactgtaggctcttcctaggatataactataacattatcctgttctatttcttattatatgggaaggtcaatatcctaactgggctaactgggcacccaatgagggtctcatggatccattttatccaaatggaatggattggatggggtggaataa

SEQ ID NO: 302541 - DNA, 230 bp, Homo Sapiens
  misc_feature (210)..(210): n is a, c, g, or t
  misc_feature (218)..(218): n is a, c, g, or t
atcaagcaagtgcagtgctaatttgcttggtagttaatctattacaacagttaacttcaaatgttaaactgttcattgaaacatcagaatagcgaattgtccaaaaatcaagttatgttattctaagtgttctcatatgtataactgggctgacattataatcttattagtgaggataaattaggggaaaaccattggtcctatgccccnttaaaatnattgggggtcca

SEQ ID NO: 302542 - DNA, 328 bp, Homo Sapiens
  misc_feature (306)..(306): n is a, c, g, or t
aagaatttaataaagagaagatcaaacaactcactctaacacaaggaagaaataaaatgctaaagcggcagtgactatgaaaaactgtataagcacagataccataactttcacatctggtgaggacctgggaggagtagttgaaggctcccagggaaaaagttaatgtgtggcaggaactgactgggcaaaagtagagagaacaagctcctgactggggttaatataaagacatgggtaattacttgtttcacttcttgcacagtttaaggggttgaaaacccttcctttttcagagctctgggngtttcatttgtatctcctccct

SEQ ID NO: 302543 - DNA, 414 bp, Homo Sapiens
  misc_feature (29)..(29): n is a, c, g, or t
  misc_feature (395)..(395): n is a, c, g, or t
tagtatctgcctccatgtttcccagaggncactaatcagactgtgtacttggaggatatccagcaggtgttttctgctctgattcaggccactatcctgaaaggtgcagtccatggggagagaactgcattctagtattagaataaattgtaacttcattttattcccctgaacagtctaataaaggtaggcatgcccttatacatgcagctattcccagcagtgtttgcaaagcgtttgcacagagtaggtgcttaatgggaatgggtaatttctgaaggaaacattttgcagccaattaaaatacagcacagagtttccctttctctttgccgctgtctgggaaaattgtaggatacatatggactttctggcacgtacacctcggaaaggcntttgcccaaccccatgggt

SEQ ID NO: 302544 - DNA, 186 bp, Homo Sapiens
  misc_feature (59)..(59): n is a, c, g, or t
  misc_feature (62)..(62): n is a, c, g, or t
  misc_feature (82)..(82): n is a, c, g, or t
  misc_feature (97)..(97): n is a, c, g, or t
  misc_feature (141)..(141): n is a, c, g, or t
  misc_feature (159)..(159): n is a, c, g, or t
  misc_feature (167)..(167): n is a, c, g, or t
ataattcagattactgttttcaaagcagtgtttcctaaagttgtttgtgcgaaattgtnttngtgacttgaatctagttgtnctgaagctaatatanaataataatggcttccccccaatttataataggaaacagtaggnaagtaacagactattagntgaggganggaaggagaaggacaaggg

SEQ ID NO: 302545 - DNA, 203 bp, Homo Sapiens
ctgagaaatatctaagtacctgggagattgaacacttaggcagtcaaatgctctcactcccaacactaatcttcaaaccctctgcattctaaacagacttctaaaggagagtggctctttaaaggcttgtgaatcacttttgagcagtaactgtacacttaaattaaaagccatgatctggcaggagacttgggttgtgcttt

SEQ ID NO: 302546 - DNA, 309 bp, Homo Sapiens
  misc_feature (253)..(253): n is a, c, g, or t
  misc_feature (269)..(269): n is a, c, g, or t
agatgacatttaatgaaagcaaggaatatccataagagaaaacacaatcttgttttaaagttcaataacccattattatgaaaattatctgatgaagtataaaagtagaaattcataggaattctgcattaggacaagatgaaaaagttaaactctgtgtaaattacttcttaatgaatattaaacaatttattcatttatcatgactgaaatcaggggtatcatcagtctttataaatacataaggaaggcnaaaaggctcaccaggnctggaccggcctttggatcccggtaatggggtccgggggg

SEQ ID NO: 302547 - DNA, 481 bp, Homo Sapiens
  misc_feature (329)..(383): n is a, c, g, or t
  misc_feature (403)..(403): n is a, c, g, or t
  misc_feature (439)..(439): n is a, c, g, or t
  misc_feature (454)..(454): n is a, c, g, or t
taagacttccaatgactaatttctatacatgtacattttcctgatagcaagttctcaaaactcacttaagtactctagtgattcttttattcaagagccatttttttcctcttcttgttaatagctacaatgaactgaggcttttgggcaatatctctacaagattttatttctatttagatgtgggaatgacttgggaaatgttacagttgtttttgggctgaatattcctgatgtacggtaattttgggtaaggcagtgtttaggtctgtacggttattctgggaaggttcttataacattctgtgggctgagggaatccaggaacnnnnnnnnnnnnnnnnnnnnnnnnnnnnnnnnnnnnnnnnnnnnnnnnnnnnnnnccagccaattgggagggccnaatgcggtttgtcccaaagggcacttggggagagcnccagggcttaatttnggggccagggataggggggttaccagc

SEQ ID NO: 302548 - DNA, 411 bp, Homo Sapiens
  misc_feature (279)..(279): n is a, c, g, or t
  misc_feature (324)..(324): n is a, c, g, or t
  misc_feature (342)..(342): n is a, c, g, or t
  misc_feature (397)..(397): n is a, c, g, or t
ctcttctctactagaagaggccaaatagtcagatgcaaatttctccaaacctatcctgaccttgagtatgtaaaggggtactatacttcattcctgacatattttggtttccatgttggcattcagctccgggttttctatttggatggtgaaaatttggaccctgccattcacagtcccttcctaagtgtagggaaaggctgggtttttgctgttcattgttattctgaaagctctgggtttgggggtccatgttcatgctgggctctcaggtttgancagatgcaatgttcttgaggagggagggggacccaattgttaccngagagggagaaggaaacnctgtgaaattaaggaccgaattaagggccgggccccatggctcacacccggtaanccgcagcccttggg

SEQ ID NO: 302549 - DNA, 214 bp, Homo Sapiens
  misc_feature (142)..(142): n is a, c, g, or t
  misc_feature (174)..(174): n is a, c, g, or t
ttctgataagtgatcagtaaacatttagcccttattatcattaatatattaagagctatgagagagggtagggtacactgggtctgcagggagggataggaaaaggcaaatgactgactgtgacagggggtaggtctggggnacgcttccggggaggagggagggtttaatgtnggggcttggccagatgagtagggggttttgcccctgtagg

SEQ ID NO: 302550 - DNA, 361 bp, Homo Sapiens
  misc_feature (298)..(298): n is a, c, g, or t
actcttttttttccccatgaacctacaaatctagaaataaaagtattagaatgctaaaggattagtatttttctagaggaatggtatcttataatagtttcttgtttcaataaattactgatttgtattttctcccatattatccatgccctttaaggtgtaagtctggttttagaatgctaatttgtgacctgtgttagagaattgcatattggagtccttcgcctagaggattaataggcttatttattaaatatgacttcttggggaggcagggcatgtcccaaggtaatgggcnggtcacttatggttggaaaaaaggggggtaataatataggggataccataggaggaaggtttt

SEQ ID NO: 302551 - DNA, 307 bp, Homo Sapiens
tgagttcatgctatttctcatacacatatttttaaaagaccagaactttttatcagactccaacagtaacatttttaatacttttctacataaactcagacaaattaatgcaacaggagtaccattaaatatctttcaattccaggggctaataatcccaagaataattgctgatgcttgggtaacagggaaataaggaaatcaaaaacctaaactgacaggaaacatgtaatttctgcagtgctgggttggaactctaacactggaacacatttttacgtgtaggttaaacccttttattattatc

SEQ ID NO: 302552 - DNA, 404 bp, Homo Sapiens
  misc_feature (75)..(75): n is a, c, g, or t
  misc_feature (161)..(161): n is a, c, g, or t
  misc_feature (188)..(188): n is a, c, g, or t
  misc_feature (235)..(235): n is a, c, g, or t
  misc_feature (241)..(241): n is a, c, g, or t
  misc_feature (277)..(277): n is a, c, g, or t
  misc_feature (301)..(301): n is a, c, g, or t
  misc_feature (313)..(313): n is a, c, g, or t
  misc_feature (321)..(321): n is a, c, g, or t
  misc_feature (338)..(338): n is a, c, g, or t
  misc_feature (346)..(346): n is a, c, g, or t
  misc_feature (376)..(376): n is a, c, g, or t
ttattatttaaaatgttttagatatttgttgaggaccatctacaggtaaagcagttttaggaatggaggattttntagaaagacacccaaagtccgtcttctcagaatgttctgttctacagaggatatatgataaacaagtacaaaacgaaggacacgantgatggacggaagttctgtgatagaantacaaccatgcgcaaagtgatagaggaggggtgggcaggaaacccantttagntgaggtggtcacttagacttctttgggaaggtggtntttcagctgagtcagaagggtggntggagcaagcantgcacagntggccaggctggcaggntaggagcntttaaaatgggttcaaaggtcctcaggccnggggtaatggggtaaagcagagtctagg

SEQ ID NO: 302553 - DNA, 226 bp, Homo Sapiens
  misc_feature (144)..(144): n is a, c, g, or t
  misc_feature (174)..(174): n is a, c, g, or t
  misc_feature (198)..(198): n is a, c, g, or t
ttgtacaggctgggtcaaactgactttaataaaggacaaacacacctagcttaaagaaggttaaaaaaagtctattgatagactatcataaaataaaaatggttactccttcattatactcctgttaacatcaaacaaagaaantttcaggttagaacaagaaaacatcaacantctcagaaagtgaggctagtgganttaaaagcttatgaaagactaaatggtt

SEQ ID NO: 302554 - DNA, 459 bp, Homo Sapiens
  misc_feature (306)..(306): n is a, c, g, or t
gtgacagaaaagggataattaggaaagcttcatgctaaattaaattcagtcttaaaaaattagcaggatgattttttaaatggagctgtcggtgaatgcactgtgtgagctagggtgcagcctgagagagagcagggcacgctgaggaccggctcggctgccgtgacacgagtgggtggtgtcttgggggtctctggggctggaccagatgagtgttgtcctcccgagtatctgctgtggaagctttgtgctgcctctcccttgtcccagtgtcttgctttgttctttgtttcttccgctagactntcagctttgggaggaagcaggccgcatctgtcttgtccccagtgttgagcgcagtgtgtgctgcagcatgggaagttgttcccttaaatacccacagttgaggatgaggctcccatttacaaacatgtttttgaagctgcacttcgcagttgt

SEQ ID NO: 302555 - DNA, 373 bp, Homo Sapiens
  misc_feature (19)..(19): n is a, c, g, or t
  misc_feature (61)..(61): n is a, c, g, or t
  misc_feature (77)..(77): n is a, c, g, or t
  misc_feature (106)..(106): n is a, c, g, or t
  misc_feature (250)..(250): n is a, c, g, or t
  misc_feature (286)..(286): n is a, c, g, or t
  misc_feature (292)..(292): n is a, c, g, or t
  misc_feature (353)..(353): n is a, c, g, or t
cagacagtgctttgagatnggttttatgtttatttaggtgggcttggggtggggggttttntgatagccaggctttngtgcttgtactactctcaaaccatacccnagccacatgtgcaggcatgtgtgtagagacttgaggtgtactgacccaacttgtcgccagcctgggctctcagaaggtttcagaagtttgttcttctctcagctcgatgggagttaaaaagtatagcagtggagagatccagtntgagggcctggacttccaaccttccagggagagctnggcttnggagactaagaactcctcaggtaatgcctgaacatggcccagtagtctatagcaaggactnggccactgtaaacacaacag

SEQ ID NO: 302556 - DNA, 299 bp, Homo Sapiens
  misc_feature (278)..(278): n is a, c, g, or t
tgtctctccttggtagagtttgtcacccccaagtaagaactaaggctctgagaaaataagttttgcccaacctaagtgtagtatgttcaagtcagatatttaaacctaatccaacatttcttgccccaaccatctctataagtaataattctcaactagtctagtaaaggagataggtatgtgaataaataacttacaaagttgtaatttatttaatggtttaatgattacacaaccattaaaaatgagcaatagctgtatatttattgtcattgaantacattcaccatgtgttaatt

SEQ ID NO: 302557 - DNA, 153 bp, Homo Sapiens
  misc_feature (39)..(39): n is a, c, g, or t
  misc_feature (56)..(56): n is a, c, g, or t
  misc_feature (60)..(64): n is a, c, g, or t
  misc_feature (80)..(80): n is a, c, g, or t
  misc_feature (126)..(126): n is a, c, g, or t
  misc_feature (142)..(142): n is a, c, g, or t
ggaagggtttttcatgactcttatctccttcagttccantctgagcttagttactncttnnnnnctgctagctctggganttgtttgctcttcattctctagttcttttagttgtgatgttagggngtcaattcgagatctntctagattttt

SEQ ID NO: 302558 - DNA, 182 bp, Homo Sapiens
  misc_feature (49)..(49): n is a, c, g, or t
  misc_feature (69)..(69): n is a, c, g, or t
  misc_feature (91)..(91): n is a, c, g, or t
  misc_feature (101)..(101): n is a, c, g, or t
  misc_feature (121)..(121): n is a, c, g, or t
  misc_feature (134)..(134): n is a, c, g, or t
  misc_feature (150)..(150): n is a, c, g, or t
  misc_feature (161)..(161): n is a, c, g, or t
ggggggcacagatgggtttgtgggttacaggggataagtttctttagtnggcgattttttgaggatttnggtattacctgttcacctgagncagtgtaacnggatatgttagtctttttantcccttcaaccgnccccccacaaggtttnccttggccccnggaggtttccaaaagttccat

SEQ ID NO: 302559 - DNA, 196 bp, Homo Sapiens
gcctgggcattggttgggtcttgtgtgctctgtctctcatgggcagcacaagctgtccctcaggactccactcccttgcccattctcatcccccatcgcctcagcttccacacgtccgcgatgggccccccagcttctcttcaccacagctgccccaacacctgccccatcttctcctcctgtcccagttccatgt

SEQ ID NO: 302560 - DNA, 372 bp, Homo Sapiens
  misc_feature (273)..(273): n is a, c, g, or t
tccacaatcagacctccattgatctgtcacaaccatcttcattagaaaaccataaaaatagcctaatgtttagaaactttgttgttattcctttggagttgcactcacagattgctaaaattgccgttaaatatgtactgttgcctgcttgcatttgaaggctgaggcattgcaggctctgggagagctgaaaggtgggaggagacttgggtttgaatggggcgcttatcttgtcatcaggggaatttggctataaaattgggcaggaagggnaaggcattcttggcacagagggtgaatgggccatggtgagggccaataggtgagggccggtatggaggtgcctatttaggtaatacagggctgaggtat

SEQ ID NO: 302561 - DNA, 447 bp, Homo Sapiens
  misc_feature (11)..(11): n is a, c, g, or t
  misc_feature (397)..(397): n is a, c, g, or t
attcggcacgnggggagccaaatcaggactgtaaggtgaatgcctaatgattcccaaggaaattctcacaaaattggcctttttcgatgagaggaatggacaggagcattgtcacagtggaggactctctggtgaagctgtccggggtgttttgctgctaaacctttggctaactttcttaaaacaatctcataagtagcagatgttatcattctttgtccccacgcccagaaaatcaacaagcaaaatgccttgagcatcccaaaaaaactgttgccatcacctttgctcttgctgtctttgctgtgactagggccactcccacctctttgtaggccattgcttaggattgtggcttttgtctttcagggattgtaggtgggtaaatccacatttncattctcctatttacagtttccttggaaggaaacactttcaggggtcttg

SEQ ID NO: 302562 - DNA, 384 bp, Homo Sapiens
  misc_feature (303)..(303): n is a, c, g, or t
  misc_feature (327)..(327): n is a, c, g, or t
  misc_feature (345)..(345): n is a, c, g, or t
  misc_feature (367)..(367): n is a, c, g, or t
gcatccattgggcaagacattgattagatttaaacagctgcttagttatgaaaagttggaggaatttaagaaagaattaataggatttattgtttgcaatttaaaagaattgaaaatgagttaaatatgtgttctgtccctaaaggaatatgataatgaagttgcacagttaagatagtattttgggagattatatatcaaaatatgttgacatgatctctgtgattttggggtctctgtaataggtgatggggtttccctgtagttgggagcttggggataggggtgggaaatgtgagggcngggtatttttcctggccttatgcnttgtatggggataggggnaattgtcccggggtttcccccnctttgagggccgccttt

SEQ ID NO: 302563 - DNA, 390 bp, Homo Sapiens
  misc_feature (340)..(340): n is a, c, g, or t
  misc_feature (352)..(352): n is a, c, g, or t
  misc_feature (369)..(369): n is a, c, g, or t
cgcatgcagccttatcctgcttttttaatatgaattgtacctcgggtaaccaaatagatagtggaaagcatctatttttagaaggactctggcttataaatgaaaaaggaacgatagactatcagcactttccagcccctaaataaaatgatggagatagtgatcatcggtggctgctaaaacaattagattgaaatgctgatgggaaactttataataagtggatcagatagaccacatctatcccactgatatatcttaggcatcttcaaaaaagagatcataggtgttttgtgtgttctgatgtgggtgtgggtagggaagtataccttaagccttngagttttcttgnctaaaaataaattctgnattctggggccaggctctagg

SEQ ID NO: 302564 - DNA, 520 bp, Homo Sapiens
  misc_feature (215)..(215): n is a, c, g, or t
  misc_feature (242)..(242): n is a, c, g, or t
  misc_feature (446)..(446): n is a, c, g, or t
  misc_feature (454)..(454): n is a, c, g, or t
aagtggggtctgctggtgaagacaacccagctggccaaatgaatcctggttggaagccttcttcagacggggctgtggtggcaccagctcccaagtctgaagaaaaagatgctgctgagatccaaaagcgcaaaaggctagagcaagctggaatcaaggtcatgccagcagcacagcgctttgccaggtcagctctgggctgagggctggcccgnctggctttctgcatgcctggggatttngaatctgtctagagagttggagttttcatctgatttttccacttcccgcttttcctattgcatcactgttccctgctctgagcacgtagatgatagtcttttgccttaaaggcatgttctctgcttaagtacctcctggggtatttttaaatgaaaggtgaagagtggagctcctcactgctggggtgcagcccttgtctttgntcatgtantttgtgattcagtcatgtgtggggctgcaggatttacctaggcaataacattgtatttttctattg

SEQ ID NO: 302565 - DNA, 508 bp, Homo Sapiens
  misc_feature (392)..(392): n is a, c, g, or t
  misc_feature (403)..(403): n is a, c, g, or t
  misc_feature (425)..(425): n is a, c, g, or t
  misc_feature (432)..(432): n is a, c, g, or t
  misc_feature (446)..(446): n is a, c, g, or t
  misc_feature (473)..(473): n is a, c, g, or t
tggggtatttgtattttaacttaattttgtaaggtttttatgttatggaaatatattgatctttatatgttttaggctttaatgtgtgtatgagcttcctaggttgccagagcaaattaccacaggcatgcctaaaacaacagaaatttatttcctcacagttatggaggccaaaagtctgaaatcaaggtgttagcagggtgattctccctcctaaggctcttagaggagaatccttcctggttctcccggcttctgctggctcctggtgttccttggcttgtagcagcagcactcacatctctctctgtgtgttcacgtggccttgtcctctgtgtctttgtctaaaattttcttctcttgtctgtgatacagacattggtcattgtganttaggggtccncaaatccgggatggtcttatcntcaaganccttaagttaattnacatccgtaaaagaccttgttttcagnataatatcgcaatttattagttaccagggtttggg

SEQ ID NO: 302566 - DNA, 420 bp, Homo Sapiens
  misc_feature (348)..(348): n is a, c, g, or t
  misc_feature (358)..(358): n is a, c, g, or t
  misc_feature (373)..(373): n is a, c, g, or t
  misc_feature (395)..(395): n is a, c, g, or t
ttcatactactgaacagcataatcaaatcaacaaattcagctaatggccattgtgttgtgggcactgtgcttggccctgcacatccccatgttccctctcccctttgtcaaaaactagctccactggttgttaatgtcaatcactgatttgcggttgtccagaataaaaatggagagcagagcccaaacggagggtggcagtcggccttgtcattacccaaagaactaaaaatggagtaatgcaaaagagtggaactccttcacattaacaaaagcttagttatatacagtataagaccactgaatatttaaacacacaaatttgaaatatggcagaggaaccgggtngaacaggttnaaaacatggtttcantaattctgggtattttataagntatttctggagtccgcttggacaac

SEQ ID NO: 302567 - DNA, 410 bp, Homo Sapiens
  misc_feature (267)..(267): n is a, c, g, or t
  misc_feature (320)..(320): n is a, c, g, or t
  misc_feature (337)..(337): n is a, c, g, or t
  misc_feature (399)..(399): n is a, c, g, or t
ataaaacaacctctcagtttttatttaagtttcaatgatttcaacaagttgaaattcagacacatttgaatgccatggataggatgcaatcagtaagaaaagctcagagactttcaagccctaatgaaaatatatgaagctaaaaaaattagcattagcagaattaccaaggagtcaagaatcagtgggatgataagtcatccaaaataaaatggattttgcccaaacctcaccttaaaagctaatgacaaatctaaatgcactggncctactgggtaaaacgatgtaaggagagcaggagctgaaacaccacttcaggntgctgagggtcagaggnaacagccgtgatgctgcgttttcagtattttgggcaaacaccccacattcacatctgaaggnggcaaggctgc

SEQ ID NO: 302568 - DNA, 324 bp, Homo Sapiens
  misc_feature (302)..(302): n is a, c, g, or t
tggcagaagagggtgaaataagttggactcttgtttttattctcaaatgctccctggaaacatactttggggaatctgtttttaaagtgagcttatgtcacataggcttgatactgtctagaaaaatctcttcaggtgagggtggggcctcaactaagagtgcaggcccgaagagcctcccaaaggaaacttctagaatcaggctgtgggctgtgactctcctcagcaaagccacgcagagggtaaggtgcttcaattcagggacttacaaaagggcctccctgctctgctcagatgggggnaaagttgatgatggggtttttt

SEQ ID NO: 302569 - DNA, 124 bp, Homo Sapiens
tggggctcaagccatcctcccgactcagtctcctgagtagctggggactacaggcctgcaccaccacacctaggctaattttttgtgttttttgtgggagatgggagttttgacatgttgcccg

SEQ ID NO: 302570 - DNA, 483 bp, Homo Sapiens
  misc_feature (190)..(190): n is a, c, g, or t
  misc_feature (462)..(462): n is a, c, g, or t
gcagggtagtgggagacgaaggcagaagcaagagtcaaactcagaatgactgagttgaattcactgtctagtcagcaatgcctgcttctgagtttggcccagagagaaggtattgagtaagattttaataactgtaaaaagtaagctggataagtaaaatcatgatggatccaaagcacagtttcttcanctcctgataaagaaagtcaaatgcttgataaattcagagtcacagatgtgagcatagctatattcttttaaacgagaggtagagtgacctagcactaagcaaatgagctgaaatgtcggaaacagagtccatcagcttatttggccacacgatcccaaacttgttttattcttggggaaatggccctgttcctcagcattcccttcttgttgctggtggggccagtggaagtcttgatcttattcaggtaaagggccacaccaagtgcgagnttttccccgggctgacttttc

SEQ ID NO: 302571 - DNA, 273 bp, Homo Sapiens
  misc_feature (108)..(108): n is a, c, g, or t
  misc_feature (116)..(116): n is a, c, g, or t
  misc_feature (262)..(262): n is a, c, g, or t
gcacaattaaaaaattttggagactctctaggagaaggtgagatggtacatcatggactctggttctgaagttgcctcttattcacagagattgctagaagtctggangtagggtnggaacagggaccttcagtgactgccagcgggtgtggacccctccccacaccaagaagggatctttgcatgagaaattcacgggagtcaagaatcagccaatttcaggatctcctgggtcctcctgactgagcagcacacagtgctnaagtaggcatt

SEQ ID NO: 302572 - DNA, 359 bp, Homo Sapiens
acatttcaggcataaatacagttgttaacatttgggattatagtcttaacctttcctcactgattagaattccgtagtgacacatttgagattagctttttaacaaagtcacttcttgttagaagtgacttttttaaagaaaataagttagctttactcacttgtgtagtaattccacattaaaataaagtttcagctatttttggggtgtaagaatagttggtgagtatgatcaagttatttttttctagatttagtcggtatatattgatcaatagggttctttgtatgtttgagatactataccagttgaaggtgtgggacttaaacaagtggaggaagggagtgccttgtatatc

SEQ ID NO: 302573 - DNA, 469 bp, Homo Sapiens
  misc_feature (332)..(346): n is a, c, g, or t
  misc_feature (389)..(389): n is a, c, g, or t
  misc_feature (408)..(408): n is a, c, g, or t
  misc_feature (422)..(422): n is a, c, g, or t
  misc_feature (448)..(448): n is a, c, g, or t
ctagataggtatcctgtagaaatgttaaacacgggtgagatgtgggaagtggctgttttctactggagatggagaggagccacctccccacgctgagcatctgtgggcatcatgaacatttggaacttaagccacaatcatttgaatttttttggatgccccagttgttttccttctgtcaccaacaactttgggacttccctactgcagaattgtcgcatattaagtaggagacctcagttgttacggagtttttctcctccctagatacctagatctgtgaaagaaatccacatagcaaacgcttgtctagagctacatctctgggacannnnnnnnnnnnnnnctgtagccaatagtgaaaaatttcttattcttgacagtccaantatatgttaagtgtacttnatttcttaaggagnttattttgacactgacatttagtggnattggatgatacagttctacc

SEQ ID NO: 302574 - DNA, 388 bp, Homo Sapiens
  misc_feature (38)..(38): n is a, c, g, or t
  misc_feature (124)..(139): n is a, c, g, or t
  misc_feature (171)..(171): n is a, c, g, or t
  misc_feature (206)..(206): n is a, c, g, or t
ctgtcatccaggctgaagtgcagtggtgcccactcagncctcaacatcctggactcaatcaatcctcccatctcagctgtccctgtagctgggactacaggtgggtaccacaagcccagctaannnnnnnnnnnnnnnngtagatacaaggttttaccatgttgcccaggntggtcttgaattcctaggctcaagcaatccgcctntctgggtctcccaaagtgctaggattataggtgtgagccactgtgcccagccccattagtttttatctcacaaaaaagtaaaaatgtaggatattaaaaataatagggccaaagcatcaccttatttataacccatcttgtttgaaaagtaatttaagggcagttcataaagtacagtctga

SEQ ID NO: 302575 - DNA, 299 bp, Homo Sapiens
  misc_feature (244)..(244): n is a, c, g, or t
gtgacttaacgaggctcctgaccttcagtagccaattcaaatcacaatatcaaatggaatctacctgagaagcatccttggggcaaaatcccttttgttacatgttgattcttaataacttcaattatgatgatacttacgataattgcaaaaggtaaaacttgtcattcttacctaatgagtctgagagcaagaaattttgttttgtactgtcacaaattccctacctttctagggaagtagnggaacaaaatgtttcaaaacaaatgctttatttagtcaatgatatgatgtataac

SEQ ID NO: 302576 - DNA, 366 bp, Homo Sapiens
  misc_feature (208)..(208): n is a, c, g, or t
  misc_feature (211)..(211): n is a, c, g, or t
  misc_feature (216)..(216): n is a, c, g, or t
  misc_feature (249)..(249): n is a, c, g, or t
  misc_feature (320)..(320): n is a, c, g, or t
  misc_feature (328)..(328): n is a, c, g, or t
  misc_feature (336)..(336): n is a, c, g, or t
tgaaacttcatagccattaaactctaactccccatttctccccgctctcagcccctggaaaccactattgtgctttcttaacattaagctccccccggctttttcttttaacatttattttaggttccggggtacatgtgcaagtttgttatataggtaaactcatgatatcacggggatttgttgtaacagattattttgtcacccnggnactangcctagtatccagtagttttgcccttctctgtncctcccaccctccaccctcaggtagggcccaagtgtcctgtcgttccccctctttgtgtccatatgttctnatcatttngctcccanttataaaatgagagcatgtgggatttggct

SEQ ID NO: 302577 - DNA, 453 bp, Homo Sapiens
  misc_feature (281)..(365): n is a, c, g, or t
  misc_feature (381)..(381): n is a, c, g, or t
  misc_feature (386)..(386): n is a, c, g, or t
  misc_feature (406)..(406): n is a, c, g, or t
aatataaccatattttcattgaatatattatcatgaacactttcagtcattaaaatctgttctgcaacatttttagtgactgcaatagatccacattttatgaataaactttgatgtttttactgtgcaatttctgtatgagtagataagggtagaaaataatataatgctatatataatgccacacaaagctacacacacgtatctaagaacttcaaaaaccacagaacttccctctcccctgttccttaaaacaaagtctgagcggaaaaaacaaactnnnnnnnnnnnnnnnnnnnnnnnnnnnnnnnnnnnnnnnnnnnnnnnnnnnnnnnnnnnnnnnnnnnnnnnnnnnnnnnnnnnnnaggcaatcaattttgncggcngataccagctagggggtccncccgtttgccctggttttcccctaggggtgggctttggttccccagg

SEQ ID NO: 302578 - DNA, 441 bp, Homo Sapiens
  misc_feature (159)..(182): n is a, c, g, or t
ccctagtattcttgcataaaaatatttcattttgtcttcgtgtaagggtcaataatttcaatcatcccccaaactggcagcaaaaagctgttcagtgtgctgttagctaacccctacagcttgtgcagtcatattctgaatgaaaaacagaagataaannnnnnnnnnnnnnnnnnnnnnnnaggcaaaaggaagctgggtggttaatcactatatatatctgttccttaaaatctgatttcaggatggaattttttcattttatccataaaaaggaaacaaactgaaaaggtagatttttttctttcaaactgggctactacttaaataactgcctactcctgagagtagggtaagtctaaagtgaaactacggcatttcataaaactttaaccctattcccagtaatgcagctcattagtgaccattaacccttttcat

SEQ ID NO: 302579 - DNA, 393 bp, Homo Sapiens
  misc_feature (232)..(232): n is a, c, g, or t
  misc_feature (257)..(257): n is a, c, g, or t
cttggagaaaaattgagtttggttccaagggctgtctgtgctcttttgggaatctaagggtaggagtcttacagatctgggtcagttaatgtgcacaaaacgttgtggcatatttactccctttgatacctaaccctggaacttttaggctttcaaagaaagtcaccactgtagtcctagctcatccctggggcatgatggttctgtgaggaccagtccagtcatcctcttnctcctgcaggcttagtcctgcagtnctaggaagccatgcaaagaaggtgagagggtcccttctttccattgttcatggcacctgagggattcttcactttgagagcagcttccattcccttagaactcatgggaccagggacttatgcagagaacagttag

SEQ ID NO: 302580 - DNA, 352 bp, Homo Sapiens
  misc_feature (44)..(44): n is a, c, g, or t
  misc_feature (174)..(174): n is a, c, g, or t
  misc_feature (282)..(282): n is a, c, g, or t
  misc_feature (335)..(335): n is a, c, g, or t
ctctctagtggctgtatgggaccgtggtaataatagttgctctngtttatttcccgtttgatgtgttttgatgcaacagactattcagctcagacagagaccgtgtgctgcaggtgaggaacacaggctttggagtctgaattcaaatgcaacttctactgcttacagcgatanaacccagggatgtttcttcgacttgcttccttcatttattcctcaaatgtttatcgagcatccgctgtattttcatgtgttatgttagaggctggggttacaatgggntgcaaagatagacatggtcctggctctagtgactctttacagttcaatttcangagagatgttcaaatta

SEQ ID NO: 302581 - DNA, 413 bp, Homo Sapiens
  misc_feature (50)..(50): n is a, c, g, or t
  misc_feature (211)..(211): n is a, c, g, or t
  misc_feature (249)..(249): n is a, c, g, or t
  misc_feature (339)..(339): n is a, c, g, or t
  misc_feature (355)..(355): n is a, c, g, or t
  misc_feature (360)..(360): n is a, c, g, or t
  misc_feature (366)..(366): n is a, c, g, or t
  misc_feature (398)..(398): n is a, c, g, or t
taatctcctttgactccgtgtctcacatccaggtcacagtgatgcaagtngtgagttctcatggtcttgggcagctccacctccatggctttgcagggtacagacgccctcccagctgctttcacaggctgatgttgagtgtctgtgacttttccaggtacatggtgcaagctgtcagtgggtctgtcattctaggacctggaggatggtngccctcttctcacagctccactaagcagtatcccagtngggactctgtgtaggggtttccaccccaaatttcccttccacactgccctagcagaggttctccatgagggctctgccctgtcagcacanctctgcttgggacatncaggntttttntataacattcttgtgaaattttagggtggganggttcccaattctta

SEQ ID NO: 302582 - DNA, 132 bp, Homo Sapiens
cttcaccgaagaatggcttaaagggttaaagatgaaaaatatagggtacggaagggatgtcagatctgaatgatagttgatttatactgtgtaactttcaaaagtagctactcaatgtgagcatttccacta

SEQ ID NO: 302583 - DNA, 433 bp, Homo Sapiens
  misc_feature (68)..(68): n is a, c, g, or t
  misc_feature (80)..(80): n is a, c, g, or t
  misc_feature (358)..(358): n is a, c, g, or t
  misc_feature (414)..(414): n is a, c, g, or t
ctatgttgcttaggctagtctcaaactcctgggtgcaaatgatcctcctgcttcaccctcccagagtnctggagttacangcatgagcactgtgcctggccctaacaattttttgaagagagcatttcattcactgttaaatttatttcttccctaaatctctatagaaaatgtgccactctatttctagcatgttagtaaacttggcgaggtttattctagactgcatcacggtggtggctttcttccatttggacattcagattggtcactgtctagttataagactctttccaccattggaaggataccataaattaaagtgaccttgctcagtagcaatccctttgactttggnagaaggctataccatattaagtaattacactctgttagtccaattttgacacttgnattttgggggtaattttgt

SEQ ID NO: 302584 - DNA, 330 bp, Homo Sapiens
  misc_feature (121)..(121): n is a, c, g, or t
  misc_feature (169)..(169): n is a, c, g, or t
  misc_feature (215)..(215): n is a, c, g, or t
  misc_feature (242)..(242): n is a, c, g, or t
  misc_feature (280)..(280): n is a, c, g, or t
  misc_feature (295)..(295): n is a, c, g, or t
gcagagccatgtcagatgcagcagaaaacagtgactgctatgcctgcagcaagatggagaccagagtgccctgtaggccagcacgcagcacccactcagggcagtgacctggagcttcctnagatccctctaaggcagacgttctgaatccatctttgttagcagtctnggagacgaacttagctttggtcaaccggcaacagcaaggcaggctngttgtagggaaggtgggctcagacgtngccccagaggtacccctcacccagcatccccagccgtngctgacttttccctnggatttgtgatcagaaatggggttagagcccagcg

SEQ ID NO: 302585 - DNA, 178 bp, Homo Sapiens
  misc_feature (19)..(19): n is a, c, g, or t
  misc_feature (68)..(68): n is a, c, g, or t
agagggccttcgctgctgngcccctggggactccttcgcgacggctcccggggagggggctgaggctngcagcgaggaccctgacaccccttcggagaggagttgctgctaggcggctcgcttgctcctggaaagatttggggtttgagagctcttggccaggaggctcgcgctggcc

SEQ ID NO: 302586 - DNA, 314 bp, Homo Sapiens
ttattcgtcatcgtaggcttggagcacataaaatgttatttctgaatcattactaggggagccttcctatcagagaaggtacctcgttttaagagtcaggaaaattctgggaaggggttactgaaacctacaaatgatgatgttttcatttttctttcacctttccctaagaaaatgccttcaaaggtcatagctcacatttatactgagggcccctaaattactttgctgatattgttggcattactctttgaaaataatctctggttaaccattttctcttgggtgatctgtttcttgtttgggatactact

SEQ ID NO: 302587 - DNA, 345 bp, Homo Sapiens
  misc_feature (264)..(264): n is a, c, g, or t
  misc_feature (279)..(279): n is a, c, g, or t
  misc_feature (314)..(314): n is a, c, g, or t
  misc_feature (324)..(324): n is a, c, g, or t
actgggctaatattttttggaggaagaccacagaagaagtgtggtattatcatcacatcacatcaaggctacatactatcaaatatggttcatcactattgatgttaacctcagtcacctggcttaaggtggtatttgtcaggtttctccactgtcaagttacatttttggtctctttttccaacactctagtttttgggaagagttttcccttatgttttttactgaatactttctatataagtgaagcttattgattttagnatttacatattattnaaagtaacactaaattataaagagtagacagtcancaaaacattngccaattacaaaatatcaatg

SEQ ID NO: 302588 - DNA, 464 bp, Homo Sapiens
  misc_feature (12)..(12): n is a, c, g, or t
  misc_feature (23)..(23): n is a, c, g, or t
  misc_feature (61)..(61): n is a, c, g, or t
  misc_feature (90)..(90): n is a, c, g, or t
  misc_feature (335)..(335): n is a, c, g, or t
  misc_feature (405)..(405): n is a, c, g, or t
  misc_feature (449)..(449): n is a, c, g, or t
ttcataaatatnggatggaagtngccacatctcatgcagtcatcttgatctgaaatttttnggtcttgtgtctcctttgatgaccatttnttcctgtatggttcctaaaaatactcacatttttccagtaaaacctgtcttctagattatatattccttttgagttcattattatgaaacccagagttttgctgttatgttagttcttaacagaacctgatgggatctcatccatcagggttcaaggactgtctttctctgatctcacttccaaaaaaccaggtctctagatttcagaccacaggaggatgttgaagaaagtttgcctgtgtggnttgatggataacactgagtttattttgtgaatggctgtgggagtattttggccattagttttctaggganttaatatatgggagtccagaatttgggtggatagttcctaggangaatgcgctgaaccc

SEQ ID NO: 302589 - DNA, 426 bp, Homo Sapiens
  misc_feature (109)..(117): n is a, c, g, or t
  misc_feature (321)..(321): n is a, c, g, or t
  misc_feature (382)..(382): n is a, c, g, or t
cttgaccttttaatgataactaattatgacataaactattaaagggtgaggaaaattgtttcactttttgacagagacataggtataatcacacttacgtgctggaaannnnnnnnnataaaagcatctccaaatataggtagtctcaaagtttaatactgtaagtgggaatagaattttaatttatgtgaaagacatatcttcaactatttttctaattttgaatgttcccaccgtgcttgaacaccattttatacagtcataattctgtgtttatgtcaggaatttatggtccttactatcaaaaacaacctctcaggntgactgttttcccggaattacaatggcatcaaggtctgtaacccttttcaaattaaaatgngatttaatttatttaatggtggattaaaatggcctttagggttt

SEQ ID NO: 302590 - DNA, 232 bp, Homo Sapiens
  misc_feature (57)..(57): n is a, c, g, or t
  misc_feature (60)..(60): n is a, c, g, or t
  misc_feature (77)..(77): n is a, c, g, or t
  misc_feature (90)..(90): n is a, c, g, or t
  misc_feature (155)..(155): n is a, c, g, or t
  misc_feature (178)..(178): n is a, c, g, or t
  misc_feature (207)..(207): n is a, c, g, or t
gctaagcccatgttttgccctgctgaggagcagctagagatttatcattcattacanganacttccttctggccctnacatatttaaccnccttcaacctcagatcctgcatcaaggaagaattcacagctctgtgccacagaattaatttctcnctggcttttccccctttcttttnaaccattcatccagctctacagagcacanggccgactacagaattagtttaaaa

SEQ ID NO: 302591 - DNA, 342 bp, Homo Sapiens
  misc_feature (231)..(231): n is a, c, g, or t
  misc_feature (318)..(318): n is a, c, g, or t
caagattcaagtgggattcagttttcagagtgctggcaaacagcctggaaacagctctataagctcctggaatcctccagaggactgcagaactccataaaccatatgctgacatcatccctgtctgggtatagacaggaccagcagccacccaggaatggccttaaagaatccctaatgaattaatcatcataaaccagctcgggagcaggagaacatgctcatgccgtnggtactgcctttgcccaggagttccacctcccatttaccaattaactttacagtttgcatctgcctttcctgccaagctctcccatnaaaggaatttatcaccttctgttt

SEQ ID NO: 302592 - DNA, 478 bp, Homo Sapiens
  misc_feature (392)..(392): n is a, c, g, or t
  misc_feature (419)..(419): n is a, c, g, or t
  misc_feature (430)..(430): n is a, c, g, or t
  misc_feature (457)..(457): n is a, c, g, or t
tggagatctgcctttcaagacattaatatgaccgtttttatcaaatattttactaaggcataaaatggtcatcacctttctaatctgtaatatcggtattcgtacctccctatcctcttactaagccagtgctacatgttttaggtttgttatggtagcaccctacttttaataacaaattttgtatattcaaggtctagttgaagggaacaaaattcactctagcgagtttatgcacaaaggtatttgcacacaataagtattaaacggcttacagaatcattaggacagttgaaaagacaggctttaagttaagttttcaggaatgattttgagaggtttgcctcaaaccaggttcaccaaagatgctcccaggctatttctatccatgnaggcttaacagctggaattggggatcntattcctgganaggtgttcccctcttgggatccgtggntgttcactggcccattatttg

SEQ ID NO: 302593 - DNA, 305 bp, Homo Sapiens
  misc_feature (281)..(281): n is a, c, g, or t
  misc_feature (287)..(287): n is a, c, g, or t
attcggcacagaaagaatagaaagaataaaagcaaatatgtcaatctctgttcacagaaatgtatgagagatgagacatattcacttataaatgtaacacaaagtagaaagtgtcaactgaaatcaaagggacagagctaaagtactctttcctttgagttaaagagaagctatattctgggtgcagcctcattttggcttcagtttggataattagtctgtctagcctgtcactggcagaatctgaaataattggaacccataaggagtaagattttctngaggangcactgcaaagtaagatg

SEQ ID NO: 302594 - DNA, 396 bp, Homo Sapiens
atttttaatgttactcgactaactttataagtatctgctcaaagagatgctattgttctttttgataattgttgctggccttaaagtgcctgggagggttatcgaactctcatcaattggttgtgaaagctaatttctgatggaaacacccagattttggtctgtctgctgcttgtgttttgatgtaaaagtattttagtaaaaattatttgaagttttaagccactgtgttgataaatatggtgtgtggtcattgctgcctaccttcgtaaagactgaaaacaatttgttcttttcccagtgtaacctttttttccctttagttcataccagagacagcgaaatgagggcaaagggaaagagtagattaagggagtttaggtagttaattccctg

SEQ ID NO: 302595 - DNA, 374 bp, Homo Sapiens
  misc_feature (353)..(353): n is a, c, g, or t
ccttacttggcctagaattgtctttattgaactaaaattagtttaacaccatgtgccaaatttgaaggattttaaaagatctaggatgcctgtattatgaaacggtattgaccttactgtttactaagttgcaccattttatttttatgagaatttatcgaaggttattttcagtgactctgtaataggagttgttgtatctcttcctcatccaaaatggtttttgtattataaatatcagaatcatgtccctaattttctcccattttccttgagcaaccagaaaccccagagtgaaattagtgacagacgtgtctggtatgtataccactctctctaacatgagctacatnaataccaaaaatcattattat

SEQ ID NO: 302596 - DNA, 319 bp, Homo Sapiens
  misc_feature (62)..(77): n is a, c, g, or t
  misc_feature (101)..(277): n is a, c, g, or t
  misc_feature (297)..(297): n is a, c, g, or t
aaaagctgaaagaattatatgatgaacacccgtatctcctaccacctagattctacactaannnnnnnnnnnnnnnnaacaattaacattgctcccatgannnnnnnnnnnnnnnnnnnnnnnnnnnnnnnnnnnnnnnnnnnnnnnnnnnnnnnnnnnnnnnnnnnnnnnnnnnnnnnnnnnnnnnnnnnnnnnnnnnnnnnnnnnnnnnnnnnnnnnnnnnnnnnnnnnnnnnnnnnnnnnnnnnnnnnnnnnnnnnnnnnnnnnnnnnnnnnnngaaaaccacagggctaacanccctggataatcttaggatggc

SEQ ID NO: 302597 - DNA, 189 bp, Homo Sapiens
ctctaggtatcccctactctagcacttaccattctgtattgtactagtttgttttcttggcttttgcctacatcagatcctgagtttcttgagggcatggaactgagtcatctttaattccctagttcggctctgtcatggggttaggacagtgtttatagagagggtaatggacatagggtagttgaa

SEQ ID NO: 302598 - DNA, 326 bp, Homo Sapiens
  misc_feature (234)..(234): n is a, c, g, or t
  misc_feature (246)..(246): n is a, c, g, or t
  misc_feature (261)..(261): n is a, c, g, or t
  misc_feature (296)..(296): n is a, c, g, or t
  misc_feature (313)..(313): n is a, c, g, or t
caaaatatgtttaactatccaaaataaccaaaccaattatgcaacctgtttttcaaccatatttatagataaaagagcttatgtcatttcagcagacagatattaatgtaatctgtttcacagtgctcaactgttataccacaaaaattgaggcttcaccacaaaatgagagaaaacaaatgttaaacttgcatcatgatggagtagctgagccaatatggggttatacagcanataaatgataanctgaattattttgtnttttattatagtggaatcccagtctgatctcccanaataaaatatggatttnaaatcaggcaact

SEQ ID NO: 302599 - DNA, 426 bp, Homo Sapiens
  misc_feature (150)..(150): n is a, c, g, or t
  misc_feature (374)..(374): n is a, c, g, or t
aagaagggataggaaaagactcccgtattttttctcaccttcaggcctttgcacaaaagctgttcctctgcctggagcactgttttcatttgatgtatacaatcaggtgtttacgtacgggagcctttctctgtctccaccgcgcacagntttaaccctgtctctttatgaaacgaatgctcattattgttcaggggttggcttacctgctgctcccatccagaaagccatctctccatccgacctttaagggttaaacacccatcctcagcgctcctgggagcccgcaatagcaggcatcacaccatgttatacttgtcaactctgtcacctggccaccccttcgaaacttgggagctccctaggagcagganaggaacgtgtcttgttcacctttgtatggcaattgggtggtttcagttgagg

SEQ ID NO: 302600 - DNA, 352 bp, Homo Sapiens
  misc_feature (23)..(23): n is a, c, g, or t
acttccatagtgttttctacatnagcggtaccattttacattctcaccaacaatgcacaaggatttcagtttctccacatcctcaccaacatttgctcttttcttgtttttatttttaataggagctctcctaatgggtgtgaggtgatatctcattatggttttggctcacatttctctagcgatgttgggcatcttttcatgtactcactggtcaaatgtttatcttgtttggagaattgtctattcaagtcctttgtgatcatggttttctttttgatgcttgctataattttggtctctttagttggactccggtgctattttcctcagtatatttgatggtctacca

SEQ ID NO: 302601 - DNA, 420 bp, Homo Sapiens
tcagactaacagaatcagagctttaggcagagaaatgaatggttggagagagaaggcaatgcccaggtgccctgctttgaaatgtcccgcccatccccaaattagtctgaaaatttcaaatgttgtataaattcccttcccatcaaaagtgtcccataaacagcagtggtagaagagttttaactgagtatcacagcttcaatgatgagtatagaaaactccaaaaatctgaataccaacacaatcaaaaaagaggtacaaaccacaagtggaagaaccatctcaagaaataatgaagcattcatgggaatacagattaggcaactctttaaaacagtattgccaagagaaacaggtaagagggccctctgggaggaaatgttcaggaaataggaaattgttaatttgtttcaattgttt

SEQ ID NO: 302602 - DNA, 475 bp, Homo Sapiens
  misc_feature (452)..(452): n is a, c, g, or t
aaaataaaaaactcttactgctgtgttattatatttggaatatcttggatttttaaatttatagtctatatcgagggactacaagaaccatgtagaatattgttagacgaactaaaactccatctatgacctttgttctaatggtatgttttcagagaagagttttttaggatgtccagctacttggctgtttcacaaggtccccacagttaagaaatctcaagtatgtaattgtgatgggtctacgtgtgatctgtggcaaaaccatctagaccacctgaaccacatgccgtgtaggtttgtgctaaccagtagctcttgagggcaagcgatagggacagaagaagctctgcctcaggcgagtttaaggaaagggagaatggcactcctaactaaagtttctttgtatgcttgtggcgtatttttgcaggtttaggaatctttaaaacccngctttcttggatacaaacagggg

SEQ ID NO: 302603 - DNA, 388 bp, Homo Sapiens
  misc_feature (82)..(82): n is a, c, g, or t
  misc_feature (153)..(153): n is a, c, g, or t
  misc_feature (249)..(249): n is a, c, g, or t
  misc_feature (306)..(306): n is a, c, g, or t
  misc_feature (334)..(334): n is a, c, g, or t
  misc_feature (372)..(372): n is a, c, g, or t
ctgactcaactgggagtgaacggggaagcccggaagagcacacacatggaaagggcacgagatgaggtgcttgtggtttgtnttcatgaaaagcttgctgaagaccatgaggggtggagctgtttgtttaccacaatggtagctgggccagantccagaacaagtgttgtgtaaatatctaataccctttaagaaacagcctagtaattcagaaaggccttaggattctatttgcctatatcacatttnttctctgatgtcctgtgaacaatgtgaggcagcaagaaaacctatttcctataatanaatttagtgcagagaacttatattcaanttaggaagaggcttcagatgattaactccatccactcngttaaaagagatggga

SEQ ID NO: 302604 - DNA, 394 bp, Homo Sapiens
gggtcctaattacatgaccatattttaatgaactgaagatgcctttgtggtacaaacatgatgtgcttacccatatccagttctcctctcttttgtgagacgtggaaggattaaacttcctagcttccctcgcagttgggcagagcatgttgactaattctagccaatggattagaggaaaaagtgacatgtcactacaagattgtagcatttaattgctggtgggagatcctccagggctctattttcccctagagtagtgactgtggaagcacagttgatacggatggggcagtaccaagccatcgcatgggaggatagttgctgtgggagagtcacacagattcttcacctgactttgtttgagcaaccttaagttcccgaggttttccga

SEQ ID NO: 302605 - DNA, 149 bp, Homo Sapiens
  misc_feature (29)..(29): n is a, c, g, or t
  misc_feature (39)..(39): n is a, c, g, or t
  misc_feature (114)..(114): n is a, c, g, or t
  misc_feature (116)..(116): n is a, c, g, or t
ccctggaattaaagcatggtttatatgtnctacagaatntcatagcaaccaagtgaacaataagtacaagacacaaatcagaacttagaaacacatttcttacagtagtaaacntncattgtttgggggattcattaaaagaacagctg

SEQ ID NO: 302606 - DNA, 196 bp, Homo Sapiens
  misc_feature (14)..(14): n is a, c, g, or t
  misc_feature (109)..(109): n is a, c, g, or t
  misc_feature (147)..(147): n is a, c, g, or t
gtagcttgaacctngcaggggttccccaccaaaggtctctgtttccttaattctgattacatgtgtccctaggcctctagggactgaccacagtggagcatgaggcctnatagatcctggtggtcacttgttgggcctgggggcagnacccagggtcttcccagtttcatgagaagagattggtgaggttggacca

SEQ ID NO: 302607 - DNA, 357 bp, Homo Sapiens
aaaggagaatagaccttcattacaaatacagatgggtattttaagaaaataatctaaaataagagaaacagttcaccatttcggaatttgtttgcttacatgcttgacatgatttgttttaagttaaatcgaacattttatttaaggtcatgtgaattcttaaagagaactggtgaattactaagctctgataggccatttctttaatctaacaccatcctgaggctggcagcccactgagtgctgagaggataagcaaaaagagaatgtggagaacagctctaggcacggtggccgatggaagggtgctcactggcttctttctgaaacagcctgggtggacatcagtaccaaaag

SEQ ID NO: 302608 - DNA, 392 bp, Homo Sapiens
  misc_feature (56)..(131): n is a, c, g, or t
  misc_feature (241)..(241): n is a, c, g, or t
  misc_feature (338)..(338): n is a, c, g, or t
  misc_feature (343)..(343): n is a, c, g, or t
  misc_feature (369)..(369): n is a, c, g, or t
tttatctctcccctgaactactagggtgagagtaggaactttttctaattcacttnnnnnnnnnnnnnnnnnnnnnnnnnnnnnnnnnnnnnnnnnnnnnnnnnnnnnnnnnnnnnnnnnnnnnnnnnnnnagtgaggcaagcacattgcttttgtctggagtagtgtgttactagggtagctttgggggatgatggagattatgaaggggctacatccttcccacccctaaccccttccnggtgcctccatttactggaatatgctacacttgaaccataggataaggccagggtatagctgaggaaggctgccttatttgggcagtcttttagggnatttnttttgcttgggatcccattgccggtngagttcacccaaaggttttgttt

SEQ ID NO: 302609 - DNA, 328 bp, Homo Sapiens
  misc_feature (174)..(174): n is a, c, g, or t
  misc_feature (256)..(256): n is a, c, g, or t
  misc_feature (298)..(298): n is a, c, g, or t
aagaattatttatttattaacttaaaaatacagagcagtaattgtaagttagtactacttcatggccgcttactccatctgtctggtttgagccctcagaaaaggtcttggtagcgcctgctgcgagggaaaggacacagatttattttcaagaggcaatgctttcaaaaacantgacgctttgtgggctctctgcaaatacaaagtgatccatacagaagaagttggagatttatactccagaaaaaaagagatnttaccaacttgcatgagcccttccaaatttctcaggtgggtntaagtgtcctatcccctgtcttactagggc

SEQ ID NO: 302610 - DNA, 315 bp, Homo Sapiens
ttgttttttttggttcagcataacttggaacatttgaaagcttttcaacctaaatgtggggaaaaaacaggtaaggcattatttttgcacaaaactagcattcctaatagtgcaaatgaatctgatacctcttaaaatggtgagaggtcatacacttactagattaatttagattttctttctatggcttgacaaattatccctctataaattctactctcacccagaggctgttgctgtaatcaaaaggataactgtaggataaaggtccaaccttctcctggtatccggcaaaagggtttttgctcatatggc

SEQ ID NO: 302611 - DNA, 414 bp, Homo Sapiens
  misc_feature (213)..(213): n is a, c, g, or t
  misc_feature (393)..(393): n is a, c, g, or t
  misc_feature (398)..(398): n is a, c, g, or t
taaggtgctggaccaatgttaagtcacatgaccatttaaagcaaatagtgaaatgagtgattcaccaactttgagaccttggaataacatcagaaggaatcatttaccaggtgatcaacttctaatcagtaaagtctttagggaaaattgataagtattttgaacagcttacattgtaaagtctcaaaaggaaaattgctagtttccttggangacatatagtgctcttttttcaggaaatttttccaaatatcaggacatttggtctaattaaaactaacactccgcgtattctcataaaaaattatccaacggcctcatgttcatttatttctttattatttgtgggtaataatgtctccttattcctagaaatgatgttggatgtgttcngggcncagcctaggttaattg

SEQ ID NO: 302612 - DNA, 377 bp, Homo Sapiens
  misc_feature (282)..(282): n is a, c, g, or t
  misc_feature (357)..(357): n is a, c, g, or t
gtaaaaggctaggctgagattcattcattgcctcaccatggatgccaccatgagtctaactctgctgtctcagctctgcaaacacagatgatagatgggcatctcatctgaacatcattaggtccagggaacacttgtccatgccaccctgactgactttaatccagtgggtgtttgttgagtgtctgctacctgcaacaccagccagggtggcttgatatgggtaaagacgcaagaaatgttagcttaacatattgatgcaagctactgtagttgggcccngggggaggaaggggaagtataaaaatgaacaaagtgtaggtctttcatctccttgagggcttacaatccgggggncaggacagggacaagtaatt

SEQ ID NO: 302613 - DNA, 436 bp, Homo Sapiens
  misc_feature (55)..(111): n is a, c, g, or t
  misc_feature (265)..(394): n is a, c, g, or t
gagagattaaatataaggactgtttttgttgtttgagacaggatctggctctgtnnnnnnnnnnnnnnnnnnnnnnnnnnnnnnnnnnnnnnnnnnnnnnnnnnnnnnnnnttgggctcaggcaatcttcccacggctcactgaaacctctacctcttgggctcaggcaatcttcccacggctcactgaaacctctacctcttgggctcaggcaatcttcccacctcagtttcctaagcagctgggactacaggcgtgcaccacnnnnnnnnnnnnnnnnnnnnnnnnnnnnnnnnnnnnnnnnnnnnnnnnnnnnnnnnnnnnnnnnnnnnnnnnnnnnnnnnnnnnnnnnnnnnnnnnnnnnnnnnnnnnnnnnnnnnnnnnnnnnnnnnnntaaggcactgttgcctgggcaaggttttttgttgttgttgtt

SEQ ID NO: 302614 - DNA, 292 bp, Homo Sapiens
  misc_feature (40)..(40): n is a, c, g, or t
  misc_feature (79)..(79): n is a, c, g, or t
  misc_feature (115)..(115): n is a, c, g, or t
  misc_feature (145)..(145): n is a, c, g, or t
  misc_feature (179)..(179): n is a, c, g, or t
  misc_feature (186)..(186): n is a, c, g, or t
  misc_feature (219)..(219): n is a, c, g, or t
  misc_feature (227)..(227): n is a, c, g, or t
  misc_feature (254)..(254): n is a, c, g, or t
  misc_feature (272)..(272): n is a, c, g, or t
cgtggaaatgaaatttaatatccagaagaaaagcacagantaaaaagtcccaggcagaaggcaacaagcctttccaggnaagacgagacctgtgctgatgggacctcagaagcgnttaaagaacgagactgacactgcgcctggngacaaacggagctggtgcagcgggacagtaagtntcagctntcacctggcacctcaggagaggcacagcagccntcacgggntcccggcaaccctgagccaggaggggntggctcttctgtcctctntcctgggggcccagaggctt

SEQ ID NO: 302615 - DNA, 387 bp, Homo Sapiens
tggaagataggagatattcctcaatctctgcagggatgttttcctcatttgtgggagaaaaaaactacatatataggcaagccacaatgatcagtaaattgcagcttattagttatactaagatctggtctcctcacacataaaagaggttacatcaactactggcactttctgtgatacctagcctgtcgtaaatgtgctgtttttattcctagcaaatgtttgaatccaagcaaaacctaattggaggtatggattttaccttccatctgaggactgaggctgccttccaaaaagttaggggagttttatttgaggcttcttggctgtggactctgtttcctacctaggtcacatgtaaaacagggaaggatttaaaacttaaat

SEQ ID NO: 302616 - DNA, 374 bp, Homo Sapiens
  misc_feature (336)..(336): n is a, c, g, or t
  misc_feature (349)..(349): n is a, c, g, or t
attcggcacaggagctagcaccatgagtcaataccctgtcatttatccagtgaaacattacaatagcctcccaatggcacttcccctactccaatccattctcttcaccttcttctaaaacacaaatctgatgcctcactccctactctaaaccatctgacaggtccccaagcaccctcagaatgactggcatctccagccccatcttccaccacgcctcctccatgctgctccagaccactctccactcttgccatgcggtgttattcccaagtttctcaattggtgtccacccagctctgcctgtgttcttcctgttgcctgggtgttcctttnctatggacacctnccctggcctttcccactttttccca

SEQ ID NO: 302617 - DNA, 458 bp, Homo Sapiens
  misc_feature (421)..(421): n is a, c, g, or t
taatttaaatttcaaaactgcttgaaaatatattgtatcttgtatagatgagtcataggacaaacatatagactgttgttctatgggaatgcttgctgtctcagcagctcaaatattaatgccttaataatttacttaataagccaaagatgtagtttgctgatagactgtatgttcatatacaagcctctttcctctgctctcccatgcctaccccgtctgcaacctttgtgccctcgtcaccctcctgtgtgcatgtatgagtacccggaatatacaaacctcatggaactatgggactctttgacctctatggataaaagatcttcggattatggcttacttcttggattatcttttttgggggaacatcttgggcctaggggatttgggattatttcactggcttcctttgtgacanacttcttaggtttggtttaacttctggcaacacagtt

SEQ ID NO: 302618 - DNA, 163 bp, Homo Sapiens
ttcttgtcttgcctatttcctaccattcctttgcctttttttgtttaaagcattcagtaattaccagccagaaacagttttcattctcaacaaagtaactacatcagtaacaggtatactctttgtctctccataattgaagtttctattgtacaggctactt

SEQ ID NO: 302619 - DNA, 250 bp, Homo Sapiens
gagtgagccacagcacttcaccagaagtgtagcttaattatgaccctgggaatgctaagagaggcatttccatatggacacatccaataagacttcatggaggtgccactgaatcctagtcatagtcaaaaagagaactcagggtgggaggatatattgtgagggaaaggtaccacagagattgaaaagagcaggctgtgcaggagtaaataggcctaattctgttggggctaggaacacagagtttttt

SEQ ID NO: 302620 - DNA, 181 bp, Homo Sapiens
  misc_feature (136)..(136): n is a, c, g, or t
  misc_feature (143)..(143): n is a, c, g, or t
taatgggattcaagtttgaggtggggacagattcagtaaatgtagttaagatgaacctttttgtagagtaaattctggtctggtgaagcaaaaggtcaataaagtctatacttggctgtcattcatattcattcantcttccnttcattttaacttcagtttaacagcaagtcttgggagg

SEQ ID NO: 302621 - DNA, 245 bp, Homo Sapiens
  misc_feature (24)..(24): n is a, c, g, or t
  misc_feature (116)..(116): n is a, c, g, or t
  misc_feature (121)..(121): n is a, c, g, or t
  misc_feature (177)..(177): n is a, c, g, or t
  misc_feature (184)..(184): n is a, c, g, or t
  misc_feature (234)..(234): n is a, c, g, or t
tttaggccaataagaaggtaaaantgagacaaccatcaaggagattaatgataagagatgagctagaggaagaaatagaactagaagagaacagattagcccagcaacaggctaanttccnattctatgtacaagctgtgaagtaattaccatttctcccttgatgatagaggttcngatatcncaaattcagaaaaatcaggatttgaaccccgaggttcatggcttaggatnccctgaatggc

SEQ ID NO: 302622 - DNA, 370 bp, Homo Sapiens
tattcagaaaggtgggaaaacctaaagtgggggcttccaggctataggtaaatttaaacattttgtggctgacaattgggtgagtttatttgaagacctgggattaatggcaaggaatgttcaggttaaggtaaagctttgtggagaccaagttttattgtgcaccggtatctctcagacaccagacgtcagagagagagcaggttgtaaaatatgtcttagacctaaaagggtatgtggctcttagttgattgtctcctgggatctggggaaggaagggaaaggaaaacaaagagggaaatgggggttctttattaggaatgtgggattttttccctacaagagactttgcagggcaatttccaggtat

SEQ ID NO: 302623 - DNA, 261 bp, Homo Sapiens
  misc_feature (220)..(220): n is a, c, g, or t
  misc_feature (236)..(236): n is a, c, g, or t
ataattagctttaaagcaaactccaaagccaaaatagttaaatctgctttctaaccacaccactagaagcagaaacagatgctcaggctatagattgctcacaaagattcttatgagaatgaaaagtatcaatataaattgcaccttatctctgatgctttaagagggaatattctcaaagattatgtttaggaaagatattgttcgtgtgataagtatnaatggctcaaacttantttcacttattgcatgtggtattcc

SEQ ID NO: 302624 - DNA, 474 bp, Homo Sapiens
  misc_feature (435)..(435): n is a, c, g, or t
atgagctgccacgcccggccaattcagcaaatttatgtgggattccacctagaactccaaaccaaggtgctctgaatatgtattggtagtataaacagaatccacagccctatcctggattataagctcgttagggaggtagcaaaatacatgacactgacctaagaacacatgaaaagcaaagaaacatgaatgcaaagtcatgtcatataagctgtttaaatcctgagtaagatgaatttaatttgcatctatcctactacctataatccgtgactcacttgtctctctcctccagtagacatgactagggcatgacccatatagtactgaactttgtattcccagcaccttaccaaagtaggtgctggggaattacaaaggagggaggacaccccacaaatgtttaaataaaacattttattgaatgggttntgggtagggtggggttgatcagggattttcttacagtgg

SEQ ID NO: 302625 - DNA, 301 bp, Homo Sapiens
  misc_feature (238)..(238): n is a, c, g, or t
  misc_feature (241)..(241): n is a, c, g, or t
gatcttcagttcctattttactataagcctttgaaatgttaaggctgaatagaccaagatatgaaaagggacaagaggaagtaagaacagtgcagatacagtgggaacacacggtaactttctgccttctccattctacgtggacggtgtgctttccgggcagcaggtgttgtgactgtaaaaagatcacacatttgtcagtaactatgtaggatttttggcactgttaagagcgtanatntataaagtcagggcagctaataaaaattccctcaaccaaatttttgataagtctgaaatt

SEQ ID NO: 302626 - DNA, 460 bp, Homo Sapiens
  misc_feature (388)..(388): n is a, c, g, or t
ataatggaagaaccaggaatccaggatgggagagttgagtgagcatgataccttcctttagggaggagaaacaatccattggctagtttgagttgtttttcagtcatagtgatggatttgaacaatccatccaactctttcacccagttcttctctttagtaattgcatgcctttgcgagatggggcaatgtgggagagatgtgggaagataaatggcccttcagaggtttccatgactttttagaattttagtgtgttggctctaattaatgctgtcaataggagaagggaaatgtctaaaactctgggtgaacagtcacttaggctactcagaaaaacatttgggaaattaggaaaaaacattgtccaacatttatatgtgttccntttgatcctaacaagcgtctatattccccttcccctaaggggaaaaggtcccgtaggtttggccgggttggc

SEQ ID NO: 302627 - DNA, 215 bp, Homo Sapiens
  misc_feature (172)..(172): n is a, c, g, or t
gtgcacatttatttcaccttaattataacttgacttatactgggcatagttttatacaaagtcttctgcaccaacttacataaattgcatgtttccatatatcaacatctattttccctagctggaaatttctttatacttgattgtacaaggaggtttctcttcgaagganttataaaggtaacatctgctgttggaaatctgctcatatttta

SEQ ID NO: 302628 - DNA, 372 bp, Homo Sapiens
  misc_feature (23)..(23): n is a, c, g, or t
  misc_feature (74)..(74): n is a, c, g, or t
  misc_feature (78)..(78): n is a, c, g, or t
  misc_feature (105)..(105): n is a, c, g, or t
  misc_feature (116)..(116): n is a, c, g, or t
  misc_feature (179)..(179): n is a, c, g, or t
  misc_feature (304)..(304): n is a, c, g, or t
  misc_feature (325)..(325): n is a, c, g, or t
  misc_feature (360)..(360): n is a, c, g, or t
gaaacatccaatctatatctttncttcatgttccaattcagtcattgtttcttgaatgtttctcccaggaaganttantttcaccaatgaaagcactggagggantggtgcctgantatttaaaaaaatgaaaatctctctcatatgtggcttttagtaacaggggaaacaaagtaaantgcacctcaagcaagtgtgagaagggcgaggaagaaagcttttcagaaggtgcattagcgctcacaacagcgccctctgctgtccaagtggtggctgaagtgaaggtggctttcatgctatcagnaaagcccttttcactaaacanatttgatgttatctcctcttctagggctctagagngggtcagaaaag

SEQ ID NO: 302629 - DNA, 495 bp, Homo Sapiens
  misc_feature (344)..(344): n is a, c, g, or t
  misc_feature (362)..(362): n is a, c, g, or t
  misc_feature (413)..(413): n is a, c, g, or t
  misc_feature (434)..(434): n is a, c, g, or t
  misc_feature (442)..(442): n is a, c, g, or t
  misc_feature (454)..(454): n is a, c, g, or t
  misc_feature (473)..(473): n is a, c, g, or t
tggacttgttggttccattccattcaaaagttctctgtggctcctttccagttcttagtttgtatattattcttgaaaagttttaagtacttacttgtgtatcaagcacaacagtaggtgctttatttgtataatctcatttaatcataatacctatctcatacagccatcagtccaatttaacagacataaatagaagctaagagattaagtacactgagcttatacaagatcacaataatttccgttaagactctaaaacccttggctcttccaactataccatgaaggttctctacagaatctgttgttctctataaatttcaaacggggagaaaaggganacaacagggaaaaggggntttgagcttttcttttgaaaagcagtgactgttcagggccggcatcccttncccgaccattggttttggttnctttcggnatttaaaattcnttcactatggggttttacnggaatggccaaaattatggtca

SEQ ID NO: 302630 - DNA, 266 bp, Homo Sapiens
  misc_feature (162)..(162): n is a, c, g, or t
  misc_feature (186)..(186): n is a, c, g, or t
  misc_feature (204)..(204): n is a, c, g, or t
aggttgcccttatgcatcaggacagggagaagggatgaggatattaagatcagcagtcatggtgttcatccactctcaagttatctttcagaaaaggaaatgtggaaatgaggaacatttcagtacaccccagcacacaaaaaggcaggtaccactaaagtnttcaagtaggttatacgtggcttnttggagaacacacaacantgaaaacatacaccagaggctagttcaagtccccattttatttagttgatacttgaaactga

SEQ ID NO: 302631 - DNA, 280 bp, Homo Sapiens
  misc_feature (208)..(208): n is a, c, g, or t
  misc_feature (263)..(263): n is a, c, g, or t
tgacacttgtgcccagccatatatttcttgaaaatataaaaataggttgaacctacgaaagaaccacacaaaaaacacaagaaatgtaactgtaaaatacagaaacacataattttacttccaagtaattttatttgttctaaggatttctgtgacttaataaaaataactttgatctaaactgaggacgaggtcatggaacataagnttacggaatctcaccatatcctgctcctttaatcaatgtattagggatttctacngggggtttaaatcaggg

SEQ ID NO: 302632 - DNA, 299 bp, Homo Sapiens
  misc_feature (148)..(205): n is a, c, g, or t
tatctctttcatgatttccttgattggctctgtcacagatcctatgaagtcacatacaatttctggacacagttttcttcagcagtaatttattgttttgggcttgatggctttcacaactttttcttttgagacagggtctcactcnnnnnnnnnnnnnnnnnnnnnnnnnnnnnnnnnnnnnnnnnnnnnnnnnnnnnnnnnncgagtacctgggactacaggtacgcatgacagtgcccagctaatttttgtatcttttgtggaaatgtggtttcaccacggttgcccagggctgg

SEQ ID NO: 302633 - DNA, 389 bp, Homo Sapiens
  misc_feature (354)..(354): n is a, c, g, or t
aatagtgggcacgtctaggtttcagcaagatgtaggacagagtgtttatatgtagcttgttaggataaactagtctgtttatggtcccaattctacctctcagtgttggagtgaccttaaaagatgagaacaaatactccctataaggaacattctagagatgagggcccctgaagaccactatttatattggtggaaatagacttaaataagagccagtcttgggagggaaaaacacagagaggaaaggttccagccagggctatgagcaagccaaagggtttcatgggaaagggtgaaaaggtcttgaggagggcccctcaccctctttgggagggatgtgaggagtgatcntaagggctcctaggggttttgaggagccttcaaat

SEQ ID NO: 302634 - DNA, 418 bp, Homo Sapiens
  misc_feature (304)..(304): n is a, c, g, or t
  misc_feature (315)..(315): n is a, c, g, or t
  misc_feature (331)..(331): n is a, c, g, or t
  misc_feature (352)..(352): n is a, c, g, or t
  misc_feature (392)..(392): n is a, c, g, or t
tatagcgtgaattaatctgaaagatctttctaaacagaattctctggatgagctctggaatacataagctttgtaataattctcctaattgtcatgtttccaacacccttccctgaatttgaaagaagaaaattacttacttgtactcaggtttgttttcagtcggtaatttactatgtggggcagtttcatattctattatctgtcttactttctcatgatgagacccaaaacctctttgctttgaggaaccttattacaaattttaaatcccttggaaaataggtcaatccccaaaactccnggttcatcccncttttcaataattccntgggggtttggttggttatcntggaaaggtgtgtagggggggtactcccgggagggttttnatataattatccccacggggccaatg

SEQ ID NO: 302635 - DNA, 469 bp, Homo Sapiens
  misc_feature (64)..(64): n is a, c, g, or t
  misc_feature (86)..(86): n is a, c, g, or t
  misc_feature (91)..(91): n is a, c, g, or t
  misc_feature (127)..(127): n is a, c, g, or t
  misc_feature (274)..(274): n is a, c, g, or t
  misc_feature (338)..(338): n is a, c, g, or t
  misc_feature (385)..(385): n is a, c, g, or t
  misc_feature (414)..(414): n is a, c, g, or t
  misc_feature (432)..(432): n is a, c, g, or t
  misc_feature (454)..(454): n is a, c, g, or t
atttcggcacaggattctggctcaaggtctcataaagttgcacacaggatatcagctagggctngagtcatctgaatgtttgactngactngaagatttacttccaagctcattcacgtaactattngccagaggttcacttccttgccaggaggcctctctttagggctgctcaatgtgacttcctccagagcaagtgatccaacagagagagcccaagacagaagctttatcttggaactcatatacagttaacttctgctctggtcttttngtcacatcagccaacgctgatccaatgtggaagcattttgaataccaagaggcaggagtcactnggggccatctttacaggctggctttccacaagtaccctgttatcagncagctgttttacccacctaaattactgantttaagatggttttcagncagggcacagttggcttcacgnctgttaattcccagg

SEQ ID NO: 302636 - DNA, 316 bp, Homo Sapiens
  misc_feature (78)..(78): n is a, c, g, or t
  misc_feature (83)..(129): n is a, c, g, or t
  misc_feature (205)..(205): n is a, c, g, or t
  misc_feature (227)..(227): n is a, c, g, or t
  misc_feature (235)..(235): n is a, c, g, or t
  misc_feature (266)..(266): n is a, c, g, or t
gaggttaagaacaggggatctaaggtcacacagccagggtttaattccaccattgctgcttaagagctgcatgatgtnggaannnnnnnnnnnnnnnnnnnnnnnnnnnnnnnnnnnnnnnnnnnnnnnttttctaacctcctaaccttccgaggtggtcatgaggatgaaacgagtgtgtctaaagccctgtgcctgagccctnggatgtagaagtactcaatgangcagagtngaaatcttatcatgagcactgttaatccatnaaagttagggattgttcctgattgctagagttgtaattatagtaagttct

SEQ ID NO: 302637 - DNA, 407 bp, Homo Sapiens
  misc_feature (204)..(204): n is a, c, g, or t
  misc_feature (229)..(229): n is a, c, g, or t
  misc_feature (298)..(298): n is a, c, g, or t
  misc_feature (303)..(303): n is a, c, g, or t
  misc_feature (319)..(319): n is a, c, g, or t
  misc_feature (332)..(332): n is a, c, g, or t
  misc_feature (368)..(368): n is a, c, g, or t
tcttgaactatttagtgaaataccctaacttctaatcttgatattaaagaaaaaagaatttatggccagccaccacgcccagctcttcagtgactttgaaagtgaggaacacttttaggaaatgtatcagctgggctatccttactaggatactggaactccgtgctgttaagctggccaatacatacctcccagatcctgttngggaaacctgggaatctgtctcctncctaccccgtaggagaaaccttatatttcctactcacctgcactgctagtcagagtttccattagcatnggatngatggaactctgtgtnactttaaatattnctttaaagttttatggggatttactataaatttctngggagtttggaatgggggtttgttgatttatggcaaggg

SEQ ID NO: 302638 - DNA, 121 bp, Homo Sapiens
  misc_feature (93)..(93): n is a, c, g, or t
  misc_feature (100)..(100): n is a, c, g, or t
atagtaatatctataattgtacatcatttgaccgtgagataatatataaaatctttctggagtatccctacacacttttcaagataacaacanaactcanggaattattgaaaagaggatg

SEQ ID NO: 302639 - DNA, 434 bp, Homo Sapiens
  misc_feature (365)..(365): n is a, c, g, or t
  misc_feature (396)..(396): n is a, c, g, or t
  misc_feature (403)..(403): n is a, c, g, or t
  misc_feature (419)..(419): n is a, c, g, or t
accatttgtccttagtaaagcttgaaatatgtgaaatcatggcacttcttttttttcccctgaatattatttcttggtcagaacattatcttcctccttggcaaaaatatattgtgcctttatgttttagcaaagtatctcaaagaatcatataaccgtagcaaaatggagctgaagggcaccttagagcccacctacccctatcatgcacctggcacctgagcctcttctacagcatcaagtggccactgagacataccagggctggaggaactaagtaccttttaaggcaacacatctaattcttagtgttttaatagcctaatatttgtttagcgttttgggactaatacattccaaggttnctgctgtctactgacttttcaccatttgttnccctagntattcattggaaatcnttttaggttaacccg

SEQ ID NO: 302640 - DNA, 364 bp, Homo Sapiens
  misc_feature (298)..(298): n is a, c, g, or t
  misc_feature (329)..(329): n is a, c, g, or t
actgtgtccggccctgtctcctcaattctaagcaggtgtgttgggcttccctccagttgaatttaggatttcaggaaggtggaaaggaagacagctatgacccaacacccaccaaaagacatctgcaacctagagggtactggcattagacatggatcccactaagtgcacctagaaggtgtaaactccagcctgggtcttattggctcagtgataccctgtatcaaggtgagaggggcaaaaaattaagggccaagtctacctgccacatggggaacatttaccttatgactgactnctgctggcaacagcaatttcacacagtccantgtttttcatatggaaggacctaaaccctacaaac

SEQ ID NO: 302641 - DNA, 424 bp, Homo Sapiens
  misc_feature (397)..(397): n is a, c, g, or t
aggcccttttcaagtcagtacacacttgaacaaatagctgatctttctacaaaaggtgagctaattggaattcaatagtattttgaaatagactagtaatttgaaattcacctttaacaatactggaactgaggataccaatgactccagcattctcgagaagcgtgagatgaagaagcgtgagatgaaggactgaacgtaccactgacagagttatccctacagagttactgtctgaaagtgaacgtggcccacactgaagaacaacgaaaaggcccaggggtctctcctcagaaacacaaagattcccttaggatgagtaacattccgtatactcttaacatctcctccacagctaatacattttcttacccccatggcctacagcgacttgggnaattacctttacaatttgggtatggtt

SEQ ID NO: 302642 - DNA, 402 bp, Homo Sapiens
  misc_feature (248)..(248): n is a, c, g, or t
  misc_feature (290)..(290): n is a, c, g, or t
  misc_feature (329)..(329): n is a, c, g, or t
  misc_feature (343)..(343): n is a, c, g, or t
  misc_feature (368)..(368): n is a, c, g, or t
aggttactgaatattaatgaagtatttatttcaaactgggttctagacacctctggggtagaggaggccatccagggacatattgtctgggctaggcatgaggtgtatgcacctctagatgctgttgtccacagtgccgaatcattactacataatcgcccattaggacactgctgggttggtgggaggaagaggcacctgggctacccagagccttccattaaactcagccctagggtttctgggantgaaccagtaaatccaccctccatcagtttacattctagagntggtactaatatttctgtaggtctgaggagcagtacagntgcagggtggggtnggggatatggggtttgcattcaggncaggctgggttttgaatgtttgctcagtttcccg

SEQ ID NO: 302643 - DNA, 378 bp, Homo Sapiens
  misc_feature (351)..(351): n is a, c, g, or t
ttatttgtatcctgctgctcaaggtcatcgccaaggtccgatttttcacaaaaaaccttataacctccagcataaatgggttaatttaatcatttcttatttatttcgtctgtcctaatagttcttaatctactttgggtcttggacctctaaaaatctgatgaaaacagtgctcagaaattgtaatatctacagaaagtttatataccaatccaggttgtttacaaaccctttgaatcctatctatgacacccaggttaagaactcttgtgctttatctccatgctggtctcaagtaacatcctacagtaatttcaccaccacttataaaattttatcactaattagatnaaagggtgggaaaagatggaattgctt

SEQ ID NO: 302644 - DNA, 142 bp, Homo Sapiens
ttggtatgaattccatattagaaaagctgtgagaagcttgatattatctttaagaaaattaacacttaggactaatttatacttcttttttgacatagatcattttggttctactgtcttgtctacaggattttggtttcta

SEQ ID NO: 302645 - DNA, 394 bp, Homo Sapiens
  misc_feature (178)..(178): n is a, c, g, or t
  misc_feature (273)..(273): n is a, c, g, or t
  misc_feature (331)..(331): n is a, c, g, or t
  misc_feature (373)..(373): n is a, c, g, or t
tgaatcattaaatatatcattttaattataaaatttaattatgatgtgaactgttcatatgtagttataaagtcgtctttgtaacttatttatagttgtttagtcataaagcaaaatagtaagattttatgttggggagcagtcaaaatgaagcactttagaatgatgagtggttttntttttttaaggaattccatattctactttgagaactctacctctgattttcatttgatttattttttgaatactcgaagatcccagtgctttcanccctgagaactgaaatgtgtgatgcatgggaatatatctcgaggacaattaaaatganagagttttttacaagggggtttttgggaggaaaatatttttngatttggtaaatgctgtgggg

SEQ ID NO: 302646 - DNA, 237 bp, Homo Sapiens
  misc_feature (98)..(98): n is a, c, g, or t
  misc_feature (135)..(135): n is a, c, g, or t
  misc_feature (185)..(185): n is a, c, g, or t
  misc_feature (192)..(192): n is a, c, g, or t
  misc_feature (225)..(225): n is a, c, g, or t
tcacattgttattacaacacagatgagctgaaacgtttttgtacagatttggaggatgggaatcctaaaaagaaatcaagcatatagaggtagttgantagcaatatggggggaaaaaagcattatcttatattncccttcagttcattacagtgcaagagtaaaatggctgcttaccaaacaantggaaancacacacacatttgccactgtttacgtggcttncttgatatttta

SEQ ID NO: 302647 - DNA, 442 bp, Homo Sapiens
  misc_feature (77)..(77): n is a, c, g, or t
  misc_feature (90)..(90): n is a, c, g, or t
  misc_feature (127)..(127): n is a, c, g, or t
  misc_feature (142)..(142): n is a, c, g, or t
  misc_feature (176)..(176): n is a, c, g, or t
  misc_feature (196)..(196): n is a, c, g, or t
  misc_feature (383)..(383): n is a, c, g, or t
  misc_feature (413)..(413): n is a, c, g, or t
  misc_feature (424)..(424): n is a, c, g, or t
aacacacattttagatttgtaaaatgagccacatacacaaataattccatgagcacctactatatgctgggtatttnatatctgtattanccgcacaataaccccacagggctgagaaacagaggtncccgaagatagaganctggcccaaagtcaggctggaggatatggagganctgtgatttgaacccagganccctggagacagaagccctcacccccgctgcatgctgccctggcccttctacgacaggcagctctgcccacagaggcacacactgtttttaaaaatctggtattgcacactgccacaatacttttaatatacttgagtaaattacagagtaattgattgggggagtattaattgggtttaataccanttcccagagattgcagatttcccagttganacttttccttnatctcctggcattatttt

SEQ ID NO: 302648 - DNA, 228 bp, Homo Sapiens
  misc_feature (78)..(78): n is a, c, g, or t
  misc_feature (112)..(112): n is a, c, g, or t
  misc_feature (135)..(135): n is a, c, g, or t
taattagcttattttttgtatataatgaagtgtctgcagacagccacaccctgggctggtataatgaggggttttttntagtcattagagacccagactccttatatctttncctccaccacgctagtatgtgtncttgccctcatggtcatatctcaccttccttcctgggctagatgaggagaaagactggagagtgagaaagacattgaccattgcttcttgacc

SEQ ID NO: 302649 - DNA, 370 bp, Homo Sapiens
  misc_feature (45)..(45): n is a, c, g, or t
  misc_feature (85)..(85): n is a, c, g, or t
  misc_feature (116)..(116): n is a, c, g, or t
  misc_feature (125)..(125): n is a, c, g, or t
  misc_feature (202)..(202): n is a, c, g, or t
  misc_feature (232)..(232): n is a, c, g, or t
  misc_feature (239)..(239): n is a, c, g, or t
  misc_feature (241)..(241): n is a, c, g, or t
  misc_feature (270)..(323): n is a, c, g, or t
  misc_feature (342)..(342): n is a, c, g, or t
  misc_feature (352)..(352): n is a, c, g, or t
acagggtctctctctgttgcccagactgaagtacaccggcatgancatagctcactgcagcctcaaattcccggcttcaagtgancctctcaactcggcatcccaaagtgctgganttacaggtntgagtcattgtacctggccagtcaaccattgcttaaagcgaaatatttctctacattgctcatatatagttcacaantttaaagcaatactttcaaatgtaaactantgcaaantntgaaaaaaatgttttcattagtgagatgnnnnnnnnnnnnnnnnnnnnnnnnnnnnnnnnnnnnnnnnnnnnnnnnnnnnnnttttgggcaaggacatgangaaaatggancccttacacattgatggt

SEQ ID NO: 302650 - DNA, 449 bp, Homo Sapiens
  misc_feature (247)..(247): n is a, c, g, or t
  misc_feature (430)..(430): n is a, c, g, or t
ctaggctttgtttgaagctctttccagcaaagtagatgatacaaaaatgtatgtaactaaaataagctaaatgatgggagttatttgattattccttttgttaggtgtatgtaggaactacactctaaattaaaggcactgtgttttaagtcgatctgtgaactcctttgctgaaatgctttttaaagtgaatttttgtgtctcttcatgcttgatgtttcatagtaccccctcgagggtacccgtnctgcttccaagcacttgtctgggtagcggaaagaatatctttatttcacacctacacgccatgggatcttttaaagggatgttgttggttacttttacttccatctggccatggacttccatagttctgttctttggataaaggatgtggttccttaggggtggctcaataggattttctttncaaaaggccactgttttaa

SEQ ID NO: 302651 - DNA, 410 bp, Homo Sapiens
  misc_feature (23)..(23): n is a, c, g, or t
  misc_feature (52)..(52): n is a, c, g, or t
  misc_feature (88)..(88): n is a, c, g, or t
  misc_feature (148)..(148): n is a, c, g, or t
  misc_feature (327)..(327): n is a, c, g, or t
  misc_feature (338)..(338): n is a, c, g, or t
  misc_feature (353)..(353): n is a, c, g, or t
  misc_feature (366)..(366): n is a, c, g, or t
  misc_feature (390)..(390): n is a, c, g, or t
aaaaaagtccaaatttgtacaanttcaactttatacaagtgaagtaagagantctagaaacacagaaatattaactaaaacttcaggngccttgaaaaacaattttattgaaatacaggactcaaactaaacggaaatagattttctnttaatattagcaactcagtagacagttatcaagccataagctaaactctccattttacttccctcttacccttccttttacataatgaggaagtgatatcaatgaacagattacttattacctaccgtttctgcgggaaataaagggagttaggaatctaggattcaggtattaatggnacttgcacagnactttggttaaagtntctgtagggcaantgggggaattttcgggttgggganttttgaggtatggggcaggt

SEQ ID NO: 302652 - DNA, 283 bp, Homo Sapiens
  misc_feature (218)..(218): n is a, c, g, or t
accacgcttggcccaaaaacaatctttttgaaaaaactggggtaaaattcacatgacaaaatttgccatcttaatcatttttaagtgtatagtttagtagcactaagtatattcacattgttgtgtaacagagatccaaaacttcctcattttgcaaatctgaaactctgtacttattaaacagcttccacagtcccgggtaatcaatcaccattctnaactttgtttctgttcaatttgtctatttttggattacctcatattaggttggggggtccaaata

SEQ ID NO: 302653 - DNA, 347 bp, Homo Sapiens
  misc_feature (106)..(106): n is a, c, g, or t
  misc_feature (224)..(224): n is a, c, g, or t
  misc_feature (282)..(282): n is a, c, g, or t
tatatacatataaaaaatggggacagacccgggctccagctggtggacaggctttgaattctgcaggttgtcgcccattctggtcatgtcaggaaaatcacctgtngctctcctgagcacttccggacctcagtgtctaacagatgaacaaaatgatctttgtctttctcaagggtgtcggcctcctcttagatcactgagcatttggagaggagggttattanattaatgcatgagataaggaaaatgttttcaactagggaattctggcatctctggganttgtattaaaaccaatttaattactccccaatcatttactctgtaattttacttcaagtattatt

SEQ ID NO: 302654 - DNA, 139 bp, Homo Sapiens
  misc_feature (73)..(73): n is a, c, g, or t
  misc_feature (86)..(86): n is a, c, g, or t
  misc_feature (114)..(114): n is a, c, g, or t
acccagcctggaatttttatttattaggccactctttttttagtggacataagggaactggaatgtaggcttnttcacctcgtttncagtaaatggggctcaaatgtttaactnaggaagattcctcccacaatattat

SEQ ID NO: 302655 - DNA, 432 bp, Homo Sapiens
  misc_feature (42)..(42): n is a, c, g, or t
  misc_feature (173)..(173): n is a, c, g, or t
  misc_feature (238)..(238): n is a, c, g, or t
  misc_feature (292)..(292): n is a, c, g, or t
  misc_feature (301)..(301): n is a, c, g, or t
  misc_feature (363)..(363): n is a, c, g, or t
  misc_feature (369)..(369): n is a, c, g, or t
  misc_feature (381)..(381): n is a, c, g, or t
  misc_feature (386)..(386): n is a, c, g, or t
  misc_feature (419)..(419): n is a, c, g, or t
acagttctacccatcctttccagggccaccaccccgcaaagntcctccttcctccacacagatgtcccacatctcgcgctccacactgtgcacggcagcctgaccccctcccggtcatccctcctggccaccctattgaactcttttcagatgtccccgctcttttcctagancccctggcatgccttctttggctcctcctggttgtctgcctccactctgtgctctgattgccttntgaccattcttttgggtaggactagggtctgccccatgtgtctatgcttgtcgnacctgactncttgaacagagggggctgtcagcgtcaactacaggtgctttcacaagaagttggctaaaacngtgganggaggcgtccgngtctnccatattcttgggttgtcttggcattaaaagtntttttaggcaaat

SEQ ID NO: 302656 - DNA, 334 bp, Homo Sapiens
gcttcggggagaaagtggatggaagaggctccacgctggcttagtcacactgatgtatgaataaacgggcaagtaatggatgacctggggttcatgccagccaactcacctgcacacctgctttcacaagcacttgacaaggcacctacctttcttaatgtgccaagtacataatctctctgattctgtaaaaagattagctgttaggaagattacaaaactttgggtacaaaaataagagtatttttagaattttgttctccatgtgttaattttatcttcagtggggttttgtttgttttggctacctctggccccacatcattaatttatg

SEQ ID NO: 302657 - DNA, 145 bp, Homo Sapiens
  misc_feature (60)..(60): n is a, c, g, or t
  misc_feature (98)..(98): n is a, c, g, or t
  misc_feature (106)..(106): n is a, c, g, or t
gagtacttaaggacatggatattaacctataactcattttctggctgttatttgaacatnctttacatttaggtatgggtgttatttgtttattattntttgaacntaattactggatacacattcatttaacttaaagtctgtt

SEQ ID NO: 302658 - DNA, 278 bp, Homo Sapiens
aaaaaagaaattgttgctgaaaattcacaggataatgggttagtttacactgatgatgaggctatcttgcctcattttaatcaactgtatattagtgacactaacagttaaaaggttaaggctataatctatggtgaaaaacacaatagagctacattctctgacaacagtataagacttctacacatggacctgacaagagtattaccctgtaacaacaggacaagactcatacttcagattcacggttgtcaacggaaagaaatcctaggagcggc

SEQ ID NO: 302659 - DNA, 445 bp, Homo Sapiens
  misc_feature (222)..(222): n is a, c, g, or t
  misc_feature (299)..(299): n is a, c, g, or t
  misc_feature (333)..(333): n is a, c, g, or t
  misc_feature (405)..(405): n is a, c, g, or t
  misc_feature (429)..(429): n is a, c, g, or t
ttgcatctaaaagggaagggaggcaaaacagactctatgatgtgaccatgctaagtccctgacaaatggaaattcctttggcagggagttagagataagtcttaaaatgaggatgttttgtatattcatatgaatgcattttaattagtatgtagattgtcagttaatagttatcaataattgatatcggactgagaagcaattatttgcaaagactagganggtgtctagggcatgcattagcagccctcagatgcttgcgcattatgggatgtttcttgctttcacttttatctggnaatgccgttttcttctgtgctcctttggaacttnggatacctctcaatcttttgagactcaaaatttcagggagatgcttcccaagtcttttcccggaccatgccnattaggaattgactttgtatggcntttacttctgttttcc

SEQ ID NO: 302660 - DNA, 442 bp, Homo Sapiens
  misc_feature (21)..(21): n is a, c, g, or t
  misc_feature (308)..(308): n is a, c, g, or t
  misc_feature (341)..(341): n is a, c, g, or t
  misc_feature (375)..(375): n is a, c, g, or t
  misc_feature (388)..(388): n is a, c, g, or t
  misc_feature (400)..(400): n is a, c, g, or t
  misc_feature (416)..(416): n is a, c, g, or t
gagcagcatcttacacatcancttatatgcggaatattttaactattcaattcccatccctaccgtcatttccttccattttctaccgatatgagacttatccttcaggatatatagctcattgtcactattttaaagcctttcaacatttctttgaagaaaatcagcatggagcacagacttttatatgactggacccctttcctacatcagtatcatctctaaacctcatactctacacaccaagcatacttaactctctctggcgcacgtattttcataccagttcctgtgcttgcaactaccangtctccctacatctcacacttcttccttgcctnctgtccaggaaaggagttccgtttccctaattgnttggtcccttttntcattttcactnaattttttttatcaangttgatctttcacacctggtggtctt

SEQ ID NO: 302661 - DNA, 359 bp, Homo Sapiens
  misc_feature (171)..(171): n is a, c, g, or t
  misc_feature (175)..(208): n is a, c, g, or t
  misc_feature (214)..(214): n is a, c, g, or t
  misc_feature (332)..(332): n is a, c, g, or t
taaaatagcatagtatttgcatataacctacgcacttcctccctatagactttaaaccatctctaggttacttatagtattgaatacaatgtaaatggtatgtaataatttttatactgtgtttttttatttgtattctttttaaccattatattgttagtgttgtttctnttcnnnnnnnnnnnnnnnnnnnnnnnnnnnnnnnnnngaggancttcacttggaggtattaaacagattccagttcttcgactgcatctgtgcgtgggtccctaacccagtgggcaccactgaggcctcatctcggtcctgaatcacaactttctggggtnaggtccagggccacctcgggctagaga

SEQ ID NO: 302662 - DNA, 355 bp, Homo Sapiens
  misc_feature (36)..(36): n is a, c, g, or t
  misc_feature (263)..(263): n is a, c, g, or t
  misc_feature (342)..(342): n is a, c, g, or t
actggttgatgggacttatggataggttccagtttngggctgctagaaataaagcttctaggtacattcatttcaagtctttgtgtgaacaggtactttaacttctctcgggtaaagagaaccgttctaatctctgagaacttagggctcagcagagagtccagtgctccctgagtggatgaacttgtgcagaactaaagcagaaagaaggcaggaggcagaaaaaggcttaggtttgaaaatctgtgagctgccaggccctnggacaccctccgacccatttcagccttctcctttcccccagccccttcctaggaagccatacctgcctgcttgtccttnagattcagttccc

SEQ ID NO: 302663 - DNA, 361 bp, Homo Sapiens
  misc_feature (252)..(252): n is a, c, g, or t
gttcacatacacacacatctgcaggtcacgcttctgaaaacctactgtgaacccaagttctcagggaggctaaggactgacagagggcagctcttaggacatggtccaggtcctgccagggtggggattggcagctggaaccatgaactgtgggccaaggataggaacatacaggacaccgtcccctgggtgctccccaggggaactgatctcaggacagcaggcaggtatgggcttctagggaaggggctngggggaaaggagaaggctgaaatggggtcggagggtgtccaggggccttgggcagcttcacagatttttcaaacctaaggccttttttttgccttcctgcctttctttt

SEQ ID NO: 302664 - DNA, 302 bp, Homo Sapiens
  misc_feature (270)..(270): n is a, c, g, or t
tttagaagacctattggtaaatcatttggatggtgtattatcattttttaaagactgtcccaaagcttgcactgatgctgtttcaattccatccctttccccactgtcacacagttcacctcatccccaacaaaaactgtatcagggatgggctttgaataataggacagagtaaggaaaaaaatatatagggacagttatgggtccttggaaattggaaatttgtgtgttgacttgaggggaaccccttaggcaccaggctcaggaggnggccttgtggaccatcttgcccgtttccgggg

SEQ ID NO: 302665 - DNA, 442 bp, Homo Sapiens
  misc_feature (129)..(178): n is a, c, g, or t
  misc_feature (194)..(194): n is a, c, g, or t
  misc_feature (202)..(202): n is a, c, g, or t
  misc_feature (205)..(205): n is a, c, g, or t
  misc_feature (276)..(284): n is a, c, g, or t
  misc_feature (386)..(386): n is a, c, g, or t
  misc_feature (418)..(418): n is a, c, g, or t
  misc_feature (429)..(429): n is a, c, g, or t
acagtttactatatttctacataatattgtgctttaatgaatcttcataatgatgagtttagtcatcaagcaaagtttaagtcataatctcccctctaggaaaaatttctaagttcatagcctacgtgnnnnnnnnnnnnnnnnnnnnnnnnnnnnnnnnnnnnnnnnnnnnnnnnnngcgcgtgctcctgcangcgtgcanttnttctgtgtttgtgtgtttgaaagcgtgtgaggatttaactgtggggttttcccttgtattcagtatacgcnnnnnnnnngggcgcattgggtcaaacggttgttattattagcttctaactttgcactgagtgtcctcgcccttcctttagcttaatcctatacattacaggaggattccnagggacaggggtgggcgacaattcatggtgtnaaatgtttacncaagggactccgt

SEQ ID NO: 302666 - DNA, 335 bp, Homo Sapiens
  misc_feature (41)..(41): n is a, c, g, or t
  misc_feature (55)..(66): n is a, c, g, or t
  misc_feature (242)..(242): n is a, c, g, or t
aaaagcaggatctatttgttacttaatttgcaatatttttntttcaaagatggannnnnnnnnnnnctggagtacacattgatggaagttggttttaagaaagcattgtaatgggaatttacctaccttactactgttgaagtttagaaggtaaatgctgaactgtgtttgtcacatccctaatcttatttctctgtagtgggtcactgactattatttgttatgagtccatcttgattatnctgtacatcttgtttaaattattttcactaaccatcaccagaacacagaggaaaattttgtttccttaggaatcaatgagtatttccaccacc

SEQ ID NO: 302667 - DNA, 308 bp, Homo Sapiens
  misc_feature (162)..(162): n is a, c, g, or t
aagaaaattagtttacaaaagcccagcaggtttgctttctcatccattgctggttcctggacaaatgcaagaccaccttctctccaaggatttagtatagtctcattaaattagttaaaccaaactttaaacacgagggaagtcaactcgtattacatgggntccagagttgaaatgaggaggtattcactctctgcctccttccaccaccttccttctttctgttccaacaggtatggttgcccagggcaggcaacaactttttcaggggaatggtcccctctttacattgagggtttcattttttt

SEQ ID NO: 302668 - DNA, 321 bp, Homo Sapiens
  misc_feature (180)..(180): n is a, c, g, or t
  misc_feature (271)..(271): n is a, c, g, or t
ttttatgaactttaatcatagcaaatgtgtttttacggtagtcataaaatcaacattaccacatatacaaaggacaagacaccagtttggcatacaaaaataccatatattaaaattgggttcattggaaaactcaggactggctaagacaccatctataacagagagagcaagcaagantgcttttaaggacattcagatttataaacaggcagcttgatatcccctttacggaagtcaatatttgggcaacatttgggacaatattttnctacacagcccggcagctcatttatctgtaggggctatttggggcccttt

SEQ ID NO: 302669 - DNA, 160 bp, Homo Sapiens
tgttctaagcttcatcttttattatgaagacaatacacccttgaggttatgttcacttcatttggttgtagctggtcttttaggagggaatagactaaagccatcaacaaaattccccttttgggaaattaattctttgtggttcttctgggaactaagg

SEQ ID NO: 302670 - DNA, 428 bp, Homo Sapiens
  misc_feature (303)..(303): n is a, c, g, or t
  misc_feature (322)..(322): n is a, c, g, or t
  misc_feature (351)..(351): n is a, c, g, or t
  misc_feature (361)..(361): n is a, c, g, or t
  misc_feature (370)..(370): n is a, c, g, or t
  misc_feature (392)..(392): n is a, c, g, or t
aacaggttgatacattagcagctaaatattaggcaaggaaggagttatgtaaaatagtaatgtcatcttatacttgtgggaggggttttgtatttctgcaaagcattttcacagctcttatctactctgctcaacaaatataaagagtaaatttcctttattctcattttttcagtgagaaaactgagatccagtggagttaatcaacttgtctatgatcacatacctagtttatggtggagaaaagactgaggtttagagactgattcataaaaccgagctcttttctatggatattgggantatcagataaaatgcaatnaaactcccaacttagatggaaatcttatnagtcttgggnaaaaagtgncatctggcttggctggactctnctgttaggacactggaccacttaacattttttagga

SEQ ID NO: 302671 - DNA, 427 bp, Homo Sapiens
tttctcacctcttattcactggtagacaatacagtgaatacaggatggataccatcccagtcaccattacaactgacctggccacagtcacccttgtcctactgattgccaaatacaaaggcctatgctcagacttcctcctacttgccttttctgcaggattgcctccctcctttgtgaagccttcttttgccatgactgacttatctcttccttttggctctttgacttctgctggccccttaaatgctgttgtgctcaaggctttatccttgggtatcttggggtccatttggggtcctatccactttcaagtattgcactgactaggccacattttggatggccctctcaaacctccattatttaggccatggacaccctgtgtcagttcagggggtttttccaggagttaacaacagggaca

SEQ ID NO: 302672 - DNA, 368 bp, Homo Sapiens
  misc_feature (87)..(87): n is a, c, g, or t
  misc_feature (99)..(99): n is a, c, g, or t
  misc_feature (111)..(111): n is a, c, g, or t
  misc_feature (179)..(179): n is a, c, g, or t
  misc_feature (237)..(237): n is a, c, g, or t
  misc_feature (309)..(309): n is a, c, g, or t
caaccacagtttctagtgtgtttaggtacagggacatggacaaaagtctggagtgggcaaggcttacctaaagcttgcctagttctntagcttccgttngaccctctaggngctagcatggaataggaaagaggcagaggacaaacccagggatcagggctcagatgtcttctgcagtnctgtgatcctgtagtcacgaagacccttgccactgtggtctccacccagcattccagntatctgccgtcaattgtattgatgcccatttaccatcttggctagtccagtagcacttacatcctaccaatntcctaatagtaaagatactgtatttgctacctgatcagagttagatgttgatgttttta

SEQ ID NO: 302673 - DNA, 451 bp, Homo Sapiens
  misc_feature (152)..(152): n is a, c, g, or t
  misc_feature (224)..(224): n is a, c, g, or t
  misc_feature (350)..(350): n is a, c, g, or t
  misc_feature (372)..(372): n is a, c, g, or t
  misc_feature (420)..(420): n is a, c, g, or t
  misc_feature (438)..(438): n is a, c, g, or t
gtaagcagccaggtagtggatttctggggtcagatcctggacctcaagtatccacacaattacaaaagcaaattactatatatttattgcatagctgcatttattgtcaaggttgttatacataaatagatttcaatacttattttttcccncttaaattgccatcacattgctaaatagcaagaacattcagaccagaaaattgagttattttttaaaagganagttaagtggacagcagctgcaggattattacattcccttgatttattttttatttacagatgcacattttcattagctggggatttgaacaggaatgggatttttacaacattagaagaaaaagncagcccaatttggggcttttantacacagatggggcttctgtctccttaggacagttttggagtgtatcntcttgcccacacagcccnggtggcttctttt

SEQ ID NO: 302674 - DNA, 440 bp, Homo Sapiens
tctcactgtggtcttaggggatgttatttcaatagtgaactatgttccctctggatcagagcaggtgagcccatatccagagctccaagactcagtttaggggaatagatggcaaagcagagaatctagagaagcagcccagggtaggatctggatggtcacctggagaggagacctgcagggaatggatggctgtcttcatccagaaagacagagaatatattccacttacaccagagggcagacaaagctgcctaaccctgatggaggtccagtgagtgcccattgcaggaagcatttcaagctgaggctgggatgaacatcgacaggggctgtttgagaggggagatttagatggcattttcagggtcttttccctttttaagatttctggcctgggagagctctagttttccaaccaggtttctttattcaattct

SEQ ID NO: 302675 - DNA, 443 bp, Homo Sapiens
  misc_feature (407)..(407): n is a, c, g, or t
  misc_feature (412)..(412): n is a, c, g, or t
  misc_feature (417)..(417): n is a, c, g, or t
ttttgctagcctcttcccaggatttagaatgagattgtcctaattcttaagtggttcactatctcataagggagacagacaaatcttggtaccgtaagcagcgttgaagtgctggaatagggcatgggcagagtccttcatgtttacggatgatagaaccactgatcctctctgagatagtgggaaggcgtcacagcatagatggcattaaagtgatccttagagaatatggggcaagtgtagtgggagttaagttgaaaagggtccagaacgttgttgtgaaacttgtacgctaagtgtttgattggagctgtgctttgggaactgcgtgtgcctcaaatagtaacttttcatagcctttcttgccgatacttggagcttcttttcagcccattctctgccctgtngcgcncaaantaatggctccccagagattttcccca

SEQ ID NO: 302676 - DNA, 442 bp, Homo Sapiens
gtggcttctgtgtccatgaaattaaagccctaggaagcctgagaatgaattccacatgaaattaaagttacagatatctggctttgactggcctggacatatagacagagttcctaaatgagcctctacaaactgtaaacaacagagaacacctcataaagcaataatggacgtgaacagccctacagcctgcaaactccagctgaacagtacctggaggcttacatttgacagcagagaactaaaatatgtctcaatctcaattgctcctagagtaatggcatacccagagatattaggcaaaatggggtctttagtaacagacttcagagatctaaatttagtgaatgggctttaggcatcatcgctgaaagacacatggcttaaacaggattgggtttcactggggaaagtagatgaatgggatggacagttctgtacc

SEQ ID NO: 302677 - DNA, 459 bp, Homo Sapiens
  misc_feature (20)..(20): n is a, c, g, or t
  misc_feature (233)..(370): n is a, c, g, or t
  misc_feature (388)..(388): n is a, c, g, or t
  misc_feature (408)..(408): n is a, c, g, or t
  misc_feature (420)..(420): n is a, c, g, or t
gaagaactcatatataaatnaatataaagtttcagttgattagtctttgatgtaaataaatatttataatttgacaaacttaataaatggtttgttttcccagaaataattggacaattggtgtaaaaattatatataaatagtttgggcttccagatatattaataaacattgatcactcaccagcttggtggagctaaagtggtttcatgactcagctctgaaattggtannnnnnnnnnnnnnnnnnnnnnnnnnnnnnnnnnnnnnnnnnnnnnnnnnnnnnnnnnnnnnnnnnnnnnnnnnnnnnnnnnnnnnnnnnnnnnnnnnnnnnnnnnnnnnnnnnnnnnnnnnnnnnnnnnnnnnnnnnggaaatgggtaaggtgcntcaataatgtccagttattnattattttttcntttatggggttaaaaatttaaaaggtggaatggggatcc

SEQ ID NO: 302678 - DNA, 118 bp, Homo Sapiens
  misc_feature (66)..(66): n is a, c, g, or t
ctttgactaagaaaacccaaagacagtctaggacagccagatgctagaaaagtttatttgtattgngaattttaaaaaattcatccacagcaaagtaagggagtacataatgggaaaa

SEQ ID NO: 302679 - DNA, 357 bp, Homo Sapiens
  misc_feature (68)..(197): n is a, c, g, or t
  misc_feature (268)..(268): n is a, c, g, or t
  misc_feature (276)..(276): n is a, c, g, or t
  misc_feature (283)..(283): n is a, c, g, or t
  misc_feature (290)..(290): n is a, c, g, or t
  misc_feature (321)..(321): n is a, c, g, or t
  misc_feature (332)..(332): n is a, c, g, or t
caaatagatggaacaaaactaaaattttagaaacttatgtacccatatataaacactggatgatagannnnnnnnnnnnnnnnnnnnnnnnnnnnnnnnnnnnnnnnnnnnnnnnnnnnnnnnnnnnnnnnnnnnnnnnnnnnnnnnnnnnnnnnnnnnnnnnnnnnnnnnnnnnnnnnnnnnnnnnnnnnnnnnnngtgcccatcctgacgacaatgagttcttacaaggatctgggttgttttaagtgcaccggcacctccccttngctctctncttgctncctgctnttcacccacatggtgaccatgcagggctccngtttcaacctncctgcccatggggcaaaggttctct

SEQ ID NO: 302680 - DNA, 327 bp, Homo Sapiens
  misc_feature (307)..(307): n is a, c, g, or t
taaggcatattatttctaaggcaactagattcaatgattagttaggaaaaggggattaaacttccttgccttaaaataaggctctgagctttttgctgtatagtatctcctttgtttaaaaccaaactgatgctttttccagagtgtaaaccacttggtgaacagcccaaggatgggcttacattactcacagagtgactgaacttctaaaatgaattatcatatgatatgtcatccatattcatttacaataaatgaaagctaattacaacaaattctaaaggattatccactttcattataaaantgaaggcatatttcttaaaa

SEQ ID NO: 302681 - DNA, 396 bp, Homo Sapiens
  misc_feature (272)..(298): n is a, c, g, or t
gtcaggatttacattggaaaagtatttggcaagagaagggaggcttgaagaagatatcatccatttgacagtgtgttccataatttaaatctttgtggatcagacttcctaaaaacactttgcttccagaatgtaagaaagtgttcattaggcagctctgaatattttgggctatgtgtaccatctttccccaccccccaattaaacatagattccagtgctacagtaatatcaattctgttccagcctttctcaatttaccaaatcttgcnnnnnnnnnnnnnnnnnnnnnnnnnnngagacagggatctgggcctcctgttgactagggctgggatgggagtgcagtggggtccaggttcactggtaggccttgaaccttctggggctccaagg

SEQ ID NO: 302682 - DNA, 269 bp, Homo Sapiens
tccttagagtatgcaagcacgctctggtgacttgtcaagacagaaagctaaacctcttggtggtttaaatggggatttgtttaagcaggtaataagattaccatcttgagccttagtgccgggcattagaaggttgaaggagccattcctgggtggatgctgtgctcagctctggttgctgaaatgatcacattgggagacagccacacagatgcgtgggtgggtcatgtcccttgggcacacctgcatgggtcaaaactgtgggactc

SEQ ID NO: 302683 - DNA, 137 bp, Homo Sapiens
  misc_feature (40)..(40): n is a, c, g, or t
  misc_feature (51)..(51): n is a, c, g, or t
atgtgaaaagtgaaccattaacatttttaaaaactctttntggcacttaancagactttgtaatctttaaacatagagtatggcaaatccaagtttcctacccagctgtgacaagtgcccagattcagtgttctggg

SEQ ID NO: 302684 - DNA, 215 bp, Homo Sapiens
  misc_feature (39)..(39): n is a, c, g, or t
  misc_feature (43)..(43): n is a, c, g, or t
  misc_feature (54)..(54): n is a, c, g, or t
  misc_feature (108)..(108): n is a, c, g, or t
  misc_feature (161)..(161): n is a, c, g, or t
  misc_feature (173)..(173): n is a, c, g, or t
  misc_feature (195)..(195): n is a, c, g, or t
  misc_feature (201)..(201): n is a, c, g, or t
aactggaagaggggagagactacattacctgggaggaantttntggttctcaantgctgagctctaaatgtgtcatctaatctaaggggtatcatgtctgcccttgantgctaggaaaacactagagttctagggtaagacattgggtgaagcgaggtagngatacctttttntttttccatccatatgcgactncaggangtacagcacactgt

SEQ ID NO: 302685 - DNA, 352 bp, Homo Sapiens
  misc_feature (178)..(178): n is a, c, g, or t
gagactgctcggcgtggggatgttccaggaaagccttgccagagtgtagaggaggagtgggaatactgcttggtcatggcagctggcatctcacaggactatgttaaagagcaagtcaagtggttgtactgcagtgcactcaagaggagcttcgggccacttggctggcaagcagcancacatatcatgctgggccagtgtgttttaggggtgtaaccatgggtggggcacagaaatagaaggccatgcaaagaactgagcaaaataggacaaaacagagttggcgactcttagccaagtcttgctgtctaagttaaaataggattcgatgtatcctcattcacactttcgc

SEQ ID NO: 302686 - DNA, 274 bp, Homo Sapiens
  misc_feature (164)..(164): n is a, c, g, or t
  misc_feature (228)..(228): n is a, c, g, or t
  misc_feature (235)..(235): n is a, c, g, or t
aaagctgcgagatagtggagaagatgcattccatggtgtttgctgaaaaccaaaattctgttttacagcatgaggttcctgtggcttcttacctactcagagtcatacaacagtttaggcagagaggtagagtctggtctcagatccggcacctatggataatnctgagctagctccctgcttccttgtgtacatagctgttgacctggtgcagtgaagaaggccttnggcagtncaggcttttgcaaattctgatttctatgtcataccattt

SEQ ID NO: 302687 - DNA, 474 bp, Homo Sapiens
  misc_feature (407)..(407): n is a, c, g, or t
  misc_feature (443)..(443): n is a, c, g, or t
  misc_feature (458)..(458): n is a, c, g, or t
gaaaaatccatgattaattagcttaaaaaagttttaaattatagggatgttaaagattcttatttttaacttttaagctagagcaaaatatatttatttctaggatataatgatttagtgactagctaaaagtggttttaaatgaacgttttgcagtatgaatggaacttaggtattttttaaagcttcttggtaaatgaaacctttatttgaataactgcaaatttctccctcctataaggacagtggcagagggtggacatgatatatctggattctggtctttacctacaattttcatgcagagtttgtcatgaacagctgctgcattttttgtaatctaattttctttactgctttaagtgatccaagtgttactcccaaccactgaatgattggcaactaanattaaaatggatgggttaatattggaaaaggggatntttaaattttggtcntaagcacacccgggta

SEQ ID NO: 302688 - DNA, 480 bp, Homo Sapiens
  misc_feature (304)..(304): n is a, c, g, or t
  misc_feature (359)..(359): n is a, c, g, or t
  misc_feature (391)..(391): n is a, c, g, or t
  misc_feature (405)..(405): n is a, c, g, or t
  misc_feature (414)..(414): n is a, c, g, or t
  misc_feature (424)..(424): n is a, c, g, or t
  misc_feature (432)..(432): n is a, c, g, or t
  misc_feature (463)..(463): n is a, c, g, or t
ttttaaagaaagataacttaaataaaatttgaaaaaaattgcatttacagtaagcaactaaacaagtggtcttaatcagttcttgtttaaaatgaactgatgtagtctgcttcttcgataaataatttttgccataaatatgttggtttcaaaacaaagcaaaagtcaggagttaccaggtctcaagcactgataagtatagcagcagctatggttctagtgttattatccagaagattggagctcaataaatgtaagcctctgattgtgtttctactctgctgtatttatattcatcaaaganaataaatacagtgaagtcataggatgaaaaaatgctaagcaaatacattattccngttttctaccctttattttgcagaatgtggcnctcttttacattantgttttttncttcttgggnaaaagtcngaggttttccccttttgttttcccctttacngttcttcccctaccacc

SEQ ID NO: 302689 - DNA, 453 bp, Homo Sapiens
  misc_feature (11)..(11): n is a, c, g, or t
  misc_feature (67)..(67): n is a, c, g, or t
  misc_feature (416)..(416): n is a, c, g, or t
agagagctagnaccatgcttcaataccctgttaaaatatttaatagaaaaggttatgtattcccaangaggcaaggtaatctcagaaattaccttaaaattttggcacagtagaaatgtgaacacactttcagagttttcctaatgaaaggtaaacctgcttttgtattagaaatgtctataacacttcagaaatgaacaggtaagatgtgttggagccacttaaaggcagttcagctctatggttctcatgacagcttaaagagatctcagccctaacacaatccccttttccttccagagcttaactacagcagtgttccttgctcactccccatgccttctttccactgggcagaagatagcaagtgtgggagaaaggcgctccgcagtgcaccctagcatgatggggcgggnagagaggatgcttccggggaccattggtctgagcacc

SEQ ID NO: 302690 - DNA, 496 bp, Homo Sapiens
  misc_feature (109)..(154): n is a, c, g, or t
  misc_feature (249)..(249): n is a, c, g, or t
  misc_feature (282)..(368): n is a, c, g, or t
  misc_feature (388)..(388): n is a, c, g, or t
  misc_feature (401)..(401): n is a, c, g, or t
  misc_feature (414)..(414): n is a, c, g, or t
  misc_feature (424)..(424): n is a, c, g, or t
  misc_feature (433)..(433): n is a, c, g, or t
  misc_feature (459)..(459): n is a, c, g, or t
  misc_feature (472)..(472): n is a, c, g, or t
  misc_feature (484)..(484): n is a, c, g, or t
aaattattaattatatgaaaatgctcataatattacaagtaaagaaaaaagtagaattgctagaatgattctggaagaatgaacatgcaggtacaaccaaactaatgtnnnnnnnnnnnnnnnnnnnnnnnnnnnnnnnnnnnnnnnnnnnnnntatgaggactttccataataccagaaacgatatatatcataattccaataattaacataatgctggcaaaagaatatacatcaattaaaacagangaggaaagcccacaaacagactcagtgcagtannnnnnnnnnnnnnnnnnnnnnnnnnnnnnnnnnnnnnnnnnnnnnnnnnnnnnnnnnnnnnnnnnnnnnnnnnnnnnnnnnnnnnngctcttgagtttggagaccngcttggggtaacntagccaaattgtnttctctacanaattacagntttaggccgggtgtgttgggctgcgnctgttaatttccngctacttggggnggcttagggttg

SEQ ID NO: 302691 - DNA, 225 bp, Homo Sapiens
  misc_feature (165)..(165): n is a, c, g, or t
tgagcactgcacctgggtctaaagttcttaatagcccataaatattgccctaattctgcctttcatcataacccttacatcctatagtccttagcctgttgtgagaccacaattacctgtaggatattttcaaaagttcacaggtgtcattttacagatcaactntttcatcggaccccagaactttttggcacataaatcaactgactttaattacaacaggcc

SEQ ID NO: 302692 - DNA, 162 bp, Homo Sapiens
ttccacaaaagttatccaagaggagatataacccagttttccactgtcttagaattaaatgaggttctagaactggcaaaaagtcaagtcaatcaactgggctgttaataaatgtaacttagccctaagcttgctcttagaagatgtaagactttttaagtt

SEQ ID NO: 302693 - DNA, 286 bp, Homo Sapiens
  misc_feature (82)..(82): n is a, c, g, or t
  misc_feature (126)..(126): n is a, c, g, or t
  misc_feature (267)..(267): n is a, c, g, or t
aaaaaaccagctactggatttactgatcttttgaatattttgggggtgtctcaatctccttcagttcagctctgtttttggntattccttgtcttctgctaactttcaggttggttttctcttggntctctagttcttttagttgtgatgttaagttgttaagttgagatatatctaactttttgatgtgggacatttagtgctataaactttcctcgtaacactgtctgaggctgtgtcccagaggattcggggatggttgtatcnttgttctcattagggttca

SEQ ID NO: 302694 - DNA, 377 bp, Homo Sapiens
  misc_feature (221)..(221): n is a, c, g, or t
  misc_feature (358)..(358): n is a, c, g, or t
aatttaggtacatcatgactttgttgcttacaattcaaattcatatataatctagaaaaataatttgaatcctgagtttaacccacctgctttaaagagactgttgttcaaaaattgcttcttagttattgatactagatgtcttaggggctttgggccttagagggtctgcaaagctctgacactaggttctagattttatagataacttcatatatttnctggggaaagaagggctgtgaccactaaagtagtttaccactgttttctagaaagacttaaggcaactgacctgttcatatgtcactcttctggctgccgctgctcccgggcactcccacagtattaggtcccaagngactatcactgtgggaggt

SEQ ID NO: 302695 - DNA, 140 bp, Homo Sapiens
ggcccagagcatccttaatgtggcaagcacttctagggtaagtgttaagtatacaaacataaagaagaccaaaccctaccatcagtgatcttccagttcaggagaaagcagtaattaaacatacccgtggccagacaagt

SEQ ID NO: 302696 - DNA, 379 bp, Homo Sapiens
  misc_feature (27)..(27): n is a, c, g, or t
  misc_feature (150)..(150): n is a, c, g, or t
  misc_feature (193)..(193): n is a, c, g, or t
  misc_feature (305)..(318): n is a, c, g, or t
ttggaggtttaagtttttaaaattttncctagcaaaccaagtacacactttaatagctatatggccatttgaacttcaaggagaaattaataaaaccagttattcagtcagtcagtatatatgcaaatggcaatattctaaagcagaganccattgtcaaaggtgtcattttgtcatccttatcacttcattnccttttaggactcattctgttccacactttcaatatctgaagttccttattaaggtgagtatcaccaccactatctccgacccccatcctccatcacccccatccccacagnnnnnnnnnnnnnnattcattcagaacatatttgggtcaggcacctacaccgcaggcattgtgcttgggtagggt

SEQ ID NO: 302697 - DNA, 162 bp, Homo Sapiens
cgcactgggccagagagaacttttttagtaaacatctattggggcactgagttagtcataaatgtgggagacacaggtgtgaagtcacattgataaaatattagtgatatgataaagggacaacattaggggaacggactctttctgggacaggaggcaagg

SEQ ID NO: 302698 - DNA, 409 bp, Homo Sapiens
  misc_feature (383)..(383): n is a, c, g, or t
aaacagataacaaaaatgcccaaagaccacagtcctttcatatatactgctgctgagctatatctttgggtaatctgttgctctcagtaaaataaatgatattcacttacagagaaaagaaaaggagaagcgtgtttaggggaaacaagcgggtcacatggattgaaaatatcctaacattccagacaatctcagggccttgctcctctgtcaaccaccaagtgaggttgtgtcggcagattaaaaccgtgggcggtctttgctaatgcagtagtaaggccccacccgcttctaggctctcaggtgtctaacctggaaggacagttcttgccttcctcatagggctcttcatggacaatggtaaccaccgtcctaatgggccnggggccggccaggcaaggcgggcagg

SEQ ID NO: 302699 - DNA, 356 bp, Homo Sapiens
  misc_feature (244)..(244): n is a, c, g, or t
  misc_feature (302)..(302): n is a, c, g, or t
  misc_feature (333)..(333): n is a, c, g, or t
  misc_feature (342)..(342): n is a, c, g, or t
agtcattagaatttaataaattgaagtaaaattatacagaaaatacattacaatcattaataacaggctgtaatgagaggaatttaataaataatcattaaaaatacaggataattttattatgttctcaatatgttgctgcacttcttaccacaaaacataataaaattatatgactataatatagatttcaggagctaaaaaagccttatatttccaaataaaagaacaacataaattttgncaaaatatgacgagcattactgcagtataaagtaaatatctgggaattaaatataccntcatttaggatacagactaaaaaaaggattntaatgtttntggttcccttctgc

SEQ ID NO: 302700 - DNA, 454 bp, Homo Sapiens
  misc_feature (314)..(314): n is a, c, g, or t
  misc_feature (387)..(387): n is a, c, g, or t
  misc_feature (424)..(424): n is a, c, g, or t
accatccacaacatttcaaaggaaatgtcagaaattattttcagttcaacaaaaatttggactctgctagagatttatttaacccttgccacgccccgttcttagctatgccccaagagtgagaagatgtagcttcaactttcttcctagacaaccaaccaccctatgctactccacaacgcgtctgccttttaaagacaagttgaactttaactggtagacacaggtcctgggtgactgcagctttcagaccaatgacagcaaatgacctacactcaacaggccattttaaatggctgtgacattctcacagntagggccaaagagtgcagtagaatatgtttttgatccataaacacaagggccaggcaaccacacaggggttanttcaaaccaaaacctccgttgtcagggggcacctttnccggaggggctaagggtttttggattcccg

SEQ ID NO: 302701 - DNA, 446 bp, Homo Sapiens
  misc_feature (405)..(405): n is a, c, g, or t
  misc_feature (418)..(418): n is a, c, g, or t
actggggaaagtgctatggtgcactatggtcagcgctatggtgcactatggtaagcgctatggtaagccctatggtgcactatggtaagcgctatggtgcactatggtcagcgctatggtgcgctatggtaagcgctatggtgcgctatggtaagcgctatggtgcctatggtaagccctatggtgcgctatggtaagcgctatggtgcctatggtcagtgctatggtgcgctatggtcagtgctatggtgcgctatggtaagcgctatggtgcctacggtcagtgctatggtgcactatggtaagcactatggtgcagggtaatgggggcagcacactatgaataaaggaattacaaaacacttcccgaaatgtgacagctaacctgagttttgaagccttgantaggtgagagccngagtaaggaagggggcagaggttggaag

SEQ ID NO: 302702 - DNA, 353 bp, Homo Sapiens
  misc_feature (338)..(338): n is a, c, g, or t
gaagtatccttcccagtggcaggaactgaagactccagatcaaccaggtggaccttttcgttgatgagctgatagcttctaggctgtggggaacctctggtgccttacaactccaactactgcagaatttcttgttgtgcctcataaacaaatgatcttcctattggaagagctacgtggtccttggacaaacaaagatagtgtattgctttaaaccttatctatttgctacagtttccttctcctaccaatatgaggcatgcctctaaatgccacaaggtgtttgaatttaatcaaagttgggctctacttttgccttttgtttgggctaaagcatncaagccatcttcttg

SEQ ID NO: 302703 - DNA, 117 bp, Homo Sapiens
attaattattatataaactactaccattagctgggagacattcctggagccccattcctccagcccccttatgcctctataagcacaaaattccctctagtaaatatctttctgctt

SEQ ID NO: 302704 - DNA, 435 bp, Homo Sapiens
  misc_feature (125)..(125): n is a, c, g, or t
aatatcaagtcaaacaatggtatgttctaggtaactaaataatttaaggtgagcttgttaaattcttcacctaccatgacactgaaatttcggagaatttttcttctcagcagtttgcgaagttncttggctactgataatgcctgggttttatctactttacagttttgctttggtctggtatggaaggctggtctacctgtttgtgaggcaaagcactttaccagctggtagctgaaccatttgtgatattttcattgtttttcttcttctctgttgacatttgccactttcagtcccatttccatctccatgtctttctttcatcttgttagagtgcatttatgcctctcaaatttgcctaggcgtgctgggcaaagagggaccagtctgttgggagatgaggtgaattacaggagtcccatatggatttac

SEQ ID NO: 302705 - DNA, 417 bp, Homo Sapiens
  misc_feature (198)..(198): n is a, c, g, or t
  misc_feature (371)..(371): n is a, c, g, or t
acttaactcatagttgatccactggagccattttctggaaactgtgattgctgagctgttgtcagaaatctctccttacctagggtacgttgctttccaaaccaagaggaaaaagtacaatcaagacatgttccaaaacccatccagcctgtggaccttacccaaggtgtaccagccagaaatttgagacgtcctggnattgtgaaatgtcttaccagaaagcagcttaactttaccactggcatgagttttaataggttgcctcagctgcttgctagcaagcacttatgtacctatttattcactgagtagctaagcctacagagaaaagagctctagagagtaaggaagtcttacccatcctgggggangattcatggcaaaggttggggtttaggttttgggggtcttccaaaa

SEQ ID NO: 302706 - DNA, 407 bp, Homo Sapiens
gagttttctcctaaggccagagtccgaacttgcatgatttctgatccatatttgaggttttcccactcatctgagaccccacgctgggaatgagggcggggtggaaaaacccgggtcccttgtgatatctgacctctgctcgaggtgtccccctctcttttgccagtcgtgagattttgtatggaatggccaggatcccgcacaattgaccctcgacggaagtctcctaattccaaacccaggtccagggattgaaggctggggagtagagccatcctgggtcaggctgctggtaggagcggtgggacctggaaagacgtggcggcgtggccgcgttccagcgcccgaggctgttcacgagtttagtcacttcgcattaacttggttaaattccggggactgggcgg

SEQ ID NO: 302707 - DNA, 261 bp, Homo Sapiens
aaaaattttctaagtaatgtctaattccactttcctagtagttacagttcagtgagtgtaattaccgtctgagggttgaaaactggtggcccatgggtttcatctatcagcaaagatactttgtttgactcacaatattaaaagcagttcattgattagtgttattagggcactgcctcttccagttggatgtcagtccctatcatgcctagtatgcttacacctgggcctgctttcattgcttctttgttattaaatttt

SEQ ID NO: 302708 - DNA, 368 bp, Homo Sapiens
  misc_feature (75)..(75): n is a, c, g, or t
  misc_feature (221)..(221): n is a, c, g, or t
ttagagcagttttaggttcagaacaaaactgaacagaaagtagagttcccacatactcctggcctccccaccccncatctccccactatcaacaagctacacatagcagaacatttgttacaatcgaacctacactgacacctcaatactgtcgaagtccacagtttaaactagtgttactcctgatgctgtacattccatggatttagacaaacatatantgacatacagccaccattatactatcacacagagtagtttcactgtcctgaaattcctctatgcctgtctattcaggcacaaccttccctcaccctctgggcaaccactcctgtttttactgcctccataggttctaccctttccag

SEQ ID NO: 302709 - DNA, 174 bp, Homo Sapiens
  misc_feature (21)..(21): n is a, c, g, or t
  misc_feature (40)..(40): n is a, c, g, or t
  misc_feature (45)..(45): n is a, c, g, or t
  misc_feature (61)..(61): n is a, c, g, or t
  misc_feature (66)..(66): n is a, c, g, or t
  misc_feature (90)..(90): n is a, c, g, or t
acttcaagtaactgccaaatntcctttcactgcagtatgnggttntctctgacttgcactntattnctttattttaatttaattttattntagagatgatctcactctgttgcccaggtttgaatgaagtggtgtagtcagagctcactgcagttttgaactcctgagctcaag

SEQ ID NO: 302710 - DNA, 512 bp, Homo Sapiens
  misc_feature (425)..(425): n is a, c, g, or t
  misc_feature (445)..(445): n is a, c, g, or t
  misc_feature (452)..(452): n is a, c, g, or t
  misc_feature (495)..(495): n is a, c, g, or t
tctcaaatgattgcaagatacaagtagaatggagaagcattaattcagcccttctaggtttgagttactcactctgcccacctctagagcattctatggcagggagattaaagtgtctcctaactatgcagtcactgataaaataagaattagcacattctcactaaatgaacatgactttaaggcacaagtatagattcctgaaaaagttctaagctgaacctgtacaaatggaatcattttaaagacaccatttactgtcacacagactccctgatactttagtgtgtgcacatgtgaaaccatttttttgaagtatggaaataattaattgctcaccattttatctattataactttgggttttgggtgtcctgaggcttctctaaaaaccggtgtgttttctatagtatttagaatattanggggtaataggttttgcagngtaccgntatggcttatactaatttataaccgcctattcctcgtgggtanccctatttggtagggtt

SEQ ID NO: 302711 - DNA, 445 bp, Homo Sapiens
atatctagtagcagccatttttcaggattaaagtacagtttatcaaaatttacccaatcaactcccattttatttagctatgataaatgttccatgctcttacagccagaaagtatctgattattaactcaagtaaacttgaattcatttgctgcagccaaactgctgctctgggataggatgtgaccaaagtttgtactttattttaacctctagggattggagagaaaggaccagtgggatgatgagaagtcttggattctggaggccattttagccatttattcattattatgtgactttgggcaagtcttgtggatctttttgaagttccgtttcatatccatttacaaatgaataacagttgtcacgccacacagagttatggtaacagtgaactaattttcgaagacactgtggaaaaacacaaagctcactgacttgg

SEQ ID NO: 302712 - DNA, 271 bp, Homo Sapiens
  misc_feature (127)..(127): n is a, c, g, or t
ggcacgagaagaaatgttctccctaaaccatacttatggcattaccataaaattgcctcttgaacacagttaaattgaaagtgctcaaaatgcgtatcaattcaggtaaaagaaatcttgctacttngaggggaggtattttttattcttccccactttctctttctaactccctacaaagctatttctaattatttgcttatgctgggcactgaattttctcttaggctgaccatatattttattaaagtagtcttgaattcaggagtgg

SEQ ID NO: 302713 - DNA, 377 bp, Homo Sapiens
attgttaaatgaaaaatggagtttacaggataacataggttgattcctttttgtaagtatttttcttacagcttttaaaatattcaagcaaggagttagtgactggtgtctctggctgttttggcggtgggatgtatttatatggactctaacagaatgtcagatgtgtggcaagggctcagaatggtggtggtgcttgttgatagagattttagcagaatcactaacaggctacgaagaagtaaatcttggttgtcttttgttcatggagatgttttttatttgccaatattcgtagtttgattactctgtgatttctcctgcattttgcatttacatagagagggataggagtagttctcagggtgtatactgtc

SEQ ID NO: 302714 - DNA, 423 bp, Homo Sapiens
  misc_feature (365)..(365): n is a, c, g, or t
gaatttggggatatacaagtgacagaattcttgagtctcagttgattataatataatgaggggacagtgccaggtctttcacgtctccaggtgggaaggggacaagttgcacgatggctgtcctcatctgtgcctggttgtgtgagaattagaaacaacgtttgtaacagtggtacctagtctttgtgaccgtggtcctctttttgatattaatatttttgcagactagttggcataaacaagttggctctctgtactcacattacaaccactgaggtataacactattctcttggagtccttagaagcacctcgctctgttcagctggcctcttcagccttgtgtggctgtttcagaactgttngatcatctgttcaagttcatcccagagattcattcttaggattcttgagttccatttt

SEQ ID NO: 302715 - DNA, 153 bp, Homo Sapiens
actttctcaccagcacatacatttcttgtataagctaaaagtggtattccctttctaaaaaatgccagcaatgttctttctatttggcccagtaaataaattaataatggtcatattctttggtccagtaaattaaacttcagaacacttatt

SEQ ID NO: 302716 - DNA, 188 bp, Homo Sapiens
  misc_feature (126)..(126): n is a, c, g, or t
ggtacagattaggtctcactgtgatgcgcagactgggctcgaactcgtgggctcaagcaagccttccatctcagcttcccaaagtgttggaattataggcatgagccaccaggcctgctccctggnccttttaagcatatgggttttcaaatatgttagagcacctaagatataaaataataagatac

SEQ ID NO: 302717 - DNA, 494 bp, Homo Sapiens
  misc_feature (370)..(370): n is a, c, g, or t
  misc_feature (381)..(381): n is a, c, g, or t
  misc_feature (444)..(444): n is a, c, g, or t
  misc_feature (452)..(452): n is a, c, g, or t
  misc_feature (457)..(457): n is a, c, g, or t
  misc_feature (481)..(481): n is a, c, g, or t
actggttcatctctttttccaacgacttccacttctctctctagtttacatgtctccaaaccttaagcctctgttaatactttcacaataagtcaattttgccaacggtttgcctcccctagaccatctaggctgggcccagaacacctcatcttcactcccactgaagtgttcctgaaggtcagctctcactgaccttgattctgctcccctacactgtcaccagaagctatccacctatggttctaattcagtaagtccaactctctcaccccctttttttgtctcagctgtgtgggctttcccaggatggcatgcaatgggacccctgttgccatgcatattgtaaaagggaaaatggccttccctncatggcggctnacaaaacagcacatttatggatgggcactttgtaaaagattatggggttgtggtgtgcacatnttggacantttcnttgggccagaagctttaatcagtngccagcagtgtcc

SEQ ID NO: 302718 - DNA, 413 bp, Homo Sapiens
  misc_feature (286)..(286): n is a, c, g, or t
  misc_feature (361)..(361): n is a, c, g, or t
  misc_feature (389)..(389): n is a, c, g, or t
aaagcatgtggtcatttaaaatggaagatatatgatcactaattatatgttaagctggaggatggtgttttactaagttattttcattgtttaattatgggtgattaaaatgtattgtggaggtacatttttaaatatgtctttatatttttcatgaatgtagaaatcatctgagcagggtcagacttttaaaatgttatcataatggtttgccagctgaccttaggcaaatcagaatctctgtgaaagttattttcttcagttttcctctgttaagtaggacttncccagggcagttcctgttgaatttgggggtatgggattttacttaagggaaagtccattggatccacagaaatgnaaactggggatggatattttttcgaggntaattaaaggggagggggcttttg

SEQ ID NO: 302719 - DNA, 493 bp, Homo Sapiens
  misc_feature (361)..(361): n is a, c, g, or t
  misc_feature (367)..(367): n is a, c, g, or t
  misc_feature (398)..(398): n is a, c, g, or t
  misc_feature (453)..(453): n is a, c, g, or t
  misc_feature (458)..(458): n is a, c, g, or t
aaagattggtgcaaagaaacccaagatttacagtttatacaaagcaatatgcaacacaacaatattttgctctcaaaaataaagcagatcataataagacaatgtcagtaaatgtctttaataagatgtatcactgaattgtttcgaaaacttacagctgttcatggccctgggcatttaggaaaaccctagtttatgtatatttctttttcctacatggcttatttgaattacccaaacaagcaatgaactcaaactggcttaacaataagggaaatttattatttcacaagttatcaaagtgatttcaggtactatataattcaatagctcagtgatgacattcaaggtcccaactttnctattncctaggttcattctgtttatccctggatgtngggcttcttcctctatggctgggggtctttttggggggtcctaaggtgggctggntagtnggccgttagggagttatggtcccttccctttgggc

SEQ ID NO: 302720 - DNA, 105 bp, Homo Sapiens
  misc_feature (15)..(15): n is a, c, g, or t
  misc_feature (34)..(34): n is a, c, g, or t
taaagcatccagagntgctcagtgtatactctgntgcttaattctataatttccagagaaaagctgtagcttgactcaaacagtgggaccctgaaaatttgttct

SEQ ID NO: 302721 - DNA, 389 bp, Homo Sapiens
  misc_feature (176)..(195): n is a, c, g, or t
  misc_feature (378)..(378): n is a, c, g, or t
acctgactgctttaaaagctctttgtaagctgaccgtagcacagatcacgtggcatccactatcaatactcataagtctaatttatcctcaggatgttccctgaagtattcaggaattcttagtcctattacaaagattttgttgctgtgatagtggttttgtttgtttattcagnnnnnnnnnnnnnnnnnnnncagctcctgtataacgatggtacaaccatgagtaattttattttttcaagcttttctttaacgtcttgaggaaatgatttttatacttcagggaaaattaaaagggggtcattaaaaaaccgggtgggcattcccaatttatctactgatggcttttggattcttctcactgtcagttagggnggctgacctta

SEQ ID NO: 302722 - DNA, 317 bp, Homo Sapiens
ggtacaggcatgtgccaccacggctggctaattttgttttctttctgtagagacagggtctctcactaggttgcccaggctagtctcaatctcctgggcctcaagcaatcctcccaccttggcctcccaaagtgttggattacaggtgtaagccaccgtgcccagcctccaattccttactccaaggacacaagtgctaacctaaactgggaggggatttcaaaggaagtggggaagaggaagggagtttcatggaacataacttcttgccaaaacttgaaggtcacccaatgggggacttcgggtttttgttcagg

SEQ ID NO: 302723 - DNA, 453 bp, Homo Sapiens
  misc_feature (191)..(298): n is a, c, g, or t
  misc_feature (358)..(358): n is a, c, g, or t
aaattttaattattttcttagtggttcctttgggtataataattaacattttaaacttaaaacaacctagtttgaattaataccaacttcacttcaatagtgtacaaaacctctgcacctatacatccctgcccctccccatctattgttagtcacaaattacatttttatagtgtgccatttgacagatnnnnnnnnnnnnnnnnnnnnnnnnnnnnnnnnnnnnnnnnnnnnnnnnnnnnnnnnnnnnnnnnnnnnnnnnnnnnnnnnnnnnnnnnnnnnnnnnnnnnnnnnnnnnttatctttttaaaggattcataattattatggtatttgtcttttaaggtcatataggggnaaaaagaggggcttacaaaccacaaatgtaatagtactgggctttttatattttacccgggggtactttaacccgggttctttccttgggctggg

SEQ ID NO: 302724 - DNA, 300 bp, Homo Sapiens
  misc_feature (161)..(161): n is a, c, g, or t
tcagaattagaaggaatgtagaaaataatgagaagtacaaagaaggagatgaaaatcacagtctgatttctcatgaatgccattaacatttgctatttttgattgtcttgtttaatgtgcataaacatatttgcaaaattaggattgaagcatgtatacanatttgtctcctgcattttaaaaattgagcattgtactatgaatattttcctaaatcataaaacagcctatcaaagcacgttttcttagctgcttaatatgatgcatgatatgtgtatctaacataaatatccagtaata

SEQ ID NO: 302725 - DNA, 428 bp, Homo Sapiens
  misc_feature (43)..(43): n is a, c, g, or t
  misc_feature (188)..(188): n is a, c, g, or t
gtttttaacgttagtccatgttgttgtggagctatcgtctttnttttattgctcccttgatttaggagttagccacaactaacccctctgtctcttttatctccctatgtttctggtattggatcatatgattcttcagaaccatgcctacacagttgtccccctttcccagtattgaacttggaganaggaggcagtgggtaagtctggtgggtgaactggcttggaaaaagtgctcaagtgacttctttctgagaggaaacttgagactagtcttttctacatcatcttacttaatggggctaataattaatgtagtccgcatgaatagttcccaaccaaatgttttttccaaagtccattcagggttgggtctttaattattctaaaagatggtccatcccggattgtggtaaaaaataatggcc

SEQ ID NO: 302726 - DNA, 414 bp, Homo Sapiens
  misc_feature (157)..(157): n is a, c, g, or t
  misc_feature (337)..(337): n is a, c, g, or t
tccatagtctcttctgattcccctgcagacctggaattttgaggtctgacccaaataccgtttaattttacttcgtaatttaatagtggcatgcatttgatttctgtctttatttctaagctgagggaaaacattatttgaaataaatgtgaaaaangattctttagtggtctccaaataattttaaatttactgttttttttattagaatcccgctaggaacatttcagcattattttaataattgaaaccattgaaagaatcatttattaagaaattagatttgaacattttaggatttcttgaaatctcattactttttgtggatctgtgttantcatggggtcttcctgggtattaaggaagatggatccaaaaggggtggggtgccggtcagtgggctcacgtctgtaa

SEQ ID NO: 302727 - DNA, 429 bp, Homo Sapiens
  misc_feature (366)..(366): n is a, c, g, or t
  misc_feature (399)..(399): n is a, c, g, or t
  misc_feature (407)..(407): n is a, c, g, or t
aatccatgggtgcttatgagagttttgatttggttaacataagccagaccgattatcttataaactaggaagtatgaaatgtttctcttttggtattccaaatctcccttcctgtacttactttccttctcctgttactgcaagtttatccctccactgagaagaaattgcttcaataaaatttgtggtagaaaaagaggatgatgatgatagtacctactatttaatcagtgcttaccatttacatgttatttactcagtgcttattatgggggctaagtttgggctttaatgcattattttgtttaatcctatctacccctatggaaattgatactggctattttccccattttttcaaagggnaaaccggggcactcccaggattcgaaaaaaccnggcaaaangtcccacagccggggtagtggg

SEQ ID NO: 302728 - DNA, 328 bp, Homo Sapiens
  misc_feature (192)..(193): n is a, c, g, or t
  misc_feature (249)..(249): n is a, c, g, or t
  misc_feature (271)..(271): n is a, c, g, or t
  misc_feature (289)..(289): n is a, c, g, or t
  misc_feature (298)..(298): n is a, c, g, or t
tgacactcacgccttgccaagaatagatttttaatctattttgtttttcaaaaatcaaatctatggcctgagccttaatgtccattttgcccaattattgtggtttacagaagctgttcactttctctgtggctcatctaatgaagttccagatttagtcaagtgcaggtttctttatgcttgttaccagtnnctttagttaaaccggaagcctcttgaagattaatactgtgacttgagacttttaangtagcccagttgtctagtgttnatgccctacggagtagancacaataantaaaatggattatgggatgtggcctttcat

SEQ ID NO: 302729 - DNA, 285 bp, Homo Sapiens
  misc_feature (66)..(157): n is a, c, g, or t
  misc_feature (242)..(242): n is a, c, g, or t
tgaaaatgttaaactttacttattatgaagaaaaactatcaatgattcatcatttgtcattatcannnnnnnnnnnnnnnnnnnnnnnnnnnnnnnnnnnnnnnnnnnnnnnnnnnnnnnnnnnnnnnnnnnnnnnnnnnnnnnnnnnnnnnnnnnncaaaaatattcaccatagcattcatagcattataaaataatgttacaaagcatctatgtataaactataaactatgatacagctntatgcagcccttaatgtttagggaaccatttctaggttcacat

SEQ ID NO: 302730 - DNA, 389 bp, Homo Sapiens
  misc_feature (191)..(199): n is a, c, g, or t
  misc_feature (354)..(354): n is a, c, g, or t
  misc_feature (364)..(364): n is a, c, g, or t
tgctttatatcatctatgttacacttcactgtgacagcagtcctgtgagggagctatgagaggctcaaggtgctgtagttatagtaaggattctactcagatctgtctgggctcagagctttccccttcccataccccaccttactttggagtttatataatatttgagacaatatgtttgtgtgccttannnnnnnnnaagtttcgtaagttctaaggaaagcgggcatttgttactttttaggagagctcttccttgacactcccctaaaggcccagggtgggatggggggttgccctatcgccacgggccgctttcaaaggctggtcattgtggggtgccatagggtatcncgtggcagtngactgtcttgacaggcagtgtttca

SEQ ID NO: 302731 - DNA, 475 bp, Homo Sapiens
  misc_feature (419)..(419): n is a, c, g, or t
agaatttataaaaagtttgtgttatattctaaattggtgagttggttatttagatcctaaaattgattcttcattcagaacaaaaaaattataaaataacggacttgtttccatggtagccagaataagtaaggttgttgacaaaagctaagtgtctgtttcacagagataactttcttaatgtggaaagattctgggtgttaccatattctaccaggtagctctgtgtcccctgtgaaatgtggtactgtttggtgtggaggtgagaggaactcaagagttaattgttgcttatagtagatcacattattcaaaaacagttgcttcccttctttactgggcttctccctacaggacctcctatttgtgggaggagtacttccttgttcctgtggacattcagggaatgggccagggancttggatttgggccactggaagatgagtagaagtgattatttgttcatgtctaagg

SEQ ID NO: 302732 - DNA, 140 bp, Homo Sapiens
  misc_feature (13)..(13): n is a, c, g, or t
  misc_feature (31)..(31): n is a, c, g, or t
  misc_feature (49)..(49): n is a, c, g, or t
  misc_feature (54)..(54): n is a, c, g, or t
  misc_feature (58)..(58): n is a, c, g, or t
  misc_feature (62)..(62): n is a, c, g, or t
  misc_feature (72)..(72): n is a, c, g, or t
ggaaaacagaatnacattaaaaggaaaaagnaacagcatgttgaaattncactnaagncganaccctttganacaaactgggttattatgcatttataaaagatgccccttgttggccatggaaaagatacattttatga

SEQ ID NO: 302733 - DNA, 434 bp, Homo Sapiens
  misc_feature (367)..(367): n is a, c, g, or t
  misc_feature (392)..(392): n is a, c, g, or t
  misc_feature (403)..(403): n is a, c, g, or t
aaggtacattagaattcagtgttttgaaataagatctatcttatttaataatttattcttagagtaaaagattttgtttgaactcattcttcttcactgactgtgacccctctagtcactgggaccacaagattttttgttttcaacagatgtcttttgttttaaaataataggcatggcaatataaatacataatgaaaaaagttttttaacagcattttttaaaataattgaaaccataatttaatgatttatatcagttacattcattatataggatttcttagttctggttaggataattttaagtgattcagttacagttccatgaatgtgggatagggatttcctcatctacctaaatagnagggtgagggagttttaggaaagcnatatttttacntttggtgggtatatacaaagaatgggatcca

SEQ ID NO: 302734 - DNA, 330 bp, Homo Sapiens
aagttagccatttaaattttaaactttctatatacttagcctatcctgccttatccacttagcacactcctcttcatccttaaagtcttgttcaagtatcacttctaggaagctattctgacaacctcctcccccaggtagagccagccactcactctattatgtccttaatacactttataatctaactctactaatgagatatttctgaacaaatatagttattgacacggtgctctcttacattctaatgtatacttcttggggagggaataattttcttcattaatttctgtattcctaatacctggcatgttgcctgccacaatt

SEQ ID NO: 302735 - DNA, 148 bp, Homo Sapiens
  misc_feature (130)..(130): n is a, c, g, or t
cccccacggacactggaggttgactctctctaggctgtatctctgtcaaaggcccacctacagggacccatccacatgggctggacatagggaatgggcaatgttttctttaggaaaccacataggcctntgggaaagggacatgggt

SEQ ID NO: 302736 - DNA, 370 bp, Homo Sapiens
  misc_feature (117)..(117): n is a, c, g, or t
  misc_feature (217)..(217): n is a, c, g, or t
  misc_feature (227)..(227): n is a, c, g, or t
  misc_feature (250)..(283): n is a, c, g, or t
  misc_feature (299)..(299): n is a, c, g, or t
  misc_feature (305)..(305): n is a, c, g, or t
  misc_feature (347)..(347): n is a, c, g, or t
attggttcctcccttgttgcccagtttattatctctgctgccattacagaaagctgctttgtaactaccttaacctggtggcagtcattttaatcatctgagaaaccatcaccatanttaactccacatgtctaactacttctattttagcatgacacatgcattaggctgcaaagtcttagaacccagatatcaaatctggcatttcctttgtaanttcccatttntctggagctaaatatcaattttnnnnnnnnnnnnnnnnnnnnnnnnnnnnnnnnnntatatatatatacagngagtgngagagatagtagcagacagagacactccctctccccctgcgnccgggtttctgtttgcccgggtt

SEQ ID NO: 302737 - DNA, 432 bp, Homo Sapiens
  misc_feature (22)..(22): n is a, c, g, or t
  misc_feature (41)..(41): n is a, c, g, or t
  misc_feature (178)..(178): n is a, c, g, or t
  misc_feature (203)..(203): n is a, c, g, or t
  misc_feature (341)..(341): n is a, c, g, or t
  misc_feature (400)..(400): n is a, c, g, or t
ggatctaagtagttatttaagnttaaacaatgtacaaattnaaatgatgtcaaaatacaagaacaaggggctgtttaagtcatcatacataggcaatcttgtttattccaaattgataaaattcgggtggggggtgaccctctgactaaatttgcaagggactgatacatcagaatgncaatggtttcatttaccaagcagancatcttcctgcaagtgggttatatatctctattcccctaggaatattctgtttcccaggcattaagacactggggaaagtgagttgctaatccaaaagggttatttgggctctgaatcacggatccacaggaaagganagtttggatggatccttaggaggtttttccccgaggggtaagggggaaaggcccaaagnacctaactttttttccggggcagagtagggtt

SEQ ID NO: 302738 - DNA, 110 bp, Homo Sapiens
atgagccaccgtttccggccggctctattctgtaatcacatgagcttggggtaagtttcacaatattataaacctcagtgtattcatctttcagtgagggttgaccacat

SEQ ID NO: 302739 - DNA, 445 bp, Homo Sapiens
  misc_feature (314)..(314): n is a, c, g, or t
  misc_feature (316)..(316): n is a, c, g, or t
  misc_feature (331)..(331): n is a, c, g, or t
  misc_feature (333)..(333): n is a, c, g, or t
aatgagaggtaagtgtcaacagtaggcttaaaatattcagtaaaccatgctgtaaacagctgtgcgccatttaggctttgttgttccatttagagagcacaggagaggaaatttagcataattcttaaggtcctatgatttacagagtgataaatgagcactgactgtaacttaaagtcaccagctgcattggtccccaagaggagagtcagtgccaccttcatcttctggataacttgttgcagcttctgcatcagcacttgctgcttcaacttgtcaagttatgggagatggcttatctccttatacttgangnaaccaacctccactngncttcaaacttttcttctgcagcttccccatctctctcagcctttagaggaattgtctctgcactaggggtttgggttaagggggtttttgtgggctgggtttggacccgctt

SEQ ID NO: 302740 - DNA, 325 bp, Homo Sapiens
  misc_feature (17)..(17): n is a, c, g, or t
  misc_feature (279)..(279): n is a, c, g, or t
gatgtaagttgaagganttgagagtgttttattatagcaatgtaattcagttctttgaattccttctatgttatatgtcaacatttgtgtaatggtctattagcaaaaatatttttaatcttcgggcacatgacaatttgataaagtccttcttcatttcttttaaacagtgaactagggaagcacctgactaggcaaagagatttgttctccaacaatttgaataatttactttctcaatttctggggaaggtataccaagaggagctttactaaggnttcatcaaattattgttaattgtgccggtaacacttggtacttagg

SEQ ID NO: 302741 - DNA, 144 bp, Homo Sapiens
atttatacagctacataaaaattttatgacaacttcaacatgaaccttatattttcgacaataccttgccaaggaatctctgaagtccatagcaggtcactgtgagacctagttccctgttgtcactgacctatgtaatcaaag

SEQ ID NO: 302742 - DNA, 320 bp, Homo Sapiens
tcatcaaaagactaatgtcatcaaatttataaagcatatgcaactagtataataaatttgtttccagtgtttataaaagagcaacaggaaacatgacaatttttcctgtctttcatattcaacaaattcaacatgatggtatttcctttataattcttttaaagcagaacacaattgctaacacttaactgtgtttcaaaactctgcttctcctgagggtatggtattcatgctcattttaatgagttaagatttgtaagtgatctgttccataatctttaatttcctaagaaattgttagtgggaaaaaattacaggaa

SEQ ID NO: 302743 - DNA, 146 bp, Homo Sapiens
  misc_feature (115)..(115): n is a, c, g, or t
tcttttgcccttgaacgttcatctgatctggagttttaagtggttttgccaaaaagcgtgtctttttgacatatttctcgatggtcttgccatatttcagggaaacgttaaaatntaccacacttgaaaagagtagttccggcgac

SEQ ID NO: 302744 - DNA, 327 bp, Homo Sapiens
  misc_feature (30)..(30): n is a, c, g, or t
  misc_feature (309)..(309): n is a, c, g, or t
tctgttttcctgaggttcagcaaagtaaanaatttgacttaggtcacaagatgataccggcttgactctacccattacactgcatcttccatggcagagagatcatcaactgctgactttgcttcattcattttccacagttgttattgagcacctttctctgctccaggctctgggatatcacacccaaaatccataaagatctcattgccctacagcaagagattaaaacaagtaatgtaaatatggtgtaataagtgtaaagaatactggaaggagtacagagggttatctgaatcaaagcaaggntgatgtggggcagggaag

SEQ ID NO: 302745 - DNA, 256 bp, Homo Sapiens
ctgttttagttgcatttgctttaggagtcttagccatgaattctttgcctaggccaatgtccagaggagtttctcctaggttatattctagaatttttatggtttcaggtcttaggtttaagtcttttatccatcttgagtttatttttgtgtaaagtgagagacagggattcagtttcattcttctacatgtggctatccagttttcccagcaccatttattaaataggggtgtccttgcctcaatttatggttt

SEQ ID NO: 302746 - DNA, 211 bp, Homo Sapiens
aacctttggatagcagggaggtgctggagggatagggtcaagaagagtgtgtgagagcagtaatttcccaagactgccctctgcgggactgtatttcagaaaacatactggtggggctacctctccattcacgtgtactgccctagcctctccccatcccccgctgatgcacttccatagatgcactgttccataacggcagcagaatgct

SEQ ID NO: 302747 - DNA, 412 bp, Homo Sapiens
  misc_feature (219)..(219): n is a, c, g, or t
  misc_feature (283)..(306): n is a, c, g, or t
  misc_feature (329)..(329): n is a, c, g, or t
  misc_feature (357)..(357): n is a, c, g, or t
  misc_feature (376)..(376): n is a, c, g, or t
  misc_feature (386)..(386): n is a, c, g, or t
  misc_feature (392)..(392): n is a, c, g, or t
aattcaaattttcgagctttctttcagtggagcctacctatactttgtgaagtgtgtttaatctctgagttatgtacatcaaaagatacttcctagatctttaagaagctctcccaagggaataaaactctgggcaaattggatggtagaagtatttcaccattcatgacaacgtgtttcctttggttgtgttggtatgtttttagtgttaacactggngaatctagaaagttttcataaactggggcttgataaaggaggttggatttaaactcttacctgnnnnnnnnnnnnnnnnnnnnnnnncacatggggggatagggttgggntaaatgggtgaaaggaaacactgaggancaaaagtccattttccccntttcactctncatccntggggcactttaccggggcc

SEQ ID NO: 302748 - DNA, 420 bp, Homo Sapiens
  misc_feature (286)..(286): n is a, c, g, or t
  misc_feature (303)..(362): n is a, c, g, or t
tgaaccagtatttgtggatatgtctagaactgtaaaatcttgcttaactagaaccttagtctgcaccctccttttaggagaatgaggtaaaaggaagacaataagcttatgatatcagggattcatgtaaaacaggaaatagtagttggctccagtcttctcctctaacaaaagtatgcatattctgagagataccccaaggcatcacaagatcctgaatcatcaaaacaccattgaattgtgttgggcattttgtagccaggaaagtgaagtggttcaatttagnaaagggtttcaggccannnnnnnnnnnnnnnnnnnnnnnnnnnnnnnnnnnnnnnnnnnnnnnnnnnnnnnnnnnntcactttgaggaccagttagttttgaggattcagcctgggcccaacgtgggtggaaac

SEQ ID NO: 302749 - DNA, 224 bp, Homo Sapiens
  misc_feature (34)..(34): n is a, c, g, or t
  misc_feature (57)..(57): n is a, c, g, or t
  misc_feature (119)..(119): n is a, c, g, or t
  misc_feature (121)..(130): n is a, c, g, or t
  misc_feature (143)..(143): n is a, c, g, or t
  misc_feature (149)..(149): n is a, c, g, or t
  misc_feature (154)..(154): n is a, c, g, or t
  misc_feature (164)..(164): n is a, c, g, or t
  misc_feature (169)..(169): n is a, c, g, or t
  misc_feature (176)..(176): n is a, c, g, or t
  misc_feature (183)..(183): n is a, c, g, or t
aaattagaattttataaagtgcttttcataaagncttatatattatagtaattaagnggatataattcccttaacaaaggcaccttgaaaagttattggcacatgagattttgtctggncnnnnnnnnnncttttgataattncaaagnctctncacatgtgtnctctnccacttnaagtttnccttaacaattcatcatatgaatagccagcccttttagaga

SEQ ID NO: 302750 - DNA, 384 bp, Homo Sapiens
  misc_feature (355)..(355): n is a, c, g, or t
cacagtgtggaaaatagggataaaaataatttgcaatttaaagaattatttaggaaacaaaatatgcagaactagctcaactgttgattatatatggggagtacagtcaagtatgacttataggtttttagcttgtaggaattgcaggggaaatatatagggcaggtagaaaggttgaccttaaatgtgagaagggacagcctcatcctttgagtgggactttaggaaaaaagatcatagtaactggacttaagtttatcaagaaggaaggtaatgagagaggaagtgggagtagagattgggtaaaaggattgatgtgcagtactgaggggtccagggtgaggatttcagaccngggatttgaaagtagtgacatcagttatt

SEQ ID NO: 302751 - DNA, 169 bp, Homo Sapiens
  misc_feature (47)..(95): n is a, c, g, or t
aggaaaatgggaaatgttctttacattatgctaagcaaaattgttgnnnnnnnnnnnnnnnnnnnnnnnnnnnnnnnnnnnnnnnnnnnnnnnnngtgtttttgtagcaatggcaaatcttagaattatgccaacctttcaatagtttgcacaactttgaaagaaaatt

SEQ ID NO: 302752 - DNA, 404 bp, Homo Sapiens
  misc_feature (381)..(381): n is a, c, g, or t
tattctttttcaactcaaaaaattacctttacttactttcaataggtagagtttagtggttttccaattttaacaagagatggaactataaaatcatgacagtgtttcatttggcttttgcaagtgtaactaacagtcacctacgaataacaaggtaagagagttcaaagcaacacaggttgccatttctcctacagtgctgtgccatgcctccataaaaaccgcgtttctgcaaacccatacaaaaaaattaatggggttgatgggggaaatgaggctgggccagcccactcgaagctctgtccctgggaccagctgcaggaagcatgggcgacgcaggcagggccggtgggattttcttaaaatggatagataggggantttctaaggtgccaacacctcgc

SEQ ID NO: 302753 - DNA, 392 bp, Homo Sapiens
  misc_feature (184)..(184): n is a, c, g, or t
  misc_feature (270)..(270): n is a, c, g, or t
  misc_feature (381)..(381): n is a, c, g, or t
gtaactacaccatctgtagttactttctccactgaagtcctgaactcatcaaagtcattcacgagggttggaatcaacttcttccaaactcctgttaatattacactcctgctgatatgttcacctcctcccatgaatcacaaatgtttttaatgacatctagaacagtgaacactttccaggnggttttccatttactttgcccagatcaatcagagaaataactacctatgatagctatagccttacaaaatatatttattaaacaanaaggacttgggaagtacaaattattccttggatccgtaggactacaaaatgggtgctgtgttagcaggcttgaaagcaacattaatctgcctgtacatctccggcagagtnttgtgtgaccg

SEQ ID NO: 302754 - DNA, 450 bp, Homo Sapiens
  misc_feature (228)..(276): n is a, c, g, or t
  misc_feature (279)..(279): n is a, c, g, or t
  misc_feature (286)..(399): n is a, c, g, or t
  misc_feature (403)..(403): n is a, c, g, or t
  misc_feature (410)..(410): n is a, c, g, or t
  misc_feature (422)..(422): n is a, c, g, or t
  misc_feature (437)..(437): n is a, c, g, or t
gttaggtttatccaccactttttaatcttttctatcaatataatcagtggaaagggctaagacatttcactatttaatcaggacaaatgtggcatatttcataactggctgtgaattaacagaaacagttggggaaaaccaagttttactacccactaaaatgatcccaaaatatgtatacagttggcccactgtatctgcatccacattcaaccaactatgaactgnnnnnnnnnnnnnnnnnnnnnnnnnnnnnnnnnnnnnnnnnnnnnnnnncantacaaannnnnnnnnnnnnnnnnnnnnnnnnnnnnnnnnnnnnnnnnnnnnnnnnnnnnnnnnnnnnnnnnnnnnnnnnnnnnnnnnnnnnnnnnnnnnnnnnnnnnnnnnnnnnnnnnngcantacttcncccttttttgcnaggggcctggatacnggggtcccgtggt

SEQ ID NO: 302755 - DNA, 458 bp, Homo Sapiens
  misc_feature (381)..(381): n is a, c, g, or t
  misc_feature (433)..(433): n is a, c, g, or t
tcctcttcagagcctacaacgcttatggtttaagtagcctagatgggttattctgtagacagaggagatctacctcttcttcagaaatgtttctgcctttaagggacctcattttgtacgtgagcaacattatacccaaactcccagaattaagcattgccattcaaaacatttcaagatcttttgatttacctctaaatagatttaaaatacactaaaacctttagacagttgtccttcccctaagccctatggagatgtataaacatgctctgatagccagactctgcttataactccattcataagaaaccaataatttgagaatatgtttgtgcttccgagggattttagtagaaccattatgttattgttttgggncaagtaaaccaaagtgtaagtgttgattcatggtgatacttggaaactcttnctgcgcagggcttatattgctccct

SEQ ID NO: 302756 - DNA, 122 bp, Homo Sapiens
ccttactttggcttatggtaataagagtgacacccattatactataattaataagagaagaggaaagcaagatgcagaatcacaaacaactttttcgacttaactagcagaggaaagagggg

SEQ ID NO: 302757 - DNA, 182 bp, Homo Sapiens
ttgctagtccccttgtcaaatttaacattcatttcgttatttttaaaataggaaatacattcaatcgtttatattcaaaagagataatagggaatacagtaagtttctctcctgccccccattcccattcctgaaagcaaccaatgttgccttgctaccaagttgctgcatttactttcata

SEQ ID NO: 302758 - DNA, 390 bp, Homo Sapiens
  misc_feature (206)..(206): n is a, c, g, or t
ttggtctaatggattctatcctggagttctttcagaaacattacccagtctctattatgaactccagaatggtgtcacagcctgttaaatgcttatggttttttcaggaaataggttagggccagaacaagcccaacaatcttacctctgtgcctttgtgcaccttcagaggaaaccatagtcttaaacagctgctagaattttcnagggaagcctttttgaaaattctgatttaatttggattccataatgcagcttagaaatgccacacgttctctgaaacacagtcttgactcaaattcctgagtactcctaaatcaccctggagataattatgatcagccagtttgtactatggcaatctacagtgattgctttgcagtaagccac

SEQ ID NO: 302759 - DNA, 388 bp, Homo Sapiens
  misc_feature (84)..(84): n is a, c, g, or t
  misc_feature (99)..(99): n is a, c, g, or t
  misc_feature (201)..(201): n is a, c, g, or t
agctcagcatagctataatgctatccatagagactgtagagttataatcgtgactactaaatttaagcagcatccttgcctggngctgtatcatttttngacaccagagatatatttattcctgtgtctagagagcgaaaaagcacctctctgtcagaatgactactttctactttaaaaatgtttttgatgataactctngatggctttagataaagccatccttccaaaaggcctgaagcactctcagatggctccgttttgtcagccctttactgctctgggatgtggtctacccactgttaagctaatatttttgatcttcaatttggaaccttaattatgctgtacagcagttcgttgtacgtgggatgcataaaattcccat

SEQ ID NO: 302760 - DNA, 482 bp, Homo Sapiens
  misc_feature (71)..(71): n is a, c, g, or t
  misc_feature (136)..(136): n is a, c, g, or t
  misc_feature (150)..(150): n is a, c, g, or t
  misc_feature (412)..(412): n is a, c, g, or t
  misc_feature (431)..(431): n is a, c, g, or t
  misc_feature (441)..(441): n is a, c, g, or t
  misc_feature (451)..(451): n is a, c, g, or t
aaaagatggtatagcaacataaaatttacaagaacattatagctggactgtataggaagagcttgactaanttctttccacaatgcattttcatcaaaactcatacatattcagagatacaaatagcataccagtnaattcaatgaactnccactgaaaccaaaacattatttcctagcatctgtttgtgggaattatgtaaaatacttaatgcaatgtgttttcattgcaatcctatttttgtttcccaagcagtgaattttcatttaaaccaatatgtttacctgagacccacacacatgcatttattggaactgaaatacagctacagatacaggcaacacgtctgaggccaaaccaatggcattttgatgcaactcaggccaatttttccacaacatggtgttctggnttctctagggggtattaangccccatatnatgggttaanggcactgaattggtgatgacaaggtggggaa

SEQ ID NO: 302761 - DNA, 268 bp, Homo Sapiens
  misc_feature (18)..(18): n is a, c, g, or t
  misc_feature (50)..(50): n is a, c, g, or t
  misc_feature (52)..(52): n is a, c, g, or t
  misc_feature (54)..(54): n is a, c, g, or t
  misc_feature (188)..(188): n is a, c, g, or t
cagaccagaaggtaagantcttataaaccttttataaccctttacaaatntntnttaaagagcagatcagtgctctaagaaaaccttgttacgcttttattccagtgttcaatttacggaactgtatcatacccctttaacttcagccagtatgttcacacacagaatttcttttaaaagattaattnttcacataatttccacaacttttgcaaaccttcagctttatcctaacttaaaacaatcccttaaccctttaatttaggcc

SEQ ID NO: 302762 - DNA, 129 bp, Homo Sapiens
  misc_feature (115)..(115): n is a, c, g, or t
atacttttacatgtaaaagacatgccaaatactaaacatgtaaaattgctaaacatgtaaagttgcttcacatctttacttttcgaggaattgtatattaaaaatacagtaagancccccccaccacca

SEQ ID NO: 302763 - DNA, 402 bp, Homo Sapiens
  misc_feature (83)..(83): n is a, c, g, or t
  misc_feature (181)..(181): n is a, c, g, or t
  misc_feature (205)..(205): n is a, c, g, or t
  misc_feature (225)..(225): n is a, c, g, or t
  misc_feature (300)..(300): n is a, c, g, or t
  misc_feature (368)..(368): n is a, c, g, or t
ccttatgctggattcatttgtcttgaaatggcgggcaatatcagctgcaggtttcaatctacatatcaggcacttcaactttnccttgtaatgtcatgacttttctttgcttcttgggagcacttcaagcaccactagtgggcacttcgtatgggccccatggttattcaaggtttatggnactgcatgaagcacgacgcaaganccatgagaactgcgagagancactctttactgcaatatgcaatttacagagaggggaactgctcacatgggaggatgactgggcatcacatgggngttttaaggcgggatacttgaggctccccacaacaggcaacagggaggtgggccatggaagtttttanaccgtaccacagttttatggcccatggattaaaa

SEQ ID NO: 302764 - DNA, 461 bp, Homo Sapiens
  misc_feature (55)..(56): n is a, c, g, or t
  misc_feature (424)..(424): n is a, c, g, or t
  misc_feature (431)..(431): n is a, c, g, or t
ctttctggcccccttttctctcccttctttagaagcaaaaggtctgagttatttnngtgaaaacaaactttttacatgatttaagatcaaccatcactaccacacaaacaaaaacccaggacagaaaggggcctaaaacacagcaaagggtctattttcctgccaccagtcactcgcttgtggcatttagttaggaactgactgtgtgtgtgagtgggtgtgctttttcccctttatttctctgggcacacaggaaacagagccctagctagaaaccagccagacacgctgcccagcatcctagtgagcccgtcagtccacctgtggggccagtcgcctgcgttgattgaggggcctgcagtgtgcatgcactgggacaaggaccatcgtgggacagggaaagaagggaaaaaaccggggtgtntagtttncaaacatttgtacagttttgattaggaatt

SEQ ID NO: 302765 - DNA, 106 bp, Homo Sapiens
  misc_feature (43)..(43): n is a, c, g, or t
  misc_feature (71)..(71): n is a, c, g, or t
ggcccagccaatatcagctattataatgagccaacaaacattnaatcgcaaatcttagccaacatcttcgncttttccaaattttggggactttttgtttgaactg

SEQ ID NO: 302766 - DNA, 442 bp, Homo Sapiens
  misc_feature (41)..(43): n is a, c, g, or t
  misc_feature (252)..(252): n is a, c, g, or t
  misc_feature (278)..(278): n is a, c, g, or t
  misc_feature (366)..(366): n is a, c, g, or t
gggtgactgctcagggtggtttccttaacagaagtcttgtnnnctactcactgcttctgtttctttttccaatttctgccaacttctgcaatttgctgcttgtgttatcagttctttccctcctcttaagtcttcctaattttcgtattttctgtagctccacctatgttcctctgttgtgtgagaaatggcagtcctatgaaatacattggtcagcttgtcaaactaaaaggaagagacagtgtgattggnctgacaatcatagtattttatttgancttattattaaaacaaggcaaaaaactctgagggatactttccctgattataaaaggtaacacccattcattgtgttaaatttagggngatacaggaaaagggggaatccacatgtaaatgatggggtaccttatggtatgttcccgtatttaaaaatattcct

SEQ ID NO: 302767 - DNA, 393 bp, Homo Sapiens
  misc_feature (354)..(354): n is a, c, g, or t
ttttctccataaatttttatttgaaagctttcaagcatatagaaaagtgagaagaagtgtacaattgcccaggtacctgtacctaaattcaataactgctaatgctttttcctcgtttgctttctctctaggagagggattctttaattcaatctgtgaatgtttctcaagaaggaattaaggataaagtcccaagtttctatcttgaatgactagggtgtttcaagagatgggcactacctaattaagttggggagagactagggggtgggggcaagttgggttttattttgggtagggggaataggttgttgtaggaatccggtaattcactttacgggtttttaaatttgngggtacttcaggtacatccccgtggggggaaattaaata

SEQ ID NO: 302768 - DNA, 383 bp, Homo Sapiens
  misc_feature (20)..(20): n is a, c, g, or t
  misc_feature (35)..(35): n is a, c, g, or t
  misc_feature (123)..(123): n is a, c, g, or t
  misc_feature (138)..(138): n is a, c, g, or t
  misc_feature (181)..(181): n is a, c, g, or t
  misc_feature (254)..(254): n is a, c, g, or t
  misc_feature (296)..(296): n is a, c, g, or t
  misc_feature (350)..(350): n is a, c, g, or t
  misc_feature (360)..(360): n is a, c, g, or t
cgcgctgggattatgccttntctttaaaattcttngaaatagctcgtttcactgtgtatttttatctgctcttggtacacaagtaaaatactacagaaattaatttctttcagcattgaagtntttgctttcctcttnatttcaactaagttgtaataatttctggtatcctgggtaattnataactaagataatatctacagagtggatgccattaattctcttagcagtcacgtgcagaagggaagggtttnggccaacctagggttgtgctgtctctgtcgactagtctaggnaagcacccagggtgtcaggtattttggtcccttccaccacatcttcagcaaatntaaaacaagnccacagttaatgggccctgttgg

SEQ ID NO: 302769 - DNA, 419 bp, Homo Sapiens
  misc_feature (244)..(244): n is a, c, g, or t
atgtactggtattgccatttgtagcagatgctgattttaagttaaacaatacatgtcatgctataggtcaaatattggggctctggggtgtgtaaactgggctcaagtctgggaaattgattgaggggccgtgattctgttttaataattcaaattagtattttgtccatttgacctagaagttttctgcttgtataaattaagtgggaatgcagtaggcttcctatcagtttcacttccgggnccaccataattaattagcccaatgcccaagttctacacaagtcagactattctgattgctgctttgcttctgctgtcccattacagtagctacgcccaccttacctttgatagttgagtgcccgtcacttgggcccctgctaccctccggatcccagttattcccatttggtatt

SEQ ID NO: 302770 - DNA, 110 bp, Homo Sapiens
  misc_feature (60)..(60): n is a, c, g, or t
  misc_feature (71)..(71): n is a, c, g, or t
  misc_feature (93)..(93): n is a, c, g, or t
ggtgtaggaatcctcaaggttaaaggttatggggaatgtggacaatttaagggcatggcntaaatttaggnctgtggaacacggttggtggtnggccgtagggtaggggg

SEQ ID NO: 302771 - DNA, 217 bp, Homo Sapiens
  misc_feature (122)..(122): n is a, c, g, or t
  misc_feature (160)..(160): n is a, c, g, or t
  misc_feature (170)..(170): n is a, c, g, or t
acgacaaatatgacaaatattaatgggatttgtgatttatgccagagaaaataaaaatttgtgggattaaactgaaaaaccaacaagggctgtcaataaaagtgggcctaatatcctctgantttctggaaaacttgcccatctttgtatacttccgganactctccatnggggtgtgcacggtgggggtcatctgttggggattcgttggctatac

SEQ ID NO: 302772 - DNA, 191 bp, Homo Sapiens
catgagttacagaaatccaagtatgtttctcaattcaataaaattccaagtagaatttcttaccgaactttagcctttctactaaaagggaaattggagagaatccaaattcaatatttttatgaactcaaagatgtgaatctacattataataaatcatatataagaacaatattatatggttaaatgtc

SEQ ID NO: 302773 - DNA, 466 bp, Homo Sapiens
  misc_feature (391)..(391): n is a, c, g, or t
catttgttagagaagtataactgataattactgagaaataacattgttgttgacattggtctggggtttcttccatgaacataggagagtggtagggtggcccttggggaggataacccattcctgggaatacccacatccaggcagcgtggctgggcatggaggatccagggtcctgcctggagaagaacttggaatgcccaggttgagggtcctcaaactactttgtctcacctgggagaggagctgcacagcttcctgagaggcaaagggctgtcttcccagttctggtgtctgagggctcttagagatggcatgcttggtccaggggctaaccttgctcaaaaaagtttcaaaagtacaacctgtcctacagcaacagaccagtctntggggttccagagttgcagtttttcagggcctgctgaacaactccccggctgatctcagatgcagagaaggggac

SEQ ID NO: 302774 - DNA, 389 bp, Homo Sapiens
  misc_feature (339)..(339): n is a, c, g, or t
  misc_feature (349)..(349): n is a, c, g, or t
  misc_feature (359)..(359): n is a, c, g, or t
  misc_feature (368)..(368): n is a, c, g, or t
tgggctcaaacaatcctcacacctttcataccttaggcccctgagtagctgggtgggactacaggcatgcatcaccatgcttggctaatttttaattttgtataggtggggtcttgccatttgcccaggctggtgtcaaactcctcaagtaatccttctgcctcggcctcctaaagtgccagggattataggcctgagccactacacacagcccggagtttttaaaaaatactcaattaaaatgcttcatttaagtgtatgtctctaaggaaaatttaataattgattaaatattgttgaataggacttaaaggcacaacatcccaggcacatggattnaggccaatantgccaggctnggttccccncattccccaatgttttctagg

SEQ ID NO: 302775 - DNA, 259 bp, Homo Sapiens
  misc_feature (190)..(190): n is a, c, g, or t
  misc_feature (248)..(248): n is a, c, g, or t
aacagtaagaagcttcctcaacttgataaacaacatatatcaaaaacctacaactatcatcataattgatggtcagaaattaaagctttcccactaagatcaggaagcgggcaaagatgttccctctcatcatccttttccatcatatcatactgggaagtcctaggctaattcaataaggaaaaggganataaaaaggtatacaggattgggaaggcataaaataaaactggtctttgttgacaggncaacatggtgg

SEQ ID NO: 302776 - DNA, 502 bp, Homo Sapiens
  misc_feature (181)..(181): n is a, c, g, or t
  misc_feature (311)..(311): n is a, c, g, or t
  misc_feature (399)..(399): n is a, c, g, or t
  misc_feature (444)..(444): n is a, c, g, or t
  misc_feature (469)..(469): n is a, c, g, or t
  misc_feature (475)..(475): n is a, c, g, or t
  misc_feature (484)..(484): n is a, c, g, or t
atattaatttcacaactgtttatttccaagatacttctttatagcaacttgcatttttaaaattagtacaataacctctaaaatatttgaagattatgacatataatatgatgaggattacatatgaaactattataagtagtagtaattattattccatataatactaattatacttggncattttttccccctgaattgtttccccaggggattctttctgcttgttaagtttgctgtgtatttttcatgttgctcttttccttaaatatttgctgtttctcatttgtctacttgcaaatgaggagccnagggagtcaacaaactttttatataaaggggtagggctttaagggcccaaacacagtatccggtccatatattggtttggggggttcnaccaaccccttttaaaaatggtaaaatcccaccagggataggggnggtgggagggcccgtagggtaggcnggtttncccaccccnttaaatttccccgggatc

SEQ ID NO: 302777 - DNA, 417 bp, Homo Sapiens
  misc_feature (404)..(404): n is a, c, g, or t
cctgccatatgactcagtagtgacccctattcccatcactcagcccccccttcccacacccccactatgccccagtgcaaagaaatcagctttgttccttcactggaaaagatgcacgtttctctgactactgtagccatgctgaaactatctcccagggaacaactttttatctcattcatgtcaaaaaagaagagtcagctagaggggatctgtggcccaaaactcagagttttaaaccagagctcagaaagtatatccctgccaccagcttctacaaagacaaaaaggggaacaggggacttgaggggttcggtgatgggaaggaagctaggccactgatgagtatcttccttttccctttttcatctgtaaaaacataacctcatagggggagttacggnggtttgaaagcat

SEQ ID NO: 302778 - DNA, 268 bp, Homo Sapiens
  misc_feature (27)..(27): n is a, c, g, or t
  misc_feature (31)..(31): n is a, c, g, or t
  misc_feature (80)..(80): n is a, c, g, or t
  misc_feature (100)..(100): n is a, c, g, or t
  misc_feature (108)..(108): n is a, c, g, or t
  misc_feature (115)..(209): n is a, c, g, or t
cttggctcactacagcctctgcctccngggngcaggtgattcgccggcctcagaccactgagtagctcggatcaccaggngtgcgccaccacacccggcnaatttgtnatctttnnnnnnnnnnnnnnnnnnnnnnnnnnnnnnnnnnnnnnnnnnnnnnnnnnnnnnnnnnnnnnnnnnnnnnnnnnnnnnnnnnnnnnnnnnnnnnngattataagtgtgagccactgcacccagcccaatgctaatcttttcaaaattaaaggtt

SEQ ID NO: 302779 - DNA, 494 bp, Homo Sapiens
  misc_feature (407)..(407): n is a, c, g, or t
  misc_feature (449)..(449): n is a, c, g, or t
tttcggcacagaaaaagattgatgaccaaataaattgcccagagagaaatcaggcacagtgaatacattcccaagtagtcctgcctctcaccacatcaatcggagaattaggccagatcaaatcaacattgctgtatggaaaaatacagtctcatcctgagaggcctgcaactgcgaatgtcatggtgcctccctctttgccctttgagatgtcagtgaataaagaaccagaattttcccagtctgttttaggagaaggccacaagtgttctaggacaataacctgctagatcccacagccaaccttaatagtcacttttgaaaagtcctgggaaatacaacaatttcagcgatctctatgttcatttaccatagctatactggaatgagatgtaccgatcccaggntcactactgttaaaacctgacagatgcttcagagttaatacnttcttccttagttatgtagtctggttttataacatttaatgcgtt

SEQ ID NO: 302780 - DNA, 301 bp, Homo Sapiens
  misc_feature (70)..(70): n is a, c, g, or t
  misc_feature (76)..(76): n is a, c, g, or t
  misc_feature (180)..(180): n is a, c, g, or t
  misc_feature (262)..(262): n is a, c, g, or t
aaaaaggttgagtttctgatcctcaaggtaaagtcgatattaatagttaactaaagtttcctacattctngccccnatctgcctgtctgcatatccacattcataccattcccttccaacctccatgcattctgttttctatcatcatggtcctagaccgagaatttccttttttcattngacaaatatttttaggtctctgtttcagtcagagctttccctagtttcccccaggcaaactctgtattttgttttctgtgtnctagtgtttcattggtttatagcaattattgtattaaat

SEQ ID NO: 302781 - DNA, 335 bp, Homo Sapiens
  misc_feature (107)..(107): n is a, c, g, or t
  misc_feature (206)..(206): n is a, c, g, or t
  misc_feature (280)..(280): n is a, c, g, or t
  misc_feature (288)..(288): n is a, c, g, or t
  misc_feature (305)..(305): n is a, c, g, or t
  misc_feature (315)..(315): n is a, c, g, or t
  misc_feature (324)..(324): n is a, c, g, or t
tccacacattctatcttaggccaagttagtcttggtctagttgttttaggtcattgcatttagccagagtgtgagtgagcactgtagtcacctaatcgacagttttnggtagaagttcctaacatgatggttgcccacatcaccttaccccctttgaatcaatgactgtattctcagctttttccaaataggaattctgagatttngctttaattggccttgcccacttgtgttctggtaattagcaattgtaaacttaagttatatttggttaaagaancccatttncaggccaggcatggttngctcacaccnctaaccccngggatttttgg

SEQ ID NO: 302782 - DNA, 397 bp, Homo Sapiens
ttcctttgttaaaaggccaacaaccccctaagtgagatgttcttggaaagaccccttgacacttgaaaggtgagaaatccatttaaaccatgtgatgccttccactgctctactgctgggttctgcttgttttaatattagtgatagatgctctggctggtgtattcagtaattggaagtgaactatataatataaatgacatttcatggcatatgtgagggcacagtggatgacacttgatttcagtgttgcctgcctttaggtttaaagttagaaaccataatggaatttaattatcagcatatattcaaagattagttcaatgcgtttgtaatacccttagttgttaggtaactgtttgattattggggcatgatgctgagtgtgtgtgattta

SEQ ID NO: 302783 - DNA, 373 bp, Homo Sapiens
  misc_feature (142)..(169): n is a, c, g, or t
  misc_feature (190)..(190): n is a, c, g, or t
  misc_feature (235)..(235): n is a, c, g, or t
  misc_feature (243)..(243): n is a, c, g, or t
  misc_feature (320)..(320): n is a, c, g, or t
  misc_feature (333)..(333): n is a, c, g, or t
  misc_feature (347)..(347): n is a, c, g, or t
ggttttttgttgttgcagagttttaagtcctaaatcttatctaagtgatttaaagtgatttttcatgattgattttatttcttgagaagagaaaaatctttccaacaaaacataatggaatttcatgactttgttttgcttnnnnnnnnnnnnnnnnnnnnnnnnnnnngagacagggtcttgctctgtngcccaggctggagtgcatggtgtcatcatagttcattgcaacctncacctccngggctcaggcagtcctcccacctcagcctccccagtagtctgggaaacaggtgcacaccaccacacccagctagganttttgtggacaantgttttaacatttntatcccgttctaggcctagatagctt

SEQ ID NO: 302784 - DNA, 167 bp, Homo Sapiens
  misc_feature (84)..(84): n is a, c, g, or t
  misc_feature (154)..(154): n is a, c, g, or t
cgcggcctgaacttgttaactgtgttcacagggaggcattattgacagtaggacaaaaggtgggaaggcaacctatgtgtctgnggggtaaatgaaatggggttctatggcatacagtgggagtattatttcaggccttaaaaggggagggaanttttgatcatagg

SEQ ID NO: 302785 - DNA, 439 bp, Homo Sapiens
  misc_feature (352)..(360): n is a, c, g, or t
aattcagtggtgaaaacccctgcttcaatccccacagctctccaaaggggtaatacaataaagatgatggctaggtggatctgattttatccaacacaaccttgcctttccaaactgctgtgggtgccctctgtgagttgtgcctcactggtgttgagtttagaatcatctgggcaactatcatacctttttgaagtcgcacgtgcacttgggagaatatagatactacatacaattggaagaactttttaggaaatatgggtagggtgaatatattttgggggtcattttaggatttttgggttatttaccaacatcattggcataaggacacaaaaacatatttaagtannnnnnnnnataggtaatatttaaatccatattattatggaattttaaatataatttattgttccaaagggaggcctttaaaacagtt

SEQ ID NO: 302786 - DNA, 270 bp, Homo Sapiens
tggaatacagaaatgttggctccttctcctgggacccatcaaactaatgtgctcctcacaatctaataagctcctgtgtccgctttttcatatatttcttcctccaaaagagtaacttgcagagctaagactctaacccaagcatacaggattctaaagcttttaccaccattgcctcccgggcaggattagattcatgggccagcaacccgtgcagtcacatagggccctgcacttagaagggccccagatttagaagtggcctgctct

SEQ ID NO: 302787 - DNA, 389 bp, Homo Sapiens
  misc_feature (78)..(267): n is a, c, g, or t
  misc_feature (285)..(299): n is a, c, g, or t
  misc_feature (351)..(351): n is a, c, g, or t
  misc_feature (375)..(375): n is a, c, g, or t
agccgcagattgagaaccaccgattaaccagtgtgtcaagggatggcactgtgatatgctgagcataaaaatattgcnnnnnnnnnnnnnnnnnnnnnnnnnnnnnnnnnnnnnnnnnnnnnnnnnnnnnnnnnnnnnnnnnnnnnnnnnnnnnnnnnnnnnnnnnnnnnnnnnnnnnnnnnnnnnnnnnnnnnnnnnnnnnnnnnnnnnnnnnnnnnnnnnnnnnnnnnnnnnnnnnnnnnnnnnnnnnnnnnnnnnnnnnnnnnncatgtatatatatatatnnnnnnnnnnnnnnnttgcacaaggaacagccacaacatctgtggcttcacagaacatcagcatgtnggtctaactttcaagtgttgttantattgcgggttttg

SEQ ID NO: 302788 - DNA, 138 bp, Homo Sapiens
  misc_feature (82)..(82): n is a, c, g, or t
  misc_feature (104)..(104): n is a, c, g, or t
  misc_feature (110)..(110): n is a, c, g, or t
catgccgggctgaaaaataaccctttagatatctacagctttaaactgtgtgcagtcatgaaaaggcagacattgggaagtnattgggcatttaaataaattgncagganaaattatacagtaaatacattacaatca

SEQ ID NO: 302789 - DNA, 302 bp, Homo Sapiens
  misc_feature (119)..(119): n is a, c, g, or t
  misc_feature (289)..(289): n is a, c, g, or t
aacatctgaaagactgcttaaagtcaaattgtgaagaacttataatgttggaaagattttatacttcattattacaaagtagtgtgattatcaaaagggagtggttcatacttaaaagnccaatgcaatattctagacaagagactcaagtgaagaagcatgaggaacagtaatcaaggtgcaaatataacttattttttagtttgtaaaatatgcaaagagattaaagactagataagccattcactattacagtttccctctttacggccttaaataggcactattngaaagtaataaaa

SEQ ID NO: 302790 - DNA, 177 bp, Homo Sapiens
  misc_feature (61)..(61): n is a, c, g, or t
  misc_feature (136)..(136): n is a, c, g, or t
  misc_feature (146)..(146): n is a, c, g, or t
  misc_feature (153)..(153): n is a, c, g, or t
aagtgtaacttttaaagtttcctctcaccttgggattccagggcctctcttttggccgggntgctgaaacaatttagggagaatttctgaaaattttcaaaggattcataaatgggaactttggtttccccccccnaaatcaaggncaaaggntcacattgaccacaggtttttctt

SEQ ID NO: 302791 - DNA, 358 bp, Homo Sapiens
  misc_feature (263)..(263): n is a, c, g, or t
agttacaggtatgctgtaagctaaggcagatagttaaagatagtctatttttatcaccaaaaacacactacagaagttcttcaggcttaaaataaactgagaatcgagtgacaccagtgagaaacaatttctcaaagttccagttgctatttcaatgtctccatgccttttttgtcctctactcaactaggctctgaagctagaaacaaacagcaccgtgctgttctggggggcagtgaggagaaatggattttttcagatantcaaagatcttttgtttgaatgaacaaatcgactggactgattgagtgggtctaaatatagggcacctgactgttgaatattaggcaacttttct

SEQ ID NO: 302792 - DNA, 436 bp, Homo Sapiens
  misc_feature (335)..(335): n is a, c, g, or t
  misc_feature (341)..(341): n is a, c, g, or t
  misc_feature (372)..(372): n is a, c, g, or t
  misc_feature (393)..(393): n is a, c, g, or t
  misc_feature (402)..(402): n is a, c, g, or t
  misc_feature (409)..(409): n is a, c, g, or t
gcctgactaaaggtttatcaattttactaatatctttaatgaaaatgctacatgctttgtatgatttctactttttctattcttttatacttgtggaagtatgttttatggcccagaatgtggtctaccttggggaatatttcatgtgagctggagaatatgtaacctgctcttgggatgaagtagtctctaggatgtcaattaggattcatgtaattgatgggttctgttaagtttaactatatccttatgattttatgcctgctggaatctgttcatttctgagagggggtgttgaagcctccacatggttataattgattcatctacttccncttgcnggttatattttggatggctttgttggttacnccaaatacaccttaaaggacngttgtgtcntctgggnccgggcgcgtgggctcacggcccgtaa

SEQ ID NO: 302793 - DNA, 332 bp, Homo Sapiens
  misc_feature (228)..(228): n is a, c, g, or t
  misc_feature (275)..(275): n is a, c, g, or t
  misc_feature (322)..(322): n is a, c, g, or t
attattagcaattgaaaaatccacacagaatgtttataaataatacacctggctcttgatatcaggaaaaaatcttcatttcaccttaaaaccctggcttcttggatgcaagctgaaggccaaaaccaagataacagatgctgatatacgccaagaacaaaaagacctgaaaggaattcccttcccacagttttatgggtataaagctctcatttcgtacaccatgantaaaagtgattaatatctgacatataacacaaataagttttaaaganacaatttattgtaggttgtaacagctaaaactaaaattatatatttnctaaatagga

SEQ ID NO: 302794 - DNA, 436 bp, Homo Sapiens
  misc_feature (67)..(67): n is a, c, g, or t
gatgattcccatggacttctacggatatattaatgctgttttggaggaccctctgtgtgccgcagcncattgacacctaatgttggtggatgcgttctggtgtgtatgtgtttccatgaaatttacaaactaacacacagcattctaacatgttcacttaggaactttcaaaactttgccctacaagacaacattctcaatagagaaaatttagaaaaatagcagcacaaaagaggaggcaaaagtcacttatattattaatataatactactctagagctaaccacaattgaattttattttgcctcagtatttttttcccatggcacattcctagggcatgctatcttaaaggcaacagtttgtgtagttaatctgttgctctccccacagttatattttaactaggggtactgattacagaacgttttggcac

SEQ ID NO: 302795 - DNA, 361 bp, Homo Sapiens
  misc_feature (340)..(340): n is a, c, g, or t
ggagtgcacaggctccatgccagacgcttccagaatcggcagagctggcctctggggaagaggagccaggggttcctcctgcaaaattaaaaaggttccaaaagtctttgtaattagaaaggacaaccatgaggacactggaggtcttcctgcccagtgtgggctgagccagccccggcagtgagcctcagagccccaggcctcctctgtccggcttccagggccccacacaggttgtcattggggagagactgttctgctgagagcccctcacccaggtttttgcctggtagccccagcccttcccctactctctgtgggctctgggaccccagttctncgtccctggttctcatcctca

SEQ ID NO: 302796 - DNA, 475 bp, Homo Sapiens
  misc_feature (337)..(337): n is a, c, g, or t
  misc_feature (342)..(342): n is a, c, g, or t
  misc_feature (416)..(416): n is a, c, g, or t
  misc_feature (432)..(432): n is a, c, g, or t
  misc_feature (455)..(455): n is a, c, g, or t
  misc_feature (460)..(460): n is a, c, g, or t
gccactgctttcacagagaagggcactgtaagtcacatgccaacaggaagggatgtataattttctccaggaaagaggggtgaaaaatcggatacaaaattacagtcaaccacatcttcctttctggatgaaactttacatgtgataaatatacactcttacagaattagatacaatttaccattttatattggcttttaagatatgcattttctcccaagttaaggtctgaaatcgtgatgcatcttacggtagatggggtcttataatcactgcaagccagggcagctgttgtgatgtcattgcctaggcatgagagaacttggctgctagtccngggtngtagggttggacacctggcaaccattgacattttcagggtccattttgaggaagggattatggagttcccgacntttcctttttggaaanttttctgtttgacaacccccttngttangttccaggccttccc

SEQ ID NO: 302797 - DNA, 405 bp, Homo Sapiens
atctttctgataaaggtactttttaaaaacttacattagcagagttctttgtgtagtttattaggcactttcatgtttatgatagcatttgatcacatgtaaacttggtaacattgacaaaatcactttcattttcttttacagatatggaaattgatctcagagaggctgagatctgctcagggtcagcaagctctcaaaactgttactagtactttttcttcaaaatatgtgtgtcgagcgtttttggctgagcctgggatggattgccattttgtatgtgactttttgaagtctggacagcagaagaacgtgtttgggtggttgcagtcagtaactttttctattcaactttatttctgaaattaaggccagcaagtactgctgactgggtcttatccattt

SEQ ID NO: 302798 - DNA, 383 bp, Homo Sapiens
  misc_feature (333)..(333): n is a, c, g, or t
  misc_feature (349)..(349): n is a, c, g, or t
tttgatctcgtatcctacaaatttactggatttgtttgtcagttctattagatttttggtggagtcttaaggtttttccaaatatgagatcatatcacctgcaaacaaggataatttgacgtcttcctttccaattttgatgtcctttatctttttgtcttgattgctctagctaagacttccaatactatgttaaataacagtggtaaaactgggcatccttgtcatcttccagatttaagataaaaggcttttagtttttccttatacagtacaatactagctgtgagtctgtcatatatgggcttttattaccttgagggtatgtttctnctataccccagttttntttttgttatgaaaatgtaattttattttatggt

SEQ ID NO: 302799 - DNA, 265 bp, Homo Sapiens
  misc_feature (211)..(211): n is a, c, g, or t
  misc_feature (224)..(224): n is a, c, g, or t
  misc_feature (250)..(250): n is a, c, g, or t
tgaagagacaatttctattttatgcaacatgttcccaggaataaaaatacaacaggaaaatctagtcagtttatatatgaagatgatacaatcttaagaaagaaaaatcataagatattttaacaacaaatttaactatgtacttttaaaatcatgaccaaattgttaaatattaatatagacaagctattaatgtaacatatcacatgantaaattgaaaaangcaattttgcaattttgcccaaaaantactttttgctgtaa

SEQ ID NO: 302800 - DNA, 361 bp, Homo Sapiens
  misc_feature (65)..(65): n is a, c, g, or t
  misc_feature (136)..(136): n is a, c, g, or t
  misc_feature (196)..(196): n is a, c, g, or t
  misc_feature (210)..(210): n is a, c, g, or t
  misc_feature (218)..(218): n is a, c, g, or t
  misc_feature (226)..(226): n is a, c, g, or t
  misc_feature (228)..(228): n is a, c, g, or t
  misc_feature (248)..(249): n is a, c, g, or t
  misc_feature (254)..(254): n is a, c, g, or t
  misc_feature (273)..(273): n is a, c, g, or t
  misc_feature (338)..(338): n is a, c, g, or t
ctttatatattcactatgctgatttcgaatatttttcatgtgatgattcacgatggtggtttttntaataatgggtacttcttactgtagtgtcactgcattaatagattcaaataagcacaaattaagacaccgngacttgagacaatagcagaatagttataacactttttaaaatgtgaaggaactattaaangtttgtataagggngaagaaanatcactgnangagtaactttggcacaggannagcantcttttccttctgaaaaantagctagtattcaatttgcctttgccttagtgtgagcagtgtttttgtatggcacttaaaacatntaaaagtgtatgacttgggaaat

SEQ ID NO: 302801 - DNA, 262 bp, Homo Sapiens
  misc_feature (206)..(206): n is a, c, g, or t
tcacacatagagaccctcagctcaaataagaagaaaatcacttaggcaattgtgaaaaatgaatactagtgactgtcaggccgtgtcgctcttatccttgagaaacgccctcctgccttacctggtattggtttggttgtagggtggagatgaggcctgttgtccctccaacataactcacaaagtgggcccatgtggggcccggngccaagagttttgtctccctttaataaggcacagacattcttttcattcctaaggg

SEQ ID NO: 302802 - DNA, 386 bp, Homo Sapiens
  misc_feature (84)..(93): n is a, c, g, or t
tgatacctgactctcatttatgaaagaatctgtgtatgaaatagcccaaattagtatcagcctttggatagtttaaaaaatgannnnnnnnnnggtatgcttccctatcatctccatctgccccagaactcaaggtctgtccatgctggtgacttagagtagtgggatttaaaccagaggatgcacacttggaggcacttgaagatgtttcaagggacatgcaggcattgaatatttaaaggaaattaattgccgattcttaggatcttgagtgttaatccagttctaacactgaccgtcctgaggaaaatgcctatggcccagggtgacctgctggttttccttttcacaccttctcttttcatggatttaccctttcttttaaa

SEQ ID NO: 302803 - DNA, 375 bp, Homo Sapiens
gaagctgagtcaatcagggacttcagagctctttgagtcccataccctgcctcccaacccaccctagcaggtgattatccccttgcgatatcaagagcaggtggtactttctctattttacagtgaggaaaatgcaagcccagctatacacagtgagtaacagcagccaggactagcacctgtctcctgatgcccagcctgcttctctatcacagcatcgtcccagcctgaggttggcaggtagttggcactaacgtgtgtttgttgactgactagctgactggccagttctggggctttgtggtgaggagggccatggcttcgcatgggaaggcagaggctgggcttcaggaaaggctcactggtttagggcgc

SEQ ID NO: 302804 - DNA, 374 bp, Homo Sapiens
  misc_feature (44)..(44): n is a, c, g, or t
  misc_feature (315)..(315): n is a, c, g, or t
  misc_feature (333)..(333): n is a, c, g, or t
  misc_feature (340)..(340): n is a, c, g, or t
  misc_feature (352)..(352): n is a, c, g, or t
tggggaggagtccctggcagccacagccaggcactggtgcttantcttgttcagcacacactgggtctctctccctagttccaggccccttgccctcgcttctctactcatctgggatagaaatgcacctccaggcctctgaagagaaactaccttttccctctttcagccaaaagggctcaagccagtcactcgctttgtatgtcctagaagatgagcatgcttccctctggctctctatagcagtgctctaatgggacaaagtcactgtgtgctcttgctttctctcctggtctttgtgtcgtgatagtcccnctctctagaaccctcttnctccttnctcattcctctngagctaatgtatttcgtttctt

SEQ ID NO: 302805 - DNA, 464 bp, Homo Sapiens
  misc_feature (97)..(115): n is a, c, g, or t
  misc_feature (324)..(324): n is a, c, g, or t
  misc_feature (365)..(365): n is a, c, g, or t
  misc_feature (405)..(414): n is a, c, g, or t
  misc_feature (434)..(434): n is a, c, g, or t
  misc_feature (442)..(442): n is a, c, g, or t
  misc_feature (447)..(447): n is a, c, g, or t
atgataataatgaatgagaaaagaaggatgctgaaaactatattgtgatcccatttttgtaaaacaagcaatgtgaagaaacttccaaccctgatannnnnnnnnnnnnnnnnnnaaaatctgtgtaagattatgtgggtaaagagaagaatatggaagaaaccacactagatggtttttgtagatttcctgagtcagtagcagggcaggaggaagtttagataccgagttgggaagaagtagagtgcagaaaagagatattcttaagtaaaaccacacatatgagatctcatttgtgtaaaatgatatttttgtgtattcatnaaaaaaattaatgggaaataccacctggcaggccttttccngggtggaacaaaataaaaatcctactccttttcagttccnnnnnnnnnnagaggagggtgtgggggggnttgtcccnatgtnctctgatgtttggaact

SEQ ID NO: 302806 - DNA, 354 bp, Homo Sapiens
  misc_feature (337)..(337): n is a, c, g, or t
tagattacacatattaggaaataatggatttgtattccataggtatgcttgatctttataaagttccctgtctctggaaaaactaaaataaggcaaaacaatcttcttagtagagttatttttacaagaaagttgcaagccagttttagttcatcgattggataatttttcctgcttgctggaggtatttcagtattggtaatacctgaactatgagatgcatgaatgatgcattttaggaatttgtttctgtgtccataccaggcataatgaattaagtttatctgttaaaaatacaggatttttgctcaatatacagttgtagaagaactcattntccaaattttttaagac

SEQ ID NO: 302807 - DNA, 448 bp, Homo Sapiens
  misc_feature (360)..(360): n is a, c, g, or t
  misc_feature (365)..(397): n is a, c, g, or t
  misc_feature (412)..(412): n is a, c, g, or t
  misc_feature (417)..(417): n is a, c, g, or t
  misc_feature (430)..(430): n is a, c, g, or t
agaggagtccctcctcctcaatttttttggagtagtttctgtaggaatagtacctgctcgtctttgtacatttccactgatcattttactgtctccatagttttgtcttttccaaaatgtcatatagttgcaatcatatagtatgtagccttttcagactgccttatttcgtttagaaatatgcaattaagtttcttctatgtctttttgtggcttaatagctcctttctttgtagcactgaatagtattccattgtatggatgtaccacagtttgtttatccattcacctgttgaaagatctcttggttgcttccaagtctttgcaattacaaataaagctgctctaagcattcgtgtngcagnnnnnnnnnnnnnnnnnnnnnnnnnnnnnnnnngagacagagtctttnactcngtccacctagggngggagtgcaagggtgtga

SEQ ID NO: 302808 - DNA, 436 bp, Homo Sapiens
  misc_feature (215)..(215): n is a, c, g, or t
  misc_feature (308)..(308): n is a, c, g, or t
  misc_feature (313)..(313): n is a, c, g, or t
  misc_feature (358)..(358): n is a, c, g, or t
  misc_feature (367)..(367): n is a, c, g, or t
tgagccaggagccccaaccagtgaatctgggtttctctcttaacattccgcctagtaggtgtgactttggctatctggagaaatggccccccaggcttcccacccaccaccagcccatcccagtgttctgacagtgcctgctgttggagtggcctccttggggctggcctgcatctgtggagtggtggccagttgtagggtctagccctacgggntttagtgggtgttctccccatgtgcggagatgagagattgtaatataaagcacaagacaaagagataaagaaaaaacacctggggccggggtnaccantaccatcaagacgcggagaccagttagtgggcccttgaacggctnggggttcantgatatttatttgcatacaagacaagggggggcagggttaagggagggtgaatttttcttaagtgattt

SEQ ID NO: 302809 - DNA, 467 bp, Homo Sapiens
  misc_feature (340)..(340): n is a, c, g, or t
  misc_feature (390)..(390): n is a, c, g, or t
  misc_feature (415)..(415): n is a, c, g, or t
  misc_feature (426)..(426): n is a, c, g, or t
aacattctgaaggatttctttgaagaattttaacaataaatgaacatggttttaccagtacatcctgaagacaaagtacaatcaaatcactggctaccaagagttggaagtgagagcagaagcagactgatcaagaacaaaggtcatggcaacactttttttgggatacgcaaggcattttgctcgttgacttttgggagggccaatgaatgccaacatctgcttattgtaagagtattttaagaaagttagctaaagcttgagcagaaaaatgcctaggaaagcttcaccagagagtccttctccaccatgatagtgctcttgcttcattcttctcatncaaacaaggtcaattttggggatagtttttgatggcacttttttagggcntccaccctacagtcccgatttgggntccctctggantttttatttctttaatcttaaaacgtctattaagggtatcc

SEQ ID NO: 302810 - DNA, 446 bp, Homo Sapiens
  misc_feature (362)..(362): n is a, c, g, or t
  misc_feature (417)..(417): n is a, c, g, or t
tccctttatgtagcaggtaaacagactgcaggaaaatgtaaacagaatgctgtagggtggtgatttcagtcattgtttaactccttttccttctgggtggaactatttttcctggggcctggcaagtatttaccacttgttttgctaacatttagtttgcacagctaaaccaagatttttgcagaatctcagtgggcgggaattacattccctgtagcaatcaaatcatggagacatacgatgtctattcccgtgctccacacctgcttggttttgagatgggcagagtatctcccaacattttcaagctttcaactcagcttgaacatttcaacaaacttcagggaggcagagaggaactngccatattctatgggaagccttcagtttggccttctggggaaataccatgagctntcccccgggtagcctcctcctgcttaacg

SEQ ID NO: 302811 - DNA, 425 bp, Homo Sapiens
  misc_feature (92)..(92): n is a, c, g, or t
  misc_feature (228)..(341): n is a, c, g, or t
  misc_feature (389)..(389): n is a, c, g, or t
gtgtgcgttggaacatacgatgttttacatctccctcttgagccatcacaattcaaaggctatgagaaggcctggagtagagaaacccattnaggcttgatgttgcatgttctgtgctaatgtgaccctggaaccccctttcagcctcacctcttaatgtgccacagaacacacttgggggaagctgttaaacttcaaaacggtggctccaccacttattagcaatgnnnnnnnnnnnnnnnnnnnnnnnnnnnnnnnnnnnnnnnnnnnnnnnnnnnnnnnnnnnnnnnnnnnnnnnnnnnnnnnnnnnnnnnnnnnnnnnnnnnnnnnnnnnnnnnnnngtcgccctctgcctgtcagcagggtttgtcccagtggatcattccctncttcttgtttccttctattaactttctgtcttccct

SEQ ID NO: 302812 - DNA, 453 bp, Homo Sapiens
  misc_feature (355)..(355): n is a, c, g, or t
  misc_feature (395)..(395): n is a, c, g, or t
  misc_feature (400)..(400): n is a, c, g, or t
  misc_feature (414)..(414): n is a, c, g, or t
  misc_feature (429)..(429): n is a, c, g, or t
  misc_feature (437)..(437): n is a, c, g, or t
aggaataggtataatatggccactcatgcctatctacctgacttcttaacttcaagaagtgcttttgcagcttttgaccccttacagtatacctcatttgatatatactgtagcaacttagaattctttacacaaaataatgtatttgataatcaagccatatacagcatccacctgcaggctgcgcagacgaggagctgtgccaggtctagaaactcgatttgtatgagtttactcaggggtagggaagtaacacacaaagactaaatgcaaagagactagtgtataaaccagaatgccactctattaatttgtaatgagaattatttattttccataacaaaactttaaggantatgctattaacacacggcacgcacggcatacgggcatgnacttncccttcacccaagnaagggttcctggggnaggctggntattcaatggccacgg

SEQ ID NO: 302813 - DNA, 350 bp, Homo Sapiens
ggaagtgtagtctatagtagagtcttcaaacaagggtctacatactcctgggaatattaaagtttctaagggatatgcaggcataaatagctttaagggaatgcaaattcagatcccagtgcccatgtaaatcctttattaaaattgacctacataaaaacatatccatatcaagggatcatgccagttctttttccctgctgccttttggtaatcactggtctcccattttacaaaagaaacctatggcaagttgtgttttgcagaaatgaccccaacaatatttaaagtctcatacccttctcgaaccttgccactacccttattcaagatgtggagttacgtccctt

SEQ ID NO: 302814 - DNA, 475 bp, Homo Sapiens
  misc_feature (139)..(139): n is a, c, g, or t
  misc_feature (278)..(278): n is a, c, g, or t
  misc_feature (366)..(366): n is a, c, g, or t
  misc_feature (396)..(396): n is a, c, g, or t
  misc_feature (403)..(403): n is a, c, g, or t
  misc_feature (417)..(417): n is a, c, g, or t
  misc_feature (430)..(430): n is a, c, g, or t
  misc_feature (449)..(449): n is a, c, g, or t
  misc_feature (463)..(463): n is a, c, g, or t
attaaactcaggcgctttaaattttacactgaaatacgttgaaagctagcttagttgatctctgtcattaacagaaaccatctctgtttttgttattttcttggcttgatttaacgttcgttgctcgcaagaaacaganacccactcaaggtagttgaaggaaagggaggttttcattcaagggagttggagaatcggaaggcaagaatgagcctcaggcctctcatgggactggacccggccagtggaaagctgttgtctcacaccctgccccaccncacaatacatgtctcttttctgcctctttccttgcatgcttgtcattctcacttgctatgtatgccagctttccctgcagcttccatngcacgctgcgtttgtgggcccttttctggnctgttgntctttccagggtanaaactagattagncttttggggtttttaattncaaatgcttagggngtgaatttggtt

SEQ ID NO: 302815 - DNA, 455 bp, Homo Sapiens
  misc_feature (405)..(405): n is a, c, g, or t
aagtaggaaggcatatattttggtagtatttgagtccgcttcttagtctgggtaacataccttagggggatacagtggtgtggcaaggagtaggcaaactcacagaattaaaatatgcatcttggtgcatcaattttccacaatggtaaaataagatactattttttaatgtggaagccaatagataagagtttagaatatattgcatatttgacataattttttaaagtaaattacatgtagagggttatcctaaccatctcctcaaatcctctccttcgttcttagatacacattggaagaaatatttgagaaaacagatactgaagtttttatcttatgttggggacttctgcaatgtaaagtaggttctgttctcccagttttgtgcccaaggagagaatnggtgtccctacagtgacgtaggggctatggggtgcctccacacaaatatt

SEQ ID NO: 302816 - DNA, 510 bp, Homo Sapiens
  misc_feature (186)..(197): n is a, c, g, or t
  misc_feature (200)..(200): n is a, c, g, or t
  misc_feature (224)..(327): n is a, c, g, or t
  misc_feature (368)..(368): n is a, c, g, or t
  misc_feature (420)..(420): n is a, c, g, or t
  misc_feature (460)..(460): n is a, c, g, or t
caagttacaaagcagctgctcagtatgacccgttctgggagcagtggggagaggagtggtcatattgcacaggtttcattgtgttctcagtggctgtctgctgatttttactgtttccctttgactcatctatttaccttaactgtagtttctaagtttttttgaagtgttcattactaaggtaannnnnnnnnnnnctntttctttggaggggacagagtctnnnnnnnnnnnnnnnnnnnnnnnnnnnnnnnnnnnnnnnnnnnnnnnnnnnnnnnnnnnnnnnnnnnnnnnnnnnnnnnnnnnnnnnnnnnnnnnnnnnnnnnnagtaactgggcattacaggcgcctgccaccatgcccagctnaatttttgtacttttagtagagatggttttaccacattgggccagggtggtnttcaactcctgacctcaagtgatctgcccaccttggcctncccaaagtgctggggattacaggcatgagccactggtgcacggtctaact

SEQ ID NO: 302817 - DNA, 588 bp, Homo Sapiens
  misc_feature (348)..(348): n is a, c, g, or t
  misc_feature (494)..(494): n is a, c, g, or t
  misc_feature (544)..(544): n is a, c, g, or t
agagagctacccacacacgacccactggtgccttcagagccttagcctggagcgacagtgtaccgttgataatggaacgcactggccatgcagaactttatggctaggcggtcagataacactacgaggggcagcatggccaccaagtgtgccagggccaagtgttcaggctctcccagagcccagtggtgagccagaagggcattttgtacaaggataatggttactttttggccagagcatcacttggctccaaatcctgggttcccgtatcatattttcttgtcaggacttaccgcaagctatgtatggctccgcggtatgccacccatggaaagacacctcatngcaccattgacctgccaggtcacgtggcctgatggcagcgttcggcttcaacaaaagaatttcccagctgcaatgcctttcgcctgctctagggccaccccaaagctgggcagccttctaggtcagttggtaaattgggttagaancaagatgccccaaagtggctaaatttgcttggaattagggcttagttggnagggattcgtatacagtcattttttctacattttgaagggaaca

SEQ ID NO: 302818 - DNA, 368 bp, Homo Sapiens
  misc_feature (190)..(190): n is a, c, g, or t
  misc_feature (338)..(338): n is a, c, g, or t
ctcccaaatttcttatcaaaattaaaacctaatgaacaaatagaactttaaatacagaatgtgacaaactggaatgcaaaccctcacatctgtctctctcagattttatcaatttgcgatcttactctctccacgagtcacacagcaatcatcagattaaacagatggaccaggctttctggaataaganaacatgcttttgtattgcctctaccgaatttgtctcagctgaactctatatcttcgttgtagttacttggaggaagggcaaaatcaagattagaagcacaaacagcttgttttcttcatatcttgaagagaaagggagtatgagaganggtaataggagagacagtaaagtgggcagt

SEQ ID NO: 302819 - DNA, 366 bp, Homo Sapiens
  misc_feature (58)..(58): n is a, c, g, or t
  misc_feature (235)..(235): n is a, c, g, or t
  misc_feature (255)..(255): n is a, c, g, or t
  misc_feature (257)..(292): n is a, c, g, or t
  misc_feature (354)..(354): n is a, c, g, or t
ggcacgagcagctggatcacaggctctgtatctgtgtgggttcctttggggttcattngagacttcttcaaccaacctagtttctctgatctggtcagcctgggcatctgaggggcagggcagagaggcctgactgctcactggccattggtctctgaccagacttaggtcttcaggagtagaccgcagtttgtcactcttcaggagtgctgggatgaggccgaccagccttctnaggagaccttcttttctttntnnnnnnnnnnnnnnnnnnnnnnnnnnnnnnnnnnnnaaaacaataataggtaaagtatttaaggaatttctcagatgccttatggacctcttcaagantgtggttgagcc

SEQ ID NO: 302820 - DNA, 393 bp, Homo Sapiens
caccaacattttattgatttaatataccataataagttctaagttactgaagacaataggcataaatgacatcagtgagcttgttccctccccatgctccagtgctacaaggagcccatcaacattgctaaggcattttctaatataagcatgaggattgaggtgctcccagtctgctctgctcatactggctgtaaacctccccattgtccagaaacacaggcccacagaagagggggtcagggcaaaggtttaggagctcaaggtctatttcctgtcttctccgtataaagagtgttgcactcgtgtccttgtaaacccccgggggcaaggaaaataactcaaattataaaggggttcagggttataacaaatattttggcatatctacaa

SEQ ID NO: 302821 - DNA, 388 bp, Homo Sapiens
  misc_feature (175)..(307): n is a, c, g, or t
  misc_feature (343)..(343): n is a, c, g, or t
  misc_feature (373)..(373): n is a, c, g, or t
taatatgttaagtatgctttgaaaatgaaagaggaaagacaccccaagaagtcatgagcaggaaataaccaggaatttttacagacaagtaaacatagctaataaacataggaaaagatgatagtaattagggaaacccaaattaagacaatgagagctaattctttatccaagnnnnnnnnnnnnnnnnnnnnnnnnnnnnnnnnnnnnnnnnnnnnnnnnnnnnnnnnnnnnnnnnnnnnnnnnnnnnnnnnnnnnnnnnnnnnnnnnnnnnnnnnnnnnnnnnnnnnnnnnnnnnnnnnnnnnnagttgaacatggatacctttttcagtatctaggaanttcacttcagggaaatgcttacacataagnccccttgaggacaga

SEQ ID NO: 302822 - DNA, 434 bp, Homo Sapiens
  misc_feature (388)..(388): n is a, c, g, or t
  misc_feature (424)..(424): n is a, c, g, or t
tttattttgtgagtagaatgtttctctgaatgctggaaacaataaagccaaccacttgcctgtaattagcctggaccccataagtcacccagacataataccaagctctaaaattgccttcagagtaaggggccagcaccctggagttacaggcacttgcttttttggcaccagatttattgacattaatgatcccaatcccatatggagttccctggactgtttagataatgaatttgccttatgacagcagtgctccttctaatgaggaatgagtattttctataagtttttattttaatgtggtggctcttgtgatattgatcactggatcatgtgctgttcaagctcagctttaaattttctcgataacatggtttcgccaatnccattggggatgctggtttaaacaagggtgggattnctacagaact

SEQ ID NO: 302823 - DNA, 393 bp, Homo Sapiens
cttggggttgtgagggctttttctttttcacagtcaattaataacattgatgttccttgcttgaaatgtgagcctgctcgaggaaatcagtgcagaggagcaggggaaagtgaaacagggaaggcgcatcttcaatcaagggtgtattcgtaaaccagcaaccatcatgggctactgtagcttaatgctaggaagacactctgggaaaagtggagaatacaagccttagcattctcccactagaggagccatcaaatcccatcaatctttgggttgaggagctattccagaggaaggggtgacattaatcttctggacacttccagcctgcagggtggggcaggacaaagtcctcacataattttcaaaggaacgccctcagggcaaggaggt

SEQ ID NO: 302824 - DNA, 218 bp, Homo Sapiens
  misc_feature (73)..(73): n is a, c, g, or t
  misc_feature (99)..(99): n is a, c, g, or t
  misc_feature (108)..(108): n is a, c, g, or t
  misc_feature (113)..(113): n is a, c, g, or t
  misc_feature (126)..(126): n is a, c, g, or t
  misc_feature (134)..(142): n is a, c, g, or t
  misc_feature (145)..(145): n is a, c, g, or t
  misc_feature (164)..(164): n is a, c, g, or t
  misc_feature (175)..(175): n is a, c, g, or t
  misc_feature (182)..(182): n is a, c, g, or t
  misc_feature (206)..(206): n is a, c, g, or t
ggaaggagctcccatgctggggccaattttattattcttaagctgggaactgtgccaatagccagttccaatntaggacacgggacagagggataattnatggggggntacancagtacagagggngagcatannnnnnnnnaancattatttaaacgggttgnttaagggaaancagcctnctttggaagttaggccaaatgggntaatggaacttt

SEQ ID NO: 302825 - DNA, 399 bp, Homo Sapiens
  misc_feature (42)..(42): n is a, c, g, or t
aaagttgttgacttcgtctgtatactcctttgatgaaaaatngacttttccatcaaactaccaagccaatatgctgtattgttttatttctttgttctttttttcttgttgtgttagtcaattttgtgctgctataacagaatacctgatgctggataatttataatcaacagaaatgtatttggttcatggttctggaggctgagaagtccaaaatcaaagagcagcatctagtgagtgccttctcgctatgtcatctcatggcagaaaggcagaaggtcaaaagagcatgcatgcagggagaggaaagggggcccaactcatcctcttctcagggagttcacttcctcaaaaactaacccactcctgaggatgggtagccattcatgagggacagtt

SEQ ID NO: 302826 - DNA, 391 bp, Homo Sapiens
  misc_feature (252)..(300): n is a, c, g, or t
tagagctccataggttattccaacacaccctataagaaagaggactggtaggttaaagccaaaaatggggacaccctagaggacatctttgggagaataatctacctaggccaagaccccactatctgagcattccacgcctataagatgaccctcttctctcctagatcagtgcttcttaaccatggaccacagctctatgttagaatcctctgggaacttaaacatatcccaacaaattaggtttagtannnnnnnnnnnnnnnnnnnnnnnnnnnnnnnnnnnnnnnnnnnnnnnnntttgggtatctattaaagctcccagtgacatcaaataatagccaaggttgagaattaatgtgctagattgacacaggtgtttgaactggtt

SEQ ID NO: 302827 - DNA, 298 bp, Homo Sapiens
tgacacttgcgtccagccagaatttattttttcaacagctaaaataaaacttacctttacttaagtaacactgttacagaaaacaaacatgatagtattttaaaaagtgttacaggcctgggggtggaaagtgggagaggttgtggcacacaacgaaagcaaatggtatttttaaatactaaaaacccttagtgggcaacatttatataccactattcttatctagccaactgaaaattccttgggacaacatttaggcaaaatatcccaagtttcagtctaggtggctcttaaatgc

SEQ ID NO: 302828 - DNA, 382 bp, Homo Sapiens
  misc_feature (307)..(307): n is a, c, g, or t
  misc_feature (343)..(343): n is a, c, g, or t
  misc_feature (355)..(355): n is a, c, g, or t
  misc_feature (363)..(363): n is a, c, g, or t
aaagaaaatgtcctttaaatccagaatattaacatgtcatatttaagaagatagggagtttggcaaaccaacctaaagggtagtgtttgcttatattacctctgtaaatcttattactagcaaaagctttcatttgaaaggtacttggaacgtggtaactgaaatattagcaatccaaataatatatgttaagtcacgcattagttccatcttgcaaatcctaagtcaccataatgaccaaagaaaaaaacaaccccttcagacaaaaaactcaaattctatacgtgttcccttcctgcactttctnaggggcttcccaccagtgtcccacatgggtggcccnttgaagggggtntttcacancgggttagggggttaaggg

SEQ ID NO: 302829 - DNA, 350 bp, Homo Sapiens
  misc_feature (112)..(246): n is a, c, g, or t
  misc_feature (280)..(280): n is a, c, g, or t
taccagctcactaaagcctcaacttcttgggctcaagcaatcctcccacctcagacccaagtagctgggaccacaggtacacaccaccacacccggctactttttaaaattnnnnnnnnnnnnnnnnnnnnnnnnnnnnnnnnnnnnnnnnnnnnnnnnnnnnnnnnnnnnnnnnnnnnnnnnnnnnnnnnnnnnnnnnnnnnnnnnnnnnnnnnnnnnnnnnnnnnnnnnnnnnnnnnnnnnnnnctcctacacctgcagtgactccctccactgacgncttgatcccctcccaagttatccatggggagctgggaatcatctttttccaaactcctgttaatgttgat

SEQ ID NO: 302830 - DNA, 404 bp, Homo Sapiens
  misc_feature (224)..(224): n is a, c, g, or t
  misc_feature (296)..(296): n is a, c, g, or t
  misc_feature (320)..(320): n is a, c, g, or t
  misc_feature (326)..(326): n is a, c, g, or t
  misc_feature (332)..(332): n is a, c, g, or t
ccaaattttataaaacaattttacattttaatccctgttaaagggtgaaaggactcagaactttgacgcctgagaaagagttgcaggttttggggtgatggctcagagaagttttcggaaggagatgaggtctccttttacatgtttaagcactagggcacgaaagaggccacaaatttgttctgtgtgaccccatgggggccggggaaggaaatctaggactnactgggtgggaagtcatggggcagtcagatgtgggactcaatttagtgtaaagagggacttttgaatagctnggagcttttccacagaggtcatcncggggnacggtnaccctcagcacttggaagccatcaagcaccaggttacagaactcaaccgggcttttttaaaacggttttaag

SEQ ID NO: 302831 - DNA, 426 bp, Homo Sapiens
agccagtttttataagtgacacatgaatatcagtcgattagacacactcctgccgagtactgtaacaaatctcttcatttttaccacatacatgaatagctgtcccatatattcataaaacataagaatttttttcttgattaataaacttcattttttagagtagttttaggctcacagcaaaattgagtggaaagtagaagagttcccatagactccctactcccatacacacacagcttcccccactgtcaacatcctgcaccagaatgatgcatttgctataatcgatgaacctacactgacacatcactatcacccagagtccacagtttacattagggggttcgattaaaataatttttttacaactttaaatccccccaataaacttaaccttacttttttggggggccttacattttt

SEQ ID NO: 302832 - DNA, 500 bp, Homo Sapiens
  misc_feature (364)..(364): n is a, c, g, or t
  misc_feature (376)..(376): n is a, c, g, or t
  misc_feature (403)..(412): n is a, c, g, or t
  misc_feature (415)..(415): n is a, c, g, or t
  misc_feature (432)..(432): n is a, c, g, or t
  misc_feature (442)..(442): n is a, c, g, or t
  misc_feature (456)..(456): n is a, c, g, or t
tctagtcccatttgtttatttttgcttttgttgcctatgcttccgaggtctcatttataaaatctttgcccaaaccaatgtcctgaagtgtttcccgtatgttttcttctagtagtttcatagtttcaggtcttatgtttaggtttttaataaattttgtgttgatttttgtatatgatgagaggtaagggtctattttcattcttttgcatatggatatccagttttcccagcaccatttattgaagagactgtcatttcccccacatatgttcttggcacctttgtagaaaatcaactggttttaaatgcatgggtttatttctgtgttatctattctgttccattggtctatgtatccatntttatggtcacnaccattgctgtttgagtagccatagcnnnnnnnnnnccncttttcgagactccatntcaaaacaancaaacagggaaccnttatgagggcagggaggtccacttgagggagtttgagacttgcc

SEQ ID NO: 302833 - DNA, 439 bp, Homo Sapiens
  misc_feature (306)..(306): n is a, c, g, or t
  misc_feature (428)..(428): n is a, c, g, or t
ggtccttgataaggtacctgtccatctgactcaatgtacagagttcacagaattaccaaccattttcttactcagacaagtctaacttttatttttcaaattagatacctcagatatttgtccagaataaacagccccaattcacctatcctaactccacccagaaagggtttcccacaagcccagcaggctgcaagctttcagttcatctcaaggatacactcaacattagcagtgccttttctgagtttaaccctctcctcccaccccacaactcaacactaccagaaataaggttaagccccnggggagggcacctaaggcaggacctcaaggtcacatgacatgggtgataggtacaacatcaagggggtaggaagctgtggacctaaagggcacatggacatggggggataattaggtaccancttcagggggg

SEQ ID NO: 302834 - DNA, 357 bp, Homo Sapiens
  misc_feature (98)..(98): n is a, c, g, or t
  misc_feature (122)..(122): n is a, c, g, or t
  misc_feature (127)..(127): n is a, c, g, or t
  misc_feature (212)..(212): n is a, c, g, or t
  misc_feature (218)..(218): n is a, c, g, or t
  misc_feature (236)..(236): n is a, c, g, or t
ttttagttgtgagtgttctttattttcttaatttagatttaatttcttaagtatagaatgcttttcttgggaactgttcttgaagagtatgatttccnaaggtatagaatgcttttcttggnaaccnttcatgaaggggatgatttgcaacttctgggactccaccagtttgataaagcaagtcctttcacatttgccatctgggctttggnttcccnatcttcaaagtcacaggnatactatttattctgacactctatggggggcgataagttaatgttggggatggtttatcaagttgggggaaaagctgacatctaaggcaagggttttctgaaaacaaccttttttcaactg

SEQ ID NO: 302835 - DNA, 368 bp, Homo Sapiens
  misc_feature (247)..(247): n is a, c, g, or t
  misc_feature (264)..(264): n is a, c, g, or t
  misc_feature (281)..(281): n is a, c, g, or t
  misc_feature (357)..(357): n is a, c, g, or t
cacacatatttagatttgcagttacagggggagctgaagggaagaattctatcatcttgctctttacacttaatgcatcacgagcacctttccaagtcaaacagaactaagacaacacttggtatactgcattacactttaaggttaggccatgatttactcttttatacattggttccatttattttcaatgctgcaaacaaatacttgatacatatacctttgaacacagattaattcttttggnaaatttgttaaagtggnattgttgagtccaaggncaggggctttaaagcttttaatactgtcaaggaccagtgaagggtataaggttttactctacttgccaagctaacnagttagttggc

SEQ ID NO: 302836 - DNA, 407 bp, Homo Sapiens
  misc_feature (316)..(316): n is a, c, g, or t
  misc_feature (328)..(357): n is a, c, g, or t
  misc_feature (397)..(397): n is a, c, g, or t
tgctattactgttcagtggcatcaaatgcatcataattataggtggaaaggctagtaatgatgccagcaacttgtttaaatgaagtttttataatttttaaagctcaaacataagtacatttcaaagttttataaggtttgggagaaactctatcaagctaataattcagtgtttgtaaattagaaatatattctatgaaaatagttatatcatgtaatatacatacaaaatgaaaaatcaatctgcatatggaaatttgggataaggactaattcagataatagtcaaaaactataaccaatttaggaccggggnctgggggctagnnnnnnnnnnnnnnnnnnnnnnnnnnnnnngaggacagtcttgtgctgtcaccccgggggtgggcctgcngtgggcctgg

SEQ ID NO: 302837 - DNA, 458 bp, Homo Sapiens
  misc_feature (41)..(41): n is a, c, g, or t
  misc_feature (110)..(110): n is a, c, g, or t
  misc_feature (125)..(125): n is a, c, g, or t
  misc_feature (137)..(137): n is a, c, g, or t
  misc_feature (205)..(205): n is a, c, g, or t
  misc_feature (240)..(240): n is a, c, g, or t
  misc_feature (345)..(345): n is a, c, g, or t
  misc_feature (381)..(381): n is a, c, g, or t
  misc_feature (404)..(404): n is a, c, g, or t
  misc_feature (420)..(420): n is a, c, g, or t
  misc_feature (448)..(448): n is a, c, g, or t
ttaatatatttgagggttaaacactcactaatatttagganttagtcctctgcaatttttcacttgtcctgataaaatccagattttacaaagtttaaacaccacaaaantcacagggctgtctntagaaggaaganttcctgttactcttagctgaatattcccaataattctttgactttctttctttgtcttattaaaccantgagaatctccagggcatgcatgttttaggtcaanttaaggaaacgcccctatgcctgaccctatttgggaatttccatttttactcatgtatgtcccacggacattaaatttattgaaaaggcaagtgccaccagtgtnggatgcatgggtctccacaaatccactcttcactgngggagatttccccacatccactngggtttggggtcggcncccagatggcaggggccataccccatgnggttcaggcg

SEQ ID NO: 302838 - DNA, 427 bp, Homo Sapiens
  misc_feature (168)..(351): n is a, c, g, or t
ggtgagaacgcagttgaaagaaggaggctccataaacctctgccacaggccccacatgtctgtccactctccttcctcctatcccagccctgccattggccctactgcagtttccacaaaaggactctgcaagaacagctgtgtcactgcagggcagaacaacaactnnnnnnnnnnnnnnnnnnnnnnnnnnnnnnnnnnnnnnnnnnnnnnnnnnnnnnnnnnnnnnnnnnnnnnnnnnnnnnnnnnnnnnnnnnnnnnnnnnnnnnnnnnnnnnnnnnnnnnnnnnnnnnnnnnnnnnnnnnnnnnnnnnnnnnnnnnnnnnnnnnnnnnnnnnnnnnnnnnnnnnnngggagtcctaggctactttgggaggctttgggcataaggattcactttgaacccccagagggcagaggtttttagt

SEQ ID NO: 302839 - DNA, 416 bp, Homo Sapiens
  misc_feature (105)..(105): n is a, c, g, or t
  misc_feature (135)..(135): n is a, c, g, or t
  misc_feature (149)..(149): n is a, c, g, or t
  misc_feature (194)..(194): n is a, c, g, or t
  misc_feature (254)..(254): n is a, c, g, or t
  misc_feature (338)..(338): n is a, c, g, or t
  misc_feature (344)..(344): n is a, c, g, or t
  misc_feature (355)..(355): n is a, c, g, or t
  misc_feature (394)..(394): n is a, c, g, or t
  misc_feature (399)..(399): n is a, c, g, or t
gctgtctggagcctaacctagaggaaaaaggggagcagagaccagtgaggccagggctagttgggagaggggcaggggctgcctattgaaaggttttgaattttncgggtccccaggcttcaatgaccttctggncccaagtgactgantattctgaccaatgctgacacctcctgccttccgtttatgatcanacaaacgttccaattatgaaaataatatgttgttgcgtataagaattcaggccatacagnaagggaaaaatgaaaatccttcctaaacctgtgagagaaactaaccaatgttaacattccattttgtgagtcttctggacattnattttnttgtacatctntaaactggatcacactaggactactttgtattagccttnttttnaatgtatgatgggcatt

SEQ ID NO: 302840 - DNA, 365 bp, Homo Sapiens
  misc_feature (148)..(148): n is a, c, g, or t
  misc_feature (168)..(168): n is a, c, g, or t
  misc_feature (213)..(213): n is a, c, g, or t
  misc_feature (238)..(238): n is a, c, g, or t
  misc_feature (251)..(251): n is a, c, g, or t
  misc_feature (283)..(283): n is a, c, g, or t
  misc_feature (329)..(329): n is a, c, g, or t
  misc_feature (345)..(345): n is a, c, g, or t
  misc_feature (353)..(353): n is a, c, g, or t
cctggactatgttctcacgactccatcggtgttgcctccggtgtgaagaggtgatgcctggagtcccgcaaacccctcccacgtgactcccgtgttgcagctgcccacgccccctcagaggcagtgtatgctttcctagccatgggtngctgaaaccttaccagtctncagcttagatgtcctttctcctcctgccgtgcagggttccctgtngtggggatgggatcaagcattcttngctcttcctttgncactttgttggcataatggagaattttttctngccttagggaaattgactttgaaagttaactcagttgggagttcangtgttgattaaataanaggttttnggtttgattccc

SEQ ID NO: 302841 - DNA, 215 bp, Homo Sapiens
ggcacgagggacagactctaggagaagaccaccttctcactccatcgcctttccagctcccattccccctgaaagcctgtgtcataggcaataaaatcctctgtattcatgacccatcaatttgttcgtgtgacctatgacccttcaattcgttcatgtgacctgattcttcctggatgccaagcaagaacttgggagccacaggtgtgggtgct

SEQ ID NO: 302842 - DNA, 140 bp, Homo Sapiens
caactttcaagaaatcttgtatattatttaatcatctgtgttaggatgacacctatgattgatgacttcggttgaatagctttattctggatttttcataactaaagctaaatccaaagacctgaaaaaggacaaaaaga

SEQ ID NO: 302843 - DNA, 143 bp, Homo Sapiens
  misc_feature (69)..(69): n is a, c, g, or t
  misc_feature (93)..(93): n is a, c, g, or t
ttgacactcacacaccctgccttgcctttcaaggttaactgatgagtcctttcaactgttttattcttnccgttttctttgaatgttacatgntagtgattaaataactatgggccattccatgaacgggttacgttgcagct

SEQ ID NO: 302844 - DNA, 295 bp, Homo Sapiens
  misc_feature (221)..(221): n is a, c, g, or t
  misc_feature (226)..(226): n is a, c, g, or t
tctactggtttctatagaagcctctctaccttaactattttattaaaatacttggatttgttaagtctaagcagaaatcacatttattccttctacttccttttcaaacctgttctctcaaatagttcttttcttgccaatggatgaagtcttaggtaagccctagagctatgctagtcccttttagcggtaatatctcatttaatattaaaaagcgtgantgatnataatattaaaactggaaattatgtggtagggaagctgggtgaagtcagcatttacttttcatccacac

SEQ ID NO: 302845 - DNA, 421 bp, Homo Sapiens
  misc_feature (388)..(388): n is a, c, g, or t
acaggtacaactaaaccaagagagggaattcagttggcctcagagacaacacaggcccctgcaccaggacagaaggaagtaatcgctcctttctcttttaaatgtccaataagttcagagcaccacacccccacacagtgcctcagtgggcacctgtacgtacactccatgaggtggctattcctttaatccctaccatctgctccaaaatgtttatccaacagttttgccatggtgcttgaacttctatcatttgggtgcctctttgggaacaggaaatttaactctgtctggtgaccgtgcacaggatttatagctgttgagcctcaggagccatcaggaactgagcttgctttctttccttctgtggccctgcccattcactttntgtccaagagtggccttaaaccagaagaaacct

SEQ ID NO: 302846 - DNA, 483 bp, Homo Sapiens
  misc_feature (48)..(48): n is a, c, g, or t
  misc_feature (234)..(234): n is a, c, g, or t
  misc_feature (237)..(237): n is a, c, g, or t
  misc_feature (376)..(376): n is a, c, g, or t
  misc_feature (406)..(406): n is a, c, g, or t
  misc_feature (411)..(411): n is a, c, g, or t
  misc_feature (422)..(422): n is a, c, g, or t
  misc_feature (441)..(441): n is a, c, g, or t
  misc_feature (454)..(454): n is a, c, g, or t
  misc_feature (462)..(462): n is a, c, g, or t
aaacttttcatcctctccctccatgccaaggggcccttgctcccagangccagcaccccgactggcaggtgacctcccattgcctgtcactcacacggcttcccgcctctccatcctcatgaccatcactcctgcagcacaggctctggttacctctcaatgggactaggtacagcaaaggcctccaaatccatcttttcacctccatcctgcctttcttcaatcccactcctnctntgccacgctgcttgagtaatcttgaaaaactctgaccctgtcactcaactgaaaagccatcagtgagtcactttccttgcaaaagaagtcaaaattccatagtctgaaactagaaagcatggggctgaacattttgctncaatagactttgtgggatttctgggacagnatttnaaaattttccnattttgagggaccactgtnacatggtgatttnttctgttncagaatgtcatcagtttctgc

SEQ ID NO: 302847 - DNA, 445 bp, Homo Sapiens
  misc_feature (64)..(64): n is a, c, g, or t
  misc_feature (120)..(120): n is a, c, g, or t
  misc_feature (203)..(203): n is a, c, g, or t
  misc_feature (372)..(372): n is a, c, g, or t
  misc_feature (420)..(420): n is a, c, g, or t
tttttttgaaaaaaaacatcagagttaatgtttgcagaaactgaagacattggttggacatggnccagttctgtttagaggggaaactaggatttaatcaaggaacaaagttcataggtntgggaggaaaacctgggaaacgttctgttttggtagctggaaagcttgtctccagaagtgaaggaaagaagctgaaagaggancttgtattttcctccagcgagctcagatcctgggcaaagggagagcgtgatgctgggtccgagctctgtggctcggtgggaaacagtgcaaaagttagttttcccaagtttagaacgttttatgtagtaagggttcttggaaaagtgcaaacaaagcaggagtggtccntcttgagcttttcccaagttggggagttactggtcacagagcttaatnaggcattcccctgggggccgcttcc

SEQ ID NO: 302848 - DNA, 394 bp, Homo Sapiens
  misc_feature (56)..(56): n is a, c, g, or t
  misc_feature (195)..(195): n is a, c, g, or t
  misc_feature (209)..(209): n is a, c, g, or t
  misc_feature (254)..(254): n is a, c, g, or t
  misc_feature (261)..(261): n is a, c, g, or t
  misc_feature (309)..(309): n is a, c, g, or t
  misc_feature (334)..(334): n is a, c, g, or t
  misc_feature (344)..(344): n is a, c, g, or t
  misc_feature (351)..(351): n is a, c, g, or t
taccctgccactggacgatgaagtcttaaagggccaagactctggtcaccttggcnctcccagccctctgctctgtccctgatcataaactacttttgacgaacgaagaaaacgaaggatcaaggaatagaaggggttgtgtaaggggccaaccaggatgaaaatcttcatctaggctcttccaaccctaccctncagcctcctccctnaacccacaatcagcaacatatcctacaaaaacatgttgacaaggnaaccatnacccacccctcaggaggcaagagatggccccagctcagtgcccctgtnaggaaagctggacctacattcaaanccagcttctntcaaagncacatttctgccatcgtggggcaattcaggctggtagtgaggg

SEQ ID NO: 302849 - DNA, 197 bp, Homo Sapiens
  misc_feature (54)..(54): n is a, c, g, or t
  misc_feature (66)..(66): n is a, c, g, or t
  misc_feature (75)..(75): n is a, c, g, or t
  misc_feature (114)..(114): n is a, c, g, or t
  misc_feature (122)..(122): n is a, c, g, or t
  misc_feature (128)..(128): n is a, c, g, or t
  misc_feature (166)..(166): n is a, c, g, or t
  misc_feature (178)..(178): n is a, c, g, or t
cgctgttggtgggtgcatgggacacgcctactgagtttataaatgggttgacanaggagggcacanatgctatgnacattcctgcatgttgggcaaccaaaagggagggcactnggggtttnaccctntcaggcccttttggttttgggcagccagccagacccangccatggccctnaagttggccaggggagccc

SEQ ID NO: 302850 - DNA, 195 bp, Homo Sapiens
  misc_feature (55)..(55): n is a, c, g, or t
  misc_feature (97)..(97): n is a, c, g, or t
  misc_feature (133)..(133): n is a, c, g, or t
  misc_feature (152)..(152): n is a, c, g, or t
  misc_feature (166)..(166): n is a, c, g, or t
  misc_feature (177)..(177): n is a, c, g, or t
ctgtgaggtaggttgttgttggagccacttcacggtttaggaaattgaggctttnagaggtgaaatcgcttgccttagagtcctgggccaggaagtnatgagattctaactgatcatgggaaggctggccctngagagcacccagaggactnaggaataggtaatnaggccaaggtnaggttgaaacaggcaaaa

SEQ ID NO: 302851 - DNA, 431 bp, Homo Sapiens
  misc_feature (283)..(374): n is a, c, g, or t
  misc_feature (380)..(380): n is a, c, g, or t
  misc_feature (406)..(406): n is a, c, g, or t
atcataatcccaaaacacacaatcctaaatgttgaaatccaaaatatcaaaatcccggaagtctaaaatcctgaaaatcaatcttgaaatgtcaaaatcctgacagtcgaattctggggaaaggtttagcacatttttgggttgtacaaaggacatttgcatcatatgagttgcatcatgttaggtggaactattcctttgttaatgtctttatttggaaactaagtatagtttaaggaaatgcatatggggtacgtgggtcaaagggtagacttatgggacnnnnnnnnnnnnnnnnnnnnnnnnnnnnnnnnnnnnnnnnnnnnnnnnnnnnnnnnnnnnnnnnnnnnnnnnnnnnnnnnnnnnnnnnnnnnttcagngggaccttagtgtgtgagtccgagtnggactaggtaggggaagttccgacc

SEQ ID NO: 302852 - DNA, 340 bp, Homo Sapiens
  misc_feature (110)..(110): n is a, c, g, or t
  misc_feature (137)..(137): n is a, c, g, or t
  misc_feature (186)..(186): n is a, c, g, or t
  misc_feature (195)..(195): n is a, c, g, or t
  misc_feature (201)..(201): n is a, c, g, or t
  misc_feature (219)..(219): n is a, c, g, or t
  misc_feature (281)..(281): n is a, c, g, or t
ctgcatctattaacacttaaaatttttggaaaaaaatgtttaagtgaataaaattcactagaaacataagtagtgtccacattcaaggaaaatgtttatttaacaacttncattaaaattaagccaatattataggnatatacttagatgctatcaaaatcctcaaaaatctaaatcattctattnctgaaatanctaggncattctagctctaaattnccttaataataaaaaacaattcaaatttaactgcttgggggcatatgggcactatataatancaagtttgcccatcttaaatgctatttactcagggggtttaaaaggaaggggttacata

SEQ ID NO: 302853 - DNA, 493 bp, Homo Sapiens
  misc_feature (395)..(395): n is a, c, g, or t
tcaatccctgttctcatgaacctaattgttattcaaggttataactaacacaagacttaatctgagcccaagtcgagtataaagtgtgaaatatccaaataactgtcattaaaatatatttggaggcaaataatgcagagaaaacatttatcaggcacatttttccaccatgaaaggaaatgctatatactttgatcacaatatttttttgtctgtcaccctaggtctgtatttgaaaaggagatatagaaaactaaaagtccagaatataccatatcttaccttctatttgggatctagaatttctagactaaagaggaggctacaaaaagttaatccaaatatggatatttactaaggcacctattcaaggcaacctaccaccttgggaggtnggactctggggatacagagggaggatggaattcaggctttacccctggaaagtacaggaaacctaggacagtttaaaaaccaaatatttttatgcagt

SEQ ID NO: 302854 - DNA, 493 bp, Homo Sapiens
  misc_feature (413)..(413): n is a, c, g, or t
  misc_feature (431)..(431): n is a, c, g, or t
  misc_feature (440)..(440): n is a, c, g, or t
  misc_feature (460)..(460): n is a, c, g, or t
  misc_feature (467)..(467): n is a, c, g, or t
attcggcacaggatgaataggttttaggaatagccccagtaggtgcaaataatttaaattagatgcaacgtataatatttatactccaactgaataaattgactataactcttatggactctgtgccacaacttgtcaagtgtctgaatgaaaagaagaaaaaagaaacacgtattcaaacttactgtttaaagttctttgttcagagccattagcatatttaataggatttgcgagtcctctctcccatatggttgtcttttaataaagattgtaataggcagaggacataatttgcctcaaatagatagctaaacaaagcaaaattaatttatttttctgagtaagttagtgacctgctaacaagttcacagtcccttaactaaaacctttggggctagcaccccaggatncaacacatttcaaatttnctagtgcanattaatggaatcttcactanttgaaanccaaatttgcctcttgtcagttttgg

SEQ ID NO: 302855 - DNA, 346 bp, Homo Sapiens
  misc_feature (55)..(82): n is a, c, g, or t
  misc_feature (212)..(212): n is a, c, g, or t
  misc_feature (223)..(223): n is a, c, g, or t
  misc_feature (274)..(274): n is a, c, g, or t
  misc_feature (301)..(301): n is a, c, g, or t
gtttggtctgttagttatgatttatatttaatatgctagttataatttagggagnnnnnnnnnnnnnnnnnnnnnnnnnnnnggggtgtgggtaagaacttgtactcagggtttgaatcctagcttccatacatactaattatgtaactttagggaagttatttacagttgagataataatagtattatagtagtacctcctgggaattgtncataaaagatncaaatgaggattattacatcttaacatgttttaacagtgttctgttacaancaattctttttagtttaatatttaccnatttatggattattatattaaattatatttatgggggttttcttt

SEQ ID NO: 302856 - DNA, 472 bp, Homo Sapiens
  misc_feature (390)..(390): n is a, c, g, or t
  misc_feature (398)..(398): n is a, c, g, or t
aaatggggaagttgtccccaccagctcttcagtttctgttctgcactatgtgggcctgggcagtcttaactggttccaattttagcatgttccattaatactgctcaaaggatttacatatcttctgttttacagtactggatagggggaacatttcccagtcagataaaatgtctcttcccataatgcagtcaggtaaaagagataaaaccatttcacatgaagtatgttcaaatatggcagctttcataatcctaacaaccgttacacttttatgttctagtcccagggaatttccccttttcatccccagatccattttaccctttcttctggcaaaaggctttgggtccccagcctgggagtcccaccagggagaccctggggctntgttcttnaatttgtttaccttggatttaaccagttttaacagggtaatttttaggtggggggtttctcatttttaatcttt

SEQ ID NO: 302857 - DNA, 491 bp, Homo Sapiens
  misc_feature (50)..(50): n is a, c, g, or t
  misc_feature (76)..(77): n is a, c, g, or t
  misc_feature (120)..(120): n is a, c, g, or t
  misc_feature (345)..(345): n is a, c, g, or t
  misc_feature (360)..(360): n is a, c, g, or t
  misc_feature (445)..(445): n is a, c, g, or t
  misc_feature (461)..(461): n is a, c, g, or t
gatgaaccagttgtggaaatttgcatgatgctggaacaggtggatcaggntgcaaagatcaggtaaggtgggtttnntaggttattgttgagtcaggtaattaaataaaaatctgatganagaggaatcaaatagccattaacacccttcctattttttgaagagggaacagcattatgcatgttgggttttgaagctcatgtgatagaagactgaaattatgtcttgacagaaccccttttttcctaaattctttggcaatttattgagtgcacgaactcaatacaggtactatgagagcagaaagtgttcttgcctgtggctttgtagtagtggttagtggtnggctttatattaccntttagtgtctctgcttgcatggcttaacttcactaagccaagaggtgcttccagtgtaaatggagattaatagttactacatccnaacattactgttaagnatttaaaccaaatggatttattgggtgttt

SEQ ID NO: 302858 - DNA, 498 bp, Homo Sapiens
  misc_feature (66)..(66): n is a, c, g, or t
  misc_feature (69)..(69): n is a, c, g, or t
  misc_feature (153)..(167): n is a, c, g, or t
  misc_feature (397)..(397): n is a, c, g, or t
  misc_feature (476)..(476): n is a, c, g, or t
ccacatggggctagtggcaccttattagacagcataggactctagacaagtcccctgcacattgtnatntctggcaatgttaggtttgcattgtgttcttctgaaaaagtctgcaccttcccccatgccagtgagtgtgttttctcaataacnnnnnnnnnnnnnnngacccttatctctcatgctcttgacacaaacttccacattttttcataagggtcacacacgatgccaagaaatgagaaaggagtcaatgccggatcaagtcagacaaccttgtccttatccttgcctccttttctcctgagagcccctagtcaatctaataccaagtgtttcccactcccagaggagaaaaggaaggggaatgggctttgggattctctgggcttaaagnttcacaggacttgcgggagttcgttcaattgtttccccactggaaccatctggatttaaggttgctggaggttttggancccttggagttttccccagaac

SEQ ID NO: 302859 - DNA, 484 bp, Homo Sapiens
  misc_feature (49)..(65): n is a, c, g, or t
  misc_feature (266)..(321): n is a, c, g, or t
  misc_feature (377)..(377): n is a, c, g, or t
  misc_feature (383)..(383): n is a, c, g, or t
  misc_feature (394)..(394): n is a, c, g, or t
  misc_feature (411)..(411): n is a, c, g, or t
gcaggtttcaattgtgggaccttacacgtggtgctattgcagctccaannnnnnnnnnnnnnnnnaacccatcatttcagcttgttaaactttggagattcatattctgtcattgagagttgtccttccttcctttgctgcttcagaggacttagtgatgcctttattagagcttttactacattgcattatggctctttatgtctttcctcctgagttctgctaggatcataatcatgtctcatcatattcctcttctctcttcnnnnnnnnnnnnnnnnnnnnnnnnnnnnnnnnnnnnnnnnnnnnnnnnnnnnnnnnaagtatttgctcttccaaattctgcttattggatagtttattaaataaattatatnttattncatgctgtttncaatatttattcgtacntatttggaatatattacctttgatatttattattaaagggaattaaatgtggggggattttattaattaaata

SEQ ID NO: 302860 - DNA, 415 bp, Homo Sapiens
  misc_feature (402)..(402): n is a, c, g, or t
cttgttttctgaagaaactagagatttgcatgagctaagcttttcctaattctgtcctgcataaggggctttcttgctccccagggcagctttttttaggaatcctggggagactgggtgcaaaacagagagggacctgaaatggcttatctgaccccggcttcccagcgaggctcagagagacctgatggggctgctttggaagctttcttgcttctctatagaatctcggattctgagctggtcgcatcattaatgaggggcctcaaaaccctcaaaatctaagacgtttgtattcagttggtagctcagatagtttttctctgactcatgtggtgttgacagctaggttattcttcccttcctgggtattaaaagcatttcctaacattgttaaatgtnaaagagctgttta

SEQ ID NO: 302861 - DNA, 355 bp, Homo Sapiens
  misc_feature (161)..(161): n is a, c, g, or t
  misc_feature (269)..(269): n is a, c, g, or t
  misc_feature (283)..(283): n is a, c, g, or t
  misc_feature (331)..(331): n is a, c, g, or t
tgcgcccggcccaattctttaataactctctcaaataaagaattagccacctgtaacagtatataattttcagaagtttaacataatccatttcacattctctattctttcacttttcaacctctaatacaggttcagacttatcttgcttagcaaaaggntttcaaaataatttcaagaaaaatattccctgtaggtcatgaaggaaaggaattcttttcaactgattactcaatctgctactataaataatcaaatctgcaagggantctgaggaatcgtntgggccacggggcatgcaacttcaaattttggcaggggcagggttccnaggcaggtttcccgggggtggggt

SEQ ID NO: 302862 - DNA, 317 bp, Homo Sapiens
  misc_feature (92)..(92): n is a, c, g, or t
  misc_feature (139)..(139): n is a, c, g, or t
  misc_feature (267)..(267): n is a, c, g, or t
  misc_feature (289)..(289): n is a, c, g, or t
accttaagaggcatctttaaggtgtcaaactcttaacatcatttatgaaaagccctgcctgtgaagcaggcctgaacactaatttgtatgtncttcatgaggaggtctccagcaaaagagaggtatgtactaataattnctgagaaatgtatgcagatcaggagactgcagtctttcactaacaaaagaagtttaacaacttttttgtgagaatatacattgtgatagtggaaataagcgtttacactgtttgtataaccactttgncattctctgaagaagggttggnatttggggagtgtgttgtgtattggggc

SEQ ID NO: 302863 - DNA, 468 bp, Homo Sapiens
  misc_feature (184)..(233): n is a, c, g, or t
  misc_feature (353)..(353): n is a, c, g, or t
atggagagaactccaggctggaatgggtaaggcatgacaaggcgttctatgtcttccaccaggtggttgaaccttctagacacattctgggaaggtctttacagaccaatatctctggaatacatttcaatgcaataaacagaccaatgcttcttctacagaccatgctgtcctgggtagatcnnnnnnnnnnnnnnnnnnnnnnnnnnnnnnnnnnnnnnnnnnnnnnnnnngggctactatctctccaggaatacagatgagatggtacatgtgaaatctcttttgaaaagaaggtatagcatgggctcaattcctaattccctcattcctactgatttttaaaaattgtncatgggcaaataaaccattgggaggttttcatttcgtttcatcttcacagattaaaaatgttaggacaggtaagcgtaggtccatccctgcttagtaaatagggctgatccgtca

SEQ ID NO: 302864 - DNA, 435 bp, Homo Sapiens
  misc_feature (363)..(363): n is a, c, g, or t
  misc_feature (385)..(385): n is a, c, g, or t
  misc_feature (407)..(407): n is a, c, g, or t
tttctctaatggatttaaatgtcatatttatgccgatggcctccaatttatatctctgtggcccaaacctcttctctgagtataccagacttgaagagtcaattatctccttttggttgccatacagagttctcaaacttagtgtgtctgaaatggaatttcattttgcctctccagcctttattctcctttttagtaaataacatcatcatctatctagatgctcaggccagaaacataggagtcagccaggattcattccttgaataaagaataaccaaaccataaaacaagtcctttgatttaatctctaatatgtctccatttgacctctctcggcgccttctggctgccatccttctncacacacagctgtggaactatnctagacacggcactgggcgttntggactgggttggtgtctggactatgtg

SEQ ID NO: 302865 - DNA, 458 bp, Homo Sapiens
  misc_feature (404)..(404): n is a, c, g, or t
  misc_feature (412)..(412): n is a, c, g, or t
  misc_feature (432)..(432): n is a, c, g, or t
taaacagagaagagaaaaaccgtgttttgagatggattggaggcattttttgtccacacacttgctttggggatttttattaggtagacggtaattagaggtgtcagtcatatgaaagtaaatcactagtctttcgtattactgttttctcagtggtccttatcagttttttttgttgctctgtaatcattcatatggtaagacttaacttttagtcatgtaaatttgtttagggacaatttaaactattttgtcaaattagtcgttttattccaagttgtacgtcttatgcatttatttagtatagtgaaagccttatatacacatttgaatatgaattagtctctgggatatttgggattattttttagtagtacttttttaggagtgtggggttttttccnttcctttnctgtttttgagacagtgtcngggtccgtcacccgggctgggagttc

SEQ ID NO: 302866 - DNA, 471 bp, Homo Sapiens
  misc_feature (224)..(232): n is a, c, g, or t
  misc_feature (353)..(353): n is a, c, g, or t
  misc_feature (411)..(411): n is a, c, g, or t
  misc_feature (438)..(438): n is a, c, g, or t
  misc_feature (456)..(456): n is a, c, g, or t
tatgtacatataattcactgggagagttttactagcacacttttgaattatggagttaatttcaaaacgtacatcaacttaagtaacataatgccatctcagtagaaatgcttcattttcctgatcttggaactaggtattgccacttgagtagccaatactgatccacttgaggcagccctcaaaccctagcctgggacgaatataatggtcttctgtacagnnnnnnnnngctatggcttttcagcttcctcattgattaaaaatatgtgagaatctctcaaaagttatgggacaatttgagttttattactttttaaaagtcagatgaggaaaatctgctccttaaggantataattaacaattgccattaaggcatcattcctgttgtccaggcaatcatttgtaanggaaggagggtttttaacttcccaatnaaaataatacatggaacntttggactaaaagtt

SEQ ID NO: 302867 - DNA, 453 bp, Homo Sapiens
  misc_feature (396)..(396): n is a, c, g, or t
  misc_feature (429)..(429): n is a, c, g, or t
ataccaggaagagtaaaggggttgcacttatttttggataaagcatctgcacaacagtgtaccaggcacgaagcaacagatgtggcggagtgatgcgagtgatcattgatactgaagacgggagaacagatgagtcattgctaatagaatctcaagagaaataacaagcaacatggaattcagtatttgaatgagattttcttagaaaaagaaacaagtctatgaaacgaggcactgttcctgcccttgctgccctgagcctgtgggcctcattggtgacatccttggagtgcactctaagctggccttgcagctttagaaacgcaggcccctgcaggtgagcggcttgtcccgcttcgggctgggttcaatccagatgcccccgtggcagccctntttttggccttacatttcaattgttcgtcagtncccaacagggtggcaagggccagt

SEQ ID NO: 302868 - DNA, 472 bp, Homo Sapiens
agagagctcaccaccattattccaacctaaatgagatactttacgttcttctaattcttgtcatttttccatccttgcactaaatgcactttttgctgatattaatgttaatgtctggcagctccatttgactaagttcacaggaaaagggatggcgctgactgtttcaactcagggtctagcacagcgcctggcatggagggcccagactatgcctgccctgtagacagcaagcgctggctttactgcatatcttctagagaagatgcactgatccaccacacaatcacatgctccacaaatatgccacagctaaaactggacaatttgtttaaaaatggatccatttccaatgctgggcaggctgtgggacagacggggctggcttatgggcctgttcagccaggttgttaaatgggcaccctctttctgtgggagaaacttggccatatgtaccaccatggcataccct

SEQ ID NO: 302869 - DNA, 132 bp, Homo Sapiens
actggacttgcagaagtcccagcaacatcagctggcttcacagtaaatgtttctggtgtgttctatgtctagtctaatgggcaaagacagagaagttaatttctgaaatgtgaagcttccctttttgccctt

SEQ ID NO: 302870 - DNA, 387 bp, Homo Sapiens
  misc_feature (271)..(271): n is a, c, g, or t
  misc_feature (355)..(355): n is a, c, g, or t
  misc_feature (366)..(366): n is a, c, g, or t
ccagccttttgagagagcatatgactcttcctggactacaacagcttcttgtgtgaatcacagcccggcttttgccagttagtctgagtagataactacccacccccactcccccaagctgataattattaccctggtttatcctctgtctcatttcccctctcaagctgttagagaatgaatactgaatactgtggtgcactgctccatggatataaatgtaacagcagtaatatttacaaccaatgtctaattggctgtagcttgcttntcagtgttcagtctaaaccataggactatatatttgtcttaggcataatgccgaaccatgcaagtctggcttaaaactataggncttaaggtttngtgtgttttggggtttcccct

SEQ ID NO: 302871 - DNA, 160 bp, Homo Sapiens
  misc_feature (60)..(60): n is a, c, g, or t
  misc_feature (80)..(80): n is a, c, g, or t
  misc_feature (117)..(117): n is a, c, g, or t
aggtacattgttaataggtggaccctcggagggaaatgggatttctcttcctattaaaanctctatggggtatataaggnattacataataatggctaatttaaaccaccttttggncttaaggaatttattcaccaaaggttttctgggggaataaggt

SEQ ID NO: 302872 - DNA, 416 bp, Homo Sapiens
  misc_feature (367)..(367): n is a, c, g, or t
  misc_feature (393)..(393): n is a, c, g, or t
ttgtacttggaattccattaaaaagaggtaatatgtgacttaaatgaatgcataaatacatcaaatataagatatctcagaaatggtttctgtgtgaattttgttatccacaagcaacttgtattattttcatggctacaagaaatttcaatgtggctgcttcccaagctgtttcccaagcaagtaataaatgttgtattactttatttgaatataacaaagctttaatttatgattgcatgtgcttacattgacaccttgggcatttcccttcagggcttttctgggacatggaaaaaggatgaggtggaatttgggctgggatgggggtctttctggttctggattcacccggctggcaccccanggcatccaggctaactaacttggggnatatattttgttttgggtggggg

SEQ ID NO: 302873 - DNA, 444 bp, Homo Sapiens
  misc_feature (169)..(169): n is a, c, g, or t
  misc_feature (243)..(243): n is a, c, g, or t
ggtttgactctaagtaaacttaatacctcagctgtttggctacactgggtctactaaatatttcaggaaaataactctacaacttgggtaagatgtgatgaactatgcaaaaatctgaatgattccaactacttaccaacaacaataattccccagaaatgcattaccngtgttgccttagagtcatgatgaaatggaaattataagaaaataagtgaaaaaggtcaatattgtgcatttccnagggattactgatacaggtatgaaatctcagagctctcaactctaaccataaaactctgctatttaattggaaagctagcctttgcaaaaaggccagggctctcccttgagtcgcagttcgttcaaagggctactgggcagaaacaaggctccaagggccaagttcttgacagtttcttagggctcagtttcccgcagggt

SEQ ID NO: 302874 - DNA, 251 bp, Homo Sapiens
  misc_feature (30)..(30): n is a, c, g, or t
  misc_feature (113)..(113): n is a, c, g, or t
  misc_feature (121)..(121): n is a, c, g, or t
atttatgtgatcaaacctatcacaattttnctttggtgattatcacctttggtgtaatgctttaaaaggactttcaaccctcctcctacttctattcaccaacactgtctctnagtatttnaatggtttcttttgatgagaatttaaatctctaatccttctaggaattcatattgggtaatgggtataaaattgtaacgtttttctaaatacttataaatctgccttggaaaccatgtctggtcacaagg

SEQ ID NO: 302875 - DNA, 379 bp, Homo Sapiens
  misc_feature (206)..(206): n is a, c, g, or t
  misc_feature (236)..(247): n is a, c, g, or t
  misc_feature (311)..(311): n is a, c, g, or t
  misc_feature (336)..(336): n is a, c, g, or t
cattgcacagcagacaactataccattggatatagaaaattacattaaacatttaggtagtttccaatttcctgcgttacccaatagtctagttctatgctgtgcaatcttgtagcaactagtaatatgaaatagaatagaaagcagcttcaaaacaatgatataacatggtgtgctatcaataacagttgggttacatgaaaaangcagattcaaacagcagggcacggtgtgannnnnnnnnnnnagacggagtttcgctctgtcacccgggccagagtgcagtgggtgcaatctcaggctcactgcangctccgcctcccggggttcacaccnttctcctgcctcagcctcctgagtagctggggactacagggcg

SEQ ID NO: 302876 - DNA, 219 bp, Homo Sapiens
  misc_feature (202)..(202): n is a, c, g, or t
ttaaaacaaaactgaaaagtctcacagataaatccaaggcacataattatgttatgactgttgtgctgagtggtaatttagtatggatatcaggtagtttacttaaaagattgtaattatccttattacactgcaagtcaaagattttaaaatttacattctttcgtatcagcagatacataccagttcagccatcattagnttgtcaaaagctagtgc

SEQ ID NO: 302877 - DNA, 112 bp, Homo Sapiens
  misc_feature (102)..(102): n is a, c, g, or t
ccttgaaggcatgcttctgatgtgagttcagaagaagacactggcaaggacagcaaagaacaggagaacactctagcttccctgatagcattcaaggtgctntccaaactga

SEQ ID NO: 302878 - DNA, 108 bp, Homo Sapiens
  misc_feature (80)..(80): n is a, c, g, or t
  misc_feature (85)..(85): n is a, c, g, or t
aaactgtttccacctgtggacaaatgagttcatccacctttccgtgttggtttgggatttgttccctgtttacaatattnccgtntcttgtttctggtttttgggttt

SEQ ID NO: 302879 - DNA, 184 bp, Homo Sapiens
  misc_feature (97)..(97): n is a, c, g, or t
tagagatggggtcttgctttgttgcctaggtgtctcaaactcctggcctcaagcaatcctcttgccttggcctcctaaaatgctggaactacaggtntgagcccctgcacacagcttgaaacatttattgttgaactgagtacacaggaacccatcaacacatttttcaattactgaataaacc

SEQ ID NO: 302880 - DNA, 423 bp, Homo Sapiens
  misc_feature (89)..(104): n is a, c, g, or t
  misc_feature (345)..(345): n is a, c, g, or t
  misc_feature (350)..(368): n is a, c, g, or t
aattaaagcagggaaccttctgtgcctggagagcctcagcatctaggggcagtgtcctgagccaccattccagggaagccatttgcaannnnnnnnnnnnnnnnaaaaaatgttgctgggtctgcgtttttccacatcctctgaactttccttcctgctagctttctatattgcttcctactttttctctgctttgggtataagcttctaggaatagaattttaaatcttagatggcttccccattctatatagctcttgggagtgctcacgtcaaagacttctgggaggctttctgcccagagttgggctgctggagaagattataaaggcaccaccatttttnaaggnnnnnnnnnnnnnnnnnnngggaagtttgggaagtttcattccagaaaagtaaccccatgaccactggaaacaa

SEQ ID NO: 302881 - DNA, 463 bp, Homo Sapiens
  misc_feature (122)..(122): n is a, c, g, or t
  misc_feature (167)..(167): n is a, c, g, or t
  misc_feature (170)..(172): n is a, c, g, or t
  misc_feature (378)..(378): n is a, c, g, or t
  misc_feature (408)..(408): n is a, c, g, or t
  misc_feature (428)..(428): n is a, c, g, or t
agaaaaatacccttgggttgatcatattcaggttaaaggttgctgtatccaataaagttaaaaaaggatgttaaaatattttggctaaattgttttttatacctcaattttttcaactatanaataaatccaggtgttttccaaacaccacagaggtattatcaganaannnggggggacaggttccgccacaccccccaaccacagtatgagtttagtgtatcctttccactttccttaatgctcatgcacatggactcatgcattttaatttgtagaagacagagtcatactctacacaatactccacatatagtgttcacataacccatcaaggcatgctccaggccaacacacccgagtctgaatttcatcctnttccaacagccacacatggggaagcatctnccattcatttcgaccagatnctttactgatggggtttcaaggtttttcccagttt

SEQ ID NO: 302882 - DNA, 454 bp, Homo Sapiens
  misc_feature (137)..(137): n is a, c, g, or t
  misc_feature (234)..(234): n is a, c, g, or t
  misc_feature (337)..(337): n is a, c, g, or t
  misc_feature (403)..(403): n is a, c, g, or t
aatgaaactatataaaccaaggcatttctgactccagtaggaggcagctgctctgagggagaagccctggccaggaatctgttatagttatttttgtcaccaactggaatggccttgggacaaagcacaacagctgncttgacctcatcgatagccttgacctcatccctcgtgtcatgctgtgtcatcttcaacatctgtcacttccatcagccttagcattggccttggctncagtttcctcatgtgtgacttgaggatgatgattcttataggaatcaataagcttgggataaagaagctattgggtcacattatacataatttaaatgcattnaagtggggtctgcagttcctagagattagcagattgcattgcgtggagaacagagccatgggagantgtttgaggtcccattaatagctgataggaggctgatcagtaaacactggg

SEQ ID NO: 302883 - DNA, 203 bp, Homo Sapiens
  misc_feature (191)..(191): n is a, c, g, or t
tgataatgaatttgttcaattatctcttaggatgttgtcctcatgtacatggttaaagtcagacacatctttcaattcggaggaagagggaaatttcaagcaaaagtggagggaaggcaatttccttttaagcaaatagtgaggaagttgcatacatcacttttattcacattccattgacaaaaattttntccatggcccac

SEQ ID NO: 302884 - DNA, 243 bp, Homo Sapiens
  misc_feature (115)..(115): n is a, c, g, or t
  misc_feature (219)..(219): n is a, c, g, or t
ggaggacaatggaaaatggggtagttcttagaaattagaaccaggggacagctacacaggctaaccaagaaatctcctctactgaaatagcaagaatcttggaaattcctacggnctgactgtgacatgtttcccattcttccatcttctgaatgacagcttttattgcagttatatttttcctaccacttttgtatactgggatgtgagatgaacagnaaacacattagtgaactgtgaggg

SEQ ID NO: 302885 - DNA, 389 bp, Homo Sapiens
  misc_feature (336)..(336): n is a, c, g, or t
atcagagctcttgagtgactaggtgtgttgtcagggagcagtaattttattcatatatttttaaatttattttaagttctgggatacatttgtataatgtgcagaattattacataggtaaacatatgccatgatggtttgctgcacctatcaacccatcacctaggtattaagcctgggcatgcatttagctatttttcctgatgctctcccccacttcccccaagcagtaatatttttaaagggaattttttttccccctgaggcagtaggatcttcaaccagtggggctttaaaatatttcagtaaaccctgggtaggaaaccaggtgttggngtccatcttggggttttgttgggcggccactttaccaggggcaccagggcaaa

SEQ ID NO: 302886 - DNA, 405 bp, Homo Sapiens
  misc_feature (172)..(181): n is a, c, g, or t
  misc_feature (322)..(322): n is a, c, g, or t
  misc_feature (347)..(347): n is a, c, g, or t
  misc_feature (362)..(362): n is a, c, g, or t
  misc_feature (368)..(368): n is a, c, g, or t
  misc_feature (379)..(379): n is a, c, g, or t
cttctcctaatagaagcttttggctgaaacaagaaacgtttttgaaagaagcatattgtcattatccttttgtgaaattttaatagccagatttgtattcttattcatatgtaacaaaaaccttgctagcacagtggtgataacagaggtacctgcaagtaaaactgagggnnnnnnnnnngaagtaaaagaaagaaaaagcagctttgaagcaggtacttacacaaatactaccttgatttaccacatatctgtaatgggatggcctgggagtagtgactgcagcctggaaaagtaatttaggggcatggggtatttaacntgatgacccttatcccataaaatanttttaggttatcccngttggnaggttcccganttttaggtttgaccaaaaccgggagg

SEQ ID NO: 302887 - DNA, 394 bp, Homo Sapiens
  misc_feature (12)..(12): n is a, c, g, or t
  misc_feature (65)..(65): n is a, c, g, or t
  misc_feature (361)..(361): n is a, c, g, or t
  misc_feature (374)..(374): n is a, c, g, or t
aattcgccacgngggggagaagggggtacagtggggtatgaaggaggagagtcatcataggttgngttcaggtatgtatatactctagttttggatacatgacaataattttctttttaagcaaaggcaatgtcaaaaagaggttgcaaagacctgctggaaaaaggagaaaagttttgcttcatgaaaaggtccatggagtcaatctttacttactctcgagctcttcctggagagtgaattctttactttaggcgctcgatgctcagtaaattgtgaaactcttccccctctgcgtataggcattagagacttttggagatgcatccagaatttatcaaactcctcagcaattcaaatnaatgattaaattncatggtttgcttttagtgcc

SEQ ID NO: 302888 - DNA, 433 bp, Homo Sapiens
  misc_feature (380)..(380): n is a, c, g, or t
  misc_feature (396)..(396): n is a, c, g, or t
  misc_feature (414)..(414): n is a, c, g, or t
agcactttgggttgcaaggatttagctattagttttgagagcagaaatcttagcttaaatttaggtgcctgccaacagtatgtttcatggaattctcattctggtacctaattaaaaatgtcagttgtatccagcaactgttgtattattcatgtgcatggaagttcatatctgaggaaagtacagtcaagaatgatcaacaaatatgtgtgatagatttagctaaaaagtagagataaacagtttttctcttaaatgcattcctaaaaactctctttgatcttcggctatcacacatacactgcccagttgtgttgggcatcttatttttaccaaattgtgcaatatgtttcttttaaaaattttacccagttgctaanttgctgtacacaaggngcattgtgtgggggctcntaattaggccggttggcag

SEQ ID NO: 302889 - DNA, 337 bp, Homo Sapiens
  misc_feature (52)..(52): n is a, c, g, or t
  misc_feature (71)..(71): n is a, c, g, or t
  misc_feature (126)..(126): n is a, c, g, or t
  misc_feature (186)..(186): n is a, c, g, or t
  misc_feature (195)..(195): n is a, c, g, or t
  misc_feature (203)..(203): n is a, c, g, or t
  misc_feature (213)..(213): n is a, c, g, or t
  misc_feature (223)..(223): n is a, c, g, or t
ggagagctgtctattcagatcctttgcccattttaaaataaggatgtctttntattattgaattataagantcctttatatagtctaaatacaagtcccttgtcagatatgattggcaaatatgtnctcccattctgtgtgttgcctttccactttcttgatggtgtcctttacagtacaaaagtnttaaatttncataaagnctaatttgtntttaattttntaacttgtgcttttggtgtgataatctgaggaagatgtttttaaccctactattgagcaagaatatgggatatcacagttaattcatagtaattgggtataggctcgtgaaatg

SEQ ID NO: 302890 - DNA, 282 bp, Homo Sapiens
  misc_feature (219)..(219): n is a, c, g, or t
  misc_feature (254)..(254): n is a, c, g, or t
  misc_feature (262)..(262): n is a, c, g, or t
cacccagccatatttgccctttaaaagggaaaacctaaggaaactgatgttaaccctttgccatcgccaatctcattgatgtcggccagtcaatcctgtcaaatcttgctctttttttaatgatgcttgaaaattgggagcctcacaactgtttactaggtggggtctagggatggtaatttctgggaaatgactgtagactatggccaaatgtctttnttagcctgttatctgaccatgcccagatgggcttnaacttttntctaggcagtgtcaattttt

SEQ ID NO: 302891 - DNA, 388 bp, Homo Sapiens
  misc_feature (328)..(328): n is a, c, g, or t
  misc_feature (375)..(375): n is a, c, g, or t
aagcatattttaaacttggttgcttgtctatataaaaatgatgatattccttctcattcacatctgtcagtaaagatcacaaatattccctctgtcctataactttcttctatgaaaataagttctataaaagtcttcattttctatatttgagggaaactaatataattgtggaagttcccttttagaattttttcttacaattaaaaaaatagatgtcaagcaatggtgaatatactgtgtaaaaagcagccgtataatgttttaagttatggtattgccataaaggacttataacactaatttgtctgaaatattaatcaagggnattaggaaagccaatattgtccattttgaggatatgggagatatttncaggaaaattgac

SEQ ID NO: 302892 - DNA, 161 bp, Homo Sapiens
  misc_feature (88)..(88): n is a, c, g, or t
  misc_feature (112)..(112): n is a, c, g, or t
  misc_feature (132)..(132): n is a, c, g, or t
  misc_feature (142)..(142): n is a, c, g, or t
cacacccggccatgaatcaaccagtcttcttgatgtagtatcagaaatacttaggatgtagctttaaaggtctatatgaaaatagggntacttgtacttatctcggggaaanttttccaaatatttaaaacnaattttaaantaaaagatgtaactgttcg

SEQ ID NO: 302893 - DNA, 272 bp, Homo Sapiens
  misc_feature (52)..(52): n is a, c, g, or t
  misc_feature (88)..(88): n is a, c, g, or t
  misc_feature (93)..(93): n is a, c, g, or t
  misc_feature (102)..(103): n is a, c, g, or t
  misc_feature (108)..(108): n is a, c, g, or t
  misc_feature (120)..(120): n is a, c, g, or t
  misc_feature (134)..(135): n is a, c, g, or t
  misc_feature (141)..(141): n is a, c, g, or t
  misc_feature (166)..(166): n is a, c, g, or t
  misc_feature (186)..(186): n is a, c, g, or t
  misc_feature (192)..(192): n is a, c, g, or t
  misc_feature (204)..(204): n is a, c, g, or t
ccttgtgggccccctggccaccacagtgttgcatcaccatcattcccttgtncagtggagcagggtattgtatgaagctcagtaaatncattncccatattnncattnccgtggtatagncactaggatacttnnccatanctgaggaaaagtgaaggatattagnctttatgggatatacattgncttctnatgggaaaaggnccttaaaaggtggggaacttggggcttttgccttttgttttttggggggccatatgtaggcacggttc

SEQ ID NO: 302894 - DNA, 478 bp, Homo Sapiens
  misc_feature (194)..(336): n is a, c, g, or t
  misc_feature (395)..(395): n is a, c, g, or t
  misc_feature (415)..(415): n is a, c, g, or t
  misc_feature (428)..(428): n is a, c, g, or t
  misc_feature (462)..(462): n is a, c, g, or t
aaaatatccacaatgagcatatttcactttgtgacagaatacagagacacaaactcaaaaaatacaaaggggcattcagtaaagcatacgtttttgtcttacccttgtccgtcagcccccagcttcctatctccagaggcaactaccctcagcagtttttttcttccagagatagggtatgcaagaacatatcnnnnnnnnnnnnnnnnnnnnnnnnnnnnnnnnnnnnnnnnnnnnnnnnnnnnnnnnnnnnnnnnnnnnnnnnnnnnnnnnnnnnnnnnnnnnnnnnnnnnnnnnnnnnnnnnnnnnnnnnnnnnnnnnnnnnnnnnnnnnnnngattacccaaatgagcccagtgtaattgcaaagatacttaaggagggacgtagggaggntcaatgggaggagagaagtncagtaatgtaatngatgggaagcagaggttggggccattgtgccttnaaaggtgggagggttg

SEQ ID NO: 302895 - DNA, 338 bp, Homo Sapiens
  misc_feature (80)..(80): n is a, c, g, or t
  misc_feature (113)..(113): n is a, c, g, or t
  misc_feature (134)..(134): n is a, c, g, or t
  misc_feature (208)..(208): n is a, c, g, or t
  misc_feature (213)..(213): n is a, c, g, or t
  misc_feature (216)..(216): n is a, c, g, or t
  misc_feature (225)..(225): n is a, c, g, or t
  misc_feature (229)..(229): n is a, c, g, or t
  misc_feature (273)..(273): n is a, c, g, or t
atcaggcaatatctgtgagagtccccaatatgaagcttctgtgttctcaggatgtgtcactctcctggcacattgacgtntatcaccaaccagggaaacacacctgagttttnggagtccagagtttttatttnggctcgttacatatgcgtgattgatagtattggctttgcgattaaactcaattttcatttggcctctgctcccnggagnatnggaggccangctngtatcacgtgactctatacctcagtggttgatctttccagcatngccagcctccatccttaaactctcattgaggccaaccagtagtcattggttgggcataaattcag

SEQ ID NO: 302896 - DNA, 270 bp, Homo Sapiens
gagcatgagcttcaatccctgtttctctcagcatcaccaaaataacaacttccagcaaccccactccagcccaacttcaaactccaattgttaatcttgcattcactactccacaaatactttttacttgtatacaaacttaatgttgattttaccttcattcaatgtttatttagttacctatatattttcttcatatttgtacatgtcagtctcacctgtacttaactagtaggttcctaaagggtaaaatgaataaacacttggatt

SEQ ID NO: 302897 - DNA, 466 bp, Homo Sapiens
  misc_feature (380)..(380): n is a, c, g, or t
  misc_feature (404)..(404): n is a, c, g, or t
  misc_feature (422)..(422): n is a, c, g, or t
tcctctaaaaccacagtaaattgctccatttcctaaattacctcttcaagagaagactggttttgatgtcatttttaaataaaggagaagttgaatttcaaaaccaagtggaacaggaatgatgtgacttggttgacattgattttaacatttggttcatggtgagtgttttgctttattgttaaaaactcgccactaaaagcatgacagaacattttatcaaatgatggcgtcatcctttaccgtaagtttgcccctagcaagacagctcttcctgagacgtgcttgcaggcccctatgtgggttttcccaccgcagtcatcatccgtcatctgtgaccttgctgcatttactccatgctcacaccccagcagcccgcnggggtttgggcatcgcccttcagngggcatcaaacttccccnggtggcaatgttacaagagttaggccagggaggttggcaggagt

SEQ ID NO: 302898 - DNA, 169 bp, Homo Sapiens
  misc_feature (147)..(147): n is a, c, g, or t
gtgcccagccaccagcagtaaatttttgaggaacttaaactaccagccttatcttggtagataccccatcttctcaaccttgatgagccacaggattttgttgttactgttatttgaatttttataattccaagccatttaaagggnacaagtgtggtcagctttatta

SEQ ID NO: 302899 - DNA, 341 bp, Homo Sapiens
  misc_feature (128)..(128): n is a, c, g, or t
gaatctaataattctaaagcactccttgtatcatgtatctccctttatttcaatatctccttaattctctatacctgtgagataaagtcctgatcccttaacatagttttatgaaatctggccaaaanttaccttccaacttacagtagcatatgaattccttatacattcctgtcacccaactttgcccacaattttttccatcttatatgacctccactctatctaaaattattaagactcgttccagtcttacctcttccataaagtctaacctacccccatagactcatctgaatgtgacatttaatcacatactactctatggtagctcatgaagt

SEQ ID NO: 302900 - DNA, 355 bp, Homo Sapiens
  misc_feature (49)..(49): n is a, c, g, or t
  misc_feature (138)..(138): n is a, c, g, or t
  misc_feature (242)..(242): n is a, c, g, or t
  misc_feature (270)..(270): n is a, c, g, or t
ataatttagcaaaagtttgttaagcagaagagggaacaaactagttctntgtagttccagaggatagaggtagaggtctaggtatctacaaggtttagagtgcacaaaacatgcctcttcctctctgggagaattttnatgccgtttataaaacaaaagcaattcttcccttacaggtaacacaaggaacacactgtttctttaccagaatgtaaaaaatttagaaggccagtggctgaatntgtttttacttgatcttatcttaaaganttatgtgtgactaaggcatttcaatgcaagaatgcattgactagggaagacaggatttcgtcttattatggagaaagaactttta

SEQ ID NO: 302901 - DNA, 382 bp, Homo Sapiens
ttacgggtagggaaaggagacctggctaggaaaggtggtcttgttagaagctttctgagagaatggatgttaaatgtttaagacctttaaaggtgtcagacaggctctcatttaaccttttctagattccagacaagggaagtcctggctgcattaatggagattctccatagacgcagatttctttcaaaaaagacagctttgcagcaccacttctgtttgctggccctctgatagccatctcaaaatatgtcaaataaatataatttgaggtaaaacatttttatttccttcaaccactacctttccttcttccccagccagtccttaaggcagtcatttaaaaaattaggaaactttgcacctaactggaattcttaat

SEQ ID NO: 302902 - DNA, 475 bp, Homo Sapiens
  misc_feature (336)..(336): n is a, c, g, or t
  misc_feature (348)..(417): n is a, c, g, or t
  misc_feature (428)..(428): n is a, c, g, or t
  misc_feature (451)..(451): n is a, c, g, or t
aaatgttgatgaattgctaatacctggatttcccaggagtgtaactaacattatctgggaagaatgaatctgaatcagcttctccttggaatccagcatcctagtcccagcgcttgggaatactacttttccagccatggtctttcttgagttgctgttaccagtgaaaccttgggctgcccccaggtgtgtttagcccagaggagaggactttcttgccctttctttccatcttttagctccttatcatatactggttcagttgtacccttttaccttacccatttctactatcatggaggttcagaattcacatctgaattcaaaagataattngggagccagggnnnnnnnnnnnnnnnnnnnnnnnnnnnnnnnnnnnnnnnnnnnnnnnnnnnnnnnnnnnnnnnnnnnnnnccagggatttngaaggttacagttaaactttcanttgtgtttattggcatttccaact

SEQ ID NO: 302903 - DNA, 414 bp, Homo Sapiens
  misc_feature (321)..(321): n is a, c, g, or t
  misc_feature (360)..(360): n is a, c, g, or t
  misc_feature (391)..(391): n is a, c, g, or t
ttcttgatttctaacttgtttgctctaaggtaaatgattgcctgcttaccaaaaatctctatttgacacataatagaattgccgtcacatgttgtttaaacaatctgtatctgatatgacgtgcatctagtcacactttaacatctacaataaatgaataggagacagaactaggaatctttaggagaattttgggagttcagtttgacaaatttagccaaaggttatgaaggaaaatacagttcttaggccccaatgttcttgtaggtctgggactttcaaggcaatcaggcatggatttaggtcccggcttttaaagcnggtcaggctttgttatggcaactatacttagggaccaanggggggggccccattgtggtgtggtgtgtgngtttgtcccccatttttaaaggg

SEQ ID NO: 302904 - DNA, 404 bp, Homo Sapiens
  misc_feature (39)..(39): n is a, c, g, or t
  misc_feature (64)..(64): n is a, c, g, or t
  misc_feature (67)..(67): n is a, c, g, or t
  misc_feature (77)..(77): n is a, c, g, or t
  misc_feature (80)..(81): n is a, c, g, or t
  misc_feature (137)..(137): n is a, c, g, or t
  misc_feature (232)..(232): n is a, c, g, or t
  misc_feature (259)..(259): n is a, c, g, or t
  misc_feature (265)..(265): n is a, c, g, or t
  misc_feature (307)..(307): n is a, c, g, or t
  misc_feature (337)..(337): n is a, c, g, or t
cgtaaatcaccctaatgaacgatttagtcatcataattngatttagtgttttcaggacgacatngtncagtgtattnttnnattggtttggaaggtagtgagtaagatatttctaagggcaaaaaggaaacagtttngaaaattcttagcctaatactgagttggccagggatgggtgaaacagagttaaaggaatgtgttggccccttttcttgtgcacctaggaaatccnccaggggcccagtaaccattttagggnttattntattaaaaaacaggcctttgggcttccccgtggttattgatncttcagtttctgcaggaacttaggaagggnaaatttacccccaaggtaaagtgaggaaggagccttaaccttgtaccctgggatgccccaaaatggg

SEQ ID NO: 302905 - DNA, 377 bp, Homo Sapiens
  misc_feature (202)..(202): n is a, c, g, or t
  misc_feature (348)..(348): n is a, c, g, or t
  misc_feature (366)..(366): n is a, c, g, or t
cctaaatcattatataatctttgaaaataggacccttaatggctgcatgatatttaatctttcatacagttttctctttctattgaagtataataaacatacatacaaaagagggcacagatctaagcgcacagctcaaaatactgaggtaaacacatctatgtaaccaggcaaccaaatcaagaaacgaatcagtatcagncattccgggagcctctactgtgtcccattccaaccactcagggtaggctattacccaggtctactaaatacaagaactcacctgtttttacatggatataaataaaataatagggggtacataaggtttttggggtcggggcttcnttcctggcaacatggtgnttggtggaatt

SEQ ID NO: 302906 - DNA, 339 bp, Homo Sapiens
  misc_feature (218)..(218): n is a, c, g, or t
  misc_feature (289)..(289): n is a, c, g, or t
ggtgcccatgaaactctatatacagacaaaacaaagacatctatcaggacacaggcaggtgaacacctgtcagcagcctgtggtacccccaagggtaaaacagactgttcccctcactagagaactacacatcctcagagcagcctgtgaagtacagaccattactcaaccacatacatatcgaacatgaggaacacaaaagaaaacaccctatggantaaatttgggaatcattttggtaaaaatgtctctgttagggacaaggctactgttaaaaatatccaaggcnggggtacagggggactctctctggaaaatattacttcttggggccggggg

SEQ ID NO: 302907 - DNA, 304 bp, Homo Sapiens
  misc_feature (34)..(34): n is a, c, g, or t
  misc_feature (67)..(67): n is a, c, g, or t
  misc_feature (104)..(243): n is a, c, g, or t
  misc_feature (268)..(268): n is a, c, g, or t
  misc_feature (280)..(280): n is a, c, g, or t
agagtcttgctttttaatcacaaaacaaatcctntcctttccaagtaatatcctctcaaggccaggnattctgtaagtagatagccttcttaaaaaacattccnnnnnnnnnnnnnnnnnnnnnnnnnnnnnnnnnnnnnnnnnnnnnnnnnnnnnnnnnnnnnnnnnnnnnnnnnnnnnnnnnnnnnnnnnnnnnnnnnnnnnnnnnnnnnnnnnnnnnnnnnnnnnnnnnnnnnnnnnnnnggagggtatgggtgggtgggtgccnggtaatcacagntactcagggagggctgagctaggg

SEQ ID NO: 302908 - DNA, 435 bp, Homo Sapiens
ttccctattgcaatcagatcaggaagttataaaatctattattttctaagaatagtgtttgaagttgtcaggagggtccagatgtgacttccaattatttattgtctaacttgcctaattcttcttcaccaacaaccattcaccatattaagacatttttagcattcaaagggacacattagcttgctgctcagcaagatgatgagaaaaaaagctagcatttttatgcaaacttgttcgtgtgtaatatttgacaagcatcattgagtgcctctacgtgctcatgcatctatgtgacagtatgcaaagggttgtggatacaaagatgcagaataaataatcttttattcttgtttgtcttctagtgtcatagtaaagtaaaatatggccttgggccagagacaggacattgggatgggcacttcgagcacactg

SEQ ID NO: 302909 - DNA, 124 bp, Homo Sapiens
  misc_feature (49)..(49): n is a, c, g, or t
  misc_feature (107)..(107): n is a, c, g, or t
agcaccgttgcccggtctaaataaaattttgaagaggctagaaccccgnaattgtgcctttgagctttattgacctcaacaactgggttccattaaaaatttatttncaaatttatggtggcgg

SEQ ID NO: 302910 - DNA, 171 bp, Homo Sapiens
  misc_feature (117)..(117): n is a, c, g, or t
  misc_feature (152)..(152): n is a, c, g, or t
tgagcactgcgcctgggccttaaatgtgtttaataataacaatgcatccaatatacatggggggaaaaggggaatgatttataaccttaaaggggtagtaagttctcaaatatgggngggttccctaaaaatacgtgagggttaatgaggantttcagagccgggagtttt

SEQ ID NO: 302911 - DNA, 355 bp, Homo Sapiens
  misc_feature (67)..(247): n is a, c, g, or t
  misc_feature (312)..(312): n is a, c, g, or t
  misc_feature (344)..(344): n is a, c, g, or t
tatttaaacctggagttaacggaggtgaagactgcttagcttcaggtcctgggtatgatgctgagcnnnnnnnnnnnnnnnnnnnnnnnnnnnnnnnnnnnnnnnnnnnnnnnnnnnnnnnnnnnnnnnnnnnnnnnnnnnnnnnnnnnnnnnnnnnnnnnnnnnnnnnnnnnnnnnnnnnnnnnnnnnnnnnnnnnnnnnnnnnnnnnnnnnnnnnnnnnnnnnnnnnnnnnnnnnnnnnnnnnnngctattcttattttataatcttttgtaggatattgatgaagtaggaaactgaaaaagtatggganatggaaataggctctaaagtaataaaaggganaatgtccccga

SEQ ID NO: 302912 - DNA, 450 bp, Homo Sapiens
  misc_feature (342)..(342): n is a, c, g, or t
  misc_feature (357)..(357): n is a, c, g, or t
  misc_feature (378)..(378): n is a, c, g, or t
  misc_feature (385)..(385): n is a, c, g, or t
  misc_feature (393)..(393): n is a, c, g, or t
  misc_feature (401)..(401): n is a, c, g, or t
  misc_feature (417)..(417): n is a, c, g, or t
  misc_feature (439)..(439): n is a, c, g, or t
ctttcaagtagtatagttttattgtagtatgtttctctttttcatttggttgaaaacctgttgttttcttattcatttccaatttcattgcaccataatctgaggatgctgtatgtaaaatttacgtcaaaagtatttactacgaaatggtgtgtattcaaatctgtggcatttaaaacaaagtgctcaggcctactacttccatttcattctcttaaaaatttatcttattacattactgagggcaattaaatttttgtttatttgaactgaaattctcatagtgaggatattatctcttattcaagtgttctgggtatacagctcttgcatttattgggnttttgtgccattccntgtcttcccgttataaggggntacatcngttaggcntataaggnggccgtatataaggtntacccccaattttaccaaaggnggtcccgggtt

SEQ ID NO: 302913 - DNA, 426 bp, Homo Sapiens
  misc_feature (280)..(280): n is a, c, g, or t
  misc_feature (363)..(363): n is a, c, g, or t
  misc_feature (402)..(402): n is a, c, g, or t
ttaaaatgtaatatacatataggaaaatgcacattgtcataagtgtagtcagtgattattcataaacttcatataaataacaccaaacacccagtacttccaaagctctttgtgtttttttctagttgtgaagacccgtccccttccctcctccctctttaccccccacgtatcctgtaaccagtatcccaacctagattatgtttagggcattaggattttaacatagggaaggattctggttagaatggacctgctgttgtttaggcagtggggaccngggggccaaagcgcagggtaggagttgcggtgcagcctgcctgctaaaatttatggaggagggacaaccctgagggaaagttncaagagctttccagctctgaatttctcctttaattcctnacgtatttttaggggtaccaggcc

SEQ ID NO: 302914 - DNA, 125 bp, Homo Sapiens
  misc_feature (52)..(52): n is a, c, g, or t
  misc_feature (62)..(62): n is a, c, g, or t
  misc_feature (105)..(105): n is a, c, g, or t
ataatacggaagaagtatgcataggacagttggaaaacaccaaggaaaagtncacttaggcntaggagggagtggacagggggggaattgggcattggctggatnaacaaaaattcttttgggag

SEQ ID NO: 302915 - DNA, 424 bp, Homo Sapiens
  misc_feature (412)..(412): n is a, c, g, or t
acatataggatggatataggcatgtccacttggctatggtccaggcaggtctggctaacacaagcagaaacaagtggggtcagttggggtttcctaacagccctgccttatctaataagggaagtttctctgatcaaaagaaaataataagaagcaaaggtacaaacatattaagcagtagttactttagtcaagcttacgattatcagagaattgtaaagaagatccactactggggtaggagaaaggagctgtagcctttttaatgacctagactctaggaaagttagaggaaataaaattcctttttcttctatttgtaggaagaaaagtgctatgtcttagtacacagagggaaatttataggattttagatggagagatcttcttttccctttatgtggcattgttntcttgggctttt

SEQ ID NO: 302916 - DNA, 311 bp, Homo Sapiens
  misc_feature (219)..(219): n is a, c, g, or t
  misc_feature (271)..(271): n is a, c, g, or t
tgctataaggtatagataaacatctagcttaaatttttttcaaatgtctagtctttagtccactgtatttattgagtaatccagtgttttaccactgatttgaaatgctattttaatcaaaaacaagaatctcaaatgcattgggatatattttgctccattttaagctgactttctgtgtctagaaggccttgtcatttatctcattgttcataattncctcaggatgtttaaaggggaacttttaaaaacattgtcaattatacaacgntacaaccaacaatttgaattttggattttttctctggtaa

SEQ ID NO: 302917 - DNA, 309 bp, Homo Sapiens
gtcagtttttaatataaaaagcttagatacaattaagctgtctgtagcaattaccattgattgccatgagttaaatcttcaacattgtagaggctgaggcagtactctacgtttactatatctccctctatatgttggattgattagtagtccagaggtaccttcagagccttggaaaattaagaactatatagtgggcagagaccctactcttttcagctaaatcatactcacccaaaaccaaagtacttaattgtgtgaggtgaaaactaaatttaaaaatacttcctctttgccagggtgtgggtg

SEQ ID NO: 302918 - DNA, 373 bp, Homo Sapiens
  misc_feature (98)..(98): n is a, c, g, or t
  misc_feature (133)..(133): n is a, c, g, or t
  misc_feature (162)..(162): n is a, c, g, or t
  misc_feature (261)..(261): n is a, c, g, or t
  misc_feature (315)..(315): n is a, c, g, or t
  misc_feature (340)..(340): n is a, c, g, or t
tttttttacttctaggacttcctcagtttccagtctgctgattacagcctttcttagtttcaattttattatttatttttaagtcatttctttctcanttagggtgggaggggaggagggtgaggggatacanctgctttcttgcttagttgcctctgacanatttcagttcagaggttgaatttaatcaagcacaagaggaaattgataggactctcgggtagaccactaacaaacagggaaaatgtgaggcatccgggngacctgctgaggtgggggctgagagaaccacggagttctgggagagggagcccnggcacagctgaaggatgctgagctnagcctttgaccccggatgcagaaacccccaccc

SEQ ID NO: 302919 - DNA, 453 bp, Homo Sapiens
  misc_feature (260)..(260): n is a, c, g, or t
gacagagtcttgctctgtcagccgtacaattataaattatagcccactgcagccttgactcttgggctcaaacagtctttccacctgagcctcctgagtagttaggactataggcatgcaccaccacgtttggctaatttttgaatttttttacagacgggtctcactatgttgcccaggctagtctcaactcctgggcctcaagggaccctcctacctttgcctcccaaagtgttaggattactgggcatgagccactntggctggccagctatgggtttttgatgtacagtacaatagaacataggatacagtaggcatgggaaagtagccacaattaaagttgtaaatttaatatgtcgtgtgagtaatcaaaatggggttgtaacaggttttatccaagtttattataaatttgtatagggttacctaggatggggatttggaaccccc

SEQ ID NO: 302920 - DNA, 442 bp, Homo Sapiens
  misc_feature (86)..(86): n is a, c, g, or t
  misc_feature (376)..(376): n is a, c, g, or t
  misc_feature (383)..(383): n is a, c, g, or t
  misc_feature (403)..(403): n is a, c, g, or t
atactcattgatttgagtaattagaaaaaaaaggaagcattgtaagcagcattctgcagctgaatttatccctgtctttttacttntaactagagttggagaaaaaaatgtaaattacactatttggtttcatttcttagtttggaaaaatgagtatgaccagcagtaattaattagcagaggcactatttatgtaatggtttccttcagatagtgtaccttgaggggggaaagtagggaagtttgcatattttgtggggctttagtgactataatttaggcaaaacaatatcctggaatgtattagggaaataaaaatgacagattccatcttgccggtattttcctgccccggaaaagctatttatggtaaggngttaaangttgtatttgtattgtaggnacaaaggtaggccgcaaaggtggggctccctagtcactt

SEQ ID NO: 302921 - DNA, 380 bp, Homo Sapiens
  misc_feature (184)..(294): n is a, c, g, or t
  misc_feature (318)..(318): n is a, c, g, or t
  misc_feature (331)..(331): n is a, c, g, or t
  misc_feature (343)..(343): n is a, c, g, or t
  misc_feature (360)..(360): n is a, c, g, or t
acacgtagaatctaattttattttttagcatttcagttgtctgccttatcaagtattaatatttaaataattctcatagatatattaaatgtcttcatttcttttaaacttttaagttctctttctccaattataatcacaaacttcggaaaatgttatacctttcaacttacagtcgctatcnnnnnnnnnnnnnnnnnnnnnnnnnnnnnnnnnnnnnnnnnnnnnnnnnnnnnnnnnnnnnnnnnnnnnnnnnnnnnnnnnnnnnnnnnnnnnnnnnnnnnnnnnnnnnnnggcaacatgggcgaaacagttgtnctaacaaaattantttacaaaaaanttaggccgggcatggtnggcacacacccgtgggtccc

SEQ ID NO: 302922 - DNA, 103 bp, Homo Sapiens
cctccgcctcccgagttcaagagattgttgtccctcagcctcctgagtagctaaaactacaatcgcacacaaccatgcctggctaatttttgtatttttagta

SEQ ID NO: 302923 - DNA, 380 bp, Homo Sapiens
  misc_feature (336)..(336): n is a, c, g, or t
gacagattttcactaagaaaagttagttctctaccttatataatgcataaaagaaatattccagatggaatacaaatccacatgtaaaactaaaaccattcaaatatcaaaagataatgatttgacaggtaaagagcttggaagttatcactgctgtccccacaacaagaaaaaagctcagcaaatggaaaatcaacaactcttctcagatccatcagagaaatgaggtcatggggcaaactgctatcctgaaaactggagagacaggtgaatgcagagaatcagaacttacctgagaagccagggaacagaagctgctgctgggagccagtactnttcaggacacttcacaggccaactggacaaatgtaattaggcac

SEQ ID NO: 302924 - DNA, 475 bp, Homo Sapiens
  misc_feature (378)..(378): n is a, c, g, or t
  misc_feature (380)..(380): n is a, c, g, or t
  misc_feature (402)..(402): n is a, c, g, or t
  misc_feature (435)..(435): n is a, c, g, or t
  misc_feature (454)..(454): n is a, c, g, or t
gatgctcatcaatgatttataaattaatgaactcaaatagttgtagaagatttcacagggaaaaaatgcatttctcttatttggccaattgcaagccatcatatgcaataatgagaaatgttgactatgttcggacaaattaaatacagtaagaaaagaaagagccatctcagaataatggtagattgattccaatttttgtaatatagataatattgcaatagacattcatggaaaaaaatgttaagtgcatttctggttatagttgtaatgttcatttcataggaaataaattactgggaccaaagaaggatataaaacctcacttttggcacattttccattaggcattgcctattggcaattaaggctatttantnatagggtggaatgttaacctcntttttggtttttaggcctggctcactctctctnctcccttattattatatgncctgtggtatatgtatgtacc

SEQ ID NO: 302925 - DNA, 428 bp, Homo Sapiens
  misc_feature (123)..(149): n is a, c, g, or t
  misc_feature (168)..(322): n is a, c, g, or t
  misc_feature (341)..(341): n is a, c, g, or t
  misc_feature (395)..(395): n is a, c, g, or t
cctacccagtttcagggacctgtgctaacttccggcctcagcgttcttcttattcactcagaccctggcgagcaccttcctccttattcttttacagaagtaccaaagccaagcaaacataannnnnnnnnnnnnnnnnnnnnnnnnnngagatggagtttcactgtnnnnnnnnnnnnnnnnnnnnnnnnnnnnnnnnnnnnnnnnnnnnnnnnnnnnnnnnnnnnnnnnnnnnnnnnnnnnnnnnnnnnnnnnnnnnnnnnnnnnnnnnnnnnnnnnnnnnnnnnnnnnnnnnnnnnnnnnnnnnnnnnnnnnnnnnnnnagggtttcaccatgttggnccagggttgtcttggaactcctggacctcaggtgctctacatgccttggccttnccaaagtgccgggatttacagggcgttgggcca

SEQ ID NO: 302926 - DNA, 363 bp, Homo Sapiens
  misc_feature (183)..(183): n is a, c, g, or t
  misc_feature (243)..(243): n is a, c, g, or t
  misc_feature (283)..(283): n is a, c, g, or t
  misc_feature (300)..(300): n is a, c, g, or t
  misc_feature (307)..(307): n is a, c, g, or t
  misc_feature (313)..(313): n is a, c, g, or t
  misc_feature (318)..(318): n is a, c, g, or t
  misc_feature (323)..(323): n is a, c, g, or t
  misc_feature (344)..(344): n is a, c, g, or t
cacataaaagccttctttggaccgtctcggactagttagctttgctaggcaccaacatggtaccttgtaattgccttcattacagcacttatcacacctggatcatatttcacctgattgtcttctcgtccccctttgatactgagtacagggagcaatgtctggatatttcttaccactatnaaccctaggactccagtatccaggcacagaggtggacaccaataagggggaagtggaacnttttttttaaaggaactctttgttgggccagttcacagtnggctcaagggctgttantcccggncatttnggggnggccnaggccgatggggttcaccggnagttcaggtgtttggagac

SEQ ID NO: 302927 - DNA, 423 bp, Homo Sapiens
  misc_feature (111)..(138): n is a, c, g, or t
  misc_feature (259)..(268): n is a, c, g, or t
  misc_feature (405)..(405): n is a, c, g, or t
acactttgtgttgtaccttctatgggtttggacaaatggataatgacaggtatctaccattattatatcatacagaatagtttcactgcccccgcccccactccccctggnnnnnnnnnnnnnnnnnnnnnnnnnnnnctctatgctttgttctcctaatccctgggcagtcactgatctttttactgtttctatagttttgcgtttaacagagtgtcatatagttgggattagacagcatgtagccttttcagactgnnnnnnnnnncactaagtaatatgcattcaaggttcctccatgtcattctcatttcttgttactgctgaataaggattccattgtatgaatatttattcacttactgaagggacattttgggtgcttccaagttttgggcagttatngaataaacccgctgtagg

SEQ ID NO: 302928 - DNA, 367 bp, Homo Sapiens
tggttatggttatgtgtattttatgcactatgaatttaagaacaatttctattgataaatgataaagtgctttagtttagtttgccatttggtttatgtgatgtcatataaaagtttaaaaagacccattctttgctatggtttccggatttagtttattccatgtttacaacttacatacaacattatttcagttgaaaagaacaaatgacctatttattaactgaggcagccaatacttctcatactaataatggggtatgtattacaataaagtgggcagcagtaagggttgggtaggacttatgtatggattttcctgtgggggtccgggggagccccaaattatttattacttgaggaacca

SEQ ID NO: 302929 - DNA, 163 bp, Homo Sapiens
  misc_feature (145)..(145): n is a, c, g, or t
gtgcacaccaccatgctcattttattcattttataaaaatgggtaattcctagtccctggcccattctcccctacttatagaatgtggtattaaaatattttacccagtttgcaattatatgcttaggaaaatattatcctaagnaaaaaagtaagagaagct

SEQ ID NO: 302930 - DNA, 472 bp, Homo Sapiens
  misc_feature (268)..(268): n is a, c, g, or t
  misc_feature (451)..(451): n is a, c, g, or t
tgtgtaatacggtagcttctttaagaagatggcacagtgtattagtccactaaggctgtcctaacaaaataccataggctgagtagctgaaacaacaaaaattaattttcttatagttcgggaggcaggaagtccaaaatcaaggtgctggaaaatcatagtgcttggtgtctggagaggcctttctttttggctggcagatgcaaccttctccctctgtcctcacatggcctttcttctgtggggtcaaagcggtgggatgcggaantctggttagagctcctcttcttcttataaggacactaatcctgtcagattaggatcccactcttatggacctcatttaaccttaattatctctgtacaagccctattctccaaacacagtcacatttgggggttaggggctttcaacgtattacatttttaaggaggggcacgagttttaccntacagatttggtttgtttttc

SEQ ID NO: 302931 - DNA, 508 bp, Homo Sapiens
  misc_feature (299)..(299): n is a, c, g, or t
  misc_feature (321)..(321): n is a, c, g, or t
  misc_feature (336)..(336): n is a, c, g, or t
  misc_feature (401)..(401): n is a, c, g, or t
gagcagcctggtttcagggagccggactcacgatgtgcttgagaccctcaaattcacccctggaagcagctgcccccgtgacaaggaactaaggacaggcatgtcatggactgtgaattggagtgacatttgtccctcccttcaccaacagactgccccaagagcttcccaagttatctgccatagaataccttgtttccctcgagtctctgaaagggggccgcaaaagctgtccccacgctggaaatgcagggccaggcttttaaagttttgctcccggattatgagaacacctaganaattcagtgctcctctccactnccccaaacccctttnacaagcccccaccctttgtttaacaaacatatgatattagtgcttttcctgggtaccagataatnacttttaaggcacttggacaaaattattttggtcatacataaaacccttattatttacactgtaatttcactttcgtcaggttccagtcattgttgaaggatacgga

SEQ ID NO: 302932 - DNA, 420 bp, Homo Sapiens
  misc_feature (43)..(102): n is a, c, g, or t
  misc_feature (276)..(276): n is a, c, g, or t
  misc_feature (331)..(331): n is a, c, g, or t
  misc_feature (356)..(356): n is a, c, g, or t
  misc_feature (381)..(381): n is a, c, g, or t
  misc_feature (389)..(389): n is a, c, g, or t
gcaattataagtaaccaaaattagattattgtctttatttatnnnnnnnnnnnnnnnnnnnnnnnnnnnnnnnnnnnnnnnnnnnnnnnnnnnnnnnnnnnnagtccctcaatcctcaatactccaaagaatgccttgtatatatcaccattatgttgaatgactgagtagatggatggatgatggggaaatctgttaaatggaggaagaaatacctgcattacccagtcccagaccatagggtacctaggatatccagtaggcagtgtatatttnatgtgtaaggtgaaatattattttggcaactgctgtcccttttaaggttaggggnaggattgcaggcaaactcttactcnaaatttatggcacaggggcaattgncccctttnaaaattcccccaattttccgggggccgcctt

SEQ ID NO: 302933 - DNA, 337 bp, Homo Sapiens
gtgatggcataaagtttgcaaatatcaatatcaaactagtctctctttgtaattaaaatctactatgccgtgtttgacttttatctcttatgtaaattgaagccaaaatgcatgttaatccttctcctttggtgtatatttatgcttaaaaatatttagtgtcttccctcccatgggctaacatagctaataatgtccttattacctcatgcagtgttcatattttaaaatgctgggataatattgctttaatattcttaaataggaattgaggtaggaatccctattttaaataggattataatggctttacaatggctcttttatatctatgggg

SEQ ID NO: 302934 - DNA, 405 bp, Homo Sapiens
  misc_feature (133)..(188): n is a, c, g, or t
  misc_feature (332)..(332): n is a, c, g, or t
tgggttcaagtgattcttctgcttcaacctcctgggtagctgggactataggcacgtaccacctctcccggctaattttttgtatttttagtagaaccagggtttcaccgtgttagccaggatggtactgatnnnnnnnnnnnnnnnnnnnnnnnnnnnnnnnnnnnnnnnnnnnnnnnnnnnnnnnntgagccaccgcgcccagctgccagttttttcactttatcaattgagactgggaaataagtcctgcctcactgttacttttaaaagtaggatattttacagtcctgggatatgtatcaaaggaaactggaataattggtaaaggnataaaaaccaaagctccaattacaaaaggatttgtatgtcccgctggatacaatttgtaaaaaccggtaaagg

SEQ ID NO: 302935 - DNA, 430 bp, Homo Sapiens
  misc_feature (37)..(37): n is a, c, g, or t
  misc_feature (375)..(375): n is a, c, g, or t
ccttgtattgagataagaatttgtgtatagcctttgncaagccaggaaacaaatctgctactctctggcaattgcttccctaccctcccctgcctccgcactcccccttccccagtttatggcctgaaagaaagtttctcttccattaggtttgtcagtcagcaacctggtcagggaagaggagaaagctgttgataaatttgggagctttgccacaaaagcattaaagatgacttcaaatatgccaggccaatattctttagtttttaaatgaagtctgactagctgcagctccctttctggcatcaccatcatgcatatgggttaagagaacttttgccaagaacaatattctaggcagtgaaggggagggtnggcaaaattgattcaggttattattatggcatattattaggagtttatttgctgg

SEQ ID NO: 302936 - DNA, 413 bp, Homo Sapiens
  misc_feature (306)..(306): n is a, c, g, or t
  misc_feature (324)..(324): n is a, c, g, or t
  misc_feature (331)..(331): n is a, c, g, or t
  misc_feature (339)..(339): n is a, c, g, or t
  misc_feature (395)..(395): n is a, c, g, or t
gttatccgtaacaaacacttaagagaaatatgttggtttgctgaatgcaggctacctaaattgatgcaagttagcttgagggagtgacgttgattgcatgttttgtatcaaaagaagaggtcattttaagcatttttccttcacagctttttaaattggtctctgtggacacatggcttttaaattgctgtatgttgcagcagggatgttaactgtttgatgtccaagacttatagataactcattaaaagttatcttcaggctgaacaggtgtttaatttcaggagataaagatgataggaatgncccggggtattaataccnttgtccngtacgggntttaggcattatggatggaatggaaatctgacattatgtccgttaaaattccattncctattccaggaaggggc

SEQ ID NO: 302937 - DNA, 267 bp, Homo Sapiens
  misc_feature (163)..(163): n is a, c, g, or t
  misc_feature (213)..(213): n is a, c, g, or t
tatatagtaataatccacctagtaacagtgaagttttgtgtgaaggaaaggtgatattttggaattttgatttacatggtttggtttgtagtgttataaaattaaatttggggatagagcagttttgggaatatatctgaaggagttacaaaagtacccagtngggagagaattaaacattgggttttatgttaatagtttttcccccatacngttggggaccccaccccaaggaggattgccttggagccagggggtttttagacc

SEQ ID NO: 302938 - DNA, 108 bp, Homo Sapiens
cacctaggtatctactgtttctaacttacatatctaaaactcttgggttcaggggtctcaaggggtacaatttattcaatggacatttggcaaggggttttgtggttt

SEQ ID NO: 302939 - DNA, 412 bp, Homo Sapiens
  misc_feature (150)..(150): n is a, c, g, or t
  misc_feature (209)..(209): n is a, c, g, or t
  misc_feature (316)..(316): n is a, c, g, or t
  misc_feature (349)..(349): n is a, c, g, or t
  misc_feature (375)..(375): n is a, c, g, or t
atcttgtgcatgttttgttagattactacccaagtattccacttttgggggtgctaatgcaaatagtattttttttaatttcaaataccacttgctcactgatgatatacacgaaaagtaactgaattttgtgtattaaccttatatccnaccaccctgggtaaaattgcttattatttccagggagcatttttgtcaatttttggganattctacataggacaatcatgtcatctgtgaacaaagacagttttatttctttcttcccaatcactatggctctttatttccttttcttgtcttactggcactaacngggggcttcgaggtacaatgttggaaggcggtngtgaggaggcatggccctggttcccnccatcttggtggggggtaggcctttaagggtttttcc

SEQ ID NO: 302940 - DNA, 401 bp, Homo Sapiens
  misc_feature (335)..(335): n is a, c, g, or t
  misc_feature (369)..(369): n is a, c, g, or t
tgggaggacaatggtgagaagagggaacctaagaattcctggactctgactgggcgtgagaaatggccggaagtagcttcgagtccgtcattcaagcagtagaggctctggagaaaaactggagcgcatctgcttaaagggccgcccagggtcaggatggaggggcaaagtccgagcagggggtttcctcccatattggatcacgatgaaaactgcacagaaagtccgtgctcagtttcttccatggttacagaacacaggccccagaccagggaaggcattctgcttaaagaaggggacccgaaacctcagctaccagcgccgatggtttcatnccttccgagggaaacctcctctttttaccttagnaacacttaggaccgaccattgcaccctggggc

SEQ ID NO: 302941 - DNA, 250 bp, Homo Sapiens
tgacaattgcacccagccaatgcatatgttttttaataagtgtttctcatacttttccttaatctcctttatcgtactagcatcttattatttactgttgatacaacattctgatttcccctctaagcccaaggtaagctgcttcttactaaaaaccaatcattttaggaaacaattaaacatgaccaaggcaaagactgaggcttttatgggtcacactctgtttatggtaaatgagggtaattttaaa

SEQ ID NO: 302942 - DNA, 454 bp, Homo Sapiens
  misc_feature (189)..(189): n is a, c, g, or t
  misc_feature (280)..(280): n is a, c, g, or t
  misc_feature (399)..(399): n is a, c, g, or t
  misc_feature (426)..(426): n is a, c, g, or t
catgacagaagtacagtgggccttgtggaggttatttgtgatgcatcctggggcaaaagttcgggggtggaagagccatcaattttaaggaagaaatcatttagaaactgaaatttgggctgtgaaggtgctaagagaagaaagatgtgttccaagtattggagggagacctcttgggcctcaaagggnctctgtacagaggatgtttaacatggagtctggtgataagaatggggtagcagagctgggtgcagtgctgggcagtgttgaatgggacttntattcagagcccaggcatcagtttacccttctaccacaggagggtgaggatgtacccggatgtgaaaggagtactcttcttcacctttacgtgatggcattattttcagacatttcttntagttagttaaaggtcacagccaaaangggcttttcccgttcttctcaggccttt

SEQ ID NO: 302943 - DNA, 411 bp, Homo Sapiens
  misc_feature (194)..(194): n is a, c, g, or t
  misc_feature (293)..(293): n is a, c, g, or t
  misc_feature (335)..(335): n is a, c, g, or t
  misc_feature (351)..(351): n is a, c, g, or t
tttagtagtgtaaggtttaaattcaaaaatgctccagggagacgccaggttagactaatgaatcaacagagtcatatattttgccctgcattctttggcaaaacgtgcttcctttggcacaaagagaaacatgcagacagtgaaagcggtcttctgggagtcctgaaaactggcctgagatcatgggtcaggtngtttgtactctagcaataaaagcacttgacttgtttctcagacaattatgagctctcattctgtgcagttccgtgggcagccttccatagggtgatcangaaagagatagaacagcctctgttttcaagctttctcagctnaggaaagcttcatctnccttctaaccttcctagtttgaaattcaaagggctaatgtttgcctcgcccaagccaggg

SEQ ID NO: 302944 - DNA, 456 bp, Homo Sapiens
ggcgtggtgagtgagtgtgctacccagccggggaaaccgtgctttttccacagaactgtgaaacctatagattggaagatcccactcacgacccacgccaccagggcctagcgtcccaaccccagagccgtgaagtttctcaatagcctcttagctggaatctgcttaagcctacagagctccccaggggagggcatgaccagcaccacagctgtgtctgcctgctgtctaagccgtttgagttccttgggggaggggcagcagccagcactgggactcacaactgcctaacacactaaggctcccggggtgggtgggaagggcatcatccatctctataggctccagggtgtgctttttcctctgctgggagtcaggggagggttgaacagtttgggttccaaggacatgtttccccaaaggcccaacacattgattttgggttgattttggcca

SEQ ID NO: 302945 - DNA, 381 bp, Homo Sapiens
  misc_feature (328)..(328): n is a, c, g, or t
  misc_feature (333)..(333): n is a, c, g, or t
  misc_feature (344)..(344): n is a, c, g, or t
  misc_feature (353)..(353): n is a, c, g, or t
attctgccctgttatgcgacatttgctataaatgccacaatgagaattttttgaaacctgggtcagagaagcctactttttatatttaatagtatgtgattgatgtattatcattgttttatgcttattgcatcttggttttatggggtgttcaaaagaagatagatgagaataggtgatccaaagtaatttagaattttatcctccagttgggactgaaccatcttgaactgatgaatatattctaccaggtttataggtagatatgccggtttcattatatcgtgaattgggagtgagacagtagccttttaagccggaccaaacnggccntatggtaaggnccaaatttnggggtaattttcccttggaaataaggcc

SEQ ID NO: 302946 - DNA, 437 bp, Homo Sapiens
  misc_feature (382)..(382): n is a, c, g, or t
  misc_feature (402)..(402): n is a, c, g, or t
  misc_feature (422)..(422): n is a, c, g, or t
gtggttttttttaatgcaaaatataaaatgctggcttgggaagaagattctcttccaaatcttgaacacaaaatcttcaaatggttagtgatacaaatatggcaactgagatacatcctccttatagcaaatgctaatgtcttgtatacatcattgcccttaaccttctcaccaccccagtgagtataaatttttaactccatttatcaatgggctcagagaggtcaatcaataacacacagggaggaaaggggacacgattggaaccaaagccagagctcttaacctccatgctgtagaacgggaaggacaagctaaaaagaaaccatccacggttgacagtttctggccatgccgagggttagccacttgggaattgtgntggaaaagtataggatagtnggcgttaccgacactgggcntttaccaaaggggaa

SEQ ID NO: 302947 - DNA, 450 bp, Homo Sapiens
  misc_feature (99)..(108): n is a, c, g, or t
  misc_feature (379)..(379): n is a, c, g, or t
  misc_feature (405)..(405): n is a, c, g, or t
  misc_feature (428)..(428): n is a, c, g, or t
cagcactatctatatatggaccctctgcatccatgaaaagaagtacctcatacaattctgtgaatatgagactaaaatacaattccaattatgaggtannnnnnnnnnagtctaatgcaggaagaatgaagactagtcacgtcaagaaccacagccttgctatgttttccttgtgtaagtgctgtaaataaattggtgaagggaatgatcaaatgccttattttcctccctaaagttagacttatcaatattcttgaccccagatcattctggtgtctatactgtatagagtgttcgcaaagatgagtgcaatgattcttcccatcctcttccacatggcacctctgtgggctttgccccctggccccatcaaggagtnggagttggaatttctaggatccgggnttaggcgtttaacttggcttggnccatggagtttggaggaaaagt

SEQ ID NO: 302948 - DNA, 406 bp, Homo Sapiens
  misc_feature (326)..(326): n is a, c, g, or t
  misc_feature (350)..(350): n is a, c, g, or t
  misc_feature (356)..(356): n is a, c, g, or t
  misc_feature (362)..(362): n is a, c, g, or t
  misc_feature (369)..(369): n is a, c, g, or t
gctattacagtgcttgcaaaacctatctttcgcttggctcatgcgttattaggatgatgcttaaattattattttttaatgtaactgtgtctcctttgtaagtagaacagctctaacatcatcacctgtcaggagttttagttgtttaaattgctgagagccacaagtagtgggtaacaatgttacaggaagggggaagctgttactagactgtctctatagttatcctttttatattttaaatttgacgtttgggattcttaaagacctctgtttgtgctcctgaaatttgactgttgtaatgattgcaaatgggctaataaccnggggtctcttctgaggtctggggnactgcntgaagnttgttcnttagacccgggcagttatttggccatgggtaaatatt

SEQ ID NO: 302949 - DNA, 101 bp, Homo Sapiens
tcgaaatgctgatattagtgttaccggacaagtgtcttataaacttaatataacggagacagatataaattagtaggttgaaaatctttccccttaatcag

SEQ ID NO: 302950 - DNA, 374 bp, Homo Sapiens
attcggcacagattgagcttcaataccctgaagtaaaagataagatgaataagcacttcatacggtataaaaattcttgtatcagcacaaaatatctttggaaggataaaaaagagaaagtgctatccatggggaagaaaactgggagactgtcttcaccatttatttctgtactgtccaattttgtttactgcatgcatgcactgctttaaaaatttttaagtgcatttttaaaactacactaggataagtgctattgtgaaagtatgtaacagatgtaacagattttaatggctaaaagcagcatttgaatccacccgaaagacttcagtggaggtttgaggagtcaccaactgacttgggacggcattgca

SEQ ID NO: 302951 - DNA, 381 bp, Homo Sapiens
  misc_feature (139)..(213): n is a, c, g, or t
  misc_feature (324)..(324): n is a, c, g, or t
  misc_feature (348)..(348): n is a, c, g, or t
aagtttgaactagaataaatgcaaagtcacatcatagtcaaactggcaaaggccaaagagaaaatgttgaaaggcctcagagaagaatgacccatcccatgaaaggggagcttcaataccgccagccactgacttcttnnnnnnnnnnnnnnnnnnnnnnnnnnnnnnnnnnnnnnnnnnnnnnnnnnnnnnnnnnnnnnnnnnnnnnnnnnncaaaaccgttctacacaagtgaaagggaacgaacgacattccctgaggaagcagagactggtggggattcattgttgggcgaaacctgccttaaagggaaatactaaaggnaggaccttccaagttgaatagganatgacaccagacggtaacttggattcctccggg

SEQ ID NO: 302952 - DNA, 387 bp, Homo Sapiens
  misc_feature (183)..(183): n is a, c, g, or t
  misc_feature (266)..(311): n is a, c, g, or t
tctttatggcctttcccaggagatcggcttttatttcaaaagtaaaaccccagcacaaagggtaaggaagcttgcaaaccttttgaggatggctgtatagcaaaagctttcatgagaatgcttctgcaagtcctgtattatcaggaaaacggcttttgcacttgttctcaaaaatctccaggntccttctgattttatgattctgagtctcttggttctaacacagtgctgggccattagttgatattaagcatgaaaatgggtgnnnnnnnnnnnnnnnnnnnnnnnnnnnnnnnnnnnnnnnnnnnnnngtgaaaaaacatgagcaggaaaagaacgcctattggcccaactaggcttcgttcttcatcaggcaaggactcaggg

SEQ ID NO: 302953 - DNA, 392 bp, Homo Sapiens
  misc_feature (59)..(59): n is a, c, g, or t
  misc_feature (188)..(188): n is a, c, g, or t
  misc_feature (362)..(362): n is a, c, g, or t
  misc_feature (382)..(382): n is a, c, g, or t
attagtttctgagataagtgggtttaggtctcagattgttgttgtaaatctggccaggncctgaccatctcattggagtattttcaaatgttagtatctgtaggcgtttctcttggaccagcttctccagggaagcatcttccagttccttgccaagagatatgtaaggctgactgccagcatgctgnatgaagagtattaaaagagggccaagaacatccccactagagatgtatgttctttcaatcctcctacttgttatacaacgcttaacctctgggccaaaggacaggggcatcctcacctcttcatatggaataacatcctgtgtcttctggaaggtatttagggaaagtgaggantctagttatttggggaaagncagggagggg

SEQ ID NO: 302954 - DNA, 321 bp, Homo Sapiens
  misc_feature (73)..(187): n is a, c, g, or t
  misc_feature (213)..(223): n is a, c, g, or t
  misc_feature (225)..(225): n is a, c, g, or t
  misc_feature (277)..(277): n is a, c, g, or t
  misc_feature (299)..(299): n is a, c, g, or t
tgctcaggtgattctctgacctcagtctcctgcgtagtaggagtacaggtatgcaccaccacatccagctaannnnnnnnnnnnnnnnnnnnnnnnnnnnnnnnnnnnnnnnnnnnnnnnnnnnnnnnnnnnnnnnnnnnnnnnnnnnnnnnnnnnnnnnnnnnnnnnnnnnnnnnnnnnnnnnnnntgagccaccatgcctgctataactannnnnnnnnnnantgtgaggaaaaaacccaaacacccattgtgtaggttttactgtttacaacgnttcttaccctaggaacagtagncttttaaatagttattcagttt

SEQ ID NO: 302955 - DNA, 428 bp, Homo Sapiens
  misc_feature (329)..(329): n is a, c, g, or t
  misc_feature (342)..(342): n is a, c, g, or t
  misc_feature (385)..(385): n is a, c, g, or t
  misc_feature (391)..(391): n is a, c, g, or t
gcagcaagtgttgaagcccagaacagactataaccacactaagtctgcttttagctttttcagagaagcttacctttaaagcaactatttagggaacaagcaaactgatccttcggaccaggaggacagtgaaaaaatgtctagttcctttaaattagtaccatccatgtccaaagctcagctaaattgcaccccagggacactgaaaaacttgctgatatggccatgggaactgctgtgagtattccctgaggaaccacgaggtatgggcagtgggcatgaggagagccggcgatgggaaagagcttttttagttcccttttaagggnaaaaatgggtaanttgcaggaagtttcccagatggggaggggtgtttaatcccttnttaaantgtttagggcagttttgggcacacttggttaggagga

SEQ ID NO: 302956 - DNA, 114 bp, Homo Sapiens
gaaatataccccattttatagctatttggcatattatccagtcatgtctcaatggtgtttagtgtattctgcactactctgaaatttaaccacctggaagaagttatgaataag

SEQ ID NO: 302957 - DNA, 291 bp, Homo Sapiens
tcttagacgcacctgggcccccacctgccctgtgctatctcagcccctggcttctgccctttttttcttccctctcctgctcccctcatccatgtgtaaaaaccaggcacccagaaaacgagtagggtgaaacttggtgcctgcctttacctgcagggggcttgggcatcacttgacctaggcctccaagactctgccctcctccctgggtcctccaacagccttcagcttcgtccagcacccagccctttgcacctgtgggaaccccctgcctggggatcaatttcaaac

SEQ ID NO: 302958 - DNA, 262 bp, Homo Sapiens
  misc_feature (101)..(101): n is a, c, g, or t
  misc_feature (117)..(117): n is a, c, g, or t
  misc_feature (162)..(162): n is a, c, g, or t
  misc_feature (177)..(177): n is a, c, g, or t
  misc_feature (197)..(197): n is a, c, g, or t
agtaagaaactccccaaaacctccatacctgatcctcacatttctggatactccttgtgtactcagtttagatgtcacctccctccactaactaagcgttnccctctgggtggagtncctttcttgtgtaaccccatagcacctgtgctcacccctgtgctnaaggtattgaaaggnataagacacagtctctcctncagagtctgtggcgtagacagtgagtcatcggatgctacaatgtgctgtgataaatgtatcacag

SEQ ID NO: 302959 - DNA, 460 bp, Homo Sapiens
  misc_feature (65)..(77): n is a, c, g, or t
  misc_feature (80)..(165): n is a, c, g, or t
  misc_feature (393)..(393): n is a, c, g, or t
  misc_feature (419)..(419): n is a, c, g, or t
  misc_feature (446)..(446): n is a, c, g, or t
ttctaccctgttctacatcaaatgcctgattcctaaaaggcacctccttaggtatgactttgaannnnnnnnnnnnnaannnnnnnnnnnnnnnnnnnnnnnnnnnnnnnnnnnnnnnnnnnnnnnnnnnnnnnnnnnnnnnnnnnnnnnnnnnnnnnnnnnnnngatcagaggcacatcactgcacctgccttgcgttttttaacgtttccaacagtttctatttctcccaccgagtaagctctgctctgcaagaagttttagactttgttattgcaaagccaaatacagtgcctgggcacagttaggtgctcaatgtctaatcaacttagtgacttcctatcccttaacaagaagaatttaacttggccaaatttcttctaaggtttttcntaaaattgctgggaattcttaaggtnacttacatatttaccattaaatttaantcccaaagttcaac

SEQ ID NO: 302960 - DNA, 446 bp, Homo Sapiens
  misc_feature (312)..(312): n is a, c, g, or t
  misc_feature (317)..(317): n is a, c, g, or t
  misc_feature (322)..(322): n is a, c, g, or t
  misc_feature (386)..(386): n is a, c, g, or t
  misc_feature (425)..(425): n is a, c, g, or t
tcatagctttagaatagtttaatgcctggcctgtttgaatttttgtagcaattaaaaattgcgtaatttaaacacaaattgaaggggacagggactaaaaacataaatgagagttagaatgcagtgccacgttgaatgctttcacaggtaggagcctagaaatcatctgttccaactactgcacttttgagttgtggagaccagaccaagagaggtgaaatgactgttggctaaggcgtccacctctacttgcgtctggaattgcccctgcctctgcctttaagtctggtctgcgtggcttctgatagcgancaggnggcgnaccccgttcactgcatcaggagagcctggagcagcgctttggcagggaactctgcagcccaggncgcccctcttagaggctgggagggacctttcgttcaagnaccccgggggttttgggatgt

SEQ ID NO: 302961 - DNA, 204 bp, Homo Sapiens
atttttttgcatgaacatgtaacttgtaattctggttatcagcgttctcatgtttcttttgtttgctgaccttggtagtttctgagaatttctggagggagtaatagcaccagcaacagtacatgtgagaatcttaagttacttcaggaaggaacattgaagggcagattttacctttcaccaggttattggggtctctagttt

SEQ ID NO: 302962 - DNA, 234 bp, Homo Sapiens
  misc_feature (51)..(51): n is a, c, g, or t
  misc_feature (220)..(220): n is a, c, g, or t
ttgctatgtctagcatttccaatgctatacggtgaaagtggaaattttttncttgtttctgatcttagagaaaaagctttcagtctttcaccattaagtatgatgtttgctgtgggttattcacagacagcttttgttatgttgagttagtttccttctattcagagtttactgagcatttttaccatgaaaggatgttgaattttgtcaaatgcttttnctgcaccacttggg

SEQ ID NO: 302963 - DNA, 320 bp, Homo Sapiens
  misc_feature (292)..(292): n is a, c, g, or t
gggatttgaggtcttcaaataagtttttctaattgtagggaaaacaaagtcttttaataattaccattaatgatttataatttaagcagtttaggaaataaaaaatgcatagaacatgatattctcatacccagacaagctcatatcccacctgcacccctttacagtcaaggatgattttgcatctcctttcctcacttaagtgccttttttgccaactaggataactcatataatgaatttttgccaactaggaaaactcatataatggctttttttaaatctggttttnctaataataaaatcatatctgttgcaaa

SEQ ID NO: 302964 - DNA, 118 bp, Homo Sapiens
  misc_feature (89)..(89): n is a, c, g, or t
  misc_feature (108)..(108): n is a, c, g, or t
tattttaaaaaatcatgggtttagggtctttgataaactatgccatagacttataaatttacaaaaataagggtctaatatcccacggntggcaaattttaaggaaantactcaccac

SEQ ID NO: 302965 - DNA, 438 bp, Homo Sapiens
  misc_feature (29)..(30): n is a, c, g, or t
aataaacctgtatccgagtacgaagtggnngaacagggttttacaggacaaaggaataaaaggcttgagtctccaaaaagaacttaaagttattcttggtagggtacagagtagaaagggttgttaagagggtagaaggaatcagaattgcctgtagccttcgcttctgttttggactaactgataaaagatagacttacttgcataggaatgtaaattagataagtgagataatttcagctcttttttaacttactagcattgcttttatgtgctaagtcatgctttgatttaaatattaagaaagtgtccttgcttaaatcaatacttgattggaatcgatacaaaaatctgtgataaggataaacccgggcggccagattatgatatcctaaggaaccattgataggtttcatggaggttatttaggtgttgatc

SEQ ID NO: 302966 - DNA, 419 bp, Homo Sapiens
  misc_feature (54)..(54): n is a, c, g, or t
  misc_feature (259)..(259): n is a, c, g, or t
  misc_feature (306)..(306): n is a, c, g, or t
  misc_feature (405)..(405): n is a, c, g, or t
gcaattgagggatagaatggttaacaaattcttccaggtcgcatggccagaagnatggcagagtcattatcaaagcccccaagttagtgcctgagtctgcaccctgggccgaaattttccagcttctgtgatacagaattttatgccagaaactcttacattactaaatttttcattctttcttttaatataaatatacataaaaatgaggaaaacttccataggtgtgttctaatactgtgagcaaattaaaactcanttgaatactattttcacaaatacatgtatgcttatctcactttaggnatgaaccaattcttaaatgtcctacttaaggaaattagttatggaccagggcatggtgggctcatggccagtggttcccggcactttggggagggccgnggcaggcagtttcg

SEQ ID NO: 302967 - DNA, 323 bp, Homo Sapiens
  misc_feature (124)..(124): n is a, c, g, or t
  misc_feature (173)..(173): n is a, c, g, or t
  misc_feature (204)..(204): n is a, c, g, or t
cctgggatcactagacacagggccagtaccattctgctggcaaattaggaacttggggatgagagtcagtggacaggtcacttccaatgagactagagcagcaacactggactaaagacgggantgattcctggaagttcagcaacataccctgagaagtaagaacaactggntctttgagagcttgaaaatacatatggagancataaaaaagcaaccatgtacttcatttatttacaacttacttgatttacaaccatttatttgatttaattcattttacacataccatacacatgctctcattgggtttaaggtcatct

SEQ ID NO: 302968 - DNA, 439 bp, Homo Sapiens
  misc_feature (34)..(34): n is a, c, g, or t
  misc_feature (52)..(52): n is a, c, g, or t
  misc_feature (286)..(286): n is a, c, g, or t
  misc_feature (317)..(317): n is a, c, g, or t
  misc_feature (350)..(350): n is a, c, g, or t
  misc_feature (371)..(371): n is a, c, g, or t
  misc_feature (410)..(410): n is a, c, g, or t
  misc_feature (427)..(427): n is a, c, g, or t
gaacttaacactcaggtagtcctgtctccctganggccagagaggaaaaatnacctatccaggatgacaggtggtttatttgagacaacactatactcatataaaagcataaaaatttttctgaattactcatcaaagcagagataaaggactgaaagaatgtatcagaaacccaaaacagaacccaaagatgaagggtccacctcattattattctgccacatggaaaatattccatggctgaagtccttcactctgctcttttatgttcactttattggctttntccttcattctgatatttttcctgggagaantaactgtcactagtgttcaagagctgactcttncatggaactagggtcaaattnaaaaacatggtttctggctcctttttccaagacattttngtttcatcctaaaatgncttttgctttac

SEQ ID NO: 302969 - DNA, 150 bp, Homo Sapiens
accagcatttcccaaactgtatttcaaaagttttctatcaatgattagtggataatttctgaaaaaaatgattccattgtcattggttcggaatggctgtatcctcctttaagaactacagtttacattaccatgctctcagaagtcctt

SEQ ID NO: 302970 - DNA, 373 bp, Homo Sapiens
  misc_feature (362)..(362): n is a, c, g, or t
tacatgagaaactgttaagtaacatggccaaaattatatagctggtaagtagggaaggcagcatgtaagccaggaaggccgcctctatagcatgtgctcataactgtgctatgtgacctatttacttaaaaaggtgaataatgtcattctcaaagtatatagagctaaggagagaggtatgatgaaagggagataataatcattatgatgaatcttttcattaaaaagttgaagtgaagacacctctcttttcataaaacattaaagtaacttctcaaaaacctgacctgggggtgtgggacctttccaaggagacagccggggggagtccggagagccgggtccttgtccttcccgggggncttttaaagcc

SEQ ID NO: 302971 - DNA, 293 bp, Homo Sapiens
  misc_feature (161)..(227): n is a, c, g, or t
ccaacagtggcatcacagcttgctgcagccttggacccctgagctcaagtgatcctgctgcctagcctcctgagtagccaggactacaggcatgcaccaccacacttggctgatttttaattttttgtagagacagggtcttactatgttgcccaggctannnnnnnnnnnnnnnnnnnnnnnnnnnnnnnnnnnnnnnnnnnnnnnnnnnnnnnnnnnnnnnnnnntgagccaccacacctgggctgaaaaaatattcttgatgagatagtaaaaagtattccttgtattaa

SEQ ID NO: 302972 - DNA, 422 bp, Homo Sapiens
  misc_feature (341)..(341): n is a, c, g, or t
  misc_feature (396)..(396): n is a, c, g, or t
tctaaagctaaattgtcctgggacactccaaatgtgatttatttgtcccaaggccagtagaagtttccatgtaggtgaaaatggatgtttggctagttgaagagaaatggaaatgagttctgcaagctgacttacccagtggaaatgggtaagtaactcaggaacattatatcactgtacattctgactataaggaattctggataattcatgtcccttatagatacatatgaacttacacatgatctatcaggaaggaagaagacaggagccccatgaagagggtggggcatctcagtgccagggcctttgtgctatgtgctttatttactcacttaggnaattgcaacgggtctaggtgaagctttaggggtcccaaagtcacaggggcacccngtaacactacccctggggtttttttc

SEQ ID NO: 302973 - DNA, 401 bp, Homo Sapiens
  misc_feature (43)..(43): n is a, c, g, or t
  misc_feature (46)..(46): n is a, c, g, or t
  misc_feature (103)..(103): n is a, c, g, or t
  misc_feature (276)..(276): n is a, c, g, or t
  misc_feature (349)..(349): n is a, c, g, or t
  misc_feature (357)..(357): n is a, c, g, or t
  misc_feature (362)..(362): n is a, c, g, or t
  misc_feature (379)..(379): n is a, c, g, or t
tcggcacagcctctatcaaagctcagtttccccacttggagtngangttgtagattatacaagacaatacatatgaagttcctaacccatgtagcagctgtgnaatggttatggttattcagattttatcaagcacctacaagggcccgatgcaggcagtttcaaccttacagagagtgtgctttcctggttgcaaacccctgaagccctatttacttttatcacagtggctcccaaatgtctggaaagcaggcaggcatgtaggggacgttgctngctcctacacaccatcctatctaaacttctgtagggcctgtatttctcagtaacttctgcacagagtacttgncatttganaactngggctttgaaggcattnagcagtgttttctttacaaggg

SEQ ID NO: 302974 - DNA, 384 bp, Homo Sapiens
  misc_feature (86)..(86): n is a, c, g, or t
  misc_feature (297)..(297): n is a, c, g, or t
  misc_feature (340)..(340): n is a, c, g, or t
ctgaatgtaactgatttgatttattcctttcacttaaactgtgtaatgcctcagtttcatgtgtctacagaggacgctcacccttngcaccacctggaaagtgtaacagcagggcattgaggttctggccaaggagccatcagcaatcccattaccaatgcttaaagtgagtctcataaggcagatttggctccaagcaaaaaccacagctctattttcataaactaatttcagttgtttgccccagttaatattaataagcccagggtaatatgcttctacttaccagagcacaangataatagaataatagagtgttagatctggaaatgggaccttnggagatcttctaggaccaacttctccattttgatagatgaggga

SEQ ID NO: 302975 - DNA, 224 bp, Homo Sapiens
  misc_feature (188)..(188): n is a, c, g, or t
attgtccccagccggatgttttcatcttgatttgccttagtttctaaatctcatcctctccattttctcctgttagtagtcacagagaaccaaattctgtcaagttatggaaactaaagtctctcttccacaagtcttcccaaatggaaaggaggaccatcaaaatggttcccgcattaaacatctgntctgcggtttaaaaaatttatttaacttagggtttt

SEQ ID NO: 302976 - DNA, 430 bp, Homo Sapiens
  misc_feature (364)..(364): n is a, c, g, or t
  misc_feature (389)..(389): n is a, c, g, or t
  misc_feature (404)..(404): n is a, c, g, or t
acattgacattcttattcagtaaagataaatgcaattattgctttttccaatagcaatacagttgtaataactggtagctgtttctgccttgcccccttacagtctattcttgatgcgtcaaccagagtgatccattcaaagtgcaagtcagaacatgtacactcctctgctcaagaccttccaagatttccccattcagagttaacgttgaagtccttacaatagcctgagtgttgggcatgttctccacctctgtgcttctttacatctgaccccagccattgctctcccctgggctaattcttcctcagctgcaccagtccccttgctgtttctaggaacaagctgggacatgttcttgcnttaacggcctttgtagtcggttccngcctcaatgtggggnggctatttcctttagaggcatctgtg

SEQ ID NO: 302977 - DNA, 406 bp, Homo Sapiens
  misc_feature (355)..(355): n is a, c, g, or t
  misc_feature (363)..(363): n is a, c, g, or t
  misc_feature (387)..(387): n is a, c, g, or t
actcctgagtaatgatcagaatggaaggggtgggaggttatatagccctattttgagaattcaggattccaccctgaccaattttaggcatgatgtttctttttaccccctagtaacaacccaaggccagcctggttggtatctatcttctatgtggcagctaggccaaaagatggcttaaggaattcagacttaattcttgttcagttacctagattctcttgttgaattgatattattctaggtcatcaggatagtgactatttggttgagtatactgcttgctgagtctctgtatggtagacagtggggaccataatgggtttctgtaggttttgtgccaaattcccttggnccctcttngcgcctgaccttttcccgatgaanaggtctgggtgttgtggag

SEQ ID NO: 302978 - DNA, 414 bp, Homo Sapiens
  misc_feature (115)..(357): n is a, c, g, or t
  misc_feature (376)..(376): n is a, c, g, or t
attcggcacagctcaccagtctgtgttacatgaagctttaatgatatttgatgattgaattcattttttaaaatagctgcattgcagaaaagtggtttgctattaaaatattacnnnnnnnnnnnnnnnnnnnnnnnnnnnnnnnnnnnnnnnnnnnnnnnnnnnnnnnnnnnnnnnnnnnnnnnnnnnnnnnnnnnnnnnnnnnnnnnnnnnnnnnnnnnnnnnnnnnnnnnnnnnnnnnnnnnnnnnnnnnnnnnnnnnnnnnnnnnnnnnnnnnnnnnnnnnnnnnnnnnnnnnnnnnnnnnnnnnnnnnnnnnnnnnnnnnnnnnnnnnnnnnnnnnnnnnnnnnnnnnnnnnctgcctctttaaaaaaganaaaatttacgtacttggagtttgggttcatacagattt

SEQ ID NO: 302979 - DNA, 447 bp, Homo Sapiens
  misc_feature (325)..(325): n is a, c, g, or t
  misc_feature (349)..(349): n is a, c, g, or t
  misc_feature (389)..(389): n is a, c, g, or t
  misc_feature (409)..(409): n is a, c, g, or t
  misc_feature (424)..(424): n is a, c, g, or t
atcttttttaaaatactgctcctatcatgttatgcctctgcccagaaactactgcttgctatgggatgagaactgcccactcaccccctgtgacttccctggagtagtttcctttaggactggtgcactcactgtatagagaaaaaccctctgtctggatctttatagtggcagagtgtcaaacctggtcttatctgagtcccactgtccagaaatctttcccaggctcaccaacccctgcaccagaggctttccactgctcccaggggacctctaatgccaatcccttcatatctttaatgaccactgtcttgctgcagccctntgaacaaaggtttctggctgcttnaaccctgtcattggcacagaacttttgtatggcagcaggngcttgaatattaggacaatnaatcagttttggagncctgggtcacatggcatttttag

SEQ ID NO: 302980 - DNA, 159 bp, Homo Sapiens
  misc_feature (137)..(137): n is a, c, g, or t
aaaagaagtaaattagggttatattagtttactagaagacatttcacaagattttttaagtgagaagcaagatgtagtgtaatatgtgtattataatttgtattaatctgttttcacattgcttgtaaagacctacntgagacttggtaacattaagat

SEQ ID NO: 302981 - DNA, 366 bp, Homo Sapiens
  misc_feature (219)..(219): n is a, c, g, or t
  misc_feature (249)..(249): n is a, c, g, or t
  misc_feature (352)..(352): n is a, c, g, or t
atttataaatactctatttatcaaccttttacagagtcagtctcctctagaaaatgagttttactctttgaaatcaggaataggtgaggacctgccacagcgttaactaaagaagaagtgaagtgttgcctcatttatgtttagaaactatcagaagtgcttttgttttaaaattacgtgcaaagactttagatcacacctacgtttcaaataccaganattgaaatgaactgttaatgtattggagancaaaagggcttagttttaggtaagaagtgtaggcaaaaaggcagtagtccattctgtgttcagttgtctttgaggtgaataaaatttagtaacagttttgttnagctaaaggataca

SEQ ID NO: 302982 - DNA, 438 bp, Homo Sapiens
  misc_feature (26)..(26): n is a, c, g, or t
  misc_feature (59)..(59): n is a, c, g, or t
  misc_feature (172)..(172): n is a, c, g, or t
  misc_feature (256)..(256): n is a, c, g, or t
  misc_feature (285)..(285): n is a, c, g, or t
  misc_feature (309)..(309): n is a, c, g, or t
  misc_feature (312)..(312): n is a, c, g, or t
  misc_feature (385)..(385): n is a, c, g, or t
  misc_feature (402)..(402): n is a, c, g, or t
  misc_feature (407)..(407): n is a, c, g, or t
  misc_feature (422)..(422): n is a, c, g, or t
tagtcactcacaaagctttttcatangcctgccctttccccctacttaggctccccctntagaactaaacagctctggaaaggatccttcagagcagacctagggcaggagctaggcaagacccttgatggtgacaacttatttggctatttctcgtggctatttaatacangaatgggagctgagttccctgcttaatagcatttgtgttcatttccagcgtggtgccggttgtctgacctctagcttctccccncttattctgtacagctgaaattctccctnctgcctaccccccagctagtcagnctncagtcctgtttagtttatcttttttgctctcctaatgcctgttaagctgggaaacaggaatcttgacttcgtncgacatattgatttttnaaatnaaggaatggaaactnaaaggaagaggttttt

SEQ ID NO: 302983 - DNA, 257 bp, Homo Sapiens
  misc_feature (65)..(65): n is a, c, g, or t
  misc_feature (70)..(70): n is a, c, g, or t
  misc_feature (76)..(76): n is a, c, g, or t
  misc_feature (125)..(125): n is a, c, g, or t
  misc_feature (181)..(181): n is a, c, g, or t
  misc_feature (196)..(196): n is a, c, g, or t
  misc_feature (214)..(214): n is a, c, g, or t
  misc_feature (225)..(225): n is a, c, g, or t
gggaaagggtctaaggctgggaagcgagacgcaggttccgatcctgttgtgtagttaatttctgngtgtnggtctngagtaaggtaccccacctttatctgtaaccatctagtcaggtgatctcnttagccattccagtagcccgggctctattagagttagttctaaggcattcatactncttgctgaagggctnttctgtctttgatccctnatccccaggtnctaagtgtgatgaggtttgttgggaaaagggt

SEQ ID NO: 302984 - DNA, 335 bp, Homo Sapiens
gtaattccctaaacatcaagtcagaaactggttttagggtacagggtctggaatatagcttttaaaaatgaatacgtccactaggttcatcttgaaggtagaattgaaggtagaacctggaagtagtttacaaaactgaaatattaggcagctattgtcaaagtcagacaatttatgttaacttttcaaatccaaattaaagtgtgctgctaaattcctgtactgaaggtaagtatttatcatgaaaatagttataacagctgtacaggcacacatctttcactcttgtgaccaaagattttatgcatgacttattttttttcaagttcttattt

SEQ ID NO: 302985 - DNA, 185 bp, Homo Sapiens
  misc_feature (133)..(133): n is a, c, g, or t
  misc_feature (154)..(154): n is a, c, g, or t
  misc_feature (171)..(171): n is a, c, g, or t
cgcctggccttgtgctagatttttgataaaaagaaagtcttctactgactccactctccaccactacttgtgttctccagtatcctagaataatttttaactcattcttctagaagtcaccataaacatctcnaaagaaatagggttttattanggtttcctggatttatncaactgtaggcatt

SEQ ID NO: 302986 - DNA, 351 bp, Homo Sapiens
  misc_feature (94)..(94): n is a, c, g, or t
  misc_feature (148)..(148): n is a, c, g, or t
  misc_feature (190)..(190): n is a, c, g, or t
ttacagcagattcatttattaattcatccattttagtaatatacagggtgataaatttgcaataacatacataaggggcttcattgattatgancagaacattgggtgcagacaagattttcttaatgcatgagaggttaagaatgancgcttttgatgttaattggaagaattctctatagggtaggtnctctcttgacaaatgagttctcagttaatttcagggcatggtaagtgagtggtacactctttaagaaaaagttttcctctcatttatcaatactgtgccctataatgctatatttaaagttgcttcacttatgattacattcttaaaaaattaaattcagg

SEQ ID NO: 302987 - DNA, 339 bp, Homo Sapiens
  misc_feature (16)..(16): n is a, c, g, or t
  misc_feature (173)..(173): n is a, c, g, or t
  misc_feature (299)..(299): n is a, c, g, or t
  misc_feature (301)..(301): n is a, c, g, or t
tgtcttagggagaagngacagcagaagtgtaaatgatccctaaagagtgatagatgttatcatgaagccacaggaggggtgccaggctgcacaaaagagacactggatgcttcttggtagtagaggcagtggcttcccagccttggggctaaggcttgtagggtgaattggancttttcagatgagcaaggcaaagaagggaccttctaacattccttggatggaacatttttgacattttcccatttacagctacttatattttctacaagtgtcactgtgaccaacttatgtacacntnctttttcttgcttagttataataatctgttcttaaagg

SEQ ID NO: 302988 - DNA, 199 bp, Homo Sapiens
tcagtgacaagcaaagtaccaaaaactgtaatacaattacaatagtagttctaagactttatataacctattctctctaatagcatcaggtcccttaattttactatggacttttagattatttaatgtgaatgagggtcttcacttactgagatcatactgttaatttcatatatactgtggtaactgcatttttttt

SEQ ID NO: 302989 - DNA, 443 bp, Homo Sapiens
  misc_feature (19)..(19): n is a, c, g, or t
  misc_feature (22)..(22): n is a, c, g, or t
  misc_feature (241)..(241): n is a, c, g, or t
  misc_feature (335)..(335): n is a, c, g, or t
  misc_feature (362)..(362): n is a, c, g, or t
  misc_feature (373)..(373): n is a, c, g, or t
  misc_feature (381)..(381): n is a, c, g, or t
  misc_feature (403)..(403): n is a, c, g, or t
  misc_feature (418)..(418): n is a, c, g, or t
  misc_feature (424)..(424): n is a, c, g, or t
attcggcacagccctgggntgnaggcttgtaacctgctggtgatttgatctcatgctggagcacatggtagagcagcaaaagataaagcatgaatggctgttgagaaagacagatattagcagaggttagtttaccggctttggtgctgcctggtggagtctatcagccatagcaacccaaaccagacgaacctacctaggactagccacacagataggcaggtacatttaagcctcaganaaaatgggccttggttgaacaagcgaaaaagagaaagctggacctctgtccacaattcagccagagtgacacacacccacttttaaaggtagangcaccaccagccacgtaattttgaaanacatgctgggngttagggnagccagttttcagttgattcanaattaggtggcagcnttgggncaattgtttccctttgtgt

SEQ ID NO: 302990 - DNA, 482 bp, Homo Sapiens
  misc_feature (294)..(294): n is a, c, g, or t
  misc_feature (406)..(406): n is a, c, g, or t
  misc_feature (436)..(436): n is a, c, g, or t
  misc_feature (450)..(450): n is a, c, g, or t
  misc_feature (464)..(464): n is a, c, g, or t
taaattcattcccatcagcctgtaatccctctctattcaccccatctaccagaatgtctttgtttactgttcctttcttcattttaacagtaaaatgtctgggaaaggggtctgagtacataagcattcacttcaatgtgctaattttaaagaattcctgaggcatttaaaaacagaataaccaaagtgactgttttacaaagacattcttatagcaagagttgacaatgtagatatagttgtaaaaagagcaactaggcccaaaaaattatcagttcagtcaggcaagactgncttcactaatgcaacaatttagaggggactggtgcccctttaaagggttttattcaaaatttcagtgatttgtaaaaggcataccctcgtcccttttggggtttaaaactcnggaaatgtgactttcaggtataggtccacnttggtcttaaggtntccttgttaggggnggtaatttttctgctcgg

SEQ ID NO: 302991 - DNA, 408 bp, Homo Sapiens
  misc_feature (311)..(311): n is a, c, g, or t
  misc_feature (317)..(317): n is a, c, g, or t
acttctatgtggtgatgtctaagttggaagtgtttccagtcaggagtttggggtggaaatggctagttagctaatatttgttatgcatctcttatgaaaccagcccaattgtcactgctatacacggtgagcttttgaaagatgtgtaagtcatgccaccaactgtaacatgaggcagacgaacctagcagagttgaattgcattcaggaaaaacgtatttcacggtaggtgcaagctactgtgccagagatgacaaaatgagcaagacacaaccttaaccttaatggaacttgcagaacagagagggganggcaangtatttcaaataagcatgcatgttgctttctagttataccagggttttctcttctatattcatgattaatgggcactacttttcagccaga

SEQ ID NO: 302992 - DNA, 222 bp, Homo Sapiens
  misc_feature (132)..(132): n is a, c, g, or t
  misc_feature (138)..(138): n is a, c, g, or t
  misc_feature (205)..(205): n is a, c, g, or t
caaccggagccaaaattacagagaaaagttttgttgacattggatattacatgatgaaattcttcagaaaatcttccaaaagtttgcattgtttcaacttgtaatttcctcttgctccccctgcaccgcccnccgccncccacctttgaccctgaatctgaagcagtttcctcttatcccatagttaacatttttagtacaggancatctgacattgaaatg

SEQ ID NO: 302993 - DNA, 372 bp, Homo Sapiens
  misc_feature (312)..(312): n is a, c, g, or t
  misc_feature (350)..(350): n is a, c, g, or t
cacaccaattttaatgctatctcaactatcatcaaggtttttccttaatcatataaacatcaaattgtggcttcttcaggatctatccccgaagttcttctggggtaaaatcaaagcatctattctttttataatttaaacttttattttagattcagtggtacacatgcagatttgttacatgggtttattgcacgatgctgaggtttgggatacgattggtcccgtcactcaggtagtgagcatagtatccatagttagtttttccaccctcccttcctcctgcctctagtagtccctgttgtctatagnttgccatctttttgtccatgagtacccagtgtttaggntcccacttgtaaaatgaggatg

SEQ ID NO: 302994 - DNA, 351 bp, Homo Sapiens
  misc_feature (275)..(275): n is a, c, g, or t
  misc_feature (282)..(282): n is a, c, g, or t
  misc_feature (323)..(323): n is a, c, g, or t
tggagatctgaacaaaatagctacctgggcatccaatccctctactgtgaaatgcatgattctccagaccttttccaacacgcatagagctttctgatcgttttagtgcctactcttaagtatgaattgaatcaaaggttgaccagacaattgaagaaattctccatcaaatgagactcaaagaatcagaacaaagtgtaattctgaaggaaaagaggtaagataaacagcagaagaaacgtttacaagactataattaatatattctgatatanccataanacataaaagggatgctattcaaatagaagattgaccagagnacacaagaggatatgagccattgtaaat

SEQ ID NO: 302995 - DNA, 396 bp, Homo Sapiens
  misc_feature (343)..(343): n is a, c, g, or t
  misc_feature (380)..(380): n is a, c, g, or t
tagaatgtgtatgtctccttgtaagaatccaatttgaggggttcagaaacacatagtgaatatgcctgatgagtagtgatttttcaataatgatttttacatgttatgtctcctcaaagataacaacagagcaccatgttgcctaaattcatgtaacttccttctgggttaaactgtttattggacatttctgaatatatgcaccatatgtggctatctttcaaagtatgtgtctgagatattattcagagccttttccagccatttagagatatatgtggagcttagagagaataaaaatataatgtgcattatttactagtaattcacataaaatattccntttctaaagcatgttgcagattattctacgggtaaanttaggttgagttgtcc

SEQ ID NO: 302996 - DNA, 429 bp, Homo Sapiens
  misc_feature (354)..(354): n is a, c, g, or t
  misc_feature (383)..(383): n is a, c, g, or t
  misc_feature (396)..(396): n is a, c, g, or t
tgagacaaacctgagtttcaatctcaattgtttgtttgtggcttgctctcagcatcttaaattctctgaatcttaagttcctccactgtgtaaaagaaataatatccctctgacctcactgtggttaggcaagagacaatgcagtgattttttcagtaatattatgagacattttattactataattaaatgattgtattttccccagattgacaaattcaaattttctattttgaaatcttattgcaaatgttaaaaaaacaaacaacccaccctttggctcctgttatgttgtcttccagctgctagtaatggaattgggacagctaaatgttccctgagagccatgggganccagggcagtgtgcttttcaggaactgtnttactttattccncacaacaatcccaaaaggaaaaacctagtttta

SEQ ID NO: 302997 - DNA, 372 bp, Homo Sapiens
  misc_feature (106)..(106): n is a, c, g, or t
  misc_feature (280)..(280): n is a, c, g, or t
taaaaattcttctgggccatcacatctctggtgtcaccaagactcaagacattaaaacattaccttaaacaaaactgcagttgcaagcactagacataaagcagantacatatatatgtgatcctttgacaagcttcaatgtgactggttacattcattcttgtcatctttccagggagacaactcaagcttagaagccttacccaaaacccacagttgttttcctgcaccacccctcttcttccattagtttcccctcctcccataggcattctggggnccttaccaatctctacctttgggcacgggggtgctttccccaccccggaccttcaggtggactcatttttcatccttggcagccctaggggg

SEQ ID NO: 302998 - DNA, 226 bp, Homo Sapiens
  misc_feature (213)..(213): n is a, c, g, or t
cataaaaaaggagagctgtagtagatacgctttgaaatgactgcttaagtcatagccctcttctctagaaaatgctcctgcaatatttgggcagtcaactatttgggccaaagacaaatgaggatagggagtaaggtacctatctcaatggggagccaacccaatctactgggatgggcaaggtaatccaattcacatttcctcaggaatttncaaactaaggagg

SEQ ID NO: 302999 - DNA, 109 bp, Homo Sapiens
tcagcagtaagtattaacattctattaactatactgataggggcaagcattctattaagtagttatggcatattctattcaaaacaaattaggaaggccttctaggatt

SEQ ID NO: 303000 - DNA, 420 bp, Homo Sapiens
  misc_feature (313)..(370): n is a, c, g, or t
  misc_feature (394)..(394): n is a, c, g, or t
gagagaataagaactctttagcctgaagggaaaaaaagagtcaagagacagtctctggtttccaaattcatgaagacctaggttcaactgggattagcgccttagagcagtagtaacatcaagttacactaaagtatgactcacatgtataatcaagaattttctaacaaaccaatccaactctgttccagaaaatattctatcctactgtttgagatttttaaaactgatttctatactagatgaacaattaaatgggaatacatatatttctcagaaccaaagaagtttaatctataaaaactactttttnnnnnnnnnnnnnnnnnnnnnnnnnnnnnnnnnnnnnnnnnnnnnnnnnnnnnnnnnntggaggtgggagccttcatggatnggggttagtgggcctaattaaagggg

SEQ ID NO: 303001 - DNA, 284 bp, Homo Sapiens
  misc_feature (26)..(26): n is a, c, g, or t
  misc_feature (40)..(41): n is a, c, g, or t
  misc_feature (44)..(44): n is a, c, g, or t
  misc_feature (57)..(58): n is a, c, g, or t
  misc_feature (129)..(129): n is a, c, g, or t
  misc_feature (132)..(132): n is a, c, g, or t
  misc_feature (162)..(162): n is a, c, g, or t
  misc_feature (189)..(189): n is a, c, g, or t
  misc_feature (191)..(191): n is a, c, g, or t
  misc_feature (239)..(239): n is a, c, g, or t
aaggtagtaagcccaccgaggcagangcaagccgggtggnnccncgctgtgtacaannttctgctccctgtgcccctatgagtgaccctatgaggtaagagccagagccgggctcacacctgagctccnggnatgtggcagccctttagaagacagaaagtntgtgcttagcccctgaagcagccacgntntgcccagcggagggcaggcgcagacagcactccttcccagaccagggntgccacttaagatttcaacaaactaaacagacaagtgaataaaag

SEQ ID NO: 303002 - DNA, 474 bp, Homo Sapiens
  misc_feature (372)..(372): n is a, c, g, or t
  misc_feature (411)..(411): n is a, c, g, or t
  misc_feature (444)..(444): n is a, c, g, or t
  misc_feature (456)..(456): n is a, c, g, or t
ttcggcacagattggctgatatacatgaaaattacagaagtttccttcagacaaatttgactgtaaatcctcattatgttatcaggactcagtctgtctcaccctctctccttcctctctcctggtgtctcccacagtctcctagctctgtccattcttggcttttttcttaggcaccatctctctttgtggtagcaaagatgaccccctcacagctgccagattacataatccttagccctctgatgatctgagagagggcttcatctgaaatagcaaaagtccaaaggctggcacatatccaccatgcccaagctcattaacatattctctatatctcattgggcctcccgtgattctaggatttggatncacttcttctggcatgcttttcctattccgggtccttgntttggacattggatgtggtttttagcaggaaangtgtgtaaaaantaggatttaggtttaaca

SEQ ID NO: 303003 - DNA, 381 bp, Homo Sapiens
  misc_feature (180)..(180): n is a, c, g, or t
  misc_feature (214)..(273): n is a, c, g, or t
  misc_feature (277)..(277): n is a, c, g, or t
  misc_feature (309)..(309): n is a, c, g, or t
  misc_feature (340)..(340): n is a, c, g, or t
  misc_feature (358)..(358): n is a, c, g, or t
actaattatccctcaagaacaattaattatcccttaattgccttaggtggagaacttaactcctagaagccacatcaaccaacctcaactctggtttgtccatatctactgtgtgagctacttaactgactcctcctctctccaactgaaggatcacccagtgttttttgggattatagnaattattatttcctggctttgttactctggggannnnnnnnnnnnnnnnnnnnnnnnnnnnnnnnnnnnnnnnnnnnnnnnnnnnnnnnnnnngggnagacagggggtctccctctggcacccgggggntggggagtgcagtggggggccaatcaggggnctcactacaggcctcaancttccggggggttcaaacaaatc

SEQ ID NO: 303004 - DNA, 404 bp, Homo Sapiens
  misc_feature (33)..(33): n is a, c, g, or t
  misc_feature (254)..(254): n is a, c, g, or t
  misc_feature (258)..(258): n is a, c, g, or t
  misc_feature (260)..(260): n is a, c, g, or t
  misc_feature (300)..(302): n is a, c, g, or t
  misc_feature (346)..(346): n is a, c, g, or t
  misc_feature (361)..(361): n is a, c, g, or t
  misc_feature (368)..(368): n is a, c, g, or t
gaacaaaaactagtttctttcccttatgctttnctgttttcccacctgcacaaaagttacacatggctggttctcgataactccgattaaatttcctgctgccctgccttacagaaagcttgagaatggggctctgctttggggatgggtgatgaggtctacgccgggctttctccctttcccactggggtttataagggtaataaggactctccctcagggtgggcacataaggcttcatttctctgttgggntcangnacaatttggatttctaggtacctcaaacagtgccgggggnnnttaatagggcactctggtaaaatatttgttgaaggggaatggantaaattgaacaacanaccgtgnactttccccaggtggacaggccctattcagccccgg

SEQ ID NO: 303005 - DNA, 415 bp, Homo Sapiens
  misc_feature (229)..(229): n is a, c, g, or t
  misc_feature (343)..(343): n is a, c, g, or t
  misc_feature (359)..(359): n is a, c, g, or t
  misc_feature (370)..(370): n is a, c, g, or t
gaagtggggttcaaggtggcagtgaccccctccactcttagtgtcctgtctgtgaaggaatctgaagtggcacagagtcctggggctttgggaaaacattacctcctcaccccctcaaggtttcttccccctccccttcctgacagtttttaattagttccttttaaaattcattggagatttaagtctgttagttaaatataccttaacttgaattacataaagtagntaatcatttagattacctaaacttcactgggaatccttagggagtagggaattttgttaggcaggggaaatgggagagggtaattttgggatccactggggcacttcaaggaangggacattccgggggngagtgggtggnaagttggggggctttaggacaattccgaggggcagccatgaaggg

SEQ ID NO: 303006 - DNA, 124 bp, Homo Sapiens
taaatgatataccagtaatatacccaatgagtgaaggaaggagagagagggacttcactcatagggttgtcttctacagtaagggatgaacatttagggggtcatatttcaaaggtggggaaag

SEQ ID NO: 303007 - DNA, 229 bp, Homo Sapiens
  misc_feature (165)..(165): n is a, c, g, or t
  misc_feature (197)..(197): n is a, c, g, or t
aataatattatcttattatccttttaatgtctgtggaattagtagtaatgccacctctttcattctcattattagttatttgtgtttccacatttttttctgaccaccctaggttacaatttattaattttattgttactattttcagagaaccaactgttgggnttcaccaactttatggaatttatttggttcanaccccataggcaccgataaaccactccattaa

SEQ ID NO: 303008 - DNA, 331 bp, Homo Sapiens
aatcctatctgcccttttatgcacaaattgacaagcagatgaattctgaaattcccatggaaatgtaaaggatccagaatagccaaaagaatcttgaaaaagaagaacagagttagagaactcacactttccaatttcaaaacttactatacaaagctacagtttttaatacatgtgacacaggtatattgatagctatatagatcagtggaatagaactgcaagtccaaaaataaattcaaacatttatggtcagttgattttcaacaagggtgccaagacaattcagtgggaaaagaatagtcttttcaattcagtggtgctggggaca

SEQ ID NO: 303009 - DNA, 298 bp, Homo Sapiens
  misc_feature (95)..(95): n is a, c, g, or t
tgttttgtcttttattgcttctgtcctttatcacatttaaaaattcctctcattacaaaggtccccaaaaccaccaaatttggttctttccaggngtatcaaatgatttggacatctttagtcatgagagagtagtaaacaacagtactagataacactgactactcatgtcagtttcatcaaggctaataactttatggggtagagaaactgagttattttgccaattttataatgaattttcttaaaccaaaaccctggacatatttgtggcggcagtgtcttgaggtttgtatcc

SEQ ID NO: 303010 - DNA, 290 bp, Homo Sapiens
  misc_feature (45)..(46): n is a, c, g, or t
  misc_feature (70)..(70): n is a, c, g, or t
  misc_feature (152)..(152): n is a, c, g, or t
  misc_feature (170)..(170): n is a, c, g, or t
  misc_feature (184)..(184): n is a, c, g, or t
  misc_feature (205)..(205): n is a, c, g, or t
  misc_feature (220)..(220): n is a, c, g, or t
  misc_feature (259)..(259): n is a, c, g, or t
tggagtatggagtcaaagacaaaagtatctgtttgcaagaagggnncgggggctctttgcttctagagancaagagccctgagcttctacagcccttcatatttattggggtaggagtaaacagagaggaaggggtaactgtcagtcaactntttaatttaacacaggtntaaggtgattgccntttttgttcaacagggctccngatgtttctgtaggntatttccagggactggaccccgggggttttgaccgcccncagcttcccttccgggggccgttcagttgtc

SEQ ID NO: 303011 - DNA, 410 bp, Homo Sapiens
  misc_feature (213)..(225): n is a, c, g, or t
  misc_feature (326)..(326): n is a, c, g, or t
  misc_feature (400)..(400): n is a, c, g, or t
atactgctaatgaactatcagggttaatcattgagaagccactatacacgttcagatagagaccatggtcagtactgtaaacccttccttgtggctccatcgctgcttcctccctaaagtatactcctgacttctaatactatagttttgttatgcttgtttttgacttttaaatatgtgggaatcataggtatgtattcttttgaggtctgnnnnnnnnnnnnngttctttaacccttatttaggatttgtctgttttgctggcatgcaaatataggttcatttatttattcctttgtagggatatacaggaatttacatttccngtggtactggttggagggggcatttaggttgggggtaccaggttttttggccccttaccaaaataaattttacngtggaaccat

SEQ ID NO: 303012 - DNA, 241 bp, Homo Sapiens
  misc_feature (187)..(187): n is a, c, g, or t
  misc_feature (196)..(196): n is a, c, g, or t
  misc_feature (230)..(230): n is a, c, g, or t
atttctgtttacaagataagatgcaaattgtaaggactcatttgataaatgtgatagggtttatagggtaaaatggttcaccaaaactttccagggttccttagtaaactctgaacaagaaatcagaagaccttcatcctaataactccagtatcttgccaataagtctccagggaagtcacttagnttctctgantacttcatcctcctaaataacagactcgcatttnctagaaagcat

SEQ ID NO: 303013 - DNA, 329 bp, Homo Sapiens
  misc_feature (49)..(49): n is a, c, g, or t
  misc_feature (98)..(98): n is a, c, g, or t
  misc_feature (149)..(149): n is a, c, g, or t
  misc_feature (169)..(169): n is a, c, g, or t
  misc_feature (173)..(173): n is a, c, g, or t
  misc_feature (198)..(198): n is a, c, g, or t
  misc_feature (245)..(245): n is a, c, g, or t
  misc_feature (254)..(254): n is a, c, g, or t
  misc_feature (296)..(296): n is a, c, g, or t
gttctcattaagaactcttctcacagactcgcccaaagacctactcccnacaatcagtccttcagtttctcaatgatcagataatctttgaatcattngatcataatcagaaatgatcaaataatctttgaatcatctattctatcagntaattcttcctaaaatagtntcanattggtcatttgctcctcagagatntagtgaattaatatgtccatcatcatatccaaactcctacagtcttnggacaggcnttcaaagtctctgacaggggtaactgtaggctttcatttcanatatttttgttttatcctaccggggggccctct

SEQ ID NO: 303014 - DNA, 411 bp, Homo Sapiens
  misc_feature (264)..(335): n is a, c, g, or t
tcaccctggctgaaatgcagtggtgtgatcaatctcactgtaacctcaaactcctagattcaggtgatcctcccacctcagccttctgagtagctaggactacagatgcatgccaccacactgggctaatctttaaatttttttgtagagacagggtcttgctctgttgcccaggctgatcttgaactcctggcctgaagcagtcctcacacgttgggctcccaagatgttaggattacaggtgtgagccactgcagggagacnnnnnnnnnnnnnnnnnnnnnnnnnnnnnnnnnnnnnnnnnnnnnnnnnnnnnnnnnnnnnnnnnnnnnnnntgtgggtagtttaggcaccaaacttcacaatctctctgatctctgccttactgggattcgttttcaatctgggggg

SEQ ID NO: 303015 - DNA, 191 bp, Homo Sapiens
  misc_feature (79)..(79): n is a, c, g, or t
  misc_feature (107)..(107): n is a, c, g, or t
  misc_feature (125)..(125): n is a, c, g, or t
  misc_feature (161)..(161): n is a, c, g, or t
cacacctgggccatcactccctttttcttcagatccctgagggctccacctctaggtcttgtgactcacagtccggggntaaaatcaacaagtgtttcccctcactntgctccaatatttctggntttaaaatttttgtgtgtggattcaaaggcagtatnataaccaccacggagacagagggggggaaa

SEQ ID NO: 303016 - DNA, 280 bp, Homo Sapiens
  misc_feature (132)..(132): n is a, c, g, or t
  misc_feature (158)..(158): n is a, c, g, or t
  misc_feature (189)..(189): n is a, c, g, or t
  misc_feature (194)..(194): n is a, c, g, or t
  misc_feature (232)..(232): n is a, c, g, or t
  misc_feature (250)..(250): n is a, c, g, or t
gcaatctgtaacagttttggtagtggtattacagaggatttgtaaaatggattggagtacttaccactatttcatctgctctgaaatagttcactaaccaaactactgacaacagtttaattttggttcttnccttaaaattatacagactgcaccangaacaccatatggacctagtaacacttcagnttttnagaccttacaacctttgcaagtgcttctatggatttcnggggctctttaggatttnctactgcttgaggtcactttgggtaattga

SEQ ID NO: 303017 - DNA, 252 bp, Homo Sapiens
  misc_feature (213)..(213): n is a, c, g, or t
tgacttcacaccatttacatttactctcatcagcaacattattcagtacccagtatattttaatcagcaagtcattcaattaatagctatagatacagccaaaaggcacaaaatgcaataaaattcacctgcatgtcaaaggaacattccactttcacaaaaagtctatagcaacacatctggataaacctggcgtcatcacaatgtgaatancatgctgagtttctgccaatatggcaggtttggcagatt

SEQ ID NO: 303018 - DNA, 431 bp, Homo Sapiens
  misc_feature (340)..(340): n is a, c, g, or t
  misc_feature (346)..(346): n is a, c, g, or t
  misc_feature (356)..(356): n is a, c, g, or t
  misc_feature (376)..(376): n is a, c, g, or t
  misc_feature (381)..(381): n is a, c, g, or t
  misc_feature (393)..(393): n is a, c, g, or t
tgtggatttttagaaaagactgtgtattggttaatttattttgaggacatcagcaaatttctatttagaacttagtgtctttattgcttttggaaagaataaattctgtgatgtgataatcattaactgagtaggggattttaaagacattttgggtttttaaaaatactctttaagacagaacctcctctgccctgaaacaaataagtgcttaggtgagtacttgctagtattggttatttttaataagatctcagtttgaggagttggagtagggagaaatcccttccagtatgctttgcagtcttttgcttactaaccttacttgcctcacatgtcnttgggntgttttaccntttcaccagctgggaaatcnggctnaggccagtcccntttactaccaagggggaaagtccaggagggggcttctc

SEQ ID NO: 303019 - DNA, 384 bp, Homo Sapiens
  misc_feature (218)..(218): n is a, c, g, or t
  misc_feature (268)..(268): n is a, c, g, or t
  misc_feature (298)..(298): n is a, c, g, or t
tttacaaaaccggagtattttattgcaccaagatcttggcaacacgtggggctccccaggcccccggaaaggaggtgcagaggatgggacacagacctctgcacacacacaggtgcggccatgcaaccaggacgcggggcaggcaagtgagaggacctgggagaggtagctgctgtacacaggccccactccctccagctccattcccaagcacaaanttcaacagacccagatcctaagtcaaccaagtgactgctatgacaaaggnttgggttattgaaatttacttacatacgtntacaagacctagagtttgaactcgttttctgggcctcatctttcccttccctattctggttgatgatttcggtggagggaaagggg

SEQ ID NO: 303020 - DNA, 411 bp, Homo Sapiens
  misc_feature (196)..(196): n is a, c, g, or t
  misc_feature (203)..(203): n is a, c, g, or t
  misc_feature (379)..(379): n is a, c, g, or t
ctattataacaaaaataccacagactaggtggcttaaacaacacttactcctcacagttctggagatggggggaggtcaaggtcaaggtgctggtatattagtgtgtggtgagggcctgcttcctgctttgtagacagccattttcttgccgtgtcctcacatggtggaaaagggagacagctccccagggcctcntttatangggcactaatcccattcatgaggggctccaccctcaaaacccaatcatctcccaaaggccctacctcctaacagttagtcctaggagtcaggatttcaacacatgaattttgggggtcgaatacattcagtgtctaacacttccttaaacctgtttcttaatgtgtggctctttgncaggagctggaatacaatggaatgtagttttt

SEQ ID NO: 303021 - DNA, 410 bp, Homo Sapiens
  misc_feature (346)..(346): n is a, c, g, or t
  misc_feature (397)..(397): n is a, c, g, or t
gtaatggaaccgctcttcacttttgtggccatcaccgaagccggagtggccaaaatgaagttcaataccttcgtgacttagaaccacagcaagaaccacaaaaggcatttctatgcaccttcccatacttcgcaggaagagagattgtctttccctctttccaaagagctgaggcagaagcctaagttcaggttgtgtgaggacaccacagaggccagcaaaccagcaaagcgggttccagggtttaaagggaagaaatacggtcatctacacttgaacgagtgcaggggggaaaagtctaatgggcacgactgttccacggtgggctttcatcccagccgggttnttattctttagggctaaccactgggacattgaccacaaaaagttccgtgantgggccagggttt

SEQ ID NO: 303022 - DNA, 422 bp, Homo Sapiens
  misc_feature (304)..(304): n is a, c, g, or t
  misc_feature (394)..(394): n is a, c, g, or t
agtgtttgggttcaattgcagatgataagtcttggctattattgtaaatatatcttttgtgctcaaaattacttacaaaatgctaatcaggcttatttcctgctcagttctattagtttagcccttgaaagcatagttcctaagatttagagacagtttttgaatagtcaagacctccctatggcactgggaaattaaatttggtttctttcctgcttttgcagaatgcttattccatcaggagtaatttactctaattagggactatgtgttctgaaaatataagcacttcttcaaggaaaanttaaatgttgtgtagttttcatgttcctgtcaacttcagggaaaaaacttataaccaaaagcatctaaggagaaggaaagtactgtatcntcagcccggggcttcagggggaggtttc

SEQ ID NO: 303023 - DNA, 116 bp, Homo Sapiens
agacagcagagcaggtttgtgggttttaagaaatcttaggaagttgtagcagatcctaaatgcaactattagttttaaatactctatttggagataaagttttcaaataggactgt

SEQ ID NO: 303024 - DNA, 421 bp, Homo Sapiens
  misc_feature (111)..(111): n is a, c, g, or t
  misc_feature (296)..(296): n is a, c, g, or t
  misc_feature (313)..(313): n is a, c, g, or t
  misc_feature (334)..(334): n is a, c, g, or t
  misc_feature (352)..(352): n is a, c, g, or t
  misc_feature (366)..(366): n is a, c, g, or t
agcatttcttctgagttgtgcttgctgaactcaaaatactaggtgatttggtaatgcgcctaaagagcatggggctcctcctgccaattataagcaaagacatcacatttngagtttggcaagatcagaatatctcaggttgagcacctgctgaatgctaggattgtgtctatgcattttaaatctatttttaatctttattacagtcttataatagggattatgacaccagaacagagacagctgtcttaagatttcaaggggtgctagctgaaggaaaacagagaggaaagttnggaagaagctggatccntgataacagctgagccatggnctttaaccagttcttagnttgaggcgataccntcacctttcaggttttcatggttcataccacctggaaattaatatattttccatt

SEQ ID NO: 303025 - DNA, 128 bp, Homo Sapiens
  misc_feature (59)..(59): n is a, c, g, or t
  misc_feature (86)..(86): n is a, c, g, or t
  misc_feature (92)..(92): n is a, c, g, or t
  misc_feature (99)..(99): n is a, c, g, or t
tgataacagcctggctgggatgaatgccagcgtgggacagtcgtgccattagacttttncccccttgcactcgttcagtttagatngacgtntttcttnccttttaaaacctgggacccgctttgctg

SEQ ID NO: 303026 - DNA, 331 bp, Homo Sapiens
  misc_feature (51)..(51): n is a, c, g, or t
  misc_feature (60)..(60): n is a, c, g, or t
  misc_feature (172)..(172): n is a, c, g, or t
  misc_feature (175)..(175): n is a, c, g, or t
  misc_feature (230)..(230): n is a, c, g, or t
  misc_feature (321)..(321): n is a, c, g, or t
tgtaccttagagaatacctgagtcggctgtcaatttcaggaaggggcactncttcagggnctatggaaggaatagatgtgtgattcacccacgggcctgcacttcacacctcggtgtgctgctctcaccatgcagatcccatctgtgtctctaaggcttgctcctggagctngtngcaacttagtcacagaggaaatggccttcctgtcactgccatcatttgctacttnaagagaggtaatccttcacgcatttgctttacttgcaatgattatgacaagggcagactctctctggggagcaaatcctggcctgggaagncttcttgggg

SEQ ID NO: 303027 - DNA, 454 bp, Homo Sapiens
  misc_feature (26)..(26): n is a, c, g, or t
  misc_feature (38)..(38): n is a, c, g, or t
  misc_feature (373)..(373): n is a, c, g, or t
  misc_feature (404)..(404): n is a, c, g, or t
  misc_feature (414)..(414): n is a, c, g, or t
  misc_feature (430)..(430): n is a, c, g, or t
attcggcacagctcggctttgaggtngagggtcgtctngtttattgttaccactactcttttctaccaccgtagtccttacaaggcttacagcagacagataaccaggcaaggcccagcgtgaccaggcccagactccttccagaaaagacatggcacaggtacccagcagtgtggatacagtgtcttgagcctcacggggcacctgtggctggtctgctgtggaaccatgagccagtgttggggaggagcaaggtggggcgaggcaggccttgccaggttggcaaaggtgacctgagtcagcccaaggtgcttccaggctagtgagtcacccagctccccacgtgaatggacatcacagccgcccagtcctnttgctgtttcggacctcagcaaggaaccacntcaggggcgncatggagaagttgttnttcatggtagggccccagcttccc

SEQ ID NO: 303028 - DNA, 434 bp, Homo Sapiens
  misc_feature (381)..(381): n is a, c, g, or t
  misc_feature (404)..(404): n is a, c, g, or t
  misc_feature (415)..(415): n is a, c, g, or t
tttctttggatgcttctctgtgagtaaaaattgttaggttgttttcacatctgcaggtgttgatgcgtcggaactccctacctagaagtttctactcacaacagaaaaggtggtatctgaagtacagttgaaggtaaaaagcgaaaggttgtcaaaatccggaatgtgtgagattatttttaaaaccagtaggaggcacactgctgaggataccttccaaaggctctgctttccctgacaacttgtgccagcaagtggaagccaccgtttatagaggccccattcttgctgtatgttcgcataaatagaatccatctctttttctctctttcatatggcacacgtgcctgtgcattcacaggtacacatataaaccttggntttgaaacttgagtcagattggntgaataaacantgggtagggaaatttaagg

SEQ ID NO: 303029 - DNA, 147 bp, Homo Sapiens
cgactttgtctcttatagtaagagctgtcaatttaacagaaaacccccaaagcaccagtgatgcaaacagtaactacaaaagcttaacactgggcaagggaccacaaatgcgtagataccaactctaccaagaaaaaatctattcga

SEQ ID NO: 303030 - DNA, 416 bp, Homo Sapiens
  misc_feature (92)..(92): n is a, c, g, or t
  misc_feature (139)..(197): n is a, c, g, or t
  misc_feature (212)..(212): n is a, c, g, or t
  misc_feature (235)..(235): n is a, c, g, or t
  misc_feature (264)..(264): n is a, c, g, or t
  misc_feature (334)..(334): n is a, c, g, or t
  misc_feature (363)..(363): n is a, c, g, or t
  misc_feature (394)..(394): n is a, c, g, or t
  misc_feature (403)..(403): n is a, c, g, or t
agggtgttgctctgccgcctagggaagtttacagtggcttgatcagagctcactgcagcctcaacctcccgggctcaagcgatcctcccgtnttagccttccaagtagctgggactgtgggtgtgcaccaccatgcctnnnnnnnnnnnnnnnnnnnnnnnnnnnnnnnnnnnnnnnnnnnnnnnnnnnnnnnnnnntggctcaggcgattntcccaagtcagcctcccaaattnttgggattataggcatgagccaccaggtntggccatgaattttaggatcaatctatttctgcaaatagattgatgggttttttaatagactttattttntagatcattttatgctcataacaaaactngggcagaaagtagagttcccatgtggccccnataccacangtatgggaacttc

SEQ ID NO: 303031 - DNA, 186 bp, Homo Sapiens
ttagataagagggaataacctgagaaggaaggcaacatggaatccaagaaacacaagggaaagatgaaaagtagtcaccgagatgatggtgaatggagaccacaggatgacagctatgcccaaggtatagagagcagtcaatccaaattacagcaggtcaggaagctcgagaaaatgtgtccaaga

SEQ ID NO: 303032 - DNA, 128 bp, Homo Sapiens
atgtcaggaaaatattctcaatggggaggaaaaaatatataaattttcaagagatgtggaaaggtagaaaactccagaattttggtctttttagagatttaaaagagatttagtctttttagagactt

SEQ ID NO: 303033 - DNA, 469 bp, Homo Sapiens
  misc_feature (60)..(60): n is a, c, g, or t
  misc_feature (407)..(407): n is a, c, g, or t
  misc_feature (421)..(421): n is a, c, g, or t
  misc_feature (426)..(426): n is a, c, g, or t
ggcacgagcggcacgagacttgatgtgattccgtttgttgatttttgctttggttacctntgcttgtggggtactgctcaataaatttttgtccagaccaatgtcctggagagtttccctgatgttttcctataatggttttatagtttgaggtcttagatttaagcctttcatccattttgatttgatttttgtgtatggtaagagatagtggtctagtttcattcttctgcatatgagtatccagttttcccagcaccatttattgaagagattgtcctttccccaatgtatgttcttgggcacctttgtcaaatatgagttcactgtggggtgtgtgaatctgtttctggggttcccagttctgttccattgggtctatgtgtctgtttttatggccagtgccnggggttgttttggnttaantacaaactctgtaggcataaatttgaaggtcagataattgtat

SEQ ID NO: 303034 - DNA, 357 bp, Homo Sapiens
  misc_feature (98)..(106): n is a, c, g, or t
tacatcatcaattttcctttcttctgaattattcctattttccttttatctgaattatttctattaacataaaaaaattatttcttacatcttaaaannnnnnnnnctccttattccacttcccccttctactacctcatttctctccttctcttagtagcaaaaccttaaaagagttgtttatacttgttccttctaagttccttcctcctgttctgagttaaaactattccactgaaatagttttagtcagggtcaccactgcctctaaatcctgtgggtcagttcgtaggtccacatcttgatttgaccataggcaggcaggcatttggacacaccatggacacattcttcagt

SEQ ID NO: 303035 - DNA, 504 bp, Homo Sapiens
  misc_feature (371)..(371): n is a, c, g, or t
  misc_feature (408)..(408): n is a, c, g, or t
  misc_feature (420)..(420): n is a, c, g, or t
  misc_feature (438)..(438): n is a, c, g, or t
  misc_feature (451)..(451): n is a, c, g, or t
  misc_feature (471)..(471): n is a, c, g, or t
  misc_feature (494)..(494): n is a, c, g, or t
ctaaatgtcctccctctgacgtttccttctctccaactctcaacacccgctttgtccatttgttagatacatttaatgcaacaacgcttttagatctactttcacttttttaaaaggcaaaatttaatataagttattaacaagaaactatatcctaatttgtaatgaatttcaggggagattatattggatgttgttagtttgggaaagagctttggaacaatcacttgtggagacacaagattcctgggaggacagatatcacatctactaaaattgactttaaagccatctaacactgtactttggcttagatagggaatatacggaaattcttgggtcattaatactgatttagagtcatttgttcnttttcaaggattatcctctaggagtccatttaggagnttaatttgttcnttttcaggattatccacnttttttggggaanggatccacaggctttccggnggtggttttaaaggggaaaggcncggtatttgg

SEQ ID NO: 303036 - DNA, 148 bp, Homo Sapiens
  misc_feature (90)..(90): n is a, c, g, or t
tcttgtaactttactgaataattttcaacgtcctttttcataatatttgctagagttactagtaatagaaacttatgcaggatgttcttntatcaatacatttcaacttatacatgccctttggatgagattgaggtgagaaattaaa

SEQ ID NO: 303037 - DNA, 371 bp, Homo Sapiens
  misc_feature (223)..(223): n is a, c, g, or t
  misc_feature (324)..(324): n is a, c, g, or t
attcaaccaagttaattgccaggcttgatcatggaataaatgaatgactagaaaatcatctcagtttttaaaattcaacaaaaaatttctcaacaactaagtgtccaagaagacagaatctacatacaaggacctcttagtcttgtgcaaacacaaaactgtcttgcactcgcatgctgggctgtgtcacctgtgtatttgtgggatatgtgagccacctggngcctaatacatatacttgttaatagtgagatatatgcatacaaagtgcttgccaccaagcgacagtatgcctgcttactcaccctggcatctataggaccnttgaggtgctactcaaaatcccgggggctgttggactttggcactgg

SEQ ID NO: 303038 - DNA, 121 bp, Homo Sapiens
  misc_feature (13)..(13): n is a, c, g, or t
  misc_feature (36)..(36): n is a, c, g, or t
  misc_feature (41)..(42): n is a, c, g, or t
  misc_feature (58)..(58): n is a, c, g, or t
  misc_feature (72)..(72): n is a, c, g, or t
  misc_feature (74)..(74): n is a, c, g, or t
  misc_feature (79)..(80): n is a, c, g, or t
  misc_feature (83)..(83): n is a, c, g, or t
tctggtcagcctntacagtctctgtcctggtgaggngcatnntcaccaacaggcaagngcttctggccttgngntttcnnttnagttaaaggagctcatctcaggtaagtgacaggccaag

SEQ ID NO: 303039 - DNA, 195 bp, Homo Sapiens
  misc_feature (14)..(14): n is a, c, g, or t
  misc_feature (96)..(96): n is a, c, g, or t
tcgtctgagttatnatcaaggctgacattgtaaaagggtgagtaagcaattatctcggtggggtgatatccagggtactgaaaaggatttcagganatactttcttcatcccctaactgatctctgaaattcctttaaggcatgactcctttggcttaaggctcgggtctctggaaaaataaaacattaagcaga

SEQ ID NO: 303040 - DNA, 247 bp, Homo Sapiens
  misc_feature (13)..(13): n is a, c, g, or t
  misc_feature (83)..(83): n is a, c, g, or t
  misc_feature (104)..(104): n is a, c, g, or t
  misc_feature (127)..(127): n is a, c, g, or t
  misc_feature (136)..(136): n is a, c, g, or t
  misc_feature (150)..(150): n is a, c, g, or t
  misc_feature (157)..(157): n is a, c, g, or t
  misc_feature (168)..(168): n is a, c, g, or t
  misc_feature (172)..(172): n is a, c, g, or t
  misc_feature (190)..(190): n is a, c, g, or t
  misc_feature (216)..(216): n is a, c, g, or t
  misc_feature (218)..(218): n is a, c, g, or t
  misc_feature (223)..(223): n is a, c, g, or t
aatagctacatanttcacaaagttgctactatattgaacattacagctctaaacccaggtatacgctattctgtctgcctggnatacacaggtatgtgtggaangtcctcatcagtgctactatctnacatcattngtattcattctttngcaaggntattctatttntgtnggtggtagttgatagggnccattctacataagagactatttggntnctctngtggagctagctacataacctcat

SEQ ID NO: 303041 - DNA, 491 bp, Homo Sapiens
  misc_feature (388)..(388): n is a, c, g, or t
  misc_feature (425)..(425): n is a, c, g, or t
  misc_feature (460)..(460): n is a, c, g, or t
  misc_feature (473)..(473): n is a, c, g, or t
cagatgggagataagtcaggtcaatttgatttgatcaacacccctgattgcatttatttccttatttccaggctggctccagagatgctatccccaaatgggcctctggaggacaaatcttttggtgaacattcattaagcaaaataatgcacttatgagtaaagcacatggtgacttggatggtgtgccattacctccccaggacagagtccaaactgcttgccatgataggtgcatgtggtctggatcctgcctttccccacttcttcccacctgggccctttgttcctggtatcctttctgcctgggcactccttttccttcccttctttctgtttgggaaaattggcctcccttaagtcttgtctgcttgtaaacaatctctgntttaaacccccatggacattctcatctcccttagttnttgaggtaccccagggttaggagggacccacaganccccgggaatccntatttacagcatttgttt

SEQ ID NO: 303042 - DNA, 429 bp, Homo Sapiens
  misc_feature (364)..(364): n is a, c, g, or t
  misc_feature (380)..(380): n is a, c, g, or t
  misc_feature (394)..(394): n is a, c, g, or t
aaagaatgctgaatataggttgaatctctcctggcttgtagggtttctgctgttttaagccttattgggggtttcctttataggtgatctggcccttttctctagctgccttagcttttttttcctttcattttgaccttagagaatctcatgtctcttgggatggtcatcttgtatagcatttcacaggggttctctgcatttcctgactctgaatgttggcctctctggcaagcttggggaaattttcacggatgatattctgaaatacactttcgaggttgcttgctttctctcccttacagggacaccagtgagtcgtagatttggttccctttaacatagtcccatattttacataggntctgttccatctttantgttttttcttcanttccgaatgagttattttcaaagagccagtctttg

SEQ ID NO: 303043 - DNA, 451 bp, Homo Sapiens
  misc_feature (73)..(89): n is a, c, g, or t
ttgacttttgaaattcctgctttctcagagtttacaacatccttaccaaacagccttctccctccttaccacnnnnnnnnnnnnnnnnngttctggggttgaggggacactccattcttaacatcctctattatcccagcccaattccccagctctcactgggactagttgtacctatcttcatcatttggtcccagcatgactacctgttggtgcatgagctgatctctcctaacctaacagccagatgctagtctctggtactcagatgctgggctgcatcagataggatgcacaggatcatcctgggaagcttgttgacatagattcctgtgcaacacttcagatatagtcttaatgtagatttgtgttggggtggtatggtaggtagaataatgggcctaccactgtgtaaacatatggatatgtttacctaacatgacagaagaga

SEQ ID NO: 303044 - DNA, 266 bp, Homo Sapiens
  misc_feature (174)..(174): n is a, c, g, or t
ctctttatttcatactgagatggttctaagtgaaacctatttggacacaaattagtgactctaattagaatagtgtacatcccactcaactcaatttaatggaatatttattggcatgatgtgaagaaactgaaataaactgtatcagagttgtgcccatggggagtttatggncttattgagaaagaaagacataaaacagcaaatggggtaacagacataatgaggttcttatgttttacaggggacttgccagaatgttactt

SEQ ID NO: 303045 - DNA, 426 bp, Homo Sapiens
  misc_feature (88)..(88): n is a, c, g, or t
  misc_feature (230)..(230): n is a, c, g, or t
  misc_feature (413)..(413): n is a, c, g, or t
ttttgaagtgggtagctgccattctgggagctggggctgaaacgggtattcattgccattcagaaccaggcctttgacagctctgctncttcacatctgctgagggcatcaagcaccggttcagtagggaaagaaggatggggaaaggctgtggggagagaggttgggtaacattagggagatgccaagaatctggctattcaagacagtgttcacagcaccaacaattncagaaaacattcatttgagtggttgtaaattagcacttgaatcccactatcctctttttcaactgccaaatttgtttgtttttcaccagaagagacttagtgattgggaattttataattgtgatattagctattggtcctgcattcatcacagaactaatttatggcacccataggaagggnaaattaaattccc

SEQ ID NO: 303046 - DNA, 328 bp, Homo Sapiens
  misc_feature (174)..(174): n is a, c, g, or t
  misc_feature (222)..(222): n is a, c, g, or t
ttggtaattggcgtgggaaccaattcttttcaactagtatttacagtgaggcattgagacaagaactcttcctgccttgtcgttggtgctgtgtcttttcctagtattagtctcagcatataagagcaagtgtttgtaggtatcttctagttcactaccagtgggggtgacttncccaaggttgtagagtgagttcatggcttaatgagggctatagccagnagatcctgatgccctgctttgtgttctttctagtgtaccacactgtctgtcttgtataggttaatacagcatgggcagaaggtatggtttccagaagccccctgtt

SEQ ID NO: 303047 - DNA, 432 bp, Homo Sapiens
  misc_feature (242)..(295): n is a, c, g, or t
  misc_feature (407)..(407): n is a, c, g, or t
  misc_feature (412)..(412): n is a, c, g, or t
aaaaacaagattaagtatcatcattgatttaaagagtacaaagtttgaagaaaatgcttccccgagacatttggcaaggatacagctttcctctattatgcccaggcagccacctctgaaagctccctagaatataactcaagaatggcacccaaaatccctgagcatcttgttcctctccagccatacaaagggatgacaacaacatggatccagcaaccggaaggtatgtttgccactgnnnnnnnnnnnnnnnnnnnnnnnnnnnnnnnnnnnnnnnnnnnnnnnnnnnnnnatgacccatgtagtcaggtaggtctgacctacatgaaccaacaggatgctggcaggaatttgacagtatggggactttccaagggttaggggctctgggggggaaaccagtncactngttgttgagggacatttcaa

SEQ ID NO: 303048 - DNA, 139 bp, Homo Sapiens
  misc_feature (36)..(36): n is a, c, g, or t
  misc_feature (48)..(48): n is a, c, g, or t
  misc_feature (59)..(59): n is a, c, g, or t
  misc_feature (125)..(125): n is a, c, g, or t
accaagcacaaaattgttccacagcataaaacaaanccataagatttnccgtatcaacntttaccccaccacacttcaagagctgccatggcaagctcaaatatgtggtgtactttacgttcagntttgtcccattttg

SEQ ID NO: 303049 - DNA, 385 bp, Homo Sapiens
  misc_feature (335)..(335): n is a, c, g, or t
  misc_feature (348)..(348): n is a, c, g, or t
  misc_feature (353)..(353): n is a, c, g, or t
actctttgcaataaaacttcaattcatggcacaaaatgctggataaataagagtctttttttcctgtgttggatttgttgggagattatttctttcaaatagtttggctttactgttaaaagtaaatgaccagtgaaataaactcattgggtggcaaatgtagcatatccagaagcaaggaattaagtagggtaaattacatgagattaggaaaagataggaagttgtaatgttaaattagtaaagatttgcaaaagtactataagagctatcaacactgtaaacaaagctttaataagtgaggattatccatttttgtaggcacgttattaaanagttactttaaantttcngttatggaatactcatttattttgtaatccta

SEQ ID NO: 303050 - DNA, 390 bp, Homo Sapiens
  misc_feature (116)..(116): n is a, c, g, or t
  misc_feature (194)..(194): n is a, c, g, or t
cttccctaaacaaatttaggggaagtaaaatattaatttcaatcatgtgattacagaaaaaggaaatgtgcatcaatttgaatgtaagtttcaaaatccaaacaagcaaatatttnctttgcttttgaggttttgacttcttacctaaaggttgcaaatttggcacctattacacatgtaaagtagtatttttnaactttttgttgttcctgggaatgtaaattatcaaaccattcccagggtgaataggaagcaaggcttaaccaagttagcttcgtaggctattgctgggaattgaccaaggggtaagtcataattttaaggtgatttaactcccaccaccaagcctcatttcccccaccccaatcaaccatttttcttgtaccaaat

SEQ ID NO: 303051 - DNA, 384 bp, Homo Sapiens
  misc_feature (228)..(269): n is a, c, g, or t
  misc_feature (355)..(355): n is a, c, g, or t
taaatttttgtatctttattaccagttcaagccatgaacacatagtgctatctttattattgtaaataaagttaccagaattttatatctaattagattatagagccaatttcagaaaccccataaccaattcagaaaatttatccttaaaattccgttcctctagaatctctttcagtaccaaaatctgtattttgtcagagttcttcagagaaacaggacaaatgnnnnnnnnnnnnnnnnnnnnnnnnnnnnnnnnnnnnnnnnnntataatgtatttaagtagttgatacacacaattatggaggctggggaatctgctgtgtgcaatgtggagacataggaaaggtggtnatgtagttccaaactatgtctgatggcct

SEQ ID NO: 303052 - DNA, 445 bp, Homo Sapiens
  misc_feature (398)..(398): n is a, c, g, or t
  misc_feature (417)..(417): n is a, c, g, or t
gctttactgagatgtaatttacataccataaagttcacccatttaaagtacacaatttagaggaggtttctcgtatacttagagagttgtgcaaccatcaccataatctaattttagaatattttcatcatctccagaagaaaccttgtacccattagcaatctctccccatccctcccccaggataactgctaacatggagggactttaacatttgaatccaaacaagaagaagaaacctttagtattcaatcacctgacacaagttcttcattttatagaggaaaaaagtgatgttagagaagggccatgattttatagggggaaaaaagtgatgttaggaggaaggggccatgttaggagaaggggtgaggatgtgggccgaactgggggtgggntccacagtccccggtgttntaccatccttattgggccgtgctgttga

SEQ ID NO: 303053 - DNA, 396 bp, Homo Sapiens
  misc_feature (224)..(224): n is a, c, g, or t
  misc_feature (347)..(347): n is a, c, g, or t
ctttagagcagtgcctcccaaactgtaatgtgcatatgaatcacccggggatcctgttacaatgcagtctgctgcagtaggtctgaggtctggccagacattccacatttctaacaagctcccacgtggtgctgatgccgcagtcagaggacttcactgtgagtagcaaggcagcgctgggactaacttggttgaactcatgagtgattataacaaggtaggtntttaggaggcagagccaaggaggaacagggcaagacttctgtgccaaggctgagcagatgctgggtaacctcagggtgcaatacaaacccggctgggggagaattgagtaggctcagggaccngtcagtgttcttcaggggccatatggccagatgcacattttgcccaaga

SEQ ID NO: 303054 - DNA, 355 bp, Homo Sapiens
gtatatagcaacttctggttgcctgtagctatctttactgaaatattccatcatatcttcaccatatcacaataacttaaataggatctcttttccttttatcaagtatagtaatagctaacattagtgagtgtttattatgtatccagcactgtgcccatatgtaatactttgcaaggatcaatgtgctgtatatgaggaaactgcaagttaaggaacttccatgtatactttgaagttcattctcttaaataaggaagctatattgccttccactgccttgcatttttgttttcagccctgtccttcaaaaccttactgtgtttgtgtaaattctgtcttcccatgttccttc

SEQ ID NO: 303055 - DNA, 408 bp, Homo Sapiens
  misc_feature (21)..(21): n is a, c, g, or t
  misc_feature (362)..(362): n is a, c, g, or t
  misc_feature (369)..(369): n is a, c, g, or t
atttatctgaacagcggcccngcaagtcaaactggtaactagcattgttactccttgtacactcatattgaaattgaggtcattaaatgtgaactaattttctcaaaatcttaacaccttctgacatggttaaagagccatgatccgcctatgttctaggtgatcagatagcccagaagtctctttccgctctttagctgtcatctcctgtgaatgcctgtaaggaaggccctttctgaaaagtcagggaaaagtcataaaagtgggagaactgagcttgtgcctcttctggagtcctgtggttctctcccttcctggccagtttgcctcccatctttatggcttttccctacctctcaatncaaacanccctgcactcttgcctgtaccaacaggatttttttattc

SEQ ID NO: 303056 - DNA, 325 bp, Homo Sapiens
  misc_feature (292)..(292): n is a, c, g, or t
ctggaaggaatacaagaattggtttggcaaggaaagagtctgaaagaacagtccaaatgctaatataattctctaaacgagatgtattaaggacccaaattagggctgacagcattggaaacaaaaggtacccaatttcccacacatatcaagggtaaactttgtatctgtaaacttcatcagagaaagtactgtcatacctcctcctcatatattctttttgaataaaaaggttttgttttgttactaatactctctaaaatacatatattgtgcatgagtctcttagagnacacaatcaagatagtaaaataagcaattaagg

SEQ ID NO: 303057 - DNA, 291 bp, Homo Sapiens
  misc_feature (118)..(118): n is a, c, g, or t
tgaaacaaggagttaatatctattatgaagattagagaagataatgtgtgacagtacctgacagtgcattgccaaatctcttcataactatgagtgaacttttaagttccgatttggntatacgctttcagtgaaatctgatttggaaattatagtgactttattatatatttggtatcacatttatcctgaataagtatcacatttgtgtttgaaaaatatctgaatagtttgttagataattatgtgtccctcagccatattgaattttcaagtttcaatcagctatat

SEQ ID NO: 303058 - DNA, 388 bp, Homo Sapiens
taaaatatgtgaaatccccttttgttctgaggattctttagtaggcaggagtgaccagattggaatatgcttggctggaaaaattaagattcaacttaacagactgttaataaccagaaccatcttctcttccgtaatgtggatttgccactgcaggtcaccctacaatgctatgttagaggtacaacactcctaccctcaggctataaacaaggtgaattattatctttatatctcttcatttagccctgatttgctgaagtgaaggcttgcttgagagttggttgcattataatttggtgagaatttaatctctcaatgacaacttacttgattccctcattctctttctggctacatagatccacagtaggaccttgggcagaca

SEQ ID NO: 303059 - DNA, 467 bp, Homo Sapiens
  misc_feature (348)..(348): n is a, c, g, or t
  misc_feature (395)..(395): n is a, c, g, or t
ttctggaagctgagtaggaatggtaggttatgacatgtcagcatctaatatgtataccttcgtttagtactcattttcagtgtaagcctttattgcctgtcaaaggctttattgcccgtcctcaactgtacctggtgtcaccaggcctttctggttcagttcttctagaaagtaaacacatattcctctggagaggtgtgggaaagtctgttaactagctcattgagctgggagaggagatccttgggattgaattactcctatttttatttgcaccccgtctcctagccttcagagattctgggtgtctccagttcctttttggaattctttttgtgctatgagttngggctgaatgctcggtgctgtgcctgcccaccttatccgtagctttnaagcttttcttcttcaacctcagttcgcatgcttgttcagctttgggccagatcaatcttttgtttgaatgg

SEQ ID NO: 303060 - DNA, 216 bp, Homo Sapiens
  misc_feature (100)..(100): n is a, c, g, or t
  misc_feature (116)..(118): n is a, c, g, or t
  misc_feature (136)..(136): n is a, c, g, or t
  misc_feature (138)..(138): n is a, c, g, or t
  misc_feature (155)..(156): n is a, c, g, or t
  misc_feature (163)..(163): n is a, c, g, or t
cactaaggatatgatttaggactcaattttgtgacgggaaaggagaacacatcttttccaacacaatcaaggtacaatactcatgctataaccctctaantccctaggcccatttnnncctactaatagttctaanantcacgcttgccattaanngggtaanactaccaatgttttgggtcatctcagaccaaaaggtcatatcaccccttaggt

SEQ ID NO: 303061 - DNA, 216 bp, Homo Sapiens
  misc_feature (85)..(85): n is a, c, g, or t
  misc_feature (158)..(158): n is a, c, g, or t
  misc_feature (174)..(174): n is a, c, g, or t
gtaaaagcataaaataatttaatccagtatagatatctgatttgtggtttagagtgcaaaatcttttcataaattattcataganagcaaaatatccttttctcctaatggtattaaatagaatagttttctgctctgctaggaatgcatattccggnactccgtttgtttccntaccatgttattgtcagaggctctttagggcatcatctcttt

SEQ ID NO: 303062 - DNA, 198 bp, Homo Sapiens
  misc_feature (68)..(68): n is a, c, g, or t
  misc_feature (88)..(88): n is a, c, g, or t
  misc_feature (98)..(98): n is a, c, g, or t
  misc_feature (102)..(102): n is a, c, g, or t
  misc_feature (107)..(107): n is a, c, g, or t
  misc_feature (110)..(110): n is a, c, g, or t
  misc_feature (112)..(112): n is a, c, g, or t
  misc_feature (124)..(124): n is a, c, g, or t
  misc_feature (138)..(138): n is a, c, g, or t
  misc_feature (149)..(149): n is a, c, g, or t
tttctatttatcctttgtctcttttctattctaattgtcatggacatgtatagtggctttagatttanttaaaggagtaaacttggantgctcaaagntaantaaantangntaaaacttctgntttttgaaagacanttttaagagantggtaagctgccagctgggggaagattttgaaagtcatgtgcttgatac

SEQ ID NO: 303063 - DNA, 257 bp, Homo Sapiens
  misc_feature (168)..(168): n is a, c, g, or t
  misc_feature (208)..(208): n is a, c, g, or t
aaaatatagaatttttaatcgagttcatgttgtttatccaaactgctttattttattgcatgtgtaaactactagaaaaaactacttagagcatattgtcttcccataatactaccttaggtgatctttgctgtttattaaccagccctcagattttgaacaaatttntttaaccttactgggaccccagatttctcaattataagangaggaatgttgtattaggggggactcttctaatcctgaatttctatgga

SEQ ID NO: 303064 - DNA, 171 bp, Homo Sapiens
  misc_feature (135)..(135): n is a, c, g, or t
atttctaatttcacatgctctttattgagacatacctgagactgggtaatttattaagggaagaggtttaattgactcacagttcaatatggctggggagacatcaggaaatttacaatcatggcaaaaaaggangcaaacacatccttcttcacatggcggcaggtgaga

SEQ ID NO: 303065 - DNA, 402 bp, Homo Sapiens
  misc_feature (338)..(338): n is a, c, g, or t
  misc_feature (362)..(362): n is a, c, g, or t
  misc_feature (373)..(373): n is a, c, g, or t
  misc_feature (384)..(384): n is a, c, g, or t
tggttaaagcaaaagaatagactgttttattttgcaaatagatagctaaatcaacattccagatgtgcttacttcccagtatatatgcactagtcatttccaaaaactattgattgacaaaaaacattcttttcaatttgatctacatagtaatgattttaatatccttagaaccaaataacactatatatagcatcagaaataaatttttgttaaactggttgactcagtgaactattcttttttatgatatacttacatgctttgtgcaacaagtaagttcatgggagtttgagatagctaaacagtaggcacactgctgggaccagggcatggtnggcttattccggtaattcccgtcntttagggaggntgtaagcaggngggattcatttggagggc

SEQ ID NO: 303066 - DNA, 411 bp, Homo Sapiens
  misc_feature (333)..(333): n is a, c, g, or t
  misc_feature (361)..(361): n is a, c, g, or t
  misc_feature (377)..(377): n is a, c, g, or t
  misc_feature (385)..(385): n is a, c, g, or t
ccatgctcatcttcccagtattattccagttttagtatatgtgctgcctaagcgagcatggaaattcattttagctgtaagtttgtgctgggcagattatccaataaaagtgcccttgtaatctaatagttctgaaatagccttgtgaatggcagatcccctgactgccctgtctgttctgcacccagcctgccagctttgccttttccactgatgttttttgtgggatgcagtggaccccagaagaacagtacctcagatttcaagcttgtgacccactagctcagcctggccaggttaaattggtgtcttaggttccctgtagaaagggtnctgtgattgttcaacctgggctggcgtngggagtaaagaaggtnatgttctngtgacagggcccagcacttcagggga

SEQ ID NO: 303067 - DNA, 354 bp, Homo Sapiens
  misc_feature (148)..(313): n is a, c, g, or t
aatacatttggtaaaatttttactaggaaatgttctatcttttctaaagatttcaaattattggtatgaagttcttcataaaaatccttatattaacattttaaatcctcagtattctgcagtgttctatatgctttgattaggtcannnnnnnnnnnnnnnnnnnnnnnnnnnnnnnnnnnnnnnnnnnnnnnnnnnnnnnnnnnnnnnnnnnnnnnnnnnnnnnnnnnnnnnnnnnnnnnnnnnnnnnnnnnnnnnnnnnnnnnnnnnnnnnnnnnnnnnnnnnnnnnnnnnnnnnnnnnnnnnnnnnnnntatccagtccctgtgtgggaagcaaggactgtacagagtcc

SEQ ID NO: 303068 - DNA, 469 bp, Homo Sapiens
  misc_feature (311)..(372): n is a, c, g, or t
  misc_feature (442)..(442): n is a, c, g, or t
tatcagaatcaatcgcatcatcacccaagctgtcaaaaatgtgaacattcgtggatttttttctatttgcaagccaaaaaatgaagactgtcaacttcatggatattagaagaaggcatgagattcctaggcctgatgaaaaatatttgatggttcatcacacaaatggaagcaagagctccatatctgtatctgttccccacgtccactccaagtgacagggatgatcaaagagacccaactggatgctttctgctcagtagattttgatcacagctgaggaatctcaaggttaagaaatcccagtgctnnnnnnnnnnnnnnnnnnnnnnnnnnnnnnnnnnnnnnnnnnnnnnnnnnnnnnnnnnnnnngattcaaagagacccaactgggtgcttttctgcttcagttaggtttttgattcacaggctgaggggattntcaagggtttaaggaaattccccgttg

SEQ ID NO: 303069 - DNA, 391 bp, Homo Sapiens
  misc_feature (321)..(321): n is a, c, g, or t
aggtaaaaatcaatatacagcgagacaaagggctctagagggtctggctacaccagcttttggtttggctcctgcacaattctacaacatgctgaggctgggaaggattagcctgcttgtgttgagtaaaccgatgatactcaataaacagtttctgttgtaaaccccttaggacgtgcaaagccacactagttgggcaatagaccagataagctgcagaaccagctgtaatctcatttaggacctgaggctgatcctcctgtcctttcattccacagggttcaaaggcaaaccactgagggagggcagctggtatttatnggcaggctctgctttgctggggtggcggccaaacattttccttaaatttcccctcctttgaagggcaggt

SEQ ID NO: 303070 - DNA, 428 bp, Homo Sapiens
  misc_feature (315)..(315): n is a, c, g, or t
  misc_feature (331)..(331): n is a, c, g, or t
  misc_feature (357)..(357): n is a, c, g, or t
  misc_feature (398)..(398): n is a, c, g, or t
  misc_feature (412)..(412): n is a, c, g, or t
ttaagaaataacacggttttgcattacaatttatatattatctcaagagaatggacatgtttacatgcttttccaagcagataagtggtgtctccatttattcagatcttattttgcctttatagttttgtcatcttcctcatataggtcttacacatttcttgttaaatttgttaagtactattctagacctcagaaccaagaataatattaaactatattatatagttacatattgtcttagtctgttttgtgctcctatcacaggaatatcacagactggggaaatttataaagaggcaggaaatgtatttnttcacagttttgggangctggggaagtccaagatccaagggnaccaacagggttccagttgtctgggtgagggggctggctcnccggtttcccaggngggcagcttgttggcc

SEQ ID NO: 303071 - DNA, 417 bp, Homo Sapiens
  misc_feature (317)..(317): n is a, c, g, or t
aattttccaaaatgtactggatcacttgttttattcttttataaaatatgaaattaagatgaagcatggtgatgctacatattaggaaattatattcctgaatgtcacctccttggtaatatttggcaaaattctgtgaataacaaatctaagagaataaatattctccaatcaataaccaaggattcagatgataaacaaaattcgttttatgttattagagcagcctgcatatactaagcccaaaacaaccacttaatcttttaaaacaaggggttataaaattataggctaggttagggccagcctgtgggttnttttttgctaacaaacgccaataggaataggttatccaaataaggtggaattaggacacaatccatcttctaatagggttccctcctctaatattccatt

SEQ ID NO: 303072 - DNA, 320 bp, Homo Sapiens
caggttcaagtgattttcctgtctcagactcctgagtggctgggattaacggcgcacgcaccatgcttggctaattttgtattttcagtagagacagggtttcaccatgttggctaggctggtatgaaactcctgacctcaggcgatctgcccgcctcatcctcccaaagtgctagaattacaggcatgagccactgggcccggccaacatggttcttaaccagggctacaataacagaaatacaatatgggaatatgggataaaaacgaagatcactagggttcaaggggaaagttgaaacccagtgcaagggttctaa

SEQ ID NO: 303073 - DNA, 407 bp, Homo Sapiens
  misc_feature (264)..(264): n is a, c, g, or t
  misc_feature (332)..(332): n is a, c, g, or t
  misc_feature (369)..(369): n is a, c, g, or t
aatctagtttcttaacaaatgcttaattttttcctctagtagtcaattgtcagtggaaccatcttggtctgcatgatgcaggggtttcagtgtaagacctaaaagctagctagtttaatgctcagtatgtttttcaatcatgtattgtctactgtccttagtcaacaatatcatgccagtttactctattatttattttgtgtgctatctcctcaaatggagtgaaaatttcttagatgggcaggaactctctttgcacctggntatctgggatacttcatttaaatagataaagggaacccttgactccatttgggcttgggctatcaggnaatcccaaattcaatactcaactgtaggaaggctccntggcagttttttgggggggaggggtgtataaattattc

SEQ ID NO: 303074 - DNA, 172 bp, Homo Sapiens
  misc_feature (96)..(96): n is a, c, g, or t
cattctggaatatctgagtcaaagttctcaaattcacttgcagtttcaaggggtcaatgtaaatgacagagacaggcctgagggtgacatagagantgaaaaatgtcccatctgcaagagttggggtggggagctggggggcagccagaagccagctgcagaggactgctac

SEQ ID NO: 303075 - DNA, 428 bp, Homo Sapiens
  misc_feature (135)..(185): n is a, c, g, or t
  misc_feature (410)..(410): n is a, c, g, or t
tgaaatgactttgttttgccttctccccagtagagaatttggaatgtgggggagggaatgataccctgttttattttgcaggagctccctcatcttccatttcttttgtggacatgatctggtgtgtctctgagnnnnnnnnnnnnnnnnnnnnnnnnnnnnnnnnnnnnnnnnnnnnnnnnnnnagctatcctattttcttggaggttttttctttagtgttttatataaggcattctttaaatatccagtgttcctttcattgttttccactcttaggaatagagaaatgaagataatggatttaactagaagacagtgggggtaaagggggggataaattgggctcttaaaattttcctctcctgtcccacgttcattctgttctttttctataaattaaatatccntagaggaggaatccctgt

SEQ ID NO: 303076 - DNA, 387 bp, Homo Sapiens
  misc_feature (261)..(261): n is a, c, g, or t
  misc_feature (354)..(354): n is a, c, g, or t
gaatgtgtccaacaagaaaaaaattgcaaataggtcctaaatagaaaaagacaatggttaatatgcactaatttgtataactagaaggaaaatatttttctgtcacttcttaaaagctcaatcttgcagcttttctctggtaactagtgatattttcagcataaggtcatgctagctgaatttaaaattttgtgtactgtatgtccttaaattttgaaagtgaaatgtttctggttttgactaaatttatcaaaaccattncacgaaaattcagcaaacgttttctagttagctagtcccaaatcttttgctgttaaagttaaccctggaaaatttctgtaccagccaaatganttgtgtggcatgtaaccttgtaaatgattttga

SEQ ID NO: 303077 - DNA, 461 bp, Homo Sapiens
  misc_feature (396)..(396): n is a, c, g, or t
  misc_feature (412)..(412): n is a, c, g, or t
gaataaacgattagtcaacttgttctttgttatgttcctgaaacacccctatttcctctcttgaaggtttccctgatgatctgttcccgtagctcctcctcccatcccccttacccggcacattggtcagtctctgctgattctctggtcttgccagtttgagctggcactgagcctgtaaagatgttctgctttttaaaaaacaaatggtgttgaggctgcagccctgtgcgccctccagtctctgattttgagcagttccattggaatcaaacccgactggatcgcagcatatgctatgcctcgagagagccttttcaaacaaagctcgaggtgaaagactgggaatgtatcttatttaaggaaaacttaattcctcttctttattttaatatnaaactttttacatatnacagggagagaatgggtgagtcacggggggcatgggattggaaaggttt

SEQ ID NO: 303078 - DNA, 469 bp, Homo Sapiens
  misc_feature (368)..(368): n is a, c, g, or t
  misc_feature (405)..(405): n is a, c, g, or t
  misc_feature (418)..(418): n is a, c, g, or t
tagcaccatgtaacatgttgaaaccctatgtctaaaatattgtatacctatttttatttgatttactaaattctaaagcttttctaaatctctaaaaggtagtttccccagtaatgcataactgcttaatcgggaagtgtacaaaacataattacactgcctaaaactacaatattgcttatgggaatatctccgttcatgcattccactttattttgtatttaatctctattaagatgtctatgtgaaaacagataggtattcttcataaacaccataaatcataaagtcatttctttgctaactcaagtccaaaatcggccccaaaaggaaactggccaggggccccaaaggacttatccactttncccttatttcaagcaggacaaggctccttggcacagngggcctcagtgcnggggccccaaaacacctaggcctggggccaatttggtcagggtccttattt

SEQ ID NO: 303079 - DNA, 183 bp, Homo Sapiens
  misc_feature (54)..(54): n is a, c, g, or t
  misc_feature (104)..(104): n is a, c, g, or t
  misc_feature (119)..(119): n is a, c, g, or t
  misc_feature (164)..(164): n is a, c, g, or t
gggaattcctctttggcagatattgaaggtttatttgaaaaatttaatttcgtncctttttttcattgtaattattttcatgggtttactatttcccttttagnattcctgaaaatggnattttcttggttgaattaagggtgctctagttttattgtaggtgntttcagattttgaaggctg

SEQ ID NO: 303080 - DNA, 153 bp, Homo Sapiens
  misc_feature (54)..(54): n is a, c, g, or t
  misc_feature (93)..(93): n is a, c, g, or t
  misc_feature (104)..(104): n is a, c, g, or t
  misc_feature (117)..(117): n is a, c, g, or t
  misc_feature (127)..(127): n is a, c, g, or t
acccagcccaaaatgtatggatttaatattcatcacaaggggctccaccaaggnttaaattaaaagacaaaagaacaaataggtaccacagtncaagatacagngttttaacacagnaatcacgggnaaggggcagaccatctaaggggggaa

SEQ ID NO: 303081 - DNA, 421 bp, Homo Sapiens
  misc_feature (316)..(316): n is a, c, g, or t
  misc_feature (334)..(334): n is a, c, g, or t
  misc_feature (361)..(361): n is a, c, g, or t
  misc_feature (376)..(376): n is a, c, g, or t
  misc_feature (399)..(399): n is a, c, g, or t
actggatcaagcattacacaactgctgagaaagcaattatatagacatatagtcaatccgtttactttgctaagaagacagacttgttgccagagtcagtctggttattttggccatattaacaaccaaataatgcagactacatggttattcagaattatgtttagtcactataccagttcaagagaaaatcaattctatttaggtcaatttaactctgttcattacatagagcattgaatgcacaacttaggcattataggtatacaacaggcagttcctaaaaaaattttaatctcataaaccaatatttttntctaaaagttgggggggnctgcttaagggttgatactttcaaggnttgtccagggaaggngttttaattcaaaccacccaacnggttcccttacccttgggccac

SEQ ID NO: 303082 - DNA, 439 bp, Homo Sapiens
  misc_feature (175)..(175): n is a, c, g, or t
  misc_feature (363)..(363): n is a, c, g, or t
  misc_feature (423)..(423): n is a, c, g, or t
tactaaaacagtgaggttggttcagtttgcctcttggtgaggtcttgtcaaaaggagattagcgatcaaaacaagaaatgctcagtaagactgaaagttctttttatttgttcctttgttctctctgtgatgacatcaagatgaccacagtgtccatggggggagcagagcaggntttcgcccctgaaccaataggggcaaagcaaagggaaggcacaaatcccacaaaatttcagaggaacaaaggcacaggggaaaaggaatgcaaaggtgtgccctctattgggtccatgtgtttttcattgctgagggtgattaggttgggcaattgtatccaggcaacagggggaggggactaagggnctttcatgtttacaaaaattcttaaaatgtggctggacacagggaacaaggttctagggnggggggcccacttggg

SEQ ID NO: 303083 - DNA, 305 bp, Homo Sapiens
  misc_feature (112)..(112): n is a, c, g, or t
  misc_feature (239)..(239): n is a, c, g, or t
  misc_feature (252)..(252): n is a, c, g, or t
taaattctcactcttacaagtagaccaagaattaatggttatagttttttacagttcaactataaaattgttattgtcctcactattttattaaagtacatatataattatnccctatattaactgatctatcttggcatttcctatcaaaccaaggccatcttatcagggataaaatttttattggtatccaaaaattttctttttcccaacaaaaggtctgaggattgggcttttcngtcaggggaaacngggcatttaaaaccaaatttatatattggtaaccttacctaatagggcccggc

SEQ ID NO: 303084 - DNA, 183 bp, Homo Sapiens
  misc_feature (122)..(122): n is a, c, g, or t
  misc_feature (155)..(155): n is a, c, g, or t
gggtcaggactcaaaatactatggtacaggtgtgattctacttatatggacactggaaaaaaggcaggtactataaggggcaggaaaacagggttaggtgggttgcccagggagttgggagnaggcagccgggggaggaactttgagggggggtnaaatgtgcccggggctttggtcggttgg

SEQ ID NO: 303085 - DNA, 130 bp, Homo Sapiens
tgctgcagaaggtaggtgtcctcttttgcagaaggagaggatatgaataggccagggatggcaacagggaagtgtgtggagtgatattagcctatcactcaggactatgattggcctccacagcttacct

SEQ ID NO: 303086 - DNA, 379 bp, Homo Sapiens
  misc_feature (265)..(265): n is a, c, g, or t
  misc_feature (316)..(316): n is a, c, g, or t
  misc_feature (346)..(346): n is a, c, g, or t
tctattttattccgtgtacaaagttctaacagaagaaatgcctcgcccaagatagaagttgttatttctttctttactgagaggtatttgcccctttgccatagtatagatgagaacaggaaaatacttgggatatcgctgagggtcacgttatctgttataatgaggtttggctccatgggaataggaaaagttgttttcatactgcaagggatttcttttcatcactttgttaaagaccccggaataaacagtcagggaactnttttgggcagctctgtgaaggtcatcaggggtttcgggccttctgtttccncccggcatgtggacatccatcctcaagggncacatggatgtctggctggaggcagtaggaggg

SEQ ID NO: 303087 - DNA, 332 bp, Homo Sapiens
  misc_feature (289)..(289): n is a, c, g, or t
ttctaatcttgtcttcacagtttatttcactaagttgatcttcaatctctaatatcctttcttctgcttgatcgattcagctattgaaattgtgtatgcttcgtgaagttcttgtgctgtgttcttcagctccatcaggtcatttatgcttttttctaaactgggttattctagttagcaattcctctaacctttttttcaagggttcttaggtttctttgcattggggttagaacttggctcctttaggctcagagggaatttgttattacccaccgtctgaaggccnacttttgtcaaattgtcaaactcattctccatccaggtttagg

SEQ ID NO: 303088 - DNA, 475 bp, Homo Sapiens
  misc_feature (363)..(363): n is a, c, g, or t
  misc_feature (384)..(384): n is a, c, g, or t
  misc_feature (414)..(414): n is a, c, g, or t
  misc_feature (447)..(447): n is a, c, g, or t
tcagccatttgctatgtttatatttaacaatatgaagccacactggaagcactgtctcaagatttatttcagtaaataattacttggcaagtaattccttactcaaagacaatagttgttaaattctctcaatcccactaaagagtttataaaagtacaacacaaatatacagtataggggttttgttaaaacttctcatgtgatctaacttttatctcattaagaaaacagttaatatatagttttagaaatagctgttgtagctttccagctggtgacatgtggtgctggcattgatctgacttgaggcatcatgctgccagttcacagaatgggccagaactgggggcttagcactcttncaattctgggccaagtggggntcccgctaggatctttgttttctgtgtccngcacattttaggatttttgttaactggagggcntagtccctccctgttgctgggttcattg

SEQ ID NO: 303089 - DNA, 405 bp, Homo Sapiens
  misc_feature (245)..(279): n is a, c, g, or t
  misc_feature (382)..(382): n is a, c, g, or t
ggaattcatttagacatggtgattaagaaacaccaagctaaagagaagctatttatgccaaattctgaaggatgagagaagactgtcatgcaaagagcagggggaagagtgttaggtaggagggacagtgggaagatgggaattgtcttgcttgaaaaactcagtcaccaaggctagaactggggcaagagggcgtgtaccagatgaaggtggaaaagtaggcaagggctggctcaggcaaggcnnnnnnnnnnnnnnnnnnnnnnnnnnnnnnnnnnncctatgaggatcatgtcacttatctttattttttcaccaatattgctcctttccttcctccccaacttgtgtagcccaacacttgaaggtttttcagaaaacntttatggtctatatggcaaaaca

SEQ ID NO: 303090 - DNA, 233 bp, Homo Sapiens
  misc_feature (69)..(163): n is a, c, g, or t
aaaaattcaacacactgtggaaagagtttttgatggtgatagctaggaaaacattaagccagatatttnnnnnnnnnnnnnnnnnnnnnnnnnnnnnnnnnnnnnnnnnnnnnnnnnnnnnnnnnnnnnnnnnnnnnnnnnnnnnnnnnnnnnnnnnnnnnnntactaaaaaaatttatctacaacaatatggtctttaacttatagttaaaactaatataaaaacatattta

SEQ ID NO: 303091 - DNA, 231 bp, Homo Sapiens
  misc_feature (129)..(129): n is a, c, g, or t
  misc_feature (162)..(162): n is a, c, g, or t
  misc_feature (170)..(170): n is a, c, g, or t
  misc_feature (182)..(182): n is a, c, g, or t
  misc_feature (195)..(195): n is a, c, g, or t
  misc_feature (207)..(207): n is a, c, g, or t
  misc_feature (221)..(221): n is a, c, g, or t
gggttacagggcgtgagtaaccacatccaggcacatgtgtattaactttctttaaaacattttaaggcactgcagtaaatttgggtctcaaagttggacacaaggaggttcctgggccgggtgtaggtnaggtaggttttgcccattaatccaaacagtttnggaggctnaaggggggaggnctgtttaaggctncagtgagcctgntcgggccattgaanccccgcccgg

SEQ ID NO: 303092 - DNA, 370 bp, Homo Sapiens
  misc_feature (182)..(182): n is a, c, g, or t
  misc_feature (340)..(340): n is a, c, g, or t
ccaacttcaggaaaatgactgccgtgtcaccaacatggggatgcttcctagaggggcaggcagttatgaattgggagtctacttacagccctttaatacctaaagcagcctgctttgccaacccctgcccctaaggtggtggagcagtgcacagccacaaagtgctgttggcactgtggggnccccaggctactcaaaagaaggatgccatcatcgggacagtgcctcattcagacatatatatatctacaggcagggagctcatgctgtcgtcatgggcacggacacagctccttaaggtgactctcaggctgtgcttttatcatggggcacccttctntgagggtgattttctaaggggaaggccgtg

SEQ ID NO: 303093 - DNA, 424 bp, Homo Sapiens
  misc_feature (143)..(143): n is a, c, g, or t
  misc_feature (159)..(369): n is a, c, g, or t
  misc_feature (392)..(392): n is a, c, g, or t
  misc_feature (397)..(397): n is a, c, g, or t
  misc_feature (410)..(410): n is a, c, g, or t
aaaataaacttttattttcaaatttttagacttacaaaagagttgcaaagataatacagagtaattggttttatagcatcaatttaagcctgttctgatcttcttgatctattttatcactttaggataatgaaaaataagtncaggtagaggagctannnnnnnnnnnnnnnnnnnnnnnnnnnnnnnnnnnnnnnnnnnnnnnnnnnnnnnnnnnnnnnnnnnnnnnnnnnnnnnnnnnnnnnnnnnnnnnnnnnnnnnnnnnnnnnnnnnnnnnnnnnnnnnnnnnnnnnnnnnnnnnnnnnnnnnnnnnnnnnnnnnnnnnnnnnnnnnnnnnnnnnnnnnnnnnnnnnnnnnnnnnnnnnnnnnacaagaggtcatgggctgcagtnagccntgattgtggccantgccttccagcccg

SEQ ID NO: 303094 - DNA, 395 bp, Homo Sapiens
  misc_feature (262)..(262): n is a, c, g, or t
  misc_feature (320)..(338): n is a, c, g, or t
  misc_feature (360)..(360): n is a, c, g, or t
  misc_feature (371)..(371): n is a, c, g, or t
tacaattgtctttctcttacatttgcggttttggtgagagaataattccaggtatgatattcagggaaccagaaagcagaaagctgaagggaccagagattagggcagccaggagtagacagagaacccctatcagccagacactctcccaatctgagcaagggacaaaaggaagcttggaggtggctccagcccagaagctacagagggccagctgctctggccatgaggtgatgccatgcttcctgcctatccccaactntgcacctgggccaccaatgagtcctatgtgtccctcccccaatagcatcccgacacannnnnnnnnnnnnnnnnnngagatgggagttttcaattccntttgcccgggnttgggagttgcagtgggcaaagtt

SEQ ID NO: 303095 - DNA, 418 bp, Homo Sapiens
  misc_feature (79)..(79): n is a, c, g, or t
  misc_feature (139)..(139): n is a, c, g, or t
  misc_feature (334)..(334): n is a, c, g, or t
  misc_feature (369)..(369): n is a, c, g, or t
  misc_feature (383)..(383): n is a, c, g, or t
tagaagttatgcaaacctatgcaaaccccatacaaatgagctggccaggccagtagtctagttgggcaaaaatatcggnaatattgtgcacaccagcctgtcattgctgtcacagaaggagagcaacaaggagaagggntatctctggtgcatttctggattaaatcataactttagaatacttttctcttttacaaagtctgactgtctctctaagtaagacatcttggataaatgtccctttccctctccgtgtttccgcattgcatgttaattttcaggtggcagttttatctcattagtcattgtcacttccacggatcacccctttgangctacatgtaaactttacttttaaactttctcaanaatgcggctttccncccttggctttaggggtccagaaaacgtttgttcc

SEQ ID NO: 303096 - DNA, 328 bp, Homo Sapiens
  misc_feature (295)..(295): n is a, c, g, or t
acaagctaactgtaaaggctgtttcaaatagcagcacacaagccatatcaacctgggaggcagtaaataaacttagaatccccaagttcatattccacctttcaattgaatgcaggtggaatgcaccaaagacctcgtgtgttttgttgtttttccctgcggtgtgtagtctttcatggctagacctactaaaatgctaaccatcactcctatgttggcttggctttggcatcaaacttgagagcagcaaattgagcattccctctgtgtgtggtgtggggaacgcaaccgaggnttctcatactgtgccagggatgagggataaagg

SEQ ID NO: 303097 - DNA, 296 bp, Homo Sapiens
  misc_feature (258)..(258): n is a, c, g, or t
ccgcagtttggactttttaaaagcgtgtgtttgcctcctgtctcctccatcatgatttagagttgctttttctactgtattttgtttctgggtatcttctttaccaacagcatgtgctctttaccagtcaaatcattgctttatccagttgccattattcatccctatcattctctgttttcccctctctcttctattttcagttatttaattactgtcaaggcatcaacagccaagcacagaactcctttcattttntcccagtcaacttaggtagtcaggatgttcagggtgta

SEQ ID NO: 303098 - DNA, 246 bp, Homo Sapiens
  misc_feature (160)..(160): n is a, c, g, or t
cttcctcataaggaaaccaaacatttatacttgttacaccccctgaagctgaaagaataaagaatgaacacatacagcaagttgctaggtgcatctctgtttaggaattgccttaacattgggtttctattgacagaaccagggaggaggttgcctcagnaccttcctgaagctccattgtccccgggctgagcagtaccacagctaattttaagtgggcaaaaggaaatgcaaacaaattcctcc

SEQ ID NO: 303099 - DNA, 474 bp, Homo Sapiens
  misc_feature (352)..(352): n is a, c, g, or t
  misc_feature (365)..(365): n is a, c, g, or t
  misc_feature (417)..(417): n is a, c, g, or t
  misc_feature (429)..(429): n is a, c, g, or t
taatgatttgcctgtcccatcagtatggattctagataaacttatcaggcaaactcaaccaactcacacaactcgtgagcatcagacccagaattcaaattcaaccctcctcgtgtgagcttttctgccattctctgcttctaaaactttttaattcaagtaccagtaataacaggggacacttattttactccactgtgtaatgataagtgacagacagggtttgaaacgaaggaagcatgggttctagggatttgttctaatagccaatctttttaaatgcagagggagaatgtaaggcatacatagtttattaaaaggcagggttatggtaatatttttgtattagggntggactgaggccntacattcttttacttcagtgggcagcatgcttgaggggttaataggccaaanatacattgggtnggcccattaattttttttccttggatttgggctttcagttgtggg

SEQ ID NO: 303100 - DNA, 145 bp, Homo Sapiens
  misc_feature (66)..(66): n is a, c, g, or t
  misc_feature (105)..(105): n is a, c, g, or t
aaagatcttttgttgggcccttagggtaatgagatgccctctgaatttgtagtgggagagggggtntagcttggtgacaaggctactgggttttgcactagggtnccacctttagttgggtttttacaggggttgggtagttgta

SEQ ID NO: 303101 - DNA, 322 bp, Homo Sapiens
cagttctgcctatatagaaacccacagttatctgagggaatgctctctgatactcaataaaagccatactcatcaatatccagatataaggcccaccatatgcagacctgactacaaaaacataccctagtgttttaactacggagcaaagccctgaaggatatgcagtctgtccaaaaataaaatgagaagtacaactacccaagcccctgtaacaagccaactaaaggtggaccctagtgcagacccagcagccttgtcaccaagctacaccccctctccactacaaatttcagagggcatctcatcaccctaagggccc

SEQ ID NO: 303102 - DNA, 461 bp, Homo Sapiens
  misc_feature (332)..(332): n is a, c, g, or t
  misc_feature (359)..(359): n is a, c, g, or t
  misc_feature (377)..(377): n is a, c, g, or t
  misc_feature (387)..(387): n is a, c, g, or t
  misc_feature (398)..(398): n is a, c, g, or t
  misc_feature (418)..(418): n is a, c, g, or t
  misc_feature (431)..(431): n is a, c, g, or t
tcaagaccccagcatacagctacactggaagggagctaaatttctattattggaaatagacacagtattgctgtcaggttggttgccatgccagctgtccaggtaccatgcttgatgccctgattaccacaagacttcccccttccccctgcttttaattatccttctgtagtgcagtgtatggtaactgatgggctcaaaactggcccacatttgccagtctccctatatgctcagcacttgaaaatgagtcttctctgctgcaatttaaagctagaaatccaaagacattgagtcaccagcataggtattttccacacagctgcaagtgnaaactttcacaatgggacttgggccgntatttgcttgacacttgnccatctgtgncaaaccgctcnaacccgtgggcctcccctgntttgtgggttgtnttttaacagggaggcagtccaggcaaagcc

SEQ ID NO: 303103 - DNA, 368 bp, Homo Sapiens
  misc_feature (137)..(284): n is a, c, g, or t
  misc_feature (291)..(291): n is a, c, g, or t
  misc_feature (343)..(343): n is a, c, g, or t
tgagagaaaggcgagacaaaaaacaagctaatattatggagtcattgcaaagtaacttttaggcaatgttccgtcatttgtacatgtttccatattgcacagttttcctacttattttttaagtgaatgtatacaannnnnnnnnnnnnnnnnnnnnnnnnnnnnnnnnnnnnnnnnnnnnnnnnnnnnnnnnnnnnnnnnnnnnnnnnnnnnnnnnnnnnnnnnnnnnnnnnnnnnnnnnnnnnnnnnnnnnnnnnnnnnnnnnnnnnnnnnnnnnnnnnnnngtgatgncatagtagtcccagggcatgctccactggcacctgggctttatgttttaaantatcactattatgtgtgggatataa

SEQ ID NO: 303104 - DNA, 419 bp, Homo Sapiens
  misc_feature (325)..(325): n is a, c, g, or t
  misc_feature (369)..(369): n is a, c, g, or t
  misc_feature (380)..(380): n is a, c, g, or t
  misc_feature (385)..(385): n is a, c, g, or t
  misc_feature (409)..(409): n is a, c, g, or t
aaactcagtgactgaaagtgtgaaccaaggatagtatagtcatccatgatctccttcaagtatgaacgctaaaagaaacagttttcaatataggaaattctgtacccatgaacccttcttgaggaatactagaggaagagtttcatctaaccatgagatgagtaacaaagtgtcagtacaaggactgactatattttaataaatataaatgtaggcagaagataaaaggggtggaagacccatatacaaatactgtatgttaagtagaagtaatacaactttaggaaaatgggagtggaacagagagtgacagagtaagctaggnctaagctcactggatggttgtatagccaattagttggggagttnaaaagcgacantaaantctcatatggccacataattaaanggttaactag

SEQ ID NO: 303105 - DNA, 435 bp, Homo Sapiens
  misc_feature (65)..(65): n is a, c, g, or t
  misc_feature (268)..(268): n is a, c, g, or t
  misc_feature (275)..(276): n is a, c, g, or t
  misc_feature (358)..(358): n is a, c, g, or t
  misc_feature (375)..(375): n is a, c, g, or t
  misc_feature (386)..(386): n is a, c, g, or t
ggattttatgcttttgggcttgaattctgtaattagtatggttactattggtttcttattatttncatttgcctgaatatctttccccattcctttatttttaccctttctgaatcattttatttagatgtatgtctttcttacagtacatagctggatcttgctttatgagcaaattgaatctttttcttttaataggtgaggtgagtccatttacatcaattgatatgactgatatgctaggtttcaactcttttactaatatttnataattnngtgaattttgatatatttgctgtgtttctctctgaggtatgtgtttcccttcttctcacttatttatcacttgagcccgggngttgtgggctgcaaaangcccattgggnaccacaccgaggttgggcatcaatatgggggaccccccgggagccgagg

SEQ ID NO: 303106 - DNA, 392 bp, Homo Sapiens
  misc_feature (194)..(194): n is a, c, g, or t
  misc_feature (214)..(214): n is a, c, g, or t
  misc_feature (347)..(347): n is a, c, g, or t
aattttaagacttgggtctgccaatgaatatgagctttctactttgcaacagaatgttaaaatataggtggaccaaaagttacactatgaagtagtgggttggaatatattttggaggtataatttcttttgaaacttaaattttatgatttttgatagaaaggcatttaccatattaaaatatattcccaatnctaagaggagtgaccttgcntatagtacaagccataataagagtctgaaacagattttggggtagttgaaatttaatcttagaagtaggcatttttacattatttagaattacattgttgagtttttaaaaacattaactttttctgattgtnaaaattatgggtgctcactatgggacaatttttgggaaaattaca

SEQ ID NO: 303107 - DNA, 131 bp, Homo Sapiens
ccaagacatttttatcctcgtcaacccactgtccctgttgtttaattatacctaataggcttttgcaaatgagttagccatataaaataattcacatggataacatatttcatgtttttaaaacacatgta

SEQ ID NO: 303108 - DNA, 438 bp, Homo Sapiens
  misc_feature (173)..(173): n is a, c, g, or t
  misc_feature (303)..(303): n is a, c, g, or t
  misc_feature (313)..(313): n is a, c, g, or t
  misc_feature (324)..(324): n is a, c, g, or t
  misc_feature (329)..(329): n is a, c, g, or t
  misc_feature (334)..(334): n is a, c, g, or t
  misc_feature (377)..(377): n is a, c, g, or t
  misc_feature (387)..(387): n is a, c, g, or t
  misc_feature (406)..(406): n is a, c, g, or t
  misc_feature (419)..(419): n is a, c, g, or t
atatcaaataaaccttttatttacaggcaaaggatatagtacaagaagaaaaagagaatacagatgacatcgggggtccaagagacattccatatttaagcttcataatgtccttatttgcacacatataccacactgccttcattttctccagctgatagatttgtgtaagnaatcttgactttgagagttcaatgtcattcccaacagggtctttatgtctgtctggtcatgttatcagccagtcttacttaatgtattagggccagttgggaaaccatcattaaagaaactgacccgggngatcaccggngtagtttcggnctatnaccancacatcataaatcccactggcccttatctggggcccccaaggncaaactgggnctttctggatgggcccccngggggtttttggncggtgtttttctggggtct

SEQ ID NO: 303109 - DNA, 188 bp, Homo Sapiens
attaactagagccaattcaatttatataatgatgggtcttattagtatgagacagtaagagttcattcacatcttcagtgaacatccaacaaacctgtgtcacatttaatgaatacaacattcatgtgtttgcagattgaatgttacattctaaaaactccacagttttcatgggaatccaggaatat

SEQ ID NO: 303110 - DNA, 370 bp, Homo Sapiens
  misc_feature (77)..(85): n is a, c, g, or t
  misc_feature (296)..(296): n is a, c, g, or t
  misc_feature (329)..(329): n is a, c, g, or t
  misc_feature (337)..(337): n is a, c, g, or t
cgtaagcataatacaattcaaccataaaagatacctcaatcaacactacagccagacttacttttccttagcagtcnnnnnnnnnctttaaattgctgacagttaaaaactattttgacccagaatgggcatactactataatctctatgcttaatttcaactcctaataaaataggtgccacactacaaatgggtttcttcacctgttccctaatgaaggttgaaaataattccttgggccttggaatttacaggatacatggtacagggggctggatggaaaggccatctggcngggggaactatggactttcatatggaagggggnaaaaaccnggagggggactggcttttcattttccggggggg

SEQ ID NO: 303111 - DNA, 369 bp, Homo Sapiens
  misc_feature (236)..(236): n is a, c, g, or t
  misc_feature (293)..(293): n is a, c, g, or t
  misc_feature (332)..(332): n is a, c, g, or t
  misc_feature (355)..(355): n is a, c, g, or t
gccttcagtttctcccctttttctgcctccctcaagggaagctggaaaccatgatggccatgaacagagtcagagatttgggtgacttctgtgccctgtcaccctgaagctctctcttgtgtgccctctctcctgtgccagctgagagaggtgcggggaagattcccagccctggccctgtgagtccagtcagggaccccgtgttctgggaccgggccacttcacacccgggcagncaacatttgggtgttggggtgggtcatgggttgttgctgctcagcctgttgggggtngggtgcaggggtctcctggggtagaaatttgtgtggggngttagaaggcaggggcagcgaanccattgtgttgggt

SEQ ID NO: 303112 - DNA, 550 bp, Homo Sapiens
  misc_feature (381)..(381): n is a, c, g, or t
  misc_feature (387)..(387): n is a, c, g, or t
  misc_feature (472)..(472): n is a, c, g, or t
  misc_feature (524)..(524): n is a, c, g, or t
aatgtcttaagaggtcttggctctggactaagtcacaaatgcatatatttaagttgcctcttggtctaaggatctaaagtttaaccgaagcctatggagccctcaaggagtccttcctcaaaggtctagtctcaaatggggtccatgaccacggtgtgtgacagtaacctggtgtgagtctggagaaagagtccaggtaaacatttggcaaagtggtccctccgctatggacattaggatttggcatttcagatagtagtgaaatggataactcgatggcttcctataattcccagatgccaggttttgtggctaaatcagactctccacattctggaatccttacagtggatccacatggagggaaagtcctttttcttnattttncatttttatggaggaaaaccaaggtttcagagaggttaaagtaatttgggccaaggtcaccgggcttaacatgtgttttaaaaancatgaatatgtatcctgtgaatttatttatatggctaactctttgcaaagcnatttagggtttaattaaaccacgggg

SEQ ID NO: 303113 - DNA, 415 bp, Homo Sapiens
gaaatttcaattactcaaatcagaaaattattaagttcacctttagcaatatataatatagatctttttccccactctgtttttcgaagagctgtactaccattttgtttcatcaagttctgcctccagtgatacttgacccccatttaaaacattcgagtttatttaacagcttattgagcccttggacatatcatagaaactactttgtttatccatctgtttcattgatcagagagaacagggtcagttttttctgccatcagaaaaatcttttattagttgttggttctgtgacccttctttctgggacagcgtggggttctctcttgccaaaaacatataggccactattgggttttcctgttcactacacggggtacttttttacccagtggacctctatttattcctt

SEQ ID NO: 303114 - DNA, 437 bp, Homo Sapiens
  misc_feature (352)..(352): n is a, c, g, or t
  misc_feature (371)..(371): n is a, c, g, or t
  misc_feature (376)..(376): n is a, c, g, or t
  misc_feature (400)..(400): n is a, c, g, or t
  misc_feature (406)..(406): n is a, c, g, or t
gatggactttgcaactaatcaagtttgggatttactgtcttctgaccaaccacagtgactgagatggggctgggaccagaagcccagtgggtgtgaacagccgagggaaccagagtctggctgagcttgtggccagatatttaaactgggtccagccacacctgcaaaaccagggcaaggcagtaccgggaaactggctggagttgctgcggtttggggaagttgcacaccctttcatagatacctcccttaaccctcagtgcagattctgagaaaactccaaggcttctctgcctaacctagtataacccctgttccctactacatacatattaacttttccatttccccnagtaatttgacccaaagtncctgncctgttagctgtgcccattggtgncaatgnttcaggaatcccttgttttcaattagtattt

SEQ ID NO: 303115 - DNA, 325 bp, Homo Sapiens
  misc_feature (209)..(209): n is a, c, g, or t
  misc_feature (232)..(232): n is a, c, g, or t
  misc_feature (240)..(240): n is a, c, g, or t
  misc_feature (270)..(270): n is a, c, g, or t
  misc_feature (281)..(281): n is a, c, g, or t
  misc_feature (301)..(301): n is a, c, g, or t
agaaggaagaggacctgaagtgctgacagctggtccaagagcacactttgagtagtgagactccggaatactgagcagcgagcaccagagcagcagttctcatcaaaggagggcatcagaacaaacacgcggtcctcgcctcctgctccctttctcaagacagagacattctgatccagtagggtgtagggtgggtcctaacacaggtnttttcgaaacaatctcaaatggngtttcatngcgcccatcccctttgttaaaaactggttnttcccggaatncaataattaatacccctgtnttaccaagtagttcgggcgttgtg

SEQ ID NO: 303116 - DNA, 142 bp, Homo Sapiens
  misc_feature (20)..(20): n is a, c, g, or t
  misc_feature (29)..(29): n is a, c, g, or t
  misc_feature (58)..(58): n is a, c, g, or t
  misc_feature (80)..(80): n is a, c, g, or t
  misc_feature (86)..(88): n is a, c, g, or t
  misc_feature (117)..(117): n is a, c, g, or t
atgggttggcaaagtatggnttgtctttncattgtgtttttaaactgcacaactgggnatttactccctgaatatatcanctatgnnnatagtagtcagtttaaggctataagccanttacagtagaactatcattgattaa

SEQ ID NO: 303117 - DNA, 372 bp, Homo Sapiens
cctcaagggattatggacctatatggctgttactccaagggaggaagtaactctttaattttcagtaggattactaatatttgtatttttaagtggctttgattttatatcaaatcacgctattctttatactgtttgttatgccaactactcaagagggatggaaagaaaagacaaagtttatttgtgaatttcagaaacttcctgggctctgtatgcattacatgtatattacggtaaataggctactgcacaatgaggcagaattttgatatacttaatatgggattgcatttgattaatgtataattgctgcaggttcgtgtgcttgtgtattcttgaggattataaagtctaaaaggctctttaggg

SEQ ID NO: 303118 - DNA, 131 bp, Homo Sapiens
  misc_feature (83)..(83): n is a, c, g, or t
  misc_feature (108)..(108): n is a, c, g, or t
cagcctaaacttgggcaagataataaaataacctttttaaggtgtcattggggcacttgtctgggttgtttttcctttagggntaccatggccaggcaatggattccnttttgagttttctggacaggagg

SEQ ID NO: 303119 - DNA, 158 bp, Homo Sapiens
  misc_feature (93)..(93): n is a, c, g, or t
  misc_feature (143)..(143): n is a, c, g, or t
actggaagaaagttttaactatttgcgttctgatgagtcgacctcagggaagtcaagtgtcattaagagctagatctggtcataaaacaactngaagttgtttactggaaagtttaaatacttgaatgtaattattcacagtnatttctattagtttt

SEQ ID NO: 303120 - DNA, 423 bp, Homo Sapiens
  misc_feature (165)..(165): n is a, c, g, or t
  misc_feature (292)..(292): n is a, c, g, or t
  misc_feature (329)..(329): n is a, c, g, or t
  misc_feature (348)..(348): n is a, c, g, or t
  misc_feature (357)..(357): n is a, c, g, or t
  misc_feature (366)..(366): n is a, c, g, or t
  misc_feature (379)..(379): n is a, c, g, or t
  misc_feature (397)..(397): n is a, c, g, or t
tttaaggaacaaagaacgtgatgactagtgtggtcatttcaggcataaaaataggactaaaacaggaatcagtcagaaattgaagactatagcccatgagtgatcatacatttatcagtgggtattaacacactcaggtgggttcatgagtagattctggaattnccataatagtctacatatttaaacatagttgaacctaggtttcatgcagttatgctataggccttaggggaagctcttggttattttacatttttaattgagttctgaagttaagcagtaatactancaatttaaatggttttgagaaatttttataatgcccntgtgttacatagtattggncattgtctnctagtaatngtgtagaggtagncatgttacagtaatgggnttagatttttaaaaggtttagccgtg

SEQ ID NO: 303121 - DNA, 152 bp, Homo Sapiens
  misc_feature (73)..(73): n is a, c, g, or t
  misc_feature (91)..(91): n is a, c, g, or t
  misc_feature (117)..(117): n is a, c, g, or t
  misc_feature (140)..(140): n is a, c, g, or t
aaaataagataatttctcaaaataatttggtttcatataactggagtagtaattaatattttaacttcatcanctagatgtatctcctcantagcatagtaactggtacatccaganttctgaaatccgagttacttgtnacaaattctact

SEQ ID NO: 303122 - DNA, 307 bp, Homo Sapiens
  misc_feature (180)..(190): n is a, c, g, or t
  misc_feature (264)..(264): n is a, c, g, or t
aagagccaccacacccgcccagctatggtgacttctaacagtgtgtgagctgtagatggttacttagtttatgaatggaagctacttgattctcccttaaatagagctatatatgaccacatagtacccaaccatagtattttgttttggctgcctttctgttgtgcctccttgaaacannnnnnnnnnnacatgagtagctgccaacacaatcctccctccaattttcagatgaggctgtagggaaattacgggaactacctnccaccccctttttttgttacaaaacacaagggaaaaacatttt

SEQ ID NO: 303123 - DNA, 317 bp, Homo Sapiens
  misc_feature (273)..(273): n is a, c, g, or t
  misc_feature (279)..(279): n is a, c, g, or t
aaagcaacaatagcagccgttggtcattcataccttaatgtggtttactgagtcttcctaaaacccaaatgaacaatgaaccttaaggctatccctttggacttgaagaaaggacttctattggaggatgagggtgagcagaaagaaaagcagtttcacagttggttgttctcctggggaaggtagttcagaccattcgagggtgtagttagaaccatgagtgcactattttggatgaacaccagggagctaagagagtaacatagaggtttngacagnggtttaagtcctcaagacaatagccccagccccatggg

SEQ ID NO: 303124 - DNA, 397 bp, Homo Sapiens
  misc_feature (309)..(309): n is a, c, g, or t
  misc_feature (356)..(356): n is a, c, g, or t
acaaggaagaaaatattttgcagaagcacttgtcaactttagggtgcttgaaagcataccctcattgctccatagaattaaatgtaaatgatcctgaaaacaagtagagtctctatgagaaaggtcttggttggcatagactcagtataatttgctgattctgctctttctaagtttcatttgtgatttctaatattgaaatcctggttatttgcaggtttcagttagtttgttataccttaaccacaagtttctacctctgccagtttctgtctcttatgggcttaatttggtgagtcatattagggnaaagtcaatcagaaattaattaccgggattcagcttgtccatttttngaacacttaaagtaggtggaattaaaaggttaccattggaa

SEQ ID NO: 303125 - DNA, 347 bp, Homo Sapiens
  misc_feature (176)..(176): n is a, c, g, or t
ctgtgtgtgtgtctgaaattgtccatttaaaaaatgaatcagtgttttacagaaatcagaagtacttgttttcacaaatcagtaccctttcttgaaatctcatctcaaaatatcaacttaaattcgaatttaaacttgttttattactaaccaaccacttcagctgagccctgcgntgtatttctgaaactttaatttgtgataagatttgataaagggtgaaaaaatacaaaggtcctttaaggtcttgctctcttacaagtcctttgggggaagatctaactgggtaaggctgtgcttcctttgtgttaatggacaagtgtgtcttcgtttcgtagctgggagct

SEQ ID NO: 303126 - DNA, 182 bp, Homo Sapiens
  misc_feature (111)..(130): n is a, c, g, or t
  misc_feature (132)..(132): n is a, c, g, or t
  misc_feature (145)..(145): n is a, c, g, or t
  misc_feature (156)..(156): n is a, c, g, or t
  misc_feature (169)..(169): n is a, c, g, or t
cccacccggcccccagaatactttttacactaccagggaatgatccacctataagccctcctcttgtactccatagcaccttgttacggagaccgctagcttcctctgccnnnnnnnnnnnnnnnnnnnnanttttgtaggaganggggggttttnctgtgttgctaanggagggtttaaaa

SEQ ID NO: 303127 - DNA, 438 bp, Homo Sapiens
  misc_feature (338)..(338): n is a, c, g, or t
  misc_feature (388)..(388): n is a, c, g, or t
  misc_feature (405)..(405): n is a, c, g, or t
  misc_feature (427)..(427): n is a, c, g, or t
tagataatgttctgatacatataatgtacagaaatcaaatcaaggtaattaacatatccattatctaaatatttatcatttctttgtgttaggaatgttcagtatcttccttccagctatttgaaactatatagtattgttaactacagtcatcctacagtggtatagaacactagaacttatttcttctatctaggctgaaattttgtatccttcaacaaatttctccctatcccttccttcctcctacccttcccagcctctattatctatcctctgtcttactttttacttctatgagaccaacattttttaggctttcacatatgagtgaggancatggcggtgtttaactttctgttccggggcttatttcacttaatgtccnccagttccatccacatngccataaatggcaggttacatnttttttatggg

SEQ ID NO: 303128 - DNA, 224 bp, Homo Sapiens
gcattttgaaactgttcacagattctcattcataagctaaatacttatagaaaatagatacagttactgattttatgcattctgtacaattttgcctaagaaattaatgcatagaagtggacttttttatatcaccaacaagattgaaaatataagcaaaaagtgtttataactaattgttttataagaaaggaacttcacctgtttctggatattttttcctc

SEQ ID NO: 303129 - DNA, 546 bp, Homo Sapiens
  misc_feature (116)..(116): n is a, c, g, or t
  misc_feature (298)..(298): n is a, c, g, or t
  misc_feature (367)..(367): n is a, c, g, or t
  misc_feature (387)..(387): n is a, c, g, or t
  misc_feature (476)..(476): n is a, c, g, or t
  misc_feature (494)..(494): n is a, c, g, or t
gcagccaccttccatgtccaggccctgttattgctgggcatacaggcccctggacagttagtgagtgtgggtcacagaactggggagtaggatcgggggtgccactttgtggaatngaagaggctgaaacagaggcccagagcccagccagccactgcttggaaagggggttgcctcctgcctgtgctggcgtggctgaacagagccaggctagctttttcctacactcctaataaaactcgctttaacaatggtgagagcgtttccagttttcccacgttttcctgcatgaggcttnggcagaccctcccttctctgagaatctgggggatggagtgagtcggaataaacttagaggcaggttttngtcccaggaaatcttagccnttgttcgctcttggggtttcagcctttcctgttaatttgttttccagtgtaaacctgggttcctttttaatgttgatgggtaatgatancagccttaaatttcaggncctgcccatgggtttgaattttctgatcacattggcattggtggttcacaga

SEQ ID NO: 303130 - DNA, 439 bp, Homo Sapiens
  misc_feature (82)..(128): n is a, c, g, or t
  misc_feature (371)..(371): n is a, c, g, or t
  misc_feature (399)..(399): n is a, c, g, or t
  misc_feature (422)..(422): n is a, c, g, or t
taaggaaatgcaacatgctttcgctatgctttcacagtaggatgaggctgtccttgaggtttgaggtttatttgcctaacannnnnnnnnnnnnnnnnnnnnnnnnnnnnnnnnnnnnnnnnnnnnnntccattcacagactcattaggccctgattgtgtctgtgggttacaatagaacactcttcttatcagtccttatctgacttgatttgctctgtgacacttaacttcctctcttttctctacccctgacccatgacactccttaattttcttctttcctcttgaatgtgtcttcttaatcttctttgcttctcttccaccttctctgtaagtgatgatgctccccgcccttcccattagggttcngtattggaccttcgatattcccctgggnggatctcaatcgtgttccagganttcaaccaccaccaccc

SEQ ID NO: 303131 - DNA, 416 bp, Homo Sapiens
  misc_feature (401)..(401): n is a, c, g, or t
gcaaaaccaacacagtagcccaaggaaaagtaactcccagaaacatataaggacaacgttctgtgaacaattttaggcaaattaaagtgacacagtaataagcagtattaaaccaaagtgtccaccatcatccatccggccaaggattggatagttccctttaaggcaaaacatatcgtgtggggctgagcactgcaatagctacagtgcttactcaggaaggctcaacctgtctgggcaggctccggggttctcaggactaggcttttatggcacatggaccattcaggtcattttaggggatattcaaaggacaggaaaattttattatcctgtggcatgggggtctgtattttaggggccttttaaatgccatacaatttaggggtaagggtaccacntttcttttccagggg

SEQ ID NO: 303132 - DNA, 333 bp, Homo Sapiens
  misc_feature (133)..(133): n is a, c, g, or t
  misc_feature (234)..(234): n is a, c, g, or t
  misc_feature (239)..(239): n is a, c, g, or t
  misc_feature (253)..(253): n is a, c, g, or t
  misc_feature (291)..(291): n is a, c, g, or t
  misc_feature (296)..(296): n is a, c, g, or t
  misc_feature (310)..(310): n is a, c, g, or t
tgacataagatttattgacttcacatcagcatttaagtattgttaaatttgtgtaacagtatttgggttgggaattggtacatttccagttgtacgaaagatagttgtattatgttaggcataattatgaccntattattgtcattatttgaagattatgtgtgagctcaggagatatctatggggttcaagttgacaaggggtgaccctgtgatgggttaatactgaggtgtncaacntggattgggattgnaaggcctggcaaaggtatttgatccccggggttttgtnccctngaggggtttttgtnccaaaggggtttaacccttttga

SEQ ID NO: 303133 - DNA, 204 bp, Homo Sapiens
  misc_feature (135)..(135): n is a, c, g, or t
  misc_feature (142)..(142): n is a, c, g, or t
  misc_feature (174)..(174): n is a, c, g, or t
  misc_feature (184)..(184): n is a, c, g, or t
ggcgtgacaacccacggccgaggcccctcgtggccgaattcttgggccttcgaggggcaaatttccctattaggtgagtcgtatttaaatttcggtaattcatgttcataggctgttttcccgttgtggaaattngtttatnccgtttcacaatttccacacaacatacggagnccggaaggcntaaagtgttaaaggccgggg

SEQ ID NO: 303134 - DNA, 322 bp, Homo Sapiens
  misc_feature (83)..(84): n is a, c, g, or t
  misc_feature (223)..(223): n is a, c, g, or t
agtcacaaaatactctttgtggaatagatatctacaggcagaaattttgcaaaaacgtttcaaagcttagcaatttacataannacgttttcaactctcaattccatacagagtctcctaagaggaaaattacaaatgccacgtggttagggtttcaacattctgaacactggtattttctccatatagcatacaggaaagagtaaatagttgttctctacanatctcaggcagcacagtcacttctgggaggctgggagtgtaacgctggcacatcgttgcctgaatgtgcatgccaagtcaatatgctgagaccctgggg

SEQ ID NO: 303135 - DNA, 357 bp, Homo Sapiens
  misc_feature (252)..(252): n is a, c, g, or t
gcaagctctgtagttcttttgtctatttccaagtttagataatttttcttaaaaacacccggccagcatgaccttttctaaacacttcaagattatccttctttagcttaattctaattgctggattgcttgactgtacctccatgaataatcctgttggcactaagtcctgtgaatgccttacttttaatgaagagtttacctaatagcatgtaagattgtgcaggaaacgaaggacagaaaggcccaggnaaattggcatatggatagtttgcctccatttgttaatttgcgggccaccttggtccgttttgggggcgtggcgtttgttttcaccatatgggcgggtgacggaac

SEQ ID NO: 303136 - DNA, 330 bp, Homo Sapiens
  misc_feature (30)..(30): n is a, c, g, or t
  misc_feature (91)..(91): n is a, c, g, or t
  misc_feature (259)..(260): n is a, c, g, or t
tgttggaagaaaacaataacatttctagtnactatgtcacttccctcataatctcacacatactctcatgcatcaccggaagccacaaccntgtgaactacttggaagctctgctcaatggcttaataccatttgctgagtctgtttaactttgcttaaaggcttaaatgtctgttagagagggccttgtttatttatttttatatgtttcccccaaggcacatggtaaaaaaagaatttgaactatgtaaaaagaggnntctaagtagaccatccaatatcaatagaaatgacaagctctcagctactcccaaggggtttgtgtacaga

SEQ ID NO: 303137 - DNA, 453 bp, Homo Sapiens
  misc_feature (428)..(428): n is a, c, g, or t
  misc_feature (442)..(442): n is a, c, g, or t
aatctgaagagaaaactgtatattgcttttgatccgtctcccttagcaaagtacatattttcatactctatttctttacataagaatatcgaggggcacacatttttgtacatttttaggtatggttttgaaaatatctcaatggaagaagctaggcattccctgaaagatcaaaagcatctaaggctgctggtggtgatgcattttctcgatggggttgttgtggtgggcagctgggatttaggagtgtcctttattgcacctgctcccattgttaggctgttggaagaaacgtggtgcacagcatggaggggaggctaatcctgaatgttttatggagcattacgactgcaggtagagaagcaaaaatcgacctcataaaaaccttaagttgtttttactatggaaaacatatacatacccagtgnaaggaaactgaacntttagggggga

SEQ ID NO: 303138 - DNA, 395 bp, Homo Sapiens
  misc_feature (275)..(275): n is a, c, g, or t
  misc_feature (330)..(330): n is a, c, g, or t
  misc_feature (342)..(342): n is a, c, g, or t
  misc_feature (349)..(349): n is a, c, g, or t
  misc_feature (372)..(372): n is a, c, g, or t
agtattcattgcgtcaaaggtatagttaatttggaataggtatgtaaccttttgcaaaaaaattgttatactgaagtatttttggtaatgcatcattaaaatagtaatattggcatcctcttattatgaaaatgttacttttcatataatggaatttctaaaattggtacaagtaatacaattaaaattataggcatatcatagggaacatatgaaacattttctatgtatttttgaaaatgcagtctgacagtgagggttgccaaagagggganataaattaaaaaggataggttttgttttccacttttataattttgggggttatcncctggaagggcnccggganttggaaggggggacccattaggnccccccttttaaaaccggtattt

SEQ ID NO: 303139 - DNA, 325 bp, Homo Sapiens
  misc_feature (183)..(183): n is a, c, g, or t
  misc_feature (305)..(305): n is a, c, g, or t
taatgatgttaacaagtttaattcaaaaagaataaactgttttttaagtaccagaggcactgctggaacaggatgaaaactgatacaccggttactaattactcttcactcttcaaactgattcccctaaagacttctacttagcaaatactataaaatacgctctgtacaggaaagaaatantagcacatgtatttgtattttattattcagactgggctgccatcccaactaggataaaggttttactggggctggtaatatctaggcacttggcatgttttcagaggcactctaaactgggntggtctcactcttttcacac

SEQ ID NO: 303140 - DNA, 471 bp, Homo Sapiens
  misc_feature (313)..(313): n is a, c, g, or t
  misc_feature (358)..(358): n is a, c, g, or t
  misc_feature (408)..(408): n is a, c, g, or t
  misc_feature (422)..(422): n is a, c, g, or t
  misc_feature (424)..(424): n is a, c, g, or t
ggttggaaacagactggcagacagtagcagtgtaggagggtcccagacctgctcgtggctttcatggtatgactccaagccaggcatcttaactagcaggacaggcgtgttgctcatagtccacatcagccaacagatgtgtgaaccacgcccacaggctacgcagatggcaggtgtgatacgatcacatgtatattggttttcatccgcaattcctggctcataactcccatagcccttattacaatgttttgttatcatgttgggtgagttaggcctcaggagcaggccccagggaaacagagtctctctnctctgaccttctcctgttcctcctgttcacctgcctaaagggaancttcttaattctggattgtggggtcaaggagaccgatttccagaggggtnttattagggaaggncntgccacacagaggagggccaaggaaaagtttgagggtgggcacagtg

SEQ ID NO: 303141 - DNA, 401 bp, Homo Sapiens
  misc_feature (360)..(360): n is a, c, g, or t
attcggcacagctgggctagaaaacagtaagacaagagagtaatattgtcaatattgaagcaaaatgattttgaactctgaacttcgtacctgggtaaattattaactgacagtatatacatttccacacatatatgggctaaaatttatatttcatacacatcttctttggaagttactgaaggatacccttcaggaaataagaaaagcaacataaacacataggatctgagaaaccatagatataacctagaagagcagaaggttccaaagcaagacttatgtgatataggctgacagacccatacaggtgggagtgagagaccagggactcaagaaaggctgtttccaaggaaactngactccacacaacagaagtgttaaggagggtaaatgacccc

SEQ ID NO: 303142 - DNA, 419 bp, Homo Sapiens
  misc_feature (27)..(27): n is a, c, g, or t
  misc_feature (30)..(30): n is a, c, g, or t
  misc_feature (45)..(331): n is a, c, g, or t
  misc_feature (355)..(355): n is a, c, g, or t
  misc_feature (365)..(365): n is a, c, g, or t
  misc_feature (374)..(374): n is a, c, g, or t
  misc_feature (384)..(384): n is a, c, g, or t
  misc_feature (408)..(408): n is a, c, g, or t
gaatctgctgaagaatgagttacatanatntaagtgtgtgctgtnnnnnnnnnnnnnnnnnnnnnnnnnnnnnnnnnnnnnnnnnnnnnnnnnnnnnnnnnnnnnnnnnnnnnnnnnnnnnnnnnnnnnnnnnnnnnnnnnnnnnnnnnnnnnnnnnnnnnnnnnnnnnnnnnnnnnnnnnnnnnnnnnnnnnnnnnnnnnnnnnnnnnnnnnnnnnnnnnnnnnnnnnnnnnnnnnnnnnnnnnnnnnnnnnnnnnnnnnnnnnnnnnnnnnnnnnnnnnnnnnnnnnnnnnnnnnnnnnnnnnnnnnnnnnnnnnnnnnnnnnnnnnnnggggttaaaaataaaagtgtgttntgccttcagngtagctgtngcaacttccntttcagtggtgagtaactttcttntaggtcacaca

SEQ ID NO: 303143 - DNA, 471 bp, Homo Sapiens
  misc_feature (385)..(385): n is a, c, g, or t
  misc_feature (420)..(420): n is a, c, g, or t
  misc_feature (434)..(434): n is a, c, g, or t
tgaaaagttagctcaaacacagtctctattagcaaccagaagaccagttagtttaggaaatcatctattacaaagaaagagttaacatgttaaaatttaaggcaactttgttatgttagtctaagtgaagacttagctctgcctctatctgaagtatcaaacaaagtttcagagagccataaaataatatgcatcaattcatcatcatctgctgagtcaaacattggaaaataatgtcaagaagttaccctgtaattacttcgtggctccttgaaaacccatttgacataatcactctttgacagctgcaagagggaaaatgttctatttcttctcccaccagtattctcttctgagacccgggggcattgcttttcagcacttnctgatctgccaaatgtttatggaagggagtatgtnggggtgccttcgtnattcgtgctcccaagggtggtcaggggttgagggttt

SEQ ID NO: 303144 - DNA, 443 bp, Homo Sapiens
  misc_feature (110)..(361): n is a, c, g, or t
  misc_feature (413)..(413): n is a, c, g, or t
tttttttacttacttttccctcgcttctatgccactctgctttgtggaacaacctttgtgtgtctggccattctagctgtgttctctggtaagaacagattcaaagtccnnnnnnnnnnnnnnnnnnnnnnnnnnnnnnnnnnnnnnnnnnnnnnnnnnnnnnnnnnnnnnnnnnnnnnnnnnnnnnnnnnnnnnnnnnnnnnnnnnnnnnnnnnnnnnnnnnnnnnnnnnnnnnnnnnnnnnnnnnnnnnnnnnnnnnnnnnnnnnnnnnnnnnnnnnnnnnnnnnnnnnnnnnnnnnnnnnnnnnnnnnnnnnnnnnnnnnnnnnnnnnnnnnnnnnnnnnnnnnnnnnnnnnnnnnnngagggagttttagggggattccttatatgagttcagtctttagtatttagcnaacatcgttcggttaacccagctattaaaa

SEQ ID NO: 303145 - DNA, 303 bp, Homo Sapiens
  misc_feature (40)..(40): n is a, c, g, or t
  misc_feature (80)..(80): n is a, c, g, or t
  misc_feature (108)..(108): n is a, c, g, or t
  misc_feature (133)..(133): n is a, c, g, or t
  misc_feature (164)..(164): n is a, c, g, or t
  misc_feature (201)..(201): n is a, c, g, or t
  misc_feature (205)..(205): n is a, c, g, or t
  misc_feature (254)..(254): n is a, c, g, or t
gaaaataactcaccaagcttattaattagagaacattggntccaagtcgtcaaataattctgaacatgaccaggggtccngctgcccatccttacagatgcttatccngtcaccctagttgctcttcttaccntacttcaacacagggccttccagcctgaggngaaaggagaattttaatacttaggcattttccaaccngggntagatctctctctgtttgaggccaacataaaaaggggattttttaaggnactccatgtaatgtattttttgtatttttgtgcagctaaccttctccct

SEQ ID NO: 303146 - DNA, 121 bp, Homo Sapiens
tggcatccacaaaatcagtcctggggatatagacttactcagactaaattattcattcagtgacaatacactacatgggtacattctgcattagttccatgctaggcatagaggggcatta

SEQ ID NO: 303147 - DNA, 114 bp, Homo Sapiens
ccgtccaaatctgcaatttttaaattcaatctctaggttttatgggctcaaactgtttgaaaaaggattccttaaatatatggaaaatttatgtggctgcactaaatattagac

SEQ ID NO: 303148 - DNA, 336 bp, Homo Sapiens
  misc_feature (307)..(307): n is a, c, g, or t
  misc_feature (323)..(323): n is a, c, g, or t
attttagcaccccaaaatagataaataattaaaatcaaccaggatgtgggaggaacccataacaataatctcatctaaggggataagaaataaaaccactaaccgaagtagctatgaaaaagggtatttgaattatacatacaggcctattttggagctattgcaggttcggttccagaccaccacaataaagaaaatatcacaataaagcaagtcacacaaatttttgtatttcccagtgcatataaaagttataatatataccatactgtagtctattaagtgtgaataggcattattcataaancaggcatgtctaaaantgtatgtacctta

SEQ ID NO: 303149 - DNA, 385 bp, Homo Sapiens
  misc_feature (60)..(68): n is a, c, g, or t
  misc_feature (296)..(296): n is a, c, g, or t
  misc_feature (344)..(344): n is a, c, g, or t
aattgtagccatcctagcaggtgtaaagtggtgtctcgttatggtttgattttcatttcnnnnnnnnnggtgtggggagtccctttctgacagaattcatttcctgaatgactactgatattgcacatcttttcatcttcttattggtcatttgtgtatttactttgaagaaatgtctactagagttctttgcctttttgtaaatttgaatgtgagaaggagagagagcgagagagctctttgcccacttttaaattggagtgtctttattgttaggttacagttctttatatatnctgggatattaattcttgatcaggatatatggatttgccaaatatttnctcacatttgggtaggattgtcctttttactcttgatgtcc

SEQ ID NO: 303150 - DNA, 458 bp, Homo Sapiens
  misc_feature (118)..(118): n is a, c, g, or t
  misc_feature (178)..(178): n is a, c, g, or t
  misc_feature (185)..(185): n is a, c, g, or t
  misc_feature (202)..(202): n is a, c, g, or t
  misc_feature (226)..(226): n is a, c, g, or t
  misc_feature (238)..(238): n is a, c, g, or t
  misc_feature (369)..(369): n is a, c, g, or t
  misc_feature (386)..(386): n is a, c, g, or t
  misc_feature (425)..(425): n is a, c, g, or t
  misc_feature (446)..(446): n is a, c, g, or t
tagtttctatatctttgttcatatcctcattctgttcatgctttgtttgcctgatttcatttagctgtctatctgtattcttgtaacacattgagcttctttaagattatcataaatnctttttcaggtaactaatagatctctgtttcttcggagtcagttaatggagatttatttngtttctntgactgatttccctgtntctttgtgtgccttgttatttttngttgtgattttngcatttgaaaaacagccacctctcccaatctttacatactgggctttctataggggaagaccttcaccaaacaggcacagccagagaatctgacagcctctcaatccttttatggggggaggatgtatctnctctcactctctggcangtaaaattcccaattaggaggaaggtttgtccagtttcntttttcgggtttataggttcnttcccccctctt

SEQ ID NO: 303151 - DNA, 176 bp, Homo Sapiens
  misc_feature (73)..(73): n is a, c, g, or t
  misc_feature (119)..(119): n is a, c, g, or t
ccgcgcttagcctgtttttagttttctaaagcaaggtacctatttgaaaggcaggccattaaacagtgatgantaaggaaaaatcctgggaagagcctgaggaagggaaaaaggtgganttttaattgccaggaggattgaagtttagttcaaagggaacagtgttggaaaacatt

SEQ ID NO: 303152 - DNA, 366 bp, Homo Sapiens
  misc_feature (11)..(11): n is a, c, g, or t
gatgcttaganttgtcagatgaaaaatgttggaaagagagccaacaatgtttaaggctcctttttcctttagaaatggaaggtccagcccccttgaggcttgtgtgaggaacctaggagctggagaaggtgtgaaattgtcattgcagagaggggtcagaagaacactaagcttggggacatggtgagattactggagttgacaggcctgctgcgggggatgaagacactgatattacggtgctgtgacttttctcaggagatgttcagctgcttcagtgacaatacagagaagccagatggctgtgttcattccagagtgaaggatttgccttaaaggccagggttgcggtgggctcatggccta

SEQ ID NO: 303153 - DNA, 273 bp, Homo Sapiens
  misc_feature (62)..(168): n is a, c, g, or t
cttgtcagcaagtaatggacagagcccttccattgtggggctcacaagagcaagtgaaccannnnnnnnnnnnnnnnnnnnnnnnnnnnnnnnnnnnnnnnnnnnnnnnnnnnnnnnnnnnnnnnnnnnnnnnnnnnnnnnnnnnnnnnnnnnnnnnnnnnnnnnnnnaccaccaacacccacctcagagagttgtcggaagggatcagggaaactatgtttgtgaagcactcagcccaatgcctgggctcagtatcaaagttcagtaaggca

SEQ ID NO: 303154 - DNA, 350 bp, Homo Sapiens
  misc_feature (113)..(167): n is a, c, g, or t
  misc_feature (292)..(292): n is a, c, g, or t
ggaatttgaaatgaaaaaaatacaaacaacacaattttaatcacagcacccccaaaatgaagttcttacatcatttgttaaatctaacaaaatatgtcaggatttataggctnnnnnnnnnnnnnnnnnnnnnnnnnnnnnnnnnnnnnnnnnnnnnnnnnnnnnnntactaggttcatgaatcaggagactcagtgaggtacaaatgctctccaatttcatctaatagattcaataacataccaaccaaaatttcagcaacgtcttcttgtagctattgccaaatttattncaaaattttaagtttaaaaaggcaaaggaattaggcggaaaacatgcatggagaatta

SEQ ID NO: 303155 - DNA, 376 bp, Homo Sapiens
  misc_feature (302)..(302): n is a, c, g, or t
  misc_feature (360)..(360): n is a, c, g, or t
ccctgtatgactcaagctttccagatgcactactgaaaatcacttactgactagtggagtaaagacttcagaaattactgaccaatagaatttattttgcatccctatatacacattgttagcaggcatttatttatttccgcaacaaatactcaagatgcctcactattggcaaagcttactgctttaactactgaaccacaatcctcaaatttttaatcctatgttacagccagagcactaaatgaaaatgttgacatagtttttagtgggatatcgtttttcttctgaggttgtctganccttacttttcatatgtggcggtaggtttggtttaaggtcacaaggcgggattgaggnaaatagggaattttct

SEQ ID NO: 303156 - DNA, 413 bp, Homo Sapiens
  misc_feature (340)..(340): n is a, c, g, or t
  misc_feature (388)..(388): n is a, c, g, or t
  misc_feature (399)..(399): n is a, c, g, or t
tataaagggatccttaaaccaaaagaatttaagaactgatgatctatgggaaagaaggggctattaatcaagtaaatttttctattttctgttcttgattcataaggcaaatagttctgtcataatcagagaaaataagcttttatttttagaaagtagacagattacatttctgtatttaataagaacaaaaagttttcaatgtatgcatattcaattttcaatagattctctgcccctgttctccctgcctaccaaccctggcttcccccaccaggctttgggtccttggcttctgggtgaggaagagtcaaggggagttttcttaactctgggtccnttttacttgttcaaatggctactgagtgttttgttggatggatgggcnggatacaattncccttcctaggggg

SEQ ID NO: 303157 - DNA, 281 bp, Homo Sapiens
  misc_feature (190)..(190): n is a, c, g, or t
  misc_feature (195)..(195): n is a, c, g, or t
  misc_feature (210)..(210): n is a, c, g, or t
  misc_feature (237)..(237): n is a, c, g, or t
  misc_feature (260)..(260): n is a, c, g, or t
tgcaacccagcctcggactgcatttttaacctcatctccatactatatctctacaatggtatgattctgaatgttattcatacactaaaacaggaaataaaaagttattattcacaatttgccttcaatgactacaagctttaagttgatgtaggaggaaatataaatgccctggggatgtattataggnaaacnttttacaataatacntttttatggctggttatttagggtacntaacccagggccccttttttccnctttcccggccatatttttaa

SEQ ID NO: 303158 - DNA, 388 bp, Homo Sapiens
  misc_feature (244)..(244): n is a, c, g, or t
  misc_feature (324)..(324): n is a, c, g, or t
  misc_feature (340)..(340): n is a, c, g, or t
acaataatagagattgcaactttgccgctaataaaacatgattcagttatttttgagactaatgaaatcttaagtagtaaataagagacaaaagtaatgatcatttaattttagtattgaaaacactgctgattctgccagtaagaaaataagctggtgtgagtaccaagaataggaaaacatttgccctggtaattgtctttttgttcctttctaggaaattgtcttttattttatgaaaggnaagcagataggtcaatataattatgtctttcatggatctggggaatagatctcaatcttctttgactctttttatacttnacttttcctgtttccngaaattatttacatatgactcatttttctctttattttgaaggaagtt

SEQ ID NO: 303159 - DNA, 344 bp, Homo Sapiens
  misc_feature (328)..(328): n is a, c, g, or t
agaaactgaagaggttgtatcaactggcagtttgcactgaaagaaaacaatcttaaatcacttttaatcttgcagagatttttgaaggtcaaggttgaaatcactggcaggaaagtaggtgaacaaaatggtttgaccctgcctgaactagacttgcactgatttgtagagctggagtggaagagagctaaaatagtagcgctttccttaaaagacacccacaccccaccacctcaccagcagcacaccagcggcagagcagtataaccacagacattcgtcactgtgccagatcaggggcataattctcttaagggcagcttgaggncttcacattagtttct

SEQ ID NO: 303160 - DNA, 414 bp, Homo Sapiens
  misc_feature (295)..(295): n is a, c, g, or t
  misc_feature (305)..(305): n is a, c, g, or t
  misc_feature (321)..(321): n is a, c, g, or t
  misc_feature (334)..(334): n is a, c, g, or t
  misc_feature (345)..(345): n is a, c, g, or t
  misc_feature (372)..(372): n is a, c, g, or t
  misc_feature (380)..(380): n is a, c, g, or t
tcccaatcagcctttgtgtcatccagacaaattgtactctgagtccatgctttgaagaaatctagtaacacagagagttgtctgtgggaggtctgttccttgttgtttccaaataattattaagcagacatatggtgaattgaatttataccaacatttctgagcctattcaattttttaagtgtactaaaggaaggataacatcaacttgtaagtatttttaaaacttttccatattaggttttaattatcttaattttcatcatatgtattaagacttgggttaaaaaaaganaaagacaaanagatggatttttgcanaaaaagccaaatncaaatattccngggcttagggtttggggttatatgggntgtttttnaaatggaaatgtttcccaatgggcattatattca

SEQ ID NO: 303161 - DNA, 407 bp, Homo Sapiens
  misc_feature (266)..(266): n is a, c, g, or t
  misc_feature (276)..(276): n is a, c, g, or t
tggattgtatatttgcaggcaagtgtaaaaggacactctactttctattattccaaaaagctgagcatttatagactttttgaaaatatgttacatactttctgaaaggaattattcaaatgtcagtttaagcctataaagcaatacaactagatggcatttattattattccacttcacttcctttctcctttaggagcaagggatcgctttacatcaggttccaaggctcagaaacatttgggctacagtcctttctaattctntgagtcaganatttacaaaggaacaaaacaaaaggatggattctctcccatctctttccatgtattccaaattcttcactgaaaatccagggaaaggagttattaccagtgttttgggttgggatatttcagtttttaaaa

SEQ ID NO: 303162 - DNA, 101 bp, Homo Sapiens
  misc_feature (60)..(60): n is a, c, g, or t
attgccagccaatgatacaagtgggtgaacactttaacaggaaaagcagcgacaaatggnttttctaccgggggattattcagttttactacccttcatct

SEQ ID NO: 303163 - DNA, 276 bp, Homo Sapiens
ctatattatacatgcaatgcttattggaaaaagatactcaaacatactatacaccctactacatttctctttaaaaagtatgttctcacaaactaatttatgcttaggcacacaatgacttatttcaaaattttgctaaggctgtcttccccttgacaataataaagtctattctacagacaatcgaataaaaaactgtgaaagaacagaaatacagtacacacttgacctacaagctctaagagcaaagactcaggaatcactaattctgcctaa

SEQ ID NO: 303164 - DNA, 168 bp, Homo Sapiens
  misc_feature (56)..(56): n is a, c, g, or t
acatcatcactttgattatagccatcctgctgggtgtgaagtagtagttcattgtngattttgatttgaatttccctgttggctaatgttgagctttatttcatgtggttgaaataccatgctggccattttgtgtatctttgaagaactatctgttcagatcctctt

SEQ ID NO: 303165 - DNA, 413 bp, Homo Sapiens
  misc_feature (222)..(342): n is a, c, g, or t
  misc_feature (384)..(384): n is a, c, g, or t
  misc_feature (402)..(402): n is a, c, g, or t
ggcacgaggagctagcaccatgacaataccctgtagttatattatactctcccatcctcacctctaaaagattccctgagtgtattaatacgttcttaagtatttaggagtgaaatcccatgaggactgggcttgctttaaaatattccagggaggtagaggtagaaaaatggagaagtatagatgcaagattggcaaaatgctgttatcaaagctaggtgnnnnnnnnnnnnnnnnnnnnnnnnnnnnnnnnnnnnnnnnnnnnnnnnnnnnnnnnnnnnnnnnnnnnnnnnnnnnnnnnnnnnnnnnnnnnnnnnnnnnnnnnnnnnnnnnnnnnnnnnngactattcagactgcaccactgcaccttggctgtttagccanaccaatttttaaaagagnattgagatttc

SEQ ID NO: 303166 - DNA, 448 bp, Homo Sapiens
  misc_feature (298)..(298): n is a, c, g, or t
  misc_feature (360)..(360): n is a, c, g, or t
  misc_feature (379)..(379): n is a, c, g, or t
  misc_feature (414)..(414): n is a, c, g, or t
  misc_feature (421)..(421): n is a, c, g, or t
aatcccatgaggagaaggcattctaatttaggtaggtatttaatatttgtctgaactgatgttatctgcatagtggaaagcagaaaagaattccaaattcgtgaagaaaatgagaaagcgctacatttttactttcctttcagttaattcagcaacataattcattacacatattttttgattctgtgaatatccagaataaacattcaatacggtatccatattcagacttcagtggcaaaaacctattccaaagttgggaaggatttatggggttgtctgccatttttgattaccntcatcagggtaggcacaggtaaagtaggaaagggacattaggctttgttggaaatcttgccnggtgtccaccctaataacnatggtaatcttgggggggaattaggtaccctttcngaggttntgggtcccctcacccggcaaatggtcc

SEQ ID NO: 303167 - DNA, 413 bp, Homo Sapiens
  misc_feature (29)..(29): n is a, c, g, or t
  misc_feature (64)..(64): n is a, c, g, or t
  misc_feature (314)..(314): n is a, c, g, or t
  misc_feature (353)..(353): n is a, c, g, or t
  misc_feature (365)..(365): n is a, c, g, or t
ttacaccttcactgctggaaaaacttggntttttaaacataataaaatgactgccagaggaaantattgcattagttttgtttctgaattttctccccaaaatattaagaaactcaaatgtttctcttttgttaaattttttcatttgctattctcgattttaaaatatatacagctaaaatgttaatattagggttttctttaatatagcagaaaactaggattacggctaggataaataatttcaacctaaatgtagggtaggctttttaaggcagggttatcattttcccgatacccaaggaggtcaatgngggagactgatggttttgatttaaaggggtatacctccncataatttccanaaaataacctccccccggggaatccgggatattttgggccaatggccc

SEQ ID NO: 303168 - DNA, 158 bp, Homo Sapiens
ggcagaatacaattagttatttgagttacgccatcgttttagaagtgaacttcctgagtaaggtaattccattgtagtagctcttttggaacttacttagctaattatgacggcaaattgcttaatactgtctttagaattgttagtaatatgcaaga

SEQ ID NO: 303169 - DNA, 282 bp, Homo Sapiens
agcaaatgtaacacaaaatgttggaatctaactgctactgtgtgtatacgctgcacagttctttcaacatttcatgtttgaaatttgtcataatcaactgagggaggaggaacaaacaaaagatgcatctggctatttttgtagggaagcttctcttctctgtccaacctccagcgtagaaccctaaaaacatcaactatataatctactctctcatgccaactccttaagggcacacacttgtccacactgggttccttatattactgaccttgaaccaat

SEQ ID NO: 303170 - DNA, 369 bp, Homo Sapiens
cagggtgtcacaactggaggtacactgtctgtctttcaatggcgatattattttgatcaatccatgaagattttgtcttattaccatatggttactgtttttttccctttgtatttaagcaatcttgggatacactttaagaccataaaaatatcctactgactgaagtctctccccttagatcaaatatccattgacggtgcttgcctgggactaatgtttactgtgatggttgcaaaatttgtatttttttattctagttcattttccacattgatcagtcagcacttgacatcctactctaagcaagactcatactttttttgatggggagtgtaaattctttaacgacttcaggaaaagagccaa

SEQ ID NO: 303171 - DNA, 401 bp, Homo Sapiens
  misc_feature (352)..(352): n is a, c, g, or t
gagacagggtctcactctgcacacaaactggagtaaaatagcacaatcacagctcactgcagccttgacctccccaggctcaggtgatcctccaacctcagcctctctagtagctgagactacaggcacacagcaccacacccagctaatttttgtattttttgtagagacagggtctggatatgttgcctaggctggcctcgaaactcctcaggctcaagccatccgcccacttcatccttccaaagtgctggggattaataggcatgagccaccatgcctgggccagcaggcaaagcacttgattgtatggaatgtaacatctttttaattaggtctcccactgatgggntactgagggtgggtttccaaactaggttactacaaacaattctgttaag

SEQ ID NO: 303172 - DNA, 162 bp, Homo Sapiens
  misc_feature (40)..(40): n is a, c, g, or t
  misc_feature (82)..(82): n is a, c, g, or t
gcacgcagcgccatgtcatggttaaagactccacggcctnctgccacctgggagatagttggattatctgtgccttagcatngcctcccaggcctccttacccaccttttcagcacatcccaccctccagtgctgtcacgccagatcctgtttgtgcctcgt

SEQ ID NO: 303173 - DNA, 125 bp, Homo Sapiens
  misc_feature (91)..(91): n is a, c, g, or t
cacccatcactcccggccactactctttaactgggaatagtgttgtaaagggaaatctgctcgctctttctgccggagaccaaattcagtncaacaatagggccctgtactcaacccgggggtct

SEQ ID NO: 303174 - DNA, 294 bp, Homo Sapiens
gcacatacaaacctcgacagatgttaagcacggtcatttctgctttcacccttggttcctggacccgggtattctacctctcaggaatgtggcatcatatacaggtctttgaatatatatagtgaatataaagtgtcctgaagtatagcatcccttccttgtaaagtgttgttaaatacctatttcctggggtctcctgatggtagtttgccttaaaccaaataggatatgtgatgctggtcttttctctgccagcatgctcttgagtattctctttttttcaacctcctatgg

SEQ ID NO: 303175 - DNA, 325 bp, Homo Sapiens
ataagacatgtagaaacactatggagaattgtctcccagcatatcttggaagcaagagctcatgctgtctagagcagacaaaccacacacataggtgtgcccaagcatctgtaatttttctgtttgtgagaggctatttttctctcatgttcgagaggccactcgatacactggaaagattcaatgtcgagataaaggacatttaagttctgattcttattctgcttctccttcaccatgagaccttaagcagcactccttgtctccagacctctgtttgtttatctgtgaagtggggcacaccatctgtcctgcctccctttaa

SEQ ID NO: 303176 - DNA, 373 bp, Homo Sapiens
agagctagcaccatgacaataccctgctgtaatcttggcactgcagcccacacagggaggaggcttgaagccccagctcttacaaaactcagcattagagattcaagacatccatgcagatgcatttatacccaaagcctttgttccctttttctcagaaattcttaagattctcaagtatagcaaccagatgcaatgaaaatctgttttgccccttaaattacaattctagagcaaataaaatattttcaccaagattgaactaggaatgcttatgtgaaaataaattttacaataaacccaggaagggagcttatttttcctggacttggacttttttcctctttcatggcacattttttttgaaaacaga

SEQ ID NO: 303177 - DNA, 492 bp, Homo Sapiens
  misc_feature (379)..(379): n is a, c, g, or t
  misc_feature (392)..(392): n is a, c, g, or t
  misc_feature (425)..(425): n is a, c, g, or t
aggaagtgtgatttttcatacgtgttctacggaaatagtaaataatggacttcacctagtctgcagtgtattatggggttcagaataaaatatgagttcaactggcaatttcaaatgcggctttggagagaaaacatttatttgactgaaagatttgcttctgacttgaggcccaggaacattcccagttttaactgtagtgttgcattcctgggaagttctgttccatagcttcctttgcaaattcatgtagatggatttctttagctctgacagtttcctccaaacctttcctacattcttccaggggcctttgcttatagacaggggagttacaccagggtggttaggttttcaggtttaacaaaaagaaacactnttattgttcattnttaatgggcaacctcggttttttacaaggcttngggtttagccgtgtgagcagatcaaaagccgcttgggtttgatttctccatattctctggagcttgt

SEQ ID NO: 303178 - DNA, 401 bp, Homo Sapiens
  misc_feature (331)..(331): n is a, c, g, or t
  misc_feature (364)..(364): n is a, c, g, or t
gtgtgagccacccgtggcaacctgacatgccctttttaatggcaaaattcagtctgctcacatttagcctaataattgatacaatgatcttattccttccccttacttttattattgtataatgtttcctcttcttccctctatttgtgttgggctagtcaaactgccattctttccaacttttttcttttgttaatgtgaaaattttcctaaatttctccattcaaataataggttcattttccctggtctaaatattatctgaaaacaggggaggccaattaatttccccaactttgaggagtggggcgggggtaaaggcgatagggtnaaccggaaattaaccggccaagggatttttccnaggggggttattcacattaatttcccatttccaccag

SEQ ID NO: 303179 - DNA, 492 bp, Homo Sapiens
  misc_feature (266)..(386): n is a, c, g, or t
  misc_feature (389)..(389): n is a, c, g, or t
  misc_feature (399)..(399): n is a, c, g, or t
  misc_feature (424)..(424): n is a, c, g, or t
  misc_feature (450)..(450): n is a, c, g, or t
  misc_feature (471)..(471): n is a, c, g, or t
cacgaggtcagttgacagagcaatgtggcacatatcatgcccgggcaccagcctgtcctgtaatcctggccagccctgctgacttacactagtgtcccagcacactctactccaccatgcctgtttctccatctgaatgtggagataacagctcctccgttctacactgagtccttctttgtataattatacggttaattactttttaaagtaattaacttaagctttccactcttttaagctttatactatgaaaaccattagannnnnnnnnnnnnnnnnnnnnnnnnnnnnnnnnnnnnnnnnnnnnnnnnnnnnnnnnnnnnnnnnnnnnnnnnnnnnnnnnnnnnnnnnnnnnnnnnnnnnnnnnnnnnnnnnnnnnnnnnganaaagatggcntacgtggaagtatggctctgttaantaggtcatttaggcattttcacatgnacgttttccctggccaaactncgggggtggtcaagtgcctat

SEQ ID NO: 303180 - DNA, 357 bp, Homo Sapiens
  misc_feature (264)..(264): n is a, c, g, or t
  misc_feature (286)..(286): n is a, c, g, or t
  misc_feature (295)..(295): n is a, c, g, or t
  misc_feature (309)..(309): n is a, c, g, or t
cactgttctaattgctagaggtctagagtaactaagacaattctctgccttcatgcagtttgtaatctaatggtagaaatagacagaaaacatagtatcagactgaatgttctgaagaaaagtaaagtatgggtactttacttaagaatacagagaatgccacttcatattgaatgaaccggggaaggcttctttgaaaagaaacagggcatcatttgagtagagagagaggataaaattaggggcattctgtgtacatttccngaggggactgaggggaataggnaaataaaantttaatttttaggnggcaactctttttggcattcattgtatccgggtttaaaaagtgttttc

SEQ ID NO: 303181 - DNA, 253 bp, Homo Sapiens
  misc_feature (67)..(67): n is a, c, g, or t
  misc_feature (88)..(88): n is a, c, g, or t
  misc_feature (91)..(91): n is a, c, g, or t
  misc_feature (97)..(97): n is a, c, g, or t
  misc_feature (122)..(122): n is a, c, g, or t
  misc_feature (182)..(182): n is a, c, g, or t
  misc_feature (243)..(243): n is a, c, g, or t
tgtagtgccttgtacatgatatgtatcacatggtagttcctcctattccattgctaatggctctttnttcctttggggatatttccgngtnctcttntaccataaaatgtgcaattaaatgnttgttccagttattttcaagtcatttagaattcttaagcaattagattctaaagcccatntttaaattatttatagggtatttaaacatctaggctgctcatgacatttcatgtgtgtccnggttcatact

SEQ ID NO: 303182 - DNA, 450 bp, Homo Sapiens
  misc_feature (158)..(158): n is a, c, g, or t
  misc_feature (378)..(378): n is a, c, g, or t
  misc_feature (385)..(385): n is a, c, g, or t
  misc_feature (404)..(404): n is a, c, g, or t
  misc_feature (427)..(427): n is a, c, g, or t
  misc_feature (434)..(434): n is a, c, g, or t
ttggaaactatgaggtcattgttttccagagtctttactataggaaacagctgtggggactacacaaacagagaacactgccttatttagtagcccctcattgtgacgagtgtatagatggggacaggaaaaatccatcaagccacgcacaaatagancaaaagtagcagagtcaaactaaaaactttaagtcacacaaaggaagacgtaaaacaactaactcaggaaaagcatctatatgattacagctgttatcttgatttaagagatagttccatgtttaggactaggatcagttcctttctacatggggtcaccaaaaactttaaatggattcacattgcacagtacctggaaaatgggtaacctttcaattantataggnttttaattaaaggttttcntgggggtttcttaggggttcaanaccgttntgggccccacccaaac

SEQ ID NO: 303183 - DNA, 260 bp, Homo Sapiens
  misc_feature (22)..(22): n is a, c, g, or t
  misc_feature (24)..(24): n is a, c, g, or t
  misc_feature (127)..(127): n is a, c, g, or t
  misc_feature (153)..(153): n is a, c, g, or t
tgccttttttgtgtgcctcctnanaagtagcgaagtactggcctattagtagaaacaacataaataggcgttgataacatagacaaaaatgatgccacaatcaataatgtaccaagcagaaaatgancaattataacagaaaggctacaaaantttggtaggaatcaaatagtcttccaaaacattttgcacatattatcttactgaaacaaaggcctaaatgtatgtttttcaaaactaatcatatactcagggaagga

SEQ ID NO: 303184 - DNA, 263 bp, Homo Sapiens
  misc_feature (99)..(99): n is a, c, g, or t
  misc_feature (178)..(178): n is a, c, g, or t
  misc_feature (210)..(210): n is a, c, g, or t
  misc_feature (215)..(215): n is a, c, g, or t
  misc_feature (236)..(236): n is a, c, g, or t
ttcccctgtgttgtctatttcttagcatgtgtttagtctccccttttagtttttgttagaggcttttctcactttctggtgatccttaagtgttagctngatttaagatggaagaactgaaaagttcatgggaaactttgtacacatgggtgtctaagtcattttcaggctgctatancaaagtatcctaggctgaatggcttaggaagnacagnaaatttctgggagactgaaanccaagatcagggttgccagcatagtca

SEQ ID NO: 303185 - DNA, 428 bp, Homo Sapiens
  misc_feature (288)..(288): n is a, c, g, or t
  misc_feature (405)..(405): n is a, c, g, or t
  misc_feature (416)..(416): n is a, c, g, or t
agagcactggtcaatataccgtgaccacaccatgaacttttatattatagctacactatatacatcactcctaatcttccttcatttaagaatgtacttcatctttcagcccttgacaattgagatgattgtttgtcatcaaagcccaattcagatgctgccttttctgtcatgcttgtccatttctctttgagttaatttattttactatttgcatttctgcaacactttatatttcaattgaagcaattaatttgctttttgccctatctctaagtctgttggganatgattttgtttacccccacaagttgcaagccccttggggaatatgggctcaggtcctatttcctttgagtttttcttaggtttagtgggacggaaatggcattttgttgggattgnaacggggttgnaaaatttttccg

SEQ ID NO: 303186 - DNA, 167 bp, Homo Sapiens
gggaatactcaacctggcattactgtggagcagtaaacaagaaatctaaaaacaattagtatcccatctttaataccttctcactctgttgtgacttgattttgaccttctgaaatgattcctcagggtataggtattcatgttttttttccccaagaccctatccc

SEQ ID NO: 303187 - DNA, 354 bp, Homo Sapiens
tcatagtttgaggttttagatttaagtctttaatcaattttgatttcaattttgtgtatgacagaatagagtggggtagtttcattcttctgcatatggatatccagtttccccaacaccatttatttaagagactgtcctttacccaattgtgttcttgggcacctttgttgaaaatgagttcactgtagattcatggatttctttctgggttctctgttctgttccattggtctatgtgtctttttttatgttagggaccatgctgttttgggttactatagttatttaggtataatttgaagtcagggtaatatggattcctccaattttgattttgttgtgtagggatag

SEQ ID NO: 303188 - DNA, 373 bp, Homo Sapiens
  misc_feature (288)..(288): n is a, c, g, or t
  misc_feature (342)..(342): n is a, c, g, or t
tatcttctggagttataaatcagaccagcctctttccaaactgaagtgatggtacaatacctcatttttgagccactagcacctgcagttgcttttttactccaattttatgagaaactatggcagaagttgtgctgtcgaagcccccaacaagcaggtcaaatggcattagtagatctccatttgacagcctgggcttttgttgggatttccatgggacaagaaaatgcagtgcccttcccttttcctctcaacaccgctgaggaatatctgctgtcaaatggatgncaaattaaaataatatgggacatggcaattactttaaatattccgggggtcttntgaggctcttgggaaatggtaacatgaaggc

SEQ ID NO: 303189 - DNA, 265 bp, Homo Sapiens
actggaaaggcaaagtgaaatatcccatattcctgcaatgtttaggaaagacctattagagggagacctacctagtatcaaacatgactggttttccattcaagataaatgtcagattttgatactgtatagggtaagaagttaactgctgaggagatggagaactttcatattttctatctgaatatagagagacacactcaaggaactgggaaaaccaaaccagttagttgtgaacttaaaattgcaactaggtctcaatcca

SEQ ID NO: 303190 - DNA, 312 bp, Homo Sapiens
  misc_feature (65)..(65): n is a, c, g, or t
  misc_feature (68)..(68): n is a, c, g, or t
  misc_feature (135)..(135): n is a, c, g, or t
  misc_feature (152)..(152): n is a, c, g, or t
  misc_feature (188)..(188): n is a, c, g, or t
  misc_feature (267)..(267): n is a, c, g, or t
taaaatgagccaccagtgttttacaaagttgaataaagcataagagattagtctgccctcagggntgngaaggggcagaacctgaaaggacactgtgtgctcctgggctggttcgagctgaggctgtgctgtttngaactctgctgtgtttnttgtgtgaagcacagtctgtgtgcttcctttccttngtcccagacctttgctgcttaagctgtggagttgtcctggtctgctcactccaacctccctggaccgatgctgacaatngcatctcccctacagctcacagccctgtagtcacctcaccttctt

SEQ ID NO: 303191 - DNA, 306 bp, Homo Sapiens
  misc_feature (125)..(125): n is a, c, g, or t
  misc_feature (185)..(185): n is a, c, g, or t
  misc_feature (227)..(227): n is a, c, g, or t
  misc_feature (251)..(251): n is a, c, g, or t
  misc_feature (256)..(256): n is a, c, g, or t
  misc_feature (263)..(263): n is a, c, g, or t
  misc_feature (268)..(268): n is a, c, g, or t
  misc_feature (283)..(283): n is a, c, g, or t
  misc_feature (294)..(294): n is a, c, g, or t
ttcagaggaggttttatcaggattttaatttaaggtttcaaacaggggaagacaggaaattcaaagcgtgacgggataaaactcatgcctccctttgtccaggcttatcagaagtaatacatctnctctgaatagcatgaatgaatcaatgtgcagttttatcagatggcatcatggataaagangataatgctgccttttctgtctctcaggctgtttccatgganacctctagagccaaataaaagctnaccantcatttngccanagcttgccttggctncatagactggntattttctttaa

SEQ ID NO: 303192 - DNA, 193 bp, Homo Sapiens
  misc_feature (41)..(41): n is a, c, g, or t
  misc_feature (75)..(136): n is a, c, g, or t
  misc_feature (144)..(144): n is a, c, g, or t
gaaaagtgttattgtatgtattacagtttcaattgtaaagnattagaaagtattattgtagaggttaagtgagannnnnnnnnnnnnnnnnnnnnnnnnnnnnnnnnnnnnnnnnnnnnnnnnnnnnnnnnnnnnntggtatcnttgcaataattattaccgtagtattctcttaggtcagtgcctaaggaaa

SEQ ID NO: 303193 - DNA, 351 bp, Homo Sapiens
  misc_feature (76)..(76): n is a, c, g, or t
  misc_feature (315)..(315): n is a, c, g, or t
attttttaaagggaaatgaacattttaacctttttcttttgagactcttaataaaatcagcttcataaatcagagntactaataattttatctattctgtacttcttaattttttcctaaattaccaaccaccatatctattttatttgaatattcttggtttgcttatgatatcctgtgaaattgcatttgaactttatagataaaactatttaagtctcccacaacgggaattccatgggaactttaagtactataaactttcaataagggcaaaagcctatgaaaattattgttacttgatccctctgtgtntccattttcttatccatgtgggtgggtaaattttaa

SEQ ID NO: 303194 - DNA, 359 bp, Homo Sapiens
  misc_feature (191)..(191): n is a, c, g, or t
  misc_feature (289)..(289): n is a, c, g, or t
  misc_feature (294)..(294): n is a, c, g, or t
  misc_feature (315)..(315): n is a, c, g, or t
aataatcactcaaagttactgtgtttgatatttgacaaataagcaaaaccttaaggacacacttaggctacagaagaaaccattttacaatgtattgaaggtttgccaaaatggccttatggttggggaaaatgatgtgtaatacctgtaaaatcagaaatcaaattttcttggattttctttgcaaaaangaaactccattttaaagtctatgggagattttgattttaaagtacagtatttgggggctccataggggactgtgacttgttataaattcaaattaggnttccnatttttacatattgccttttncatggcttcaaaaacctcacttcattcccggcggcttttagggt

SEQ ID NO: 303195 - DNA, 297 bp, Homo Sapiens
  misc_feature (190)..(190): n is a, c, g, or t
  misc_feature (245)..(245): n is a, c, g, or t
  misc_feature (252)..(252): n is a, c, g, or t
  misc_feature (266)..(266): n is a, c, g, or t
  misc_feature (273)..(273): n is a, c, g, or t
  misc_feature (279)..(279): n is a, c, g, or t
atgagcatgcacccagctattctatgacttttaatggtcatcatcctctatgtttgtacaaagcatcttggatacaatgagtcatgacattcttttaacacccaatgttgggcagaaccatggtgtatcattggactaggccagaaatttgtaaattctctcttcgcaaaacactgtgattgaaccaggntgcaggccaggatggagaaggccatctcatctattgtcaaaaggcccaccatttnaggggtnctgctaagcaaatnttacttngccctnttatttttataaatggag

SEQ ID NO: 303196 - DNA, 417 bp, Homo Sapiens
  misc_feature (69)..(69): n is a, c, g, or t
  misc_feature (363)..(363): n is a, c, g, or t
  misc_feature (379)..(379): n is a, c, g, or t
  misc_feature (385)..(385): n is a, c, g, or t
tttaaaagcctacctatggacaaaaaagggcgaaggggaagggagctgacactatccctcccgcagttncagccctaatagtgggttctccagaagctcgccaggcattcatttctccaggggagcgcccttacttggaggtagcgctgcttggttttctcgcccgccagcgttgagttcaggtgtgcaggctaccaacctgtattcttcaggtaagtcaccctcctctgactcgcctcccaccctgctccctcctgcctcgcgaccagtgcgaagggagtccccgaactgcgacacctcccggggcagccgcaccggtatccgtccgagtcgacccacttgccgtggcttttcacctacggnagtaaaagcaagtttnattttnaaaagggagaggaaggcaggttttcacaagac

SEQ ID NO: 303197 - DNA, 137 bp, Homo Sapiens
  misc_feature (65)..(65): n is a, c, g, or t
aattacattttacaaaaatatttattgtttccttatacatttctaacattacaagattatcaatnttttgacaattttcaaaagacaggaaaaaaatcacaattttacccattaatgattatgaacagcacatggca

SEQ ID NO: 303198 - DNA, 115 bp, Homo Sapiens
  misc_feature (35)..(35): n is a, c, g, or t
  misc_feature (37)..(37): n is a, c, g, or t
  misc_feature (51)..(51): n is a, c, g, or t
  misc_feature (71)..(71): n is a, c, g, or t
cctacactacatcactggaaggccttaggtatatnanaccacctaggactncccaaagacagacacctgantagaggtcctgtcccccttctaccagcccctacagagtacatat

SEQ ID NO: 303199 - DNA, 318 bp, Homo Sapiens
  misc_feature (29)..(29): n is a, c, g, or t
  misc_feature (59)..(59): n is a, c, g, or t
  misc_feature (65)..(65): n is a, c, g, or t
  misc_feature (71)..(71): n is a, c, g, or t
  misc_feature (99)..(99): n is a, c, g, or t
  misc_feature (107)..(107): n is a, c, g, or t
  misc_feature (115)..(115): n is a, c, g, or t
  misc_feature (117)..(117): n is a, c, g, or t
  misc_feature (132)..(132): n is a, c, g, or t
  misc_feature (138)..(138): n is a, c, g, or t
  misc_feature (166)..(166): n is a, c, g, or t
  misc_feature (174)..(174): n is a, c, g, or t
  misc_feature (225)..(225): n is a, c, g, or t
  misc_feature (274)..(274): n is a, c, g, or t
ccctatcctcacaagtattgacaactttnattagtgtaggcaaaaaacaagcagtaagnaaatantaccanccaatgaactcatctccctgtcaatgcncagggatncttcatantntcattgtgtgaaaanaagtanttcaaaaccacattttggaacttttatnctgagccntaaagggactgtgattttgggacctcagtcactaacaggcagctgtaaccngggcagacatagcctggatttccctgactacaggattaggccttttatncccccctaacttacactggctttgctaaatgctggcaaataact

SEQ ID NO: 303200 - DNA, 347 bp, Homo Sapiens
  misc_feature (162)..(162): n is a, c, g, or t
  misc_feature (166)..(166): n is a, c, g, or t
  misc_feature (170)..(170): n is a, c, g, or t
  misc_feature (185)..(185): n is a, c, g, or t
  misc_feature (194)..(194): n is a, c, g, or t
  misc_feature (211)..(212): n is a, c, g, or t
  misc_feature (218)..(219): n is a, c, g, or t
  misc_feature (236)..(237): n is a, c, g, or t
  misc_feature (257)..(257): n is a, c, g, or t
  misc_feature (295)..(295): n is a, c, g, or t
  misc_feature (305)..(305): n is a, c, g, or t
  misc_feature (310)..(310): n is a, c, g, or t
  misc_feature (319)..(319): n is a, c, g, or t
gagaaagcctggatgaggttgcagtggatcttctgggaagtcctttcctagtggaggcaactgagattctctgtttggcagttttatattttatccattatcccctttcttgttgctttgactaatctggggagttgacccttcgaacatataactaattgntctntgantttccttaactaaanataagctgnattccaagatggacctnntacaannccacagagatagaacanntgtcttttagaccctttttnctatgagctttcaaaaagaaggcagggaaagagagganggaacaaganggganaggaaaaancttcggtctttccgacttgtgggcacgt

SEQ ID NO: 303201 - DNA, 422 bp, Homo Sapiens
  misc_feature (366)..(366): n is a, c, g, or t
cattgacttgtccgatcatagtcactgaattagttgaaaaggcaagtctaggaccagtcaagtcttctggatcccaatccccacccacacacccaaatattacacagataggtgcaggcatggcggagaggggcccagggggaattaagggctttgtaaccagcagtgaattgccaaggaatcccagggaaccataaaaatgtcagtgagtgaaaccgggttttgctaaaagagtatgtgtttttcaaaaaagattccaatttctaatgggcattagtattccaaggcaggctggaatcccgggctgggaaaaagggtacaaatgatgattggctcattaggcaaataggaatacaggatgtttcnggttcatttttgcctgaggtggcaccaggcaccttcaggggaggcccaccagctta

SEQ ID NO: 303202 - DNA, 115 bp, Homo Sapiens
  misc_feature (48)..(48): n is a, c, g, or t
  misc_feature (95)..(95): n is a, c, g, or t
agtgaattttaaaaatcaaaatttatggggatgtacctaaagcagggnctcaaagagaaacatacaggctgtaaatgtctatattttaaaaaggnttcacatcaaataaataacc

SEQ ID NO: 303203 - DNA, 396 bp, Homo Sapiens
  misc_feature (111)..(343): n is a, c, g, or t
  misc_feature (349)..(349): n is a, c, g, or t
  misc_feature (368)..(368): n is a, c, g, or t
  misc_feature (375)..(375): n is a, c, g, or t
gaagcaagaaaatatgttccacacccatgattatgtgattgtatacccaggcctttttatcggtgtgtgtaataataaaactggtgttaaaatgtagtacgtatttgccannnnnnnnnnnnnnnnnnnnnnnnnnnnnnnnnnnnnnnnnnnnnnnnnnnnnnnnnnnnnnnnnnnnnnnnnnnnnnnnnnnnnnnnnnnnnnnnnnnnnnnnnnnnnnnnnnnnnnnnnnnnnnnnnnnnnnnnnnnnnnnnnnnnnnnnnnnnnnnnnnnnnnnnnnnnnnnnnnnnnnnnnnnnnnnnnnnnnnnnnnnnnnnnnnnnnnnnnnnnnnnnnnnnnnnnnaggctnaggaccacggcacttgcantccagcngggggttgacagttccgagga

SEQ ID NO: 303204 - DNA, 397 bp, Homo Sapiens
  misc_feature (328)..(328): n is a, c, g, or t
  misc_feature (360)..(360): n is a, c, g, or t
  misc_feature (374)..(374): n is a, c, g, or t
  misc_feature (382)..(382): n is a, c, g, or t
gaagtttcccattagaagagacaagtgcttcctacaaaaggaacagaatgtggaccaccttttctttctccaaaaccaagacccaaatgagggagaacttatatgagtgaattgtacttccagttcacatatcagctatttctaggaatcagtattacacataaatctgaacagaaatacttcttataaaagaggaccactaacttctcgtatacaactgcctgaggaggacactcaaccttccttgtctcatttgggcctcacaatggaccagctggtaatgtgctttttaaggaatctccacccgaggattcaactccttctcaanggggcctcatttttcacttggggtgggtcatncactaactttatcnagggcggngaggaggcggaccct

SEQ ID NO: 303205 - DNA, 174 bp, Homo Sapiens
tcagtaggaatctttgacaatgagccaagtacagcattgctagtgtacaggattacttttatttctttagttttaacagtggtttctggtaacatatctgtagggtgtcggttctcagggaacttttcacctggctgtaatccaattaacgttatttggtgtataaattgcttt

SEQ ID NO: 303206 - DNA, 165 bp, Homo Sapiens
  misc_feature (72)..(72): n is a, c, g, or t
  misc_feature (84)..(84): n is a, c, g, or t
  misc_feature (91)..(92): n is a, c, g, or t
  misc_feature (120)..(120): n is a, c, g, or t
acccaagatatcagatggcactatacacatgacattgaaagtgcatttacattacttcaaaagctcattttnggcactgctgantaaccanngaaaataggtagtttcaagtttttcccngtagattttaaccccaccccatcatcatttcagaaacatacacac

SEQ ID NO: 303207 - DNA, 210 bp, Homo Sapiens
  misc_feature (94)..(95): n is a, c, g, or t
  misc_feature (111)..(111): n is a, c, g, or t
  misc_feature (150)..(150): n is a, c, g, or t
  misc_feature (165)..(165): n is a, c, g, or t
  misc_feature (170)..(170): n is a, c, g, or t
  misc_feature (185)..(185): n is a, c, g, or t
  misc_feature (199)..(199): n is a, c, g, or t
taatcataaaaatgttagcccatcccacctatcaatacaaaatggttcaagaatataatcctctcttgaggacatttctgtcagtattcaaganngaccatctagatctcngtgtcacatctgacacctcaaaagctgactggaaatttncgggttttggaaaanatagntcttcaagtaaaatnttcatttcatactnaggctattcag

SEQ ID NO: 303208 - DNA, 163 bp, Homo Sapiens
tgaatagtcaactgttgtgactatttcgatcactttttgtgcacagacaattgtaattgggccttttgagggtaacgtttgggaaatgagcattctgagaatttggggtggcttaaggaacgtatatcacgttactcatacccaccaaacatgtatctccttt

SEQ ID NO: 303209 - DNA, 208 bp, Homo Sapiens
aaattacattttaactaatttgaaatttaattcaactcattttaagcgttagacggttttgtgagtctgtcaattgtgtaaaaaatgtattgaggtaatatttatattgaacaaaatagataaaactttaaattataattaggaatatttattgagaattttttctgcagtttgtgtccgagatttatttcaacattgactgactttt

SEQ ID NO: 303210 - DNA, 331 bp, Homo Sapiens
gcttagtgttaaaaagtcctgaaggaaaatgcatacttgggcttatttctagctccatctacctgaatgctatgtgagctgtagtactatgagatcccaatctgatttcaggtggaagacacagccaaatgaatttgtttgtttgtttgtttgaggcagggtctcactgtttcagacaggctggaatgcagggtcatgatcctggaattctgtaaaaaggctactgccaaaaagaagactgtgatgaggcttcagtgctttgagcccagttgcaaatctaagagaatgctgcctattaagagaagcaagcattttgaaccgggaggaggaa

SEQ ID NO: 303211 - DNA, 202 bp, Homo Sapiens
  misc_feature (14)..(14): n is a, c, g, or t
  misc_feature (115)..(115): n is a, c, g, or t
  misc_feature (159)..(159): n is a, c, g, or t
  misc_feature (182)..(182): n is a, c, g, or t
cattaaaatatggnaagccactgctttgactggcattgtccctgccctactcctaaactgttcatagcttaaatgtgaaggtcattgtttaaatgtcaatttctccgagaggggnctccccaaacaccctataggatgcagagagctcccctgcatccnattattctccctctcagcctctnatgtatactcttggctctag

SEQ ID NO: 303212 - DNA, 420 bp, Homo Sapiens
  misc_feature (155)..(155): n is a, c, g, or t
  misc_feature (342)..(342): n is a, c, g, or t
gcctcaagaacttgctgctttttctggaagaaataattcatgtgatggtaggatttgtcctttttacattcaggtagcatcagaagaaacagtgatttgtttgctgtcttttgtaatgtttttaacacaataggtctgcccagtttcactcaggnattgctcctttcatttatttctgaaggtatcaaagcagagagagtttcttttaaatgaagagaattcaaatgtagaaatctacaaactacaaaaatatatgtttactttttaaaatttagacatccttcccacagaattctgtccgactgaaacttcgtatgtaaggagatgggctgaggcctctgnagccatggccgagcctggggtttggatgttggtgtgacttcaaatctctttgtacccgcaggccgcattgacaggttt

SEQ ID NO: 303213 - DNA, 312 bp, Homo Sapiens
  misc_feature (62)..(62): n is a, c, g, or t
  misc_feature (65)..(65): n is a, c, g, or t
  misc_feature (79)..(79): n is a, c, g, or t
  misc_feature (192)..(192): n is a, c, g, or t
  misc_feature (277)..(277): n is a, c, g, or t
  misc_feature (291)..(291): n is a, c, g, or t
aaaaaagctacgaaatggataaaacattggagaacagggagaaacctaagaaatacacaganccnccatgagcttcctncaaaacagaacctacacaatgatggtttggctgctaagtgtaagctagctagatgtaggctaaaacttttgggcaaatacatactggattttcaagacatcacttaaagaccngtgacatctctgatcagtttctaaaaatgaagtatcttttcatcttttcatacaatgttccttatactatcaggcaagtgatccnatacaacatacaanagtgtcctttgtaactatccc

SEQ ID NO: 303214 - DNA, 271 bp, Homo Sapiens
gaacatgtgcaggggaactcccatttataaaagcataagatcttgtgagacttgctcaccactacgtgaacagttttggggaaactgctcccatgattcaattatctccactcagccctgcccttgacaagtaaggattactataattcaaggtgagatttaggtagagacacagccaaaccatatcagagactatagaggtaaacatacacatagggtcaattgattttggaaaagtgttgccaaagtaattcaatagggatcagataga

SEQ ID NO: 303215 - DNA, 339 bp, Homo Sapiens
  misc_feature (299)..(299): n is a, c, g, or t
gctctgcaccccgtgttcttctgcagaacacggcctcctttgtgttcccagcatggcagtgagcaagagaaggctggggagaaaccggggtggccagccccctccccgtcacccccattcacagcaggactgcagcttcaagggtgtcgtggggctcgggcagaatatggggttcagggtggctgctgggggccctaggcattgcttgggagatggctcattgcgggtggctctacgtggttgaccggggccctgggaggaaggcgtctgggggctcctgcgtggcttcagtgagcgtngcagaggacaggtctacacgggccaggcgctgtttttgct

SEQ ID NO: 303216 - DNA, 264 bp, Homo Sapiens
  misc_feature (106)..(106): n is a, c, g, or t
  misc_feature (235)..(235): n is a, c, g, or t
acatgccaccacgcccagctatttttttatagagatagggtttggccatgttgcccaggctggcttcaaactcctggtactcaagcaatccacctgccttggcctncccaaagtgttggaattacaggagtgaaccaccatgaccagccctaatttccctttctatccaaggtgctttcaagtatggtttcttaccttacatcagtaggatattagctttcagggaatgggaaantcattttaacattttgcctaattaaaatt

SEQ ID NO: 303217 - DNA, 376 bp, Homo Sapiens
  misc_feature (252)..(252): n is a, c, g, or t
  misc_feature (346)..(346): n is a, c, g, or t
agttattgaattctagaatatagtggttgctttgcattattactgtatatagtgtatttgtgcttattttatagtttatggagcaaaatttagtatattaagccatttttgcatcttaaccagctgctgcctaattattacaggaaaatagtgtggaagttcagctattctaaatctaaaataattggttttggtacatattctctaacctttagatggtctgtagctattgagccatatatgacattcttntaccttgcagtgaatttcatagcttgttcatattggggaagttgtacatgggaagtcatattgcttgaaggtagataatttaatggctatgggnggttcatttgactgtacctgctttttaaat

SEQ ID NO: 303218 - DNA, 445 bp, Homo Sapiens
  misc_feature (357)..(357): n is a, c, g, or t
  misc_feature (371)..(371): n is a, c, g, or t
  misc_feature (378)..(378): n is a, c, g, or t
  misc_feature (396)..(396): n is a, c, g, or t
  misc_feature (422)..(422): n is a, c, g, or t
  misc_feature (432)..(432): n is a, c, g, or t
agctttcttaaagcaacatacacctgtcctaagctgccctgtggaaaagggaaacccatatatattttagatggagtagggtttttaacacccttctagcctgaaatgccctctgaaggctaatgtaagctaaagaatcttctggctatagggttgaacagagagtcctacttcacatgcaattggtacagaaaatccagtattctttcttctatcaaagtagagtttgtaagccaggggacacaaatttgtgatttccttatgctgtagcaggataatccttaaaagaataaacactggaatggaatgaatgaatgaataatggggaaaataggaactgtttaagtgatctttgtncaaaaggcagtaantcttgcnggaaattattccctcctntggggggggattaggttattcctggncggtgccccntctggctaggggg

SEQ ID NO: 303219 - DNA, 403 bp, Homo Sapiens
  misc_feature (355)..(355): n is a, c, g, or t
agatggtaaatagccttccttgggattactatcaagtattcattttaacaacattaatttacaacgtgctatcccactttacattgtgctacatgacttattcacagagccagcccttcggcgcctgatgttgattcattctaatcaccgcacttgcctatgatttttaggttaatgggacctgggactggaaaaggattgtttgtgtgggaatcattcatggcaaaggcagtgacacctccttcaaaaacctgtgtctttctgggcagagtgttgctgggagatggccactgggagaggctgagtcaaatcaatctcctcacctgagggacttcctaagaccagcgcactggangggccagcaggcaacaacaacattaatgctaatggttccctttttggg

SEQ ID NO: 303220 - DNA, 293 bp, Homo Sapiens
  misc_feature (260)..(260): n is a, c, g, or t
  misc_feature (266)..(266): n is a, c, g, or t
tcagggatctcatacctgccttttaagatgaaatgtattttcatatgaggctttaaattctctgaaaaaagtaatttatgaatcatggtcagatttgaaaatattccatcgatgccatagatcttgagggagagtcagtcactcaatcagaatgcgctatcaggtggtcatggagagaatgtgatgatatgcatctcacttgtagccacttccaaaatctgaaatgtacacccttttatagggagctgtcttggtctggngattanttaccagcatgggttatcctgttgcca

SEQ ID NO: 303221 - DNA, 556 bp, Homo Sapiens
  misc_feature (414)..(487): n is a, c, g, or t
  misc_feature (492)..(492): n is a, c, g, or t
  misc_feature (498)..(498): n is a, c, g, or t
  misc_feature (512)..(512): n is a, c, g, or t
agtccagtaagcaccgtcaccttttgcctaatgtaccagagcagcatctaacctcttctagctcttggccctttaaactgttctacccacagtagccaggataatctttacaaaacatcaatatgatcatatcactagcctgcttgaaaccttcggatgatttcaagttgctctgagagtcaaatccagtattctaatgctctctgtatctggcccttgcttaactctccagcttcatattttactcctctatcaccctcattcactctgctacactagccttctagtcatttcctcaagctgccagttcttttttgctgtagaacagagctgttcaatagtacattctgatggaagatggaagtagtctatatctatagtgtctgggtttggcttcccgctaggccccgtgtnnnnnnnnnnnnnnnnnnnnnnnnnnnnnnnnnnnnnnnnnnnnnnnnnnnnnnnnnnnnnnnnnnnnnnnnnncgggngtaatnttaataggccacgnattgggtaggtgtaatttggacaatgcatttctagtgctttttt

SEQ ID NO: 303222 - DNA, 409 bp, Homo Sapiens
  misc_feature (367)..(367): n is a, c, g, or t
ggcacgagctcacagactagcacctgaccctactgcccttgacctgaagttccaagagccaggttaaatatcctgcttaaattaccctggatttttctgtctttacgtgaccaatcccctgctacagccttccaaataagactcacaggtaatcagaccaacaagtgatggtctcacatggctacaaaataaatattttttgtttttccccctcttcctatcttacaacaggggaatggtggaaatttaaaggagtaaaacacacagatttaggggattttgtgaagctaaacacctcagagagtttaacctttgtaggctttgaaggaaaagagtgcaaacatcagagttctggcagcccagcagnggagcacctgccagtttaagtgtgttaccacatagggttttt

SEQ ID NO: 303223 - DNA, 370 bp, Homo Sapiens
  misc_feature (115)..(115): n is a, c, g, or t
ataagcaatacaaggaactaaagagatgcagaccaagttggaaatgtatgaacttccttctctccagtctccagttccagctgtttcctcctgttatcaagctgggtgctgaggngggtatctagcccagtaagcttagtgtgctgttattaaatactttctaagtaagtggctcaggctctcctgagtgcccttctgttcctcagcactgaggttgtaaggtggagccactgacaatgaaaacagaagatcacgctgctgaaaaaccctatgtgggtacacacttaactgggaggtgttctctgctggggctgcaggaactctgatgtttggcactcttttccttcaaagcctacaaagggttaaactc

SEQ ID NO: 303224 - DNA, 163 bp, Homo Sapiens
  misc_feature (97)..(97): n is a, c, g, or t
  misc_feature (136)..(136): n is a, c, g, or t
atcagggtatgatttatgaattgtggaacctgggattatgggagagtctggcttcaatcaagggctgaaattccatttccactgacattctcttccntccccatcccccggtttctgtcctgcaacagggtaacanggaagggggcccttaggcatatgggac

SEQ ID NO: 303225 - DNA, 364 bp, Homo Sapiens
  misc_feature (103)..(103): n is a, c, g, or t
  misc_feature (252)..(252): n is a, c, g, or t
  misc_feature (318)..(318): n is a, c, g, or t
  misc_feature (327)..(327): n is a, c, g, or t
  misc_feature (343)..(343): n is a, c, g, or t
tgagtatggtctaaaacgttcgatgatctgttcaaatagctattggttataaaactgtgtaacaaaaagttaccatgaagctggtccaatgatttcatatttnactaaatcacaacagcacccacaaataatgcttagtgcacatggagatttttggattttctgaaataactctggcctaaagtttgagaaatactgcctaggaattcctatcacaattgggtaatgacatgaaattcttaaggataaaanatattaattcctaggaataagggttttcagtgggtcttatggttaatcaggacaattgtatttatntttggggtnggaatggaacttatcnttcatccctgcaggaattacc

SEQ ID NO: 303226 - DNA, 413 bp, Homo Sapiens
  misc_feature (67)..(332): n is a, c, g, or t
aaataatgaaagaatagttgtattattctgggagtcggatagatcttcttaatttcggaaataacannnnnnnnnnnnnnnnnnnnnnnnnnnnnnnnnnnnnnnnnnnnnnnnnnnnnnnnnnnnnnnnnnnnnnnnnnnnnnnnnnnnnnnnnnnnnnnnnnnnnnnnnnnnnnnnnnnnnnnnnnnnnnnnnnnnnnnnnnnnnnnnnnnnnnnnnnnnnnnnnnnnnnnnnnnnnnnnnnnnnnnnnnnnnnnnnnnnnnnnnnnnnnnnnnnnnnnnnnnnnnnnnnnnnnnnnnnnnnnnnnnnnnnnnnnnnnnnnnnnnnnnnnacaagactcttaacatccacacacaaccacacacctacctaccttacaaagtattagatgtgtttactttacataaaattt

SEQ ID NO: 303227 - DNA, 219 bp, Homo Sapiens
  misc_feature (47)..(47): n is a, c, g, or t
  misc_feature (81)..(81): n is a, c, g, or t
  misc_feature (83)..(83): n is a, c, g, or t
  misc_feature (87)..(87): n is a, c, g, or t
  misc_feature (140)..(140): n is a, c, g, or t
  misc_feature (142)..(142): n is a, c, g, or t
  misc_feature (145)..(146): n is a, c, g, or t
  misc_feature (148)..(148): n is a, c, g, or t
  misc_feature (188)..(188): n is a, c, g, or t
atttaccttataaacaatcatgtcattagtaaatagagatgagtttnatttttctgtatagagaatggttatttatttatntntgtncttttcctgctccttctcctgaggcagagaatggttttatttgtgtggtcctntnctnntncttgccttactgcattgcctaggacatctactacaaagtngaatagtaatgggcagagtaggcatccttgc

SEQ ID NO: 303228 - DNA, 270 bp, Homo Sapiens
  misc_feature (31)..(31): n is a, c, g, or t
  misc_feature (115)..(115): n is a, c, g, or t
agtgcaattaaaaattcaaaatgtcattttncagtgcaattcggcctgaaatcaacctgttttatggtaattatgggctctggcaccagaacatagcagagctttagaaacattnaatgagtgattgagtccaacctccataaatgtgaaacatatgaaatgatttgggtaaagtaaaaaccagagagcgttgtcaccctccctaccttgagctatgcataaagctgcgttaatgtagtggagtagtcatatcagaatgagggagagggt

SEQ ID NO: 303229 - DNA, 536 bp, Homo Sapiens
  misc_feature (11)..(11): n is a, c, g, or t
  misc_feature (423)..(423): n is a, c, g, or t
  misc_feature (451)..(451): n is a, c, g, or t
  misc_feature (477)..(477): n is a, c, g, or t
  misc_feature (487)..(487): n is a, c, g, or t
  misc_feature (503)..(503): n is a, c, g, or t
taccttctaanatttacatgtgtgtttactgaatgggtatgattatgtctccttttaaaagtatactggaggcaaaactttttttggcaagttaacttagatggagagagacctttaggagattttctcttttcctctgaggttattattggtggctgaattggaggttttagcactgtgttgtgttaaagatggctacactgttagggctttggatagttagactacccagaagcaaggaaagtgttgaggtgtggcctttcccatttaggccaggggactctgaatataatcaggaaacaccgcctgcctagtttggagtagattgcacttggtgttggaggaagggacttaggaactaaaaaggatccattacctctaaaggaagacctgttagaattaaaaactctccctcaagagatncataactgttttctaaaggtcaaattcntttcgggaaacttcggttatttatcngtgcttcaanattcatttcttcactntatatagttcttagtttcattttgttacccttc

SEQ ID NO: 303230 - DNA, 276 bp, Homo Sapiens
  misc_feature (160)..(160): n is a, c, g, or t
  misc_feature (245)..(245): n is a, c, g, or t
  misc_feature (255)..(255): n is a, c, g, or t
tgggctcagctttgtgccgtccagcctattgacacaaacatgtaagatagtcttgcctccttacagcaaggttaacattttaagatcagagacaacaacacattaaatatgaaaagccaccacagatttgacaagtgatcttttgtttcaacataggtancaggtattttcaaactaaccggactcaatgtgaaaaatgcatagggaaagggcttcttgtctttcctctattttgaggccatccnggaacaatgnaaacggttggttaccaacaac

SEQ ID NO: 303231 - DNA, 312 bp, Homo Sapiens
  misc_feature (138)..(138): n is a, c, g, or t
  misc_feature (174)..(174): n is a, c, g, or t
  misc_feature (241)..(241): n is a, c, g, or t
  misc_feature (248)..(248): n is a, c, g, or t
tgtatgattctcaatatgtagttactcaacatattataaagatggatttgattgatttgatatagttattctccatattataaagatggatttgattggattccatctgggtagaactatattgtgtagatgagtgtncttcagatagctccttaaggtcactacttaatttgnggttgcggagacgggagcattctccacattatcacttccagttcctcagcttttgaatagggttttnatttgangagagggatattgtgggccgataaatgattttaaatggattgatgtaggataccataaaatgta

SEQ ID NO: 303232 - DNA, 426 bp, Homo Sapiens
  misc_feature (346)..(346): n is a, c, g, or t
  misc_feature (370)..(370): n is a, c, g, or t
  misc_feature (407)..(407): n is a, c, g, or t
atcattccatcagtgctaccaaaaaataatgtaaggcagcaaatgactcattaggttattggaaaagccagaattagaactttagttcaaccattcctacccgtaccattccttatgcattttctattaaagaacagtgagagaaatagccatgaaatcaaccagtgaaagtctcaggacagctagtgtttatctgattatgtgactcaatacacataggaaaaagatggttttttctctttactaaaacaaaacagaaaaaatgtgcttcgggaaacagtgtaggagttgtcattattattatcctggattgtcatgggtgggatggatatttttgggaaccggnctttgttacccgggaaccgggccntattgtgggctctggtatccccgggtgggcccagggnttttttagggggattctta

SEQ ID NO: 303233 - DNA, 132 bp, Homo Sapiens
  misc_feature (96)..(96): n is a, c, g, or t
  misc_feature (121)..(121): n is a, c, g, or t
cgcccggccttaacatagggattttcatcctagaatgactttttcccccaaaaagatttcaattttaggggctcttgcttttagggaaatttcccntgggggtttgcacaaaagagggganggggaacaatt

SEQ ID NO: 303234 - DNA, 389 bp, Homo Sapiens
  misc_feature (292)..(292): n is a, c, g, or t
  misc_feature (327)..(327): n is a, c, g, or t
  misc_feature (334)..(334): n is a, c, g, or t
  misc_feature (344)..(344): n is a, c, g, or t
  misc_feature (351)..(351): n is a, c, g, or t
  misc_feature (358)..(358): n is a, c, g, or t
gaagatcatgtctaacatgattaaaaccattactaaagccaaagctcattaaaattgcttgtgggagaagttatgtgaaacactttctatttgctttataataaatgcaatttgaaagtaccatgaaacagaagggaaaaaagttgataagaaagtttaaggagtaaaccatggcacattacagtttcttaacctgcactgaccgcattgctggtgcctgtaatacttcagagtttggggcaaagagagtgagattgtcttgccaaaagaaaaaccgggtgtcagttgcagngcacggggatggcaattttaaaggtgttgggtgcnaacgttncttgttgtgnacattanaaaggcnaatcagtgccagtgtcttttcccgcttttcc

SEQ ID NO: 303235 - DNA, 154 bp, Homo Sapiens
ttctttcaaccactgatttacaagcaagtgggtttccaagaaataccatttctaaagttctcatccttaagtttccccaatgtatctgtaaaacaaggcagaggaatgttctgtcagtgttggaatggtcgcaggggcttctgcttagactttg

SEQ ID NO: 303236 - DNA, 325 bp, Homo Sapiens
cagctaagccaacaatagatcagtggttgcttatttaatatacataatactacctatacttttatctttacctaatacatatgccatacacaacgattttaaagttgtgattgagttgagtgaaaaatcttttagaatacccacgaacagacataaaattttcattgatttctgtgaatagtaacaacaatagcagtaaacaattgaatgaccctcttctcaactggggattctgaggaatggggtttcagggaagttttcgtttttatgtgtgttctgaaactatggcaattcaggaaagggatgaaggggccagacctgccct

SEQ ID NO: 303237 - DNA, 342 bp, Homo Sapiens
  misc_feature (244)..(244): n is a, c, g, or t
  misc_feature (252)..(252): n is a, c, g, or t
  misc_feature (276)..(276): n is a, c, g, or t
  misc_feature (286)..(286): n is a, c, g, or t
  misc_feature (303)..(303): n is a, c, g, or t
taacttcattaattgctaaatttaatattcataaaatttcaagatggaaataattttttggtcagattcctgagtatgctgagaaatcacagccaaaagtatattaaatgcattactagtagccaaataaaatttaaaggcaatgttaaaaaatccatttgactactttttgcaacctaaaatacttatatttaacatgagacataggtgcattttaatatgtttgctgtgaagtgagatgaantttcaaanttaaaagtatcgaggtcctacaanagtcttaaantgggctctgtttgagtntggctctaaataagggcacgtgggttgcacagagttggg

SEQ ID NO: 303238 - DNA, 335 bp, Homo Sapiens
  misc_feature (263)..(263): n is a, c, g, or t
  misc_feature (301)..(301): n is a, c, g, or t
cccgggctagtctccaccgtgcctggcccctctgtggttactttctctggtgaagtcaaacccctcaaagtcatccatgatgattggagtcaacttttttcaaactcctctaaatgttgacatattgacctcttctcaatgaatcactaatgttcctaatggcatctaggatggttaatcctttccaaaaggttttcagtttactttattcagatctatctgaagaattactttttgtaggaagctacagccttgcaaaaagnatttctgaaataataaaacttgaaagtcagttggggcngggtgggccacacctgttaattcaaaggcagttt

SEQ ID NO: 303239 - DNA, 422 bp, Homo Sapiens
  misc_feature (238)..(373): n is a, c, g, or t
aaaaaaagacctatataaattagtttaagctaacatttagacatttactattacatatatggtatttgcaaccaaatcactgagtttgttgttgtcgttgtttgaggctgttgctctgtcacccaggatggagtgcaagtagctcaatcatagcttactgcagcctaaaaactcctgggctgaagaaatcctctcacctcagccttttaagtagctgaaacattaggtgcacaccacnnnnnnnnnnnnnnnnnnnnnnnnnnnnnnnnnnnnnnnnnnnnnnnnnnnnnnnnnnnnnnnnnnnnnnnnnnnnnnnnnnnnnnnnnnnnnnnnnnnnnnnnnnnnnnnnnnnnnnnnnnnnnnnnnnnnnnnnccccaaataggcttttacttcataacctagtgtgggcctaaatttattt

SEQ ID NO: 303240 - DNA, 106 bp, Homo Sapiens
caaaccctggccaaatatcctgtttctcatggaaacttttcacctttctgggtttatagccaaagtctaaggcagaaggcccctgcggaccctttcccaacattgg

SEQ ID NO: 303241 - DNA, 149 bp, Homo Sapiens
gtgtggccatcactaaatgaacacttaccctgtccagggaggtttattgaggcagaatgctggggcagctcagtcacaaagggaccacaagttttcgactatggacatcatgtttcaaacaatttattaattaaaatcacaaagtttcc

SEQ ID NO: 303242 - DNA, 463 bp, Homo Sapiens
  misc_feature (259)..(259): n is a, c, g, or t
  misc_feature (296)..(309): n is a, c, g, or t
  misc_feature (353)..(353): n is a, c, g, or t
  misc_feature (361)..(361): n is a, c, g, or t
  misc_feature (375)..(375): n is a, c, g, or t
  misc_feature (384)..(384): n is a, c, g, or t
  misc_feature (389)..(389): n is a, c, g, or t
  misc_feature (407)..(407): n is a, c, g, or t
  misc_feature (421)..(421): n is a, c, g, or t
  misc_feature (436)..(436): n is a, c, g, or t
  misc_feature (445)..(445): n is a, c, g, or t
attagattcccatgggcctccatggcagatgacttcacttctaatctaagttccccgtcactaagcagttgacctttgactacaaatggcagtgagaaaagaagcaaagacttcttgaaattcatcacccatttcacaagttaagccacaaattctgggggtattcttatatggaatagccataacaagttatattttaatgttgtattaaatattttgacagtaatggttttagatgtgtttctaatttctttcaaantagaaaatatattttaatttccttgattttaaaacannnnnnnnnnnnnnctacagtttttcagtgtatgactatgtggaagtttaaaagtaangcccaccntgtccctatccccnaaaataacngatgntgtctcgttgtgggtccnttccggacctggantaaatttttggccanttaaaaatncctgggttaatgggttac

SEQ ID NO: 303243 - DNA, 195 bp, Homo Sapiens
tgggataattttgagtaaaggtggagaggaaggtcaaggaggataagggctgcacctcacagggaccctgctggtcagcatgacaacactggggcagaggagccctgggtggaccctgcatagcaattcctaagcatgcttctcattctcaacctcatgcctccaattcagaaaactatgtgaaaaatgtctgca

SEQ ID NO: 303244 - DNA, 348 bp, Homo Sapiens
  misc_feature (330)..(330): n is a, c, g, or t
caggccgaagccctcagagagtgttttcatcaggaaccactctcgaacctgaaggttgactttagcgtttagaacccagggcggtgtgtgtgtttcccgttttgttttctgagtggtagcagtgatcaccgtaattccatgtagccatgtgctagcagaacccctgtgtcctcaccgtggcccgtgtgaccccagccgacgagtgcccggcggaccccgctgccttcccatggtccagtgagctgccagggcatcacatgactctcagctgtgctcttgtcgcttctgtgttgtggtgacaccatgcgctccccagggccagacctgcangcggcagtctgtggccga

SEQ ID NO: 303245 - DNA, 365 bp, Homo Sapiens
  misc_feature (55)..(55): n is a, c, g, or t
  misc_feature (77)..(77): n is a, c, g, or t
  misc_feature (190)..(190): n is a, c, g, or t
  misc_feature (307)..(307): n is a, c, g, or t
  misc_feature (321)..(321): n is a, c, g, or t
  misc_feature (349)..(349): n is a, c, g, or t
taaaagttccaggacccttcctacatcccgagacattctaattctctgccgtttntgtagcaattctttgaactgtngaaagatctcctgacaaattgttactgatattgtgttaagcaataatcttaaccttcccagtaaatgaactggaatgcccaattttaagtttctctatttatgaagaaacaanatacaggggtcatagtcaggatactgcctatggtacattttaaaatttctgggtctactaggatataatctttcttaacctcttttgagatttgatgtcagttcaagggaagcattncattgatgtcaggnaagggcagctatttgtttgactgaattnctgggtactctgggca

SEQ ID NO: 303246 - DNA, 468 bp, Homo Sapiens
  misc_feature (391)..(391): n is a, c, g, or t
  misc_feature (410)..(410): n is a, c, g, or t
  misc_feature (430)..(430): n is a, c, g, or t
  misc_feature (441)..(441): n is a, c, g, or t
  misc_feature (454)..(454): n is a, c, g, or t
gctattagtcacaaatcagatatagtaatctaatcattgctaccttgtgacacttgccatgcaaagtgggcatgggtcaatttcacaatatcacatttagcattaagaatactgacaaatagtctttaattggtaaagttgaaattcaaaagtcagcatacaaccacagaagtcacccaatcctcactatgtcccacagagaagtgtggtggatgcacgcagtgaggaacacatgtgtcccagtggtgggccctgcagtcccttcccaaccttcccagtgggaagaggaaaacattacacaggtaccagggcaatctgggtttaggtgccaacaatttatgggtatttgttcttaaaaacatcaggggaccctgcactttaaaggtttcgntggcttaaggaaaagttgnattttaattaaatttccttnacagggggagntaggaggtttttnttattgtttggttc

SEQ ID NO: 303247 - DNA, 403 bp, Homo Sapiens
  misc_feature (197)..(205): n is a, c, g, or t
  misc_feature (254)..(339): n is a, c, g, or t
  misc_feature (368)..(368): n is a, c, g, or t
tctgtctgtccttgtggttatagtgtgtcttcctaagattgcctgcctcatggaaagaaaggagacaggctgctctgaactactgctgttgacgtgagagtgatgggaccagaaactgttttgcttaactttcccttagcttaccttgcaggctgggcccaaagatgacctcttttcttgaggccctgtattattannnnnnnnngagggggttggcaatttttgattaagatgagagggctgtaggtctctgnnnnnnnnnnnnnnnnnnnnnnnnnnnnnnnnnnnnnnnnnnnnnnnnnnnnnnnnnnnnnnnnnnnnnnnnnnnnnnnnnnnnnnttcctaaggggcatagtttaggaggatanggaaatgtttacattgggaggaaacatgaaggaac

SEQ ID NO: 303248 - DNA, 314 bp, Homo Sapiens
  misc_feature (57)..(57): n is a, c, g, or t
  misc_feature (83)..(135): n is a, c, g, or t
  misc_feature (145)..(145): n is a, c, g, or t
  misc_feature (235)..(256): n is a, c, g, or t
  misc_feature (268)..(268): n is a, c, g, or t
aagagatagggtctcactctgttggccaggctccagtgcaatgctgcaatcatagancactgcagccctgaactcaggctgcnnnnnnnnnnnnnnnnnnnnnnnnnnnnnnnnnnnnnnnnnnnnnnnnnnnnngtgacttcanatgagggtagctgaagatacactgagtgtgaatgagatcactcaaagtgtatactggctggatatcaactctattccatgttgtacatgnnnnnnnnnnnnnnnnnnnnnngagacggagtcnaactctgtctcccaagccagagtgacagtgaggactccgtctcagg

SEQ ID NO: 303249 - DNA, 404 bp, Homo Sapiens
  misc_feature (352)..(352): n is a, c, g, or t
  misc_feature (380)..(380): n is a, c, g, or t
  misc_feature (390)..(390): n is a, c, g, or t
ctaatgaggtacattgaaatgaacactcatattcttcaagtagaggtatagatttgtagagcccagtctgccagtatgtgttaagagacttaatcatccatgcccattcacccaataattctagtttcatttatttatactaagaaaacaatcccaaatgctgaaaaaactttgtatacaagtacatttgtgacattgtgatttaggttctgaaaattgggaggttacttacagtaggagggaaaaaataggatcggttccaggcacatggcatttaaaaggggtattgacccgggccggggcatagtgggttcatgcctggtaatccccggaactttatgagggctgaggntggggcaggtggactttaggcccggggngttccgaggncccgctttgggcca

SEQ ID NO: 303250 - DNA, 262 bp, Homo Sapiens
  misc_feature (99)..(99): n is a, c, g, or t
  misc_feature (202)..(202): n is a, c, g, or t
  misc_feature (224)..(224): n is a, c, g, or t
tcagcattttaaatatgttatgccactctcccctggcctgtaaggttttcactgagaagtctgcttccagatgtactggagttccattgtatattattngtttcttttctctttctgcttttagaattctttatctttgacctctgggagtttgattattaaatgccttgaggtagtcttatttgggttaaatctgcttggngttctataaccttcttttattngaatactgatatgtttctctaggtttgggaagttctgt

SEQ ID NO: 303251 - DNA, 365 bp, Homo Sapiens
  misc_feature (292)..(292): n is a, c, g, or t
  misc_feature (298)..(298): n is a, c, g, or t
caaactccttcacaaagagatttctttctgagcttaatgagctaatgaagaggaaatgcctgctgcttagcatgtggtttgtgctgggtctctaaccattgatggttcttccttgtccaggcagtcttacgtggtccaagagacctgttgattcagcacaggtcttgcaaaacatttcacttatagttcagtatcttgggctctgtgcttgaagatcagttactccctggtcgtgggcagaggagacaaattaggaaaagagcaagggagacagcccttgacggcagtctgntctctnttctctttagggtgtcagtatcaccagggttggggtgtatttttgcagctggggaggagcccggtcc

SEQ ID NO: 303252 - DNA, 363 bp, Homo Sapiens
  misc_feature (165)..(165): n is a, c, g, or t
  misc_feature (196)..(241): n is a, c, g, or t
  misc_feature (260)..(260): n is a, c, g, or t
  misc_feature (282)..(282): n is a, c, g, or t
  misc_feature (293)..(294): n is a, c, g, or t
atctgaaacaaaaatttcagagattaattacctgaaattggctttatatttgcttaatagtgaagcctattaatgcacatctcagtaacctgaagactacctttaaccagtgctcaggacatgccccacactgctgaggagataaaacacagcaatctgcctgcnggagcttataatttaaagaggtgtttaaaannnnnnnnnnnnnnnnnnnnnnnnnnnnnnnnnnnnnnnnnnnnnngaagagcatcacagagganataccatgccctagagtagganacacttagggnnaggaaggacagtgtggaaaccaattgctctgcttttcatagggatgtgccaaaaggcggctgttccggg

SEQ ID NO: 303253 - DNA, 332 bp, Homo Sapiens
  misc_feature (36)..(36): n is a, c, g, or t
  misc_feature (205)..(205): n is a, c, g, or t
  misc_feature (260)..(260): n is a, c, g, or t
  misc_feature (270)..(270): n is a, c, g, or t
gttatataggcagcactcttatcaagcgagaaaaanaattctttctgaaaaatagttatcgaggaaacttaacgaaattgaaagggattaacttgtgttgtgagacaaagcataggaaatacataactcaacagaaatgattccagaaaaaagccaggcacttaaatcaacattttcactgttacagatctagaatttttaaganctctgatgataccccctcataaatgccaagagtcggctatgcatatctccacttntcaactcaanccataggacataactataagtaggcagcttgtgggcaaaatctattttcctaccacaacatc

SEQ ID NO: 303254 - DNA, 377 bp, Homo Sapiens
  misc_feature (99)..(99): n is a, c, g, or t
  misc_feature (263)..(263): n is a, c, g, or t
  misc_feature (328)..(328): n is a, c, g, or t
  misc_feature (352)..(352): n is a, c, g, or t
  misc_feature (363)..(363): n is a, c, g, or t
actggctgccctgccccaccaatctcactcaactaggagaaggcctgcccagggaatcacagactcaagcttctataggacattgcaggaaaactcaangttcccaaagcccccagaactccattctccaatccccaaaggtgtgttccagccaactagataacggaacaatgaaaacagcacccatagggagcccgtgggttgacacacaggggttaaaggaagcccaacccaaggactttaaggacccccaaagttgaaanggtaaaatgggacttcacacaattgtctttttatgggtctcccttaattacctaaaagaacagtncatgcttgcccgaacaggctgggnggaaacctttncatctcttccttac

SEQ ID NO: 303255 - DNA, 312 bp, Homo Sapiens
  misc_feature (91)..(91): n is a, c, g, or t
  misc_feature (279)..(279): n is a, c, g, or t
aaggcccattccaggccctaattcccagacagcatgacacatactgagctagaagggagcctgcttccctgaagggaaggacccagtcctngcaggattcatcccctgctgactaaagagcctttgggtcctgaataatcagcaacagtattcagacagtatttgccgtggtcctgaggtaagactcagagatgtgctggcttcaagtgtgacccaacacattcccagctgtggtggctatgaggaaggactctttctgattgagaaaaggagagggangagtaaagacttcatgttgcagttaggtgccag

SEQ ID NO: 303256 - DNA, 353 bp, Homo Sapiens
  misc_feature (241)..(241): n is a, c, g, or t
aaacttacttctgtaggatttgcagaaataaatatttataaaagtctcattctactatatctgatgactataatgtaataggtttctttgtgccttatgagtatgttctgttctgcacaaatagattctcttgcattgtagcaactagaatatggccaccttgcccttaagtcttagctatagcctgggctagagagaagatgtttgcaaccagaccttgaaccctgttggagtcctagtngagataactgatctaacactttcctgcagggaaaagtgagaacgtggagagcagcctccaaatagaccagcaaggcatttaggactacacaggacacataaaccacatcatt

SEQ ID NO: 303257 - DNA, 146 bp, Homo Sapiens
ggaaagggaattccaaaatctttgtctgtagcaatatctgaaaactagatatagcaatatctgaaaactagaagggaattaatcagatgactagaaattgatatctggaagtctggaagcaaaatcacacaactgttgcttttttt

SEQ ID NO: 303258 - DNA, 294 bp, Homo Sapiens
  misc_feature (30)..(30): n is a, c, g, or t
  misc_feature (88)..(88): n is a, c, g, or t
  misc_feature (103)..(104): n is a, c, g, or t
  misc_feature (188)..(188): n is a, c, g, or t
  misc_feature (208)..(208): n is a, c, g, or t
attatgcctccactgaattcagctccaganactacagggtgttggtgttaagtttgggaggcttctgcaattttgaagatattttctnagtttcttcgatttnnccaaaggtgaatttgaaaaaataaggccagatttctatatagaaacagagataaacatcttaaaggaataaagctgtataaatntatgaataatccttataaanccttgagtgtgccttgaaaattaatcactggattcagcaaataatggagctgctctgtcttgcctgctttcatggttttgccacag

SEQ ID NO: 303259 - DNA, 371 bp, Homo Sapiens
  misc_feature (312)..(312): n is a, c, g, or t
  misc_feature (342)..(342): n is a, c, g, or t
  misc_feature (358)..(358): n is a, c, g, or t
tgtgttcgtgtctaatctctgctaccagactgaaagccccttgaaggcaaagctagcatcttctttgatctctcacagaattgaataaggacatagaccatagactcagggtagcacatctcattcaacctcagccatgtagacctttgactcaagacctcaccattcaggggaggaaaaattagagttctgtgggtgtttggtatatctctagtttgccagagaaatacatagaattaacactacaggaatagggaaaactatgggaatgctgtggcaattaggcaaaagggggttctattatgcagcctncagaattcctgaatctatctggagaaaganaaatgctcacccttgncttcccgcttttc

SEQ ID NO: 303260 - DNA, 148 bp, Homo Sapiens
  misc_feature (61)..(61): n is a, c, g, or t
  misc_feature (71)..(71): n is a, c, g, or t
  misc_feature (81)..(81): n is a, c, g, or t
  misc_feature (100)..(100): n is a, c, g, or t
  misc_feature (106)..(106): n is a, c, g, or t
  misc_feature (129)..(129): n is a, c, g, or t
aaaaaaagcaacagttgtgttgattttgcttccagactttccagatattcaatttgtagtncatctgattnaattcccttntagtttttcagatattgcnatatcncagttttcagatattgctacagncaaagatttgggattcctt

SEQ ID NO: 303261 - DNA, 117 bp, Homo Sapiens
ggtgaatgcccatttctaaggaagattcaatatatttttagtaaggttcctatttatatgggacatcaaataattaggcaaaccctgccccaaaaggggcataaaataacattaagg

SEQ ID NO: 303262 - DNA, 394 bp, Homo Sapiens
  misc_feature (348)..(348): n is a, c, g, or t
  misc_feature (363)..(363): n is a, c, g, or t
  misc_feature (378)..(378): n is a, c, g, or t
taaccctttttatttcaacttgaaattattgttctgcttaaagtctattttaaactctcttcactgaaacagtgaggaaataattcaggtcactccaaaatcatctcaggcaagtattcagtgaccacaagaagagcctgtgaggcagatcgcctgccaggtactcataggcacgtgggtcttaaacccctgctatggttcaaagggggtcagagacgcaagtctctttccctcagggactcggaatctgggtggaaagagagaaacaatcccagagtaccacacatttcacaatattgtctaactgtgttttggattctgactaaaaaattatttttccaaaatctncccgtgggccagggncagtggctcggaccngttaatccctgcactt

SEQ ID NO: 303263 - DNA, 286 bp, Homo Sapiens
  misc_feature (249)..(249): n is a, c, g, or t
caggcctccccttaaagaagggcaccttaactggactcactcctcccatagtagactgcacagtacacaagcagaagaggagagctcaataataaagtcagcataaaggataatttttaaatgaataaagaaatcagaaaatccagtattggctagcacatatggctatcagcaagctcaccctacaaaaaaatagtgagaaaacagttcgaatattggccgtttggggcacatattctacaaaaaggnaaagttttgaaatgtatatatatttaatttaactcta

SEQ ID NO: 303264 - DNA, 138 bp, Homo Sapiens
gatgtgagtcagggctaataaaaagctatagaataattttctttccaataagtaaaaatcctctgttttattaaggaaaaaatagctatgttttaggtaaataactctgaaataaactggtacaacaattgtaaaata

SEQ ID NO: 303265 - DNA, 342 bp, Homo Sapiens
  misc_feature (56)..(56): n is a, c, g, or t
  misc_feature (62)..(62): n is a, c, g, or t
gagaactacagtttaaaaaacttatttcttgatggatagtctcgtgaaggtattgntgtgtntactcaattatgactaaccatagtctctcaagggtggcccacactaatcattctcaatttttcatcttaccagaatgctgctggtggagtcagcaggaaaagcctttctgcccctgatcaacctctacctgaggacctaaggcaatgcttttattgtagatcctgatatgcaaacagaactacagcactccagaagtaacctcatttgactggcctattagttaatggggtaaatacatgtgtaaatgaacggaatgacttaggcaaataggagttaacc

SEQ ID NO: 303266 - DNA, 416 bp, Homo Sapiens
  misc_feature (60)..(68): n is a, c, g, or t
  misc_feature (397)..(397): n is a, c, g, or t
gaaaaatagacacttattctttagcatcagagtatacagtataccatgtaatttatgtgnnnnnnnnncagaaagtattggaaggtgcagatagactggtgttcatgagcttattttattttaaatttaatttatttgtataaatttaatgagaacaagtaccgttttgttacatggatatattatgtagtggtgaagtccgggcttctggtgtattcatcaccaaataatatacattgtacccattaaataatttctcattccccatccccctctgactctctcacccttccgaggtcttcagtgtctattactccacactgtatggtccatgtgttacccatttttttagctctcactggtgaaatggaggaacatgcagttatttggactttcnggtttctgtgttgttttca

SEQ ID NO: 303267 - DNA, 129 bp, Homo Sapiens
tggaatatagagaaggaaacataaatctgcatattagacagttctgtaataaacagtacttacatagacataataatgtaaaaacacagaccaaggaagactaactatgaacagaacatgttatcaatt

SEQ ID NO: 303268 - DNA, 425 bp, Homo Sapiens
  misc_feature (350)..(358): n is a, c, g, or t
ctaagaccaatcctggtagtcacttaagtacaaaagactcactttaactggcttggtctgaaggggtcaatcctttactgcctgtacaagatctgggcagttttgctctgtgtcttgtgatgacccagctgaatgtgaaaagcctatgagttattgagcaaccagaggtccctgcattccaagttgcagtttagctctggggaaactctggctttctctttcctcaagtgtccaccactgcccatcatttgcagaaagacttggccctgcctttagcaacttccctatctccttagagtagacaagaaagaaacagatttgtgcacattttacaaagtgccttcctctannnnnnnnnaaagttttcattttgcaagggaaaaatgtattggattaggaaagtaacatttggccttatagggggt

SEQ ID NO: 303269 - DNA, 390 bp, Homo Sapiens
  misc_feature (355)..(355): n is a, c, g, or t
  misc_feature (371)..(371): n is a, c, g, or t
tataggacctaattgtaatacgtttaaatattaagtctccaccacaaaataacatgggtcatatgttacatgcatatttgttgaatgcacatgggtcaggaccaccttcatgaatattcctagcccctcctgcaacctgttaaatatgtaagttcagccaacatgttgtcatattcccacaggacctccaagcacgattgataggggagaatgtgcactctaattaagactgagtggtatgtgtacatcctagataattctggaaacaaatcctcagccctatgagacatgcataagcaaattaatgctatgtcttatcccacaatgtcctaagtcagtgggctctcctcatggnttgggtccagggcccncttgggtgaaaaaaagttg

SEQ ID NO: 303270 - DNA, 175 bp, Homo Sapiens
caaggcacttatttcttacataggggaaaaaaagtttaagtgcccttaagttatctataatatcctaagtcaaacatttcttctcatcctcaataattaattgcaatattctcaaaaatatcactgctttcctccaatgatttattaaggaatttaataaatgttgagtggattg

SEQ ID NO: 303271 - DNA, 252 bp, Homo Sapiens
  misc_feature (181)..(181): n is a, c, g, or t
  misc_feature (220)..(220): n is a, c, g, or t
  misc_feature (225)..(225): n is a, c, g, or t
  misc_feature (242)..(242): n is a, c, g, or t
cacgcccagccgggagtcagtatttctaaggtttcactctgaacatggcccccatccctcccaactctcccttggtcacttggtgcgatgagtcctctgacctccctgtttccattctctgagcccttcctgctttcactcgtccatctccagggtgggctcctagggctgtctctgcagncattgtcctcaacttttccctagggtcctccttttcctnaaggncctccggggcagaaaancaacaaaacc

SEQ ID NO: 303272 - DNA, 418 bp, Homo Sapiens
ttagaagtagtttattcttatgtaaggaataactaagactttttggagtcaggcatatatatcaacttcagacaaattagtcttggcaataaaatacaatagtaacaaattgagaaatttgcctcaaactggtccatgtattctattaaaagtaattaggtttaatctctgtcctcatagaatgcctcttacattctttaacttatttttctctggcgttaattctggttctgccctcctttaactcaagtgtggaatgttggaaatgcctctttagttggtctttctgcttgcgtttcttctttgaattaatactacatgccaccaaagcacctgtaaaaaattgttacctgttgacagaggaaatttacacatgtctggcacatttccaagtcctaagtaatctggactgtacttc

SEQ ID NO: 303273 - DNA, 336 bp, Homo Sapiens
  misc_feature (264)..(264): n is a, c, g, or t
aattactagattcctataatgtattagcacttttctttggttggataacaagggaagcacagatttgaggcagagatctctcagaggcttattgggagtgctcttagaactatcattgaagccatgacagatgcagggttggggagagtgagaaggcgaactccagtgcagtcgcaacaaaagcccagcaaattcctcagggcgggactctggagttggcagagaccttcagagatgtccctgaaatgaagcaaagatgaagangccaatcctttgtactctgggcattcattgggatttcactgggggctgcctctggggagaaggagtttaagg

SEQ ID NO: 303274 - DNA, 272 bp, Homo Sapiens
  misc_feature (247)..(247): n is a, c, g, or t
gtgtgtcttggaaattctccttaataactaaaggttaaaattgacaaccagctggtcttaatttctccttaccattagaacactcagcgatcatattgttggggttttttgttattgtttcagtcgttctcccatcggatttgaccaactctacccaatttggtcaaatctgaatgagaattccaaatcatggggaaaaaggcctctgaattggctaaaattccttgcagctgaaaacaaaacaaanacatatgtttagtttctgtgtctgc

SEQ ID NO: 303275 - DNA, 347 bp, Homo Sapiens
  misc_feature (28)..(28): n is a, c, g, or t
  misc_feature (149)..(149): n is a, c, g, or t
  misc_feature (180)..(180): n is a, c, g, or t
  misc_feature (297)..(297): n is a, c, g, or t
  misc_feature (320)..(320): n is a, c, g, or t
tggaaatagaggtattaaaactgatctnttaaacagagactaaaaagaaagactaaagaatcaaatttcttactgaatgtaaaccctgttccaatctgacccccaagaagaatggccataaaatatactctgttcttctacaatatgtntatttaatgggaataactaactcagaagcanttggtgagaatggagactggggactatgttagtataacacagaattcatgttgatggttcataatgtttcccaacacattgttctgcactgagcacaaagtgtaataatgcagccancaaggcagccaagggaccagtgncatggaagcctgtttcactccacgtgc

SEQ ID NO: 303276 - DNA, 410 bp, Homo Sapiens
  misc_feature (86)..(99): n is a, c, g, or t
  misc_feature (297)..(297): n is a, c, g, or t
  misc_feature (308)..(308): n is a, c, g, or t
  misc_feature (339)..(339): n is a, c, g, or t
  misc_feature (367)..(367): n is a, c, g, or t
  misc_feature (398)..(398): n is a, c, g, or t
ccctttacattggtggaggcaggacttgaacaccagaaatctgactccagggtccacagtcataatcattacactatgctgccttnnnnnnnnnnnnnncatttatagtacaggatttgtcacacactgtataagaatttggctactgtaccttaagttactgggcaaatactttaaacatgtcatggtacaagtaagagcaacaaacattaatcgattataaaatgtttcatctacatactggaaacaactggagaaaaacttgtccatttgtctatttatcccgaatggcacagncaccacagganaggatattgatgggtttcattcaaggtcctntaggatcccactctattgcttccggagnttattttctccagctcggttgggtgggtccngtccgattttct

SEQ ID NO: 303277 - DNA, 394 bp, Homo Sapiens
  misc_feature (113)..(113): n is a, c, g, or t
  misc_feature (274)..(274): n is a, c, g, or t
  misc_feature (308)..(308): n is a, c, g, or t
  misc_feature (341)..(341): n is a, c, g, or t
  misc_feature (346)..(346): n is a, c, g, or t
  misc_feature (365)..(365): n is a, c, g, or t
gctgctgactcttcctcctatgacagatgagttcttagttcacttacattactccctttctttctcacaacacagttacattgctcttgtaaagtcctctctatgttactttnttcactacaaataatatgactaaacgtcttatttttaatcctattagtgataggtaaattatcttgtctcctcgctttataatatgaagatagagtgcagttgcaatatgtgtgcacttagctcatacgtattagctaacttcatctgggccagaaaagangaaagtggggtatgaggaagaagtgagagagaanacgggggcaggaggaagacaggccgagggggtntgggngaggcagaactcttaaatnagtgtgaaatgatgatttccgctgccccc

SEQ ID NO: 303278 - DNA, 316 bp, Homo Sapiens
cagaatactaatgattttaatgaagatgcagcatcttgcaaacaaataattagtttttcgcatgaaaggataaatagaatcctaactaacaaatcggtaatttttcttagagcttttaggttttgatcataacaagtggcagttttatgtgtagtttgaagaatttattttgttattctatagtcaccgagagtgattataactccaaagtttgtgtaatacagtgtatgtttattttgagttaacagagttgtaagcctgagacaatcaaggctctttgattcttcttttgaacaccacacctaaacacctggga

SEQ ID NO: 303279 - DNA, 423 bp, Homo Sapiens
  misc_feature (18)..(18): n is a, c, g, or t
  misc_feature (41)..(41): n is a, c, g, or t
  misc_feature (150)..(263): n is a, c, g, or t
  misc_feature (383)..(383): n is a, c, g, or t
  misc_feature (410)..(410): n is a, c, g, or t
gacgaacttaaaccaggncctaaagtccacttaagccaggntctcaactgttcttaccagctctaatctatctagactcatgggtctcaacaaggggtgaatctgtccaccaggagacattctggattggtaagcctgggttatggtagnnnnnnnnnnnnnnnnnnnnnnnnnnnnnnnnnnnnnnnnnnnnnnnnnnnnnnnnnnnnnnnnnnnnnnnnnnnnnnnnnnnnnnnnnnnnnnnnnnnnnnnnnnnnnnnnnngacagtcagctgttaaacagcacaattcacctttgcatctcttattgtaaaagtaccaaatatagggtaggacacttcactattttaactggaattctttttttacacaaacttcactgnccggcttggttccccctttccccgttnttttttccccatg

SEQ ID NO: 303280 - DNA, 400 bp, Homo Sapiens
  misc_feature (225)..(225): n is a, c, g, or t
  misc_feature (228)..(228): n is a, c, g, or t
  misc_feature (345)..(358): n is a, c, g, or t
  misc_feature (385)..(385): n is a, c, g, or t
tctctgaaaggagaggaaatcgcctccaggaaccagttccttaatgacgtagataggccgtctttgtgtgtgaactcctatacttttgacattactgggatgattatattgcttgaggattttggcttctagtaaaaattttaatttcagttcctggggaagacgttcttgacgtgttttaacagcaacagcaattttatcctttaatgtgaccttaaatgtggncancaaaattcccttgcctcttgtaacgtggcacctttatgattgagaacccatttcttattctcctaatgggccatactgtgataccatggatggctctttaattgggaacattggacnnnnnnnnnnnnnnggcaattttaaacaattgggggtaaantccatataacatcaa

SEQ ID NO: 303281 - DNA, 325 bp, Homo Sapiens
  misc_feature (151)..(151): n is a, c, g, or t
  misc_feature (220)..(220): n is a, c, g, or t
cccaggagactggagggacagtgggaggaagaggaaagaaaacgtgctgctcccagatggggaagccttgtctgagtgaaatggcattataggttgtctgggtgttagccccttaaagtggtttaatttcccactaaatagagatcactgngaggactaaggaaccaagcaaatgctttcgattgcggctatcttgattaggaaggccctgcattaaggncaagaggcattgggcaggagcccgcaggaggagctgagggcaccctgagggcatggcaggcaagggtccatggggcagggcttaggattttcaagtgggcttttt

SEQ ID NO: 303282 - DNA, 239 bp, Homo Sapiens
  misc_feature (79)..(167): n is a, c, g, or t
  misc_feature (220)..(220): n is a, c, g, or t
ttagagattaagtgtctctaagtctgtgatttcctttcacaaggcttaggggaaaaaggtttacatatctatatcaagnnnnnnnnnnnnnnnnnnnnnnnnnnnnnnnnnnnnnnnnnnnnnnnnnnnnnnnnnnnnnnnnnnnnnnnnnnnnnnnnnnnnnnnnnaatttggggaaaacaatttttaaaactaggggcatgaaaggagggtataaaanatctaatttggggggaagg

SEQ ID NO: 303283 - DNA, 392 bp, Homo Sapiens
  misc_feature (300)..(300): n is a, c, g, or t
aaatgcaaagaaggcaaatgattcataaaagttgctgagtgaattagaactataatgtgggacaaacactccgcctttctgtctctgcagctagtggtatttccaggttcccagggaactcctgtcccttgctccactgtgcatttttagatggacctgatatttggttacctcccttgtcaggcccaacaatccttgctaaggcacagacttgtgtatttgctgatccctgaggggaaagctgtgattcaggctctgaagtctaaggaattgcagacttagtttcttgtctcccgatgnaaactgctaatctggggtgccaatgggtgtttctgcttacatgggacacctggccccacacaggcatggatttaggaaattattaatgtatg

SEQ ID NO: 303284 - DNA, 247 bp, Homo Sapiens
  misc_feature (56)..(56): n is a, c, g, or t
  misc_feature (117)..(117): n is a, c, g, or t
  misc_feature (173)..(173): n is a, c, g, or t
  misc_feature (180)..(180): n is a, c, g, or t
  misc_feature (220)..(220): n is a, c, g, or t
  misc_feature (234)..(234): n is a, c, g, or t
atacaaattcagctatgatacagttaaacaaattagggattgtcatgtggtaattntaaatcaagtctttttaaatgtcacccatatcacctaataaagtttagttattattaaatnaggtaaaataggttacatacaatgggacttaagagtaacatcgaggatttactgangtgggantctaaggcattcttcttaccacgggctctatggggtaggngatcccgggggccnaataggtgtgggg

SEQ ID NO: 303285 - DNA, 345 bp, Homo Sapiens
  misc_feature (26)..(26): n is a, c, g, or t
  misc_feature (38)..(38): n is a, c, g, or t
  misc_feature (289)..(289): n is a, c, g, or t
gtaatggcatcatgctgaaggaaatnctgttgcacagnaccatacaggtggtgttgagtatacagctttgtttctcaaagtagaatacttgggctgctagttaaaatgtatattcctcctgggctctctctcagattagtcaatcaaaatttatggagtagggcctaaggattgaatttttaatgagcttcccaggtgacgtgcactgaagatgctcaccagcgtatacaaagaggatgggaatggacataagtaaaggtgtagggagtagggccagtacaccccattncaacccacccatattttattaaaggcatcttatttaatgtttcttaaatgcttgtt

SEQ ID NO: 303286 - DNA, 298 bp, Homo Sapiens
tcactaaatacttgacttatacatgttaagataatatttatggttgagtaacattgaaattgattataagtgttacttgggatactaactctgagggatatactactcatcagataaatgtgaatgatcatacaaagatactccatttttatatgaatttttcctcttcattgccattttgaaaataatttgtattttatattcagagatactgcccaagagaacactaaaatcctgctttgtgtttcagttaatgcaattttagtattataatcaaaagccattaagaaaatttcac

SEQ ID NO: 303287 - DNA, 337 bp, Homo Sapiens
  misc_feature (20)..(20): n is a, c, g, or t
  misc_feature (78)..(78): n is a, c, g, or t
  misc_feature (84)..(84): n is a, c, g, or t
  misc_feature (94)..(94): n is a, c, g, or t
  misc_feature (119)..(119): n is a, c, g, or t
  misc_feature (164)..(164): n is a, c, g, or t
  misc_feature (226)..(226): n is a, c, g, or t
  misc_feature (245)..(245): n is a, c, g, or t
  misc_feature (268)..(268): n is a, c, g, or t
  misc_feature (315)..(315): n is a, c, g, or t
tttttttaccaactacaggnattttatttttatttaataacaataatgtttcactgatttccttgagttctcaaaganctaagnaaattttagnatgcaatcctatcttaaagctaggnacctacaagaaacaaccaaatatcaaccccaaacagtgacaaagngattattagtagggccaagctaggagggtgggaaggggaagccatggtagcctactgcaggngttaatgcctgacctgggntacaatgggttcacatggggctnttggtagcctgggccagtacttaggagagtatctgtgcaggagggtngcctgggtgcaggctgggcgac

SEQ ID NO: 303288 - DNA, 347 bp, Homo Sapiens
  misc_feature (67)..(223): n is a, c, g, or t
  misc_feature (262)..(262): n is a, c, g, or t
  misc_feature (306)..(306): n is a, c, g, or t
  misc_feature (329)..(329): n is a, c, g, or t
tcttctctcttctaccacgtgagaacatagcatctgtcacctccagaagaagcagcaacagacatgnnnnnnnnnnnnnnnnnnnnnnnnnnnnnnnnnnnnnnnnnnnnnnnnnnnnnnnnnnnnnnnnnnnnnnnnnnnnnnnnnnnnnnnnnnnnnnnnnnnnnnnnnnnnnnnnnnnnnnnnnnnnnnnnnnnnnnnnnnnnnnnnnnnnnnnnnnnnngacaatgagttttgcacaatctaacttttaaaacctccnggtaaggcaaagcttgagttttattttcatggatttaaaagggncaagtaagggattttctcggttnaccggccttattggggtc

SEQ ID NO: 303289 - DNA, 323 bp, Homo Sapiens
  misc_feature (183)..(183): n is a, c, g, or t
  misc_feature (259)..(259): n is a, c, g, or t
  misc_feature (275)..(275): n is a, c, g, or t
  misc_feature (283)..(283): n is a, c, g, or t
  misc_feature (290)..(290): n is a, c, g, or t
  misc_feature (297)..(297): n is a, c, g, or t
  misc_feature (307)..(307): n is a, c, g, or t
atttaaaaacatacataaatataggcgatcagaaaaacctgcaatgaatttacaaagagatggaaacaagtcaatatccacaattagcataatcaaatacgtgtctatttgagacaattaatttgcatttctttgggcaaaagcacttgcatgattttcagctcaatataatttacataatanattatattaagctcaaagacaataaaaagctaaggacaactcagtagagtatgctagatgaggtaaggcatttttnattttaaaatctttcntaattttncctctanggttccntctacatggnctatttgacccgtttg

SEQ ID NO: 303290 - DNA, 421 bp, Homo Sapiens
  misc_feature (111)..(111): n is a, c, g, or t
  misc_feature (366)..(366): n is a, c, g, or t
  misc_feature (385)..(385): n is a, c, g, or t
  misc_feature (392)..(392): n is a, c, g, or t
  misc_feature (400)..(400): n is a, c, g, or t
tacctccacttagtttcatctcaggagcaaaaaggtgcaaatacttgtttttgggaaaaatcacagattggttctgactctttaggtgaaagtgagaggcagttaccaggncactagttattcctcaggcccagaaggcaagaattgcagcaggtgtgggaaattgaatggtgtggctgctcttctcccgagctgtcagctgttggcaggctgaatgaatctagctctagagctggctgcagacaatgcaaagatgtggggcccacttcacttgctttacttgattatgtgaatctgggaaaacaaaaccagctgaggaatttacagatttcatcctcgggtgagggtgacaaggggactatgggngggaaaccaagggggtctnggaagtnggggaggnctttattttgcaaggagatgt

SEQ ID NO: 303291 - DNA, 381 bp, Homo Sapiens
  misc_feature (14)..(14): n is a, c, g, or t
  misc_feature (322)..(322): n is a, c, g, or t
  misc_feature (368)..(368): n is a, c, g, or t
attcggcacagggngtatcacttagtctaatcctggctttttatgtatgaaaccaggaaggcctttgataccgaaagaatcttttggctatgtggtaactgaatacaataaattatttttagctcatttaaaaaatttatatcatactagatcatcttgaagttgctttttgtcggtatctactctctattttacttttcctgttaatcaacttgttgctactttctggatgcttcttgtctcctgctcctttatcttaccactaacttctccctcatcttgtcactgttgccatgtaaaccccataagagtagatttactnagaaatctgggattgatggggactgggtatgggatgggtctgctancccaaaggacttt

SEQ ID NO: 303292 - DNA, 415 bp, Homo Sapiens
  misc_feature (308)..(316): n is a, c, g, or t
  misc_feature (364)..(364): n is a, c, g, or t
  misc_feature (379)..(379): n is a, c, g, or t
tcagtatgtagaaaatgactaaagtcaaaagtaaagattcctaagagtcattctgaccggcatgtggggccagggacagtgctggaagatagaggacaggcggttccagatgacatgcgagatacactgaagccctgcattcctgcccccacctccccagaccaacgccagcctcacagtagtagagtagttgatgtgtttcaataaataaatatttctctaggcatttagtaaagccagggcatgtgatccatttatttggaaacagaattttatgtagtgttttattatttttcccttgtaagacnnnnnnnnncccaaagaagagtactcatttaatttcaaccatgggcccttaggtatnttggaaatctttctnacttatattgggctaccagaggaacccaaggttcaa

SEQ ID NO: 303293 - DNA, 427 bp, Homo Sapiens
  misc_feature (362)..(362): n is a, c, g, or t
  misc_feature (400)..(400): n is a, c, g, or t
taatacattatcaaaacattatcctgaatcaagttctagcttcttttaccctaattttaaaaccagtaaacctttggacaccagaatttaaaattgattccgtaattgttttccttcttaaattgtatcttctaagtatatatggctttaataaaatgaagtgttttaagttgatgagaaaattttgattttggattgttaatatgttacaaagtatatttgttttaaattttttaacgaaaatagtttttataagaatgtacagataggctgggcgtgttggctcgtgtgtaatctcaggcactttgggaaagccaaggtggggcagatccgcttgagcccggggttttaaggaccatccnggggcaacatgggcaaaactctgttctctggcaaaggnttttaaaattaggccggggctggtggg

SEQ ID NO: 303294 - DNA, 355 bp, Homo Sapiens
  misc_feature (313)..(313): n is a, c, g, or t
aactggctctctgtgcttagtaagtacaaaagaaaggaaggaaagaaggaagtctaccagtggcagatgaacagaactttgtgagaagacagaagacttaaaatgtcatacacaatacccatgacctacaactacctgataattacggtcttccttcagtatcctccaaggattgtttccaggggaatcactgataataaaacccttgggtggctgaagtatcttatataaaatcatgtagtctttgcatataatcaacacacatccttctctgtactttatgtcatctctaggttaattataaaacctaatnacaatgtaaaaatgctatgtaaatagttgccatactgtattc

SEQ ID NO: 303295 - DNA, 420 bp, Homo Sapiens
  misc_feature (307)..(307): n is a, c, g, or t
  misc_feature (343)..(343): n is a, c, g, or t
  misc_feature (384)..(384): n is a, c, g, or t
  misc_feature (393)..(393): n is a, c, g, or t
  misc_feature (405)..(405): n is a, c, g, or t
agcaaatgcaaagagatggagtcataaaaggcgcaggtagtactgtgaggagtgtgaacaatgaagcttaggaagtgagatggtctgtagcaattagtaagagatgaagctaccgtggtggctagagaccaaattgtgagaggacgtaagagtccctttgaaggagttcagcttttatcttgtagttgggtcagtgttaatgctgagtatttaatagggacattttgataaatgtcttaaatctggtgatttactagtttagaaggtagaatatatattttattaactctacaagtggtatttaccnacaagtataacttggaatctttaaaattgtgtaacntgggcaacctattttacccctccctgcttattcttatttcntcaggcacnggtatttaagcntttaaggtttaaagc

SEQ ID NO: 303296 - DNA, 486 bp, Homo Sapiens
  misc_feature (246)..(349): n is a, c, g, or t
  misc_feature (380)..(380): n is a, c, g, or t
  misc_feature (401)..(401): n is a, c, g, or t
  misc_feature (415)..(415): n is a, c, g, or t
  misc_feature (449)..(449): n is a, c, g, or t
  misc_feature (472)..(472): n is a, c, g, or t
attcggcacagcattcatgcaccaaacactgctctaaatttacagacaactttattcttcaccaatgtaggatagcctttattacctgcatattatagacaagggaaacaacttcatgcaggcaattacctctccaaggacatcaaataaattcacagaaaagctgtattcaaatacaggctttgtcaaatcccaagcaacaatcttgatttagagatggctttggagccagcggcctgagttcannnnnnnnnnnnnnnnnnnnnnnnnnnnnnnnnnnnnnnnnnnnnnnnnnnnnnnnnnnnnnnnnnnnnnnnnnnnnnnnnnnnnnnnnnnnnnnnnnnnnnnnggaggatactaattattacctcatgtagttngatagggaaggtttaaataantacatgttaaagcnttgaggaagagtgttctggacactgggtagggancatattaacttcttctttttttnattcagacgggcaa

SEQ ID NO: 303297 - DNA, 495 bp, Homo Sapiens
  misc_feature (340)..(340): n is a, c, g, or t
  misc_feature (368)..(368): n is a, c, g, or t
  misc_feature (384)..(384): n is a, c, g, or t
  misc_feature (411)..(411): n is a, c, g, or t
  misc_feature (430)..(430): n is a, c, g, or t
  misc_feature (438)..(438): n is a, c, g, or t
gagaagcttcaataccctgcatttctctgaccctgaattcatgtcttacacagatgcatctgatcaataaagcctaggtcatatgcttgtgccctagctgcaaggaatactaggaaattgagttctgactctataaaacatgaacatgcaaatttatccaacattgagaggctatttgaaatgagaaaccacaaatacagatcaagtctatgcttccaatcaagatcctcaaacctgacagattataactaagccttgtacaaacaagactctctctgttcctcatatggaggtaagaaccagagacttatcagttattgcacacagctccaatatcagnaattctctcggtgatatccccctccttncctgttttctcatatnaacccatggaagttaaactggcaaaangggggcaggcctcctgagncgccgggnccacaggtttcacggcggcctgcccaaaacacaaaagttaacttttgtgttttttgt

SEQ ID NO: 303298 - DNA, 469 bp, Homo Sapiens
  misc_feature (102)..(102): n is a, c, g, or t
  misc_feature (156)..(156): n is a, c, g, or t
  misc_feature (175)..(175): n is a, c, g, or t
  misc_feature (274)..(274): n is a, c, g, or t
  misc_feature (414)..(414): n is a, c, g, or t
tgacaaagcagcaaaaccttcaggaatatgtacagaaatgggtgatgatgatgatgtgagagagaaagaaacatgcttttgcatttggctgaatgtattggnatggtgcagttatcagagattctgaattcattgttctcgttcaagtagccaggngtggttctaattgtttgcncctttggtctcagcattgacttatactaaatgaagttgaatgcctaaaaactcatagcataatatagaggaagaagtcaaaagattaaaggaaataganctgatggagtggatttatcactgtgaccattcacttacttcccctattccctctccagtattctctactaagaggtctgggaagacacttcatttcaccaacctaatgagaaatacttttgagggcagtgccggcatttntggaaaagtaattcaattggcttttgtctgtagggtgggaggggatactttcttt

SEQ ID NO: 303299 - DNA, 399 bp, Homo Sapiens
  misc_feature (30)..(30): n is a, c, g, or t
  misc_feature (44)..(44): n is a, c, g, or t
  misc_feature (348)..(348): n is a, c, g, or t
  misc_feature (387)..(387): n is a, c, g, or t
atggggtctggctatgttgctcagcctggncttgaactcctggnctcaagcaatcctcctgccttagccacccaaagcactggaattacaggtgtgagccatcacacgcagccccacagtttttgattctgtagtttcgtagtaacttttgaaataaatcaggaactgtgagtcctctaactttcttcttcttttcaagattgttttggctcccttcagattccatatggattttagaatgggtttttctatttctgcaaataacatcgtttggattttgataggaattgcatttaatctatggatcactttgggtagtactgtcttcttaacaagattaagtctccnaattcttgaacgtggggatatcttccctcttatttacangttctttcattc

SEQ ID NO: 303300 - DNA, 339 bp, Homo Sapiens
  misc_feature (217)..(217): n is a, c, g, or t
  misc_feature (287)..(287): n is a, c, g, or t
tgtaatgtatttgaaaatatgtgttcactgacaaatacactgaactttttcccctgaattattgtataatattcagtaatcgtttatgaaatgtgtaacatttttcaaggggatttacatatcaacttttcctagtggaatcaacaacagtagcatgaaatgtatctactccatttactcttatccagtgctcctactttctttttccctttaattnttatatatggtaaaaatttcattgaagagagattttagatgacaggactgtaattttaaacccaatagangaggtgtaagcaatttgagcttagctgaagcataatcttagggttgtgcaag

SEQ ID NO: 303301 - DNA, 313 bp, Homo Sapiens
  misc_feature (213)..(213): n is a, c, g, or t
  misc_feature (244)..(244): n is a, c, g, or t
  misc_feature (259)..(259): n is a, c, g, or t
  misc_feature (279)..(279): n is a, c, g, or t
  misc_feature (296)..(296): n is a, c, g, or t
atgagcactgtgcccagccctcataaagttataatatggtagcctagggctgggtactcaatatgctgtgcctcgcagtataatatttttacacactcaagcttgttagcttttcagacgactttgggtttatagtttttaaatgtctgccagtaaatcagtcaaatgcaaatgctaaaaactgcttcttccaatatatcattaaactcatgnagacataaaaaagatctattccggctgtcantgtaaattatagganatcttagacctaaaagttcntgcatatacctttccantatatagtaggaattac

SEQ ID NO: 303302 - DNA, 339 bp, Homo Sapiens
  misc_feature (92)..(92): n is a, c, g, or t
  misc_feature (239)..(239): n is a, c, g, or t
  misc_feature (249)..(249): n is a, c, g, or t
  misc_feature (256)..(256): n is a, c, g, or t
  misc_feature (268)..(268): n is a, c, g, or t
agaagaaattaacgcatgattttttgagggggaaaacatgatttttctctaaagggaaacgtgtcgtagccttaaccaagatcaattacctncatgttggtcgcagccttaaccaagatcagtcacctccatgttggttgatcttggttaaggctacaacaggcttgaaggggtctggagggtggctttactggctaggggcagcaccagccagatcagacctataggggatctaggcntcttgtactncataccntgtcttctcttncccatttgccatttgacttggggactccagaagcccttgaggagaggcagcatgggagggtaaaaagaggg

SEQ ID NO: 303303 - DNA, 401 bp, Homo Sapiens
  misc_feature (316)..(316): n is a, c, g, or t
  misc_feature (352)..(352): n is a, c, g, or t
  misc_feature (378)..(378): n is a, c, g, or t
ttttaatactcaggctaacattcttcgttattgctgttaagataaaagattgttctggtatatatggcattcattgaaaatgcactttagacttagaatgtagggaacattctcatactaaatcatatttagacaaatacaccgattataattctctatatggtgacacattctcaaaaatcagaatttcaaaatagtgtaaattatgcttgtgaaataaatttgcctgtgcttttacttcattgtgtagttatttgtcccagttgtaccatgtttgtgtcaggaaaagctactctctgtagggggtactttaccngccctagggccaagtgaccgggatggaatttattcngtggctttgtgggggagccagccgcnctgggggtccgggcccttacccc

SEQ ID NO: 303304 - DNA, 496 bp, Homo Sapiens
  misc_feature (213)..(213): n is a, c, g, or t
  misc_feature (286)..(286): n is a, c, g, or t
  misc_feature (373)..(373): n is a, c, g, or t
  misc_feature (439)..(439): n is a, c, g, or t
  misc_feature (446)..(446): n is a, c, g, or t
  misc_feature (452)..(452): n is a, c, g, or t
  misc_feature (465)..(465): n is a, c, g, or t
ttaaaaccgagatgttgaaaacgcaagaactcacaagctacacattccgttagctgtgggcgtgatgacatcagggtgcgtagtctctggaaaagtccactgtgtgcttgcgaatgaaagagggcggaaaaggcacatcacatcttactattggctgaaaatagctgtggcctcgggaacctctgcgagaggagtcccggggatcctacactnagaacactgctctggctcattaacttgtttttatcattattgggaagttctccttccaatgggatataggttnacttgatgctttagaacccagcatttcaggggctttagcaagatggaaatgtctgtctcatgtcaagtgtccagggagtgaccagtngcagagatagtctggtagctccaaggcgttcaggggacccagggccccttattgttctcattgtgnctgtttncagtgnattgctttttctncaaaatggggcaattgggccaaatgctgttt

SEQ ID NO: 303305 - DNA, 131 bp, Homo Sapiens
  misc_feature (43)..(43): n is a, c, g, or t
  misc_feature (72)..(72): n is a, c, g, or t
  misc_feature (78)..(78): n is a, c, g, or t
  misc_feature (103)..(103): n is a, c, g, or t
ctaagagcctgcatttttaacaaaagggacatgtgattttgancccatactgaaaaagacattttgaagggncaagtnattttgttttttaaaaatacaggtnattcataattttaggctacatcaatttc

SEQ ID NO: 303306 - DNA, 502 bp, Homo Sapiens
  misc_feature (243)..(243): n is a, c, g, or t
  misc_feature (273)..(273): n is a, c, g, or t
  misc_feature (282)..(282): n is a, c, g, or t
  misc_feature (322)..(322): n is a, c, g, or t
  misc_feature (375)..(375): n is a, c, g, or t
  misc_feature (465)..(465): n is a, c, g, or t
  misc_feature (486)..(486): n is a, c, g, or t
ccaattaaaacatgcaagtcagtggtttctagtgtctttaaagagttgtgcaaccatcaccactatctaattttaaaacatttttatcatttcatacccatcaaaagtcacttccccttgctcactcccccaacccctgggcaaccactgatctattgtttaatctctatgggatttgcctatgctgggacatttcatataaatggaattatacaatatggcggtcttttttgtctggctccnttcacgttagcataatgtttttgagggttnaggtttccnttttatgactttcattcccttttatgactgaataatattnccatgggtatttgcttaggcatgtttttattttatccaggttcattaattggngggacaaatgggtttgttttccatttttgggctaattatggacgaggttcagggggaattcgggggtcgggatccccgtaggaatttggntaattatggattaggtgttgnttagggaacattgtgt

SEQ ID NO: 303307 - DNA, 468 bp, Homo Sapiens
  misc_feature (374)..(374): n is a, c, g, or t
  misc_feature (386)..(386): n is a, c, g, or t
  misc_feature (408)..(408): n is a, c, g, or t
  misc_feature (434)..(434): n is a, c, g, or t
  misc_feature (447)..(447): n is a, c, g, or t
  misc_feature (458)..(458): n is a, c, g, or t
tggatctactggatggatatgcacactgttaatatgttgtcctgagtctgagactgctactgccccactggttctgctctgaatgcacttgtaatcactcttggtcagtaccaacagcttaacatctatgtatctttcgtattaaaatcttttcctcggacaactgtgatttttgtactaggctaactgggcagctcgtatgactttgggagggcatgaaatgtatgaattacaccgttcaaatttaacaggaaacacagggcagatacagattcatttggggttaatttcctatgggttttgggttgggatattattaagggagtctggggggggatttggggtaaggagggtaggagcctttgttcccaccnttcccggatttngggtaggccacagggcaggggntttccatggggaggaaaggggaaccngctaggacagttngtttccggggnaagttaggga

SEQ ID NO: 303308 - DNA, 289 bp, Homo Sapiens
  misc_feature (271)..(271): n is a, c, g, or t
gactacagtggagagcagcttccaaaaatcagattacgttttaatcaatagtgaaaaaccttgacataggaaatgaggagtaatcaaatgtagaaggtactcagaaggcaaaatccacagcagccactaaggacttaataaatttgggcacaaaatatgggctgccataaggaagagagcccaaataatcaggaaaatattagggtaaaagatgtttctacaatgcacctgtcaggggaaaactctcccttgctctttctagtcttagggnggaaggacagttttaggg

SEQ ID NO: 303309 - DNA, 448 bp, Homo Sapiens
  misc_feature (404)..(404): n is a, c, g, or t
  misc_feature (415)..(415): n is a, c, g, or t
tttcaagacctagatttagaattcagagctgcagatttaggtcccggatgggtggagtagcagcagttgttacctgcaattgtgagcattttagcgagagaagggaaagagaagtggagattctcatgtctccatgtctactcaatgcacactgttactctgattaggtttctgggctccatggtctctgaatcagtttcagttctgaagataaaagagtcatggaatgaagtaaaatgattaatatctgccctataaagtttgtagaaatctggtctagcccctctagaagtgactatagaggactataggacaccaaataggaaagagacacaattctgcctgcatatttagggtgacagccatgcactttaggagcataattgtggagttgactgggaggnctagggggggnaagtccccttttacattaaagctgggtgggccc

SEQ ID NO: 303310 - DNA, 107 bp, Homo Sapiens
  misc_feature (85)..(85): n is a, c, g, or t
  misc_feature (90)..(90): n is a, c, g, or t
ccacctgactgaaaggggcatttgtaaaaattaggaattaatgttaggggaattaaacctaatggcagtgggctggatatagggngatgntttaataaatagtatct

SEQ ID NO: 303311 - DNA, 320 bp, Homo Sapiens
  misc_feature (295)..(295): n is a, c, g, or t
tattcagagtgagatttctgagaggagaagagagaatgtagatggcagttattgagagtggggctataggacaaaaagaagaaaagtatggttaacattgccaaataaagggtcatacagccttgctttttgctggagttagcaaaaatcattctccatatgatagttttagatgttccccagctcatttgtattattgagttttcagctgggtatatattataataacagtcaacatgatgtaggggctcagtattacatgggcagggctatactaattggcttcaatatgccntatctcattattctgtgaggatagg

SEQ ID NO: 303312 - DNA, 144 bp, Homo Sapiens
  misc_feature (64)..(64): n is a, c, g, or t
gctgtgttcatataaaaattaggagtacaattgggcaatgatattataggtccttttggctccnttaaaatttttgatggtttttctttaacataggtatgaggctaaattcccatctattatccccacttcctttattaattc

SEQ ID NO: 303313 - DNA, 385 bp, Homo Sapiens
  misc_feature (155)..(155): n is a, c, g, or t
  misc_feature (335)..(335): n is a, c, g, or t
ccttgggcacttaaaaaacatgttttccattgaagagtctacacttctctgtgtatgaatagtcagttgtattttcctctatttaattcatttttgattacttaatggtttagatgaatagatgttaaaatcagtctccaatcttggatttttanttcctttcagtttttacagtatgatggtttctaagaggggatcttgggagtcagactgccagggacaggaaaccagattccctgcttgggtataggctatgatctgaggactccattttacaactactccctgcctcaggtattatcacctataaaaaggcaggatggattgggccgggnccgtgggttcccaggcaatttgggcagggctgagggcagggtgggatcca

SEQ ID NO: 303314 - DNA, 395 bp, Homo Sapiens
  misc_feature (58)..(59): n is a, c, g, or t
  misc_feature (67)..(67): n is a, c, g, or t
  misc_feature (90)..(90): n is a, c, g, or t
  misc_feature (138)..(138): n is a, c, g, or t
  misc_feature (155)..(155): n is a, c, g, or t
  misc_feature (177)..(177): n is a, c, g, or t
  misc_feature (207)..(207): n is a, c, g, or t
  misc_feature (212)..(212): n is a, c, g, or t
  misc_feature (229)..(229): n is a, c, g, or t
  misc_feature (247)..(247): n is a, c, g, or t
  misc_feature (252)..(252): n is a, c, g, or t
  misc_feature (261)..(261): n is a, c, g, or t
  misc_feature (272)..(272): n is a, c, g, or t
  misc_feature (304)..(304): n is a, c, g, or t
  misc_feature (320)..(320): n is a, c, g, or t
  misc_feature (330)..(330): n is a, c, g, or t
  misc_feature (345)..(345): n is a, c, g, or t
  misc_feature (360)..(360): n is a, c, g, or t
  misc_feature (366)..(366): n is a, c, g, or t
agaaaaattatttgtatataactttaaaaggagtagaagggctttttgcagagttatnncgtttgangtatactttatttcttgaaaaanttacagattttttgtaaataatgatgtaattcaactctcaaaatattncctactgtttctttatnccagttgtattcacatgtgaangcatgtgaccagttattgctgcattaaaancatgngtcttttttattagggngggccattatttatgganctttnctatggaanggggtaggggncattaaaatgtaaggatgccatgatggaaaanttaggtgaggggggcnttttaggggntaatttatattgganttaatgccttggggnggggtnttccggggtatttttttgccgtttggggg

SEQ ID NO: 303315 - DNA, 311 bp, Homo Sapiens
  misc_feature (74)..(177): n is a, c, g, or t
  misc_feature (240)..(240): n is a, c, g, or t
  misc_feature (278)..(278): n is a, c, g, or t
  misc_feature (284)..(284): n is a, c, g, or t
  misc_feature (296)..(296): n is a, c, g, or t
cctcttgcttcagcctttcaagtagctggcaccacaggcacacacaccaccacggccagataatttatctttannnnnnnnnnnnnnnnnnnnnnnnnnnnnnnnnnnnnnnnnnnnnnnnnnnnnnnnnnnnnnnnnnnnnnnnnnnnnnnnnnnnnnnnnnnnnnnnnnnnnnnngtatggccattgtgcccagtcctgttattccatttctaatggccttaaggagacaacacacanaaaaggaagtaatacaaaatgggcccaaagtatttttnaataancctcttacttantaaaaatttccttta

SEQ ID NO: 303316 - DNA, 344 bp, Homo Sapiens
  misc_feature (75)..(119): n is a, c, g, or t
  misc_feature (233)..(233): n is a, c, g, or t
  misc_feature (286)..(286): n is a, c, g, or t
  misc_feature (334)..(334): n is a, c, g, or t
ttatgcacaaaggaaaacagtcatctcaatagcgataagaagtgagacttcaaatgacaacaagctacaggaagnnnnnnnnnnnnnnnnnnnnnnnnnnnnnnnnnnnnnnnnnnnnntgaaccagttgatagttggtttatccacctctattcatcatttaacattttcagtactcccagattcaaaggcaaaccacctcctgtcaaattattgcttataaactctgtagngtctgatgaattctcatgattatatctgacaacattcagtgttttgaaatggnatgtcggctactgaccctcggggaggctaatgcttttccatatattcngcacagtttt

SEQ ID NO: 303317 - DNA, 255 bp, Homo Sapiens
  misc_feature (171)..(171): n is a, c, g, or t
ccaaatggccttttttcaaacctgcttttattccagggatgtcatggttaatagtagcagtgcaatcccagggtacttaagccagaaactgtcatctttatttctttctcatggcatccatatccagtgaggtttcctactcttgtacattttatcttacaaacattgggncctttcaggaccatctttcagggggtatggcaacaggtacttacttggattctggctttggaattatggactctttggaatatt

SEQ ID NO: 303318 - DNA, 415 bp, Homo Sapiens
  misc_feature (136)..(136): n is a, c, g, or t
  misc_feature (285)..(285): n is a, c, g, or t
  misc_feature (344)..(344): n is a, c, g, or t
  misc_feature (357)..(357): n is a, c, g, or t
  misc_feature (373)..(373): n is a, c, g, or t
  misc_feature (392)..(392): n is a, c, g, or t
acctttcaggagaaaggcaaggagactacttgccttactgtcatattattgagggaatcagcgcaaagcctgaggaaatgaacagtagctgtgggtcaaagccatgtctccaggttcacggctcactcccccaggncaagcctagttaggtagtggctgcatctgggtatccctgggacagaaatgcaggtgagaaggggtatcaagaatgcctcgagggggagatgggtgaaccagaaggtcaacagttgcatttcttcatctaggaatgttctctaggaaggngaatgatgatcatgagagtccccttaagggcacaccgcggaactgacttgatttctgtngggcccagaattntccctttaattacagngagggtaaatttggccttngtttttttccccccccattaaat

SEQ ID NO: 303319 - DNA, 123 bp, Homo Sapiens
  misc_feature (43)..(43): n is a, c, g, or t
  misc_feature (53)..(53): n is a, c, g, or t
  misc_feature (70)..(70): n is a, c, g, or t
  misc_feature (78)..(78): n is a, c, g, or t
  misc_feature (88)..(88): n is a, c, g, or t
  misc_feature (94)..(94): n is a, c, g, or t
  misc_feature (100)..(100): n is a, c, g, or t
acagaaagtaccagccacaggacccgcagaacgccagcgccgnccccaggcancacgcgggccagccacngcaagccnaaagcagtgngacccncatgtnaacacacagagccgccctgtcta

SEQ ID NO: 303320 - DNA, 169 bp, Homo Sapiens
  misc_feature (60)..(60): n is a, c, g, or t
  misc_feature (105)..(105): n is a, c, g, or t
atagattgcaaagaaacataaacattaccaggcacaaaaagcatggataagaacagagantaactcttacagagatataaattaacaaaagaaccaatatgagancttctcaaagcaaattacaacattcttatcatgaaaaaaggcaatctatcctggcgaggcatag

SEQ ID NO: 303321 - DNA, 433 bp, Homo Sapiens
  misc_feature (24)..(24): n is a, c, g, or t
  misc_feature (151)..(151): n is a, c, g, or t
  misc_feature (303)..(303): n is a, c, g, or t
  misc_feature (320)..(320): n is a, c, g, or t
  misc_feature (341)..(341): n is a, c, g, or t
  misc_feature (380)..(380): n is a, c, g, or t
  misc_feature (387)..(387): n is a, c, g, or t
  misc_feature (393)..(393): n is a, c, g, or t
  misc_feature (404)..(404): n is a, c, g, or t
caccgagggattctcggagaaggntggggcctgcgtggtgctcccaggggaagggtgggcctggaggctctgctggacttcccagagccacgagggccacctgtacccatcctgcagggggctcaccagtctctggcccagctggggcaancctcagtgttgccaggcttctggtgccagcgccttccctccttgaagtgaaggcctactgggattggtaactctgtccccaggcctgtgacctcccagttcctccccagggctcctctccacctgctgaagtcagcggagggaagggtgttnggagcctggccaccctnctgcccccactgtgaattttnctggtggaaccctgtgggttggggagtcatattggaatnttgtttnttgttncttaagggatnattgaagggcccttgaagcaattcggcat

SEQ ID NO: 303322 - DNA, 110 bp, Homo Sapiens
tttgaaacatggttatatacttcatgcagaagtagcaaactagttactcaggctgcatctggtctcaaacatgttttgtttaatattttcttattagtcttctaatactg

SEQ ID NO: 303323 - DNA, 394 bp, Homo Sapiens
  misc_feature (310)..(310): n is a, c, g, or t
  misc_feature (341)..(341): n is a, c, g, or t
  misc_feature (355)..(355): n is a, c, g, or t
  misc_feature (360)..(360): n is a, c, g, or t
  misc_feature (378)..(378): n is a, c, g, or t
acaccgcaatttgagagccccactggtataaagtgagtgaaacccaggcagagacaggcaaaatggtgaggcccgcatcctattggtgagtcacacagggaacgctgaaattcatggccttctccaggctactgggaacccatgggcggtgatggagggagtggtgccaccttcacttgctgctgaggctcttccccctctccccagcatactccttacctggctgtctctcctcatgtataaggaacctatagtggtgtagaatctactcttcttccccctgtggcttccaggcccccctgtatagctngctattccagcccgattttttcaccactggncccggggctttccncctgnccccgtggctttcacgtnttctggaacacatgca

SEQ ID NO: 303324 - DNA, 311 bp, Homo Sapiens
  misc_feature (16)..(16): n is a, c, g, or t
tgtcagaaggaacaanagcactaggtaaggaaatgattaagcccatttcctctttgcccttcccaaaatgcttaaacatctgaagggattcttaggcattattgaattttgcaaactaggaatacccaggtacagtgagataactcgccctttataccacctcataaaagaaatgcaagcagctaaaactcagtccctgacttgggaacctggggctcaaaaaggctttaaccagttaaaacaagccttgctttaaagcaccagcccttagtcttcccataggaaagacattcagtctctatgtagcaaaa

SEQ ID NO: 303325 - DNA, 312 bp, Homo Sapiens
  misc_feature (213)..(213): n is a, c, g, or t
  misc_feature (233)..(233): n is a, c, g, or t
  misc_feature (240)..(240): n is a, c, g, or t
  misc_feature (287)..(287): n is a, c, g, or t
tataaggaaaaaaggcttattgcacggtatcatgtatttgcgaagtcaaaataacatttgcatcctaagcatctattagctcttataaaaagacctgtcttttcagctcatgtcagattttgcataatttataatacattcctccatcagttgtgtctcacctatgaaccaacatcaagacattatagactgctcacaatcatttaacatagntgtaacagctttcctccccngcactgntcccccactccccatttcttccagtcatgacttgggtttgcatgggnttctttgttcactgctcaaaccatt

SEQ ID NO: 303326 - DNA, 231 bp, Homo Sapiens
agaaaatgtcccgtattacatatatcccccaatatagggtaggaaggctatttccaagtcctttgtatataggatccatcaaatgctataatatgaacttgtcaaagcttcaagataatcttttaacatatccttgaacaagcagttatagtcttcaccagatcaactcttaaattaacatcccacttcttattttaacatagaattgtaatgtctacttgcctgctttaa

SEQ ID NO: 303327 - DNA, 226 bp, Homo Sapiens
  misc_feature (80)..(80): n is a, c, g, or t
  misc_feature (204)..(204): n is a, c, g, or t
ggccatgtacttgaatattttttaatagcatcctatgaagtcaagaggtcaatatctttgatactttgatatgaagagangttcatatcaaattaaagactttatacaaatgtctagtgatctttagctgtccactcctatttaagagagaaacactaaaaatctagttgaaagcactgtgcctacaggtggagttgtcaatcnttgctttactgtaaggtctggt

SEQ ID NO: 303328 - DNA, 346 bp, Homo Sapiens
  misc_feature (12)..(12): n is a, c, g, or t
  misc_feature (235)..(235): n is a, c, g, or t
  misc_feature (249)..(249): n is a, c, g, or t
aagttttcagantaacaaagctttccctcattcatacagatattgctgtactaatctataattatgttttagaattcaaattataacactgactaaacatcactaatgaaacatttgtgacctccttttttccgaagtttaatttttgctttgaattcatattttatcagtatgtgttaatataatgtcatgtgctctttcagttatcaattaagttcattcaggttttcaacgntttaagtgcttttntttaaaaagccaataattacccttaaccaactggcaaattgggaattattcaaaagggtttctccttttaactcaacttcttgacaggaactcatcc

SEQ ID NO: 303329 - DNA, 388 bp, Homo Sapiens
  misc_feature (19)..(19): n is a, c, g, or t
  misc_feature (177)..(177): n is a, c, g, or t
  misc_feature (202)..(202): n is a, c, g, or t
  misc_feature (297)..(297): n is a, c, g, or t
  misc_feature (309)..(309): n is a, c, g, or t
  misc_feature (317)..(317): n is a, c, g, or t
gttttgcacacaatttctnctagcaagattacaaccttaatggaaacacacagcgtattttaaaagttactaataataattccttagcattatctaatagccagtccatattcaaatttcaccagttgctaaaaatgccttttaacatttgaattgttccaatgaagatttaaccancgttcatgtgttctattaggttctngctgtcttgagcgtgtcttctctcctgttttcctcttgccattgattgctttacatagcagttgcaaagcaagggtcatgatgaactaagtttcnctgatttcatantaggtttntctttctaccataccattgaggaaaggaagatatttcttccaaggtctgaaaggatttaaatttgttaact

SEQ ID NO: 303330 - DNA, 325 bp, Homo Sapiens
  misc_feature (94)..(94): n is a, c, g, or t
  misc_feature (134)..(134): n is a, c, g, or t
  misc_feature (155)..(155): n is a, c, g, or t
  misc_feature (258)..(258): n is a, c, g, or t
  misc_feature (264)..(264): n is a, c, g, or t
  misc_feature (309)..(309): n is a, c, g, or t
caggtactgccttatgggattgtcataaatctgctctaattgtagaagggaattgtggaagtttttactacattgattgggaaaacttgaaagngaacaaatgagattaaatccagggtttaaaggtctctctncccacccttctcaaaagagangatgggcttatgctgtatcactaaagtcgtgttacttattttaagtcaagcatatttcctttgaggttgaaactgcttttggtaaagtaggtgcttttgatanagtagnatggtaaagcacatgcttatcatttttttcctattgagagtattntatttctatctgtact

SEQ ID NO: 303331 - DNA, 398 bp, Homo Sapiens
  misc_feature (235)..(345): n is a, c, g, or t
  misc_feature (381)..(381): n is a, c, g, or t
ttcaaataggtctacaatcaaatccatctccttaacctcccagacctccatatctcctacctaaaagaaagaaaaccttttcttctttgtccttctaaatttttttctaacacttattttctaaattgttcaaaaagtaggagcacaatatgttaaggctctaaacaaaacaggcagcaggtcctgggttctgaaggcagggctgtggcccacataccccagggcttccagggtnnnnnnnnnnnnnnnnnnnnnnnnnnnnnnnnnnnnnnnnnnnnnnnnnnnnnnnnnnnnnnnnnnnnnnnnnnnnnnnnnnnnnnnnnnnnnnnnnnnnnnnnnnnnnnnaactcatgggagatgggaatgaggggtgcacagggnttacacataaaggattt

SEQ ID NO: 303332 - DNA, 215 bp, Homo Sapiens
  misc_feature (156)..(156): n is a, c, g, or t
  misc_feature (187)..(187): n is a, c, g, or t
  misc_feature (199)..(199): n is a, c, g, or t
aactcgggtatgctgtatcctttacccagagtcaccaattccttctgttttgaccatctgctttatctttctctatttttatagacatgcattttcctgagccattgaaagatggagcataccccttttacttccaaatacttcagtgtataagancaagatcattttcttatataacccatagganaattatcaaaancaggaaatttaacagt

SEQ ID NO: 303333 - DNA, 395 bp, Homo Sapiens
  misc_feature (22)..(22): n is a, c, g, or t
  misc_feature (55)..(55): n is a, c, g, or t
  misc_feature (61)..(61): n is a, c, g, or t
  misc_feature (219)..(219): n is a, c, g, or t
  misc_feature (237)..(237): n is a, c, g, or t
  misc_feature (269)..(270): n is a, c, g, or t
  misc_feature (277)..(277): n is a, c, g, or t
  misc_feature (283)..(283): n is a, c, g, or t
  misc_feature (311)..(311): n is a, c, g, or t
  misc_feature (323)..(323): n is a, c, g, or t
  misc_feature (335)..(335): n is a, c, g, or t
  misc_feature (364)..(364): n is a, c, g, or t
  misc_feature (372)..(372): n is a, c, g, or t
  misc_feature (384)..(384): n is a, c, g, or t
gaaagacatttttataggattngggaggagcctctgaatacaggagatccaccgncaggangcaccggttagcactgaacgctccgtttccacaggtccctgggacacgcaaattcgtctccccacttccacgggttccatctcatttttctaccttgttgcttttctcacgcattcattcacaaatgtttatggtgcacctattacatctgtaccctnatagctgagcctatcatntcaaattgaagaaagaggtagagagacaacannatacaancagggnatgaaatatgcgtaacattccaagtttnaaaatttgtttnctcttgcctcantgattccagggacgagatttgattttgtnggtctgtnaagtttgtcctnttttcccgttt

SEQ ID NO: 303334 - DNA, 454 bp, Homo Sapiens
  misc_feature (344)..(344): n is a, c, g, or t
  misc_feature (370)..(370): n is a, c, g, or t
  misc_feature (410)..(410): n is a, c, g, or t
  misc_feature (423)..(423): n is a, c, g, or t
agcaacttttaaagggttataaaatatttaacattaaaactataattaacataatttgatattttatcccaaagtcacttcacataagagtaattttctaagcatcaagtatgagaatgccatgacaaaattcaggatgttcgaattatctgctcattttaacctgggattaacaagttttcacttaggcctgggatgttttccaaagtaatagatttaaatggtctgttggagattacattgcacacctcctgacaacgactaaaaccggtctctcctcatttccttgtcgcactctgcaaccctttgaagagctgggaaaggtgggtctcagcctcccctgncatgcttttttcagggtcatgctccngggacgtgtcagttttttcacagctcacgtttttcagcanttctggggcactntgggagaaagggaggagcgcccttcctgaca

SEQ ID NO: 303335 - DNA, 398 bp, Homo Sapiens
  misc_feature (278)..(278): n is a, c, g, or t
  misc_feature (381)..(381): n is a, c, g, or t
aagttaaaatgatattaggaaaaagctcagattagatataaaattgatcatgtctgccagaaaatattctcctaaaagcaatttctctctaaacacccaaagcgcacagctactctcagcaagagaaacatgagcattatgaagaaaggtggcagattttcagaagaatttttataaagtttctttcccatctctgctgttctgtcatctcctagccattgaatggaggttctatattgaaatacatctgacaacttccaacaacactttttgatgangaaatagaatctgactatgttcatatagtggaatatattagaacttgcaacatagccaaactgaagagctattatggtttttgggtggccacatcacatgttnttatttgtcctgtaatt

SEQ ID NO: 303336 - DNA, 168 bp, Homo Sapiens
  misc_feature (83)..(83): n is a, c, g, or t
gtgtgagccataaacagtattttctaaaataggtatgaatataaagccacaatacttactttgaatgaatcacttaaatgggntattttaatattgtaatttatacttttggaaatataggtgttttgggccgaaggtataggttttaattatttaaaaatgccacca

SEQ ID NO: 303337 - DNA, 279 bp, Homo Sapiens
cgcgcccggccaactctaatattctttacatgttatatagggttttatttctttgaaatgtaaacgatttccttctcagtgctatgacatttgtgtggtgtggtcatctcattgcaggaaggggatgtgcctgcattctatatttcactcctctggggcaggctgagaactaccactagtttagtgcaaaccaatctagggttagactagaaaaaccagatttttagatctactttatctcaaactgaactgtggtgacctctaaacccgggttgggaa

SEQ ID NO: 303338 - DNA, 366 bp, Homo Sapiens
  misc_feature (20)..(20): n is a, c, g, or t
  misc_feature (52)..(52): n is a, c, g, or t
  misc_feature (88)..(88): n is a, c, g, or t
  misc_feature (106)..(106): n is a, c, g, or t
  misc_feature (247)..(247): n is a, c, g, or t
  misc_feature (274)..(274): n is a, c, g, or t
  misc_feature (309)..(309): n is a, c, g, or t
  misc_feature (316)..(316): n is a, c, g, or t
  misc_feature (321)..(321): n is a, c, g, or t
  misc_feature (340)..(340): n is a, c, g, or t
gaaaataatccaaggttcantaaaacccactcaaagtatataagtgaatgantaggtatagtagataatgttctgacattgccctagnttcatcccctctcatctnagcttgtgagtgttacatggggtcttccacctcccacacagcacagttctggtgtcttcagtgggtgctaccggccctctctagcattcattattgccacattgtattggccaccttctcctaactttttgtgcctagggnctatcagggcccagcattgtggtggtnggactagatgacttttgcaaaccccttcctacttnagtgttnttctngagttttgtaatgagacantagccatgtgaagcttgccatgttga

SEQ ID NO: 303339 - DNA, 284 bp, Homo Sapiens
  misc_feature (52)..(165): n is a, c, g, or t
ggataaaatgtatattcattgcgaggtacaatgtgaactgtgaatagtagannnnnnnnnnnnnnnnnnnnnnnnnnnnnnnnnnnnnnnnnnnnnnnnnnnnnnnnnnnnnnnnnnnnnnnnnnnnnnnnnnnnnnnnnnnnnnnnnnnnnnnnnnnnnnnnnncctgagaattcatacttctaagaaagtacaaatccatagggcacatgagaactgcaatgtctatctacagtaaatacagtttgataaataaaatgaaaggcaattgacctaaggtgaaa

SEQ ID NO: 303340 - DNA, 395 bp, Homo Sapiens
  misc_feature (12)..(12): n is a, c, g, or t
  misc_feature (242)..(242): n is a, c, g, or t
  misc_feature (337)..(337): n is a, c, g, or t
  misc_feature (344)..(344): n is a, c, g, or t
ataaacaaattngtttcgtgaaaattactatatagtacattaagttttccctcatcatttaaatagatttttgtgtctattttcctttaaaattttaatgtacttgatctagcttgatctagattattctgtaatagaagtagttgtaaatctctaaaagtaagtcttttgatttctgtagaccatggattttttaaccttggcactactgacattttgggcagatagttctttgttgagtngctctcctgtgcattgtgggatgtttagcaacatccctggacctctaccagtatatgcaggtagcactgcaggagccccagcgcatgtccccacnatctctncttgctgggatggcatcaactaaaaatgtccccagtactgccatatgtttg

SEQ ID NO: 303341 - DNA, 279 bp, Homo Sapiens
  misc_feature (69)..(156): n is a, c, g, or t
  misc_feature (196)..(196): n is a, c, g, or t
aagcacagaacttgttaatgagatcacactcatataatttgctatttgctgataccaacaatttggtannnnnnnnnnnnnnnnnnnnnnnnnnnnnnnnnnnnnnnnnnnnnnnnnnnnnnnnnnnnnnnnnnnnnnnnnnnnnnnnnnnnnnnntgtgccaggcaaggcactcaggaagtgctggggttttggntagtattgaagggtgattgatattttaaagaactgggatgaatcagacagttttgagacacccaaagaggcaggaagatacaa

SEQ ID NO: 303342 - DNA, 127 bp, Homo Sapiens
agaattcctcattctgttggtgtatatcagaaattaatgtttccttcaaaatgtaatatttttagcacagtttaacttctctctttcagtgtctatgacattagaataagagttatagtaagcagtt

SEQ ID NO: 303343 - DNA, 314 bp, Homo Sapiens
  misc_feature (293)..(293): n is a, c, g, or t
ccgaaaaaagccagtagctttatgtattattacttcctctcttacacagaaagtagtagcatactgtatttttttaatattgtcgttgtcactttaatgatgtatcttagagagatcactcccataccaacacatagaaatcatcttcactctttctttggttttagggtattctatgaatgtttattcaatcattcttctattggtaggtattttactaagaatgacattaatgggaacagtgtaactaatctatgatagaaataaaaccttgaagatatgaataaatgggncacaggtgccaatagtccagg

SEQ ID NO: 303344 - DNA, 352 bp, Homo Sapiens
  misc_feature (237)..(237): n is a, c, g, or t
cttcaataccctgccaaatagtcatctggactcagttgaaacatctccaggaccagagaacttgctccccttcatgccaggaggaagatggtagggagctttcttcaatcatccctggagtgaggtgaacagaggtacaagaagggagggagtaattacctgaagaaccttcccctttccaagcagcaggtttaggctctggcaatgcctgccatgagctcaaggagcccaaacganacaaaaaaatgcctgggaaggtaacttctcccaggtctccaatacagagctagtttccaattctagccattcaatgccacctgggaaatccatggttgtcactgttatgctacat

SEQ ID NO: 303345 - DNA, 259 bp, Homo Sapiens
  misc_feature (33)..(33): n is a, c, g, or t
  misc_feature (94)..(94): n is a, c, g, or t
  misc_feature (173)..(173): n is a, c, g, or t
  misc_feature (185)..(185): n is a, c, g, or t
  misc_feature (195)..(195): n is a, c, g, or t
  misc_feature (215)..(215): n is a, c, g, or t
  misc_feature (232)..(232): n is a, c, g, or t
agttgactgactctgaaatactcaataaaagtnaaatacttctgctgctgaattaggtagaggccaagaaaatagttcaaagatatggaaaaantattgtaaagatctataaggattttaagctaagaattcatctgaagagcctaaattcttgttctacttaaaaaacccanactggagtcttncatgatacantatggggcatggcttccccnatacaggcaatatgggntctatagctagcagagctactctggaa

SEQ ID NO: 303346 - DNA, 350 bp, Homo Sapiens
  misc_feature (256)..(256): n is a, c, g, or t
  misc_feature (289)..(289): n is a, c, g, or t
  misc_feature (323)..(323): n is a, c, g, or t
ttttaaacttggtctttaaaatctcagtttttcctgcttaagacaagaagatccctgatgccaagatttctacctgaaagtcagtttcagctttgtaacaactgggtaattgtctcctaaaataaaccagcatctcagggactgcaagcttgtcttctcagttatgtgaatgcaaatctcttctctcctaatgactaccctgcctatgccgtttcctgtgggcatgtgcagtcatctggaaatggcggctgcagtntccacagctggggacgaccctgggcttcttttnctttaaatgaggatgtgtctgctcctgccattgncccactcttttggtcctcttgtcttgt

SEQ ID NO: 303347 - DNA, 400 bp, Homo Sapiens
  misc_feature (357)..(357): n is a, c, g, or t
  misc_feature (366)..(366): n is a, c, g, or t
  misc_feature (383)..(383): n is a, c, g, or t
aatgaataatttatttattggacataaaaaatgtatcatttctgggaacttattttctaggaaaaattttgcagatgtaaatatttctccgatagaaatctcagaatttttagaacattgttcagttatttttacttaatcctagtacacatctaatatccaaagtgagactacagaaaatacaatcattatttaagacagaatatgcaaagtagaaatgggaaatgattaatacattgaacatcatattcattcaggtcaatgaatattatcaaatgtcttctatgtgccggggactggggggaaaaacaaccatggaaggaaggacagatatgttcctcaccatcaagtgggggntttaggggntaatggggccccagggnccaaatttaccattggt

SEQ ID NO: 303348 - DNA, 383 bp, Homo Sapiens
  misc_feature (288)..(288): n is a, c, g, or t
  misc_feature (319)..(341): n is a, c, g, or t
  misc_feature (345)..(345): n is a, c, g, or t
  misc_feature (350)..(350): n is a, c, g, or t
aaaaagatgtagtatctttagtctcacaacttgtttaaatatcgtgccattaaatagcttatgatgtttgtggtcacttattaccaagtattgccagaattccactatctaaaataacatcatctcagtccacttaaccagccatgcttaaaatgccatggacacaaaaacagacaagtgagcttgcattgtccagtctctgttctctcctcagaattccatacatataccatatagataggatgtatctgacacataggatgggaaaaaaatgctaggaaaaagggncaaaaatattaggggaatgccgggggctggnnnnnnnnnnnnnnnnnnnnnnnaggntgggngtttcacctcttgttggccccggactggggggt

SEQ ID NO: 303349 - DNA, 138 bp, Homo Sapiens
  misc_feature (82)..(82): n is a, c, g, or t
aaaatatttcttttttaatgggcattcatttgatattttaaggaccacataatataggaaaatacacttataatactagggngacaatatttcctttacacaggtgtatgcactgggttttttttaaatgtctaaggg

SEQ ID NO: 303350 - DNA, 367 bp, Homo Sapiens
tttacagcttaataattattttgggggaaattattcatattacttttaacacacaattacaccatggaatgtacttcattcaatgtgagatgggaaatgtaaagtttaaagatcactggttttgtagggaacctatcaataaggaagtcagggcttagttgatgatcgccatggtcatagtactgaattcagagagaaatgcagatcccatgaattcagaactcagtgcacttcagagtgaaatgactgtcttgtaaagcgattttcatattaagactaactcttgttaatactgatgcaaaatcatatccaacaccttgtatttatgtggatgcttcacttttctaaaagggattttcaattattt

SEQ ID NO: 303351 - DNA, 464 bp, Homo Sapiens
  misc_feature (426)..(426): n is a, c, g, or t
atatatattataacagatatgtatattttataataaaaatgccatatctttggcatgagaaggaatcccagaatctggggcatatgtgcatgcagactagtcgcacctataactccttctcctcaaactgtgtttttggctttggtggtaacaaatataagcattctgcagtttccctgttcttatcttgtcttccccccaacgcctcctcataaggtcttggtgacctataaaatttcctctgaattcaccagcttcacctattctgttgctcttaactttccatgatacaatctccttctccaatacaatgaattcttcctttgatctgtgcccttaacgctatgtttttgatgcctgattaaagaaattatgggcatagctggttctatgtaatattatggcaagggtgctatggaatcattnaaaatgtttgtctgtatatgctgacagggaggtcatct

SEQ ID NO: 303352 - DNA, 474 bp, Homo Sapiens
  misc_feature (153)..(153): n is a, c, g, or t
  misc_feature (155)..(155): n is a, c, g, or t
  misc_feature (370)..(370): n is a, c, g, or t
  misc_feature (398)..(398): n is a, c, g, or t
  misc_feature (410)..(410): n is a, c, g, or t
  misc_feature (428)..(428): n is a, c, g, or t
  misc_feature (442)..(442): n is a, c, g, or t
  misc_feature (456)..(456): n is a, c, g, or t
gggctcggcgtggccaccctaatttcagctaaatctgagggtggggagattgccaactcaaaaagctctctgagcctaatcaaggttcttaaaggactcagtcactaggcagagaccataccaatttcattcactgctggggccccatgcccnancttagcactgcctgatacacagccagcacttaacatatgaatgagtctgtcaggaaaggaataaaccagatgggtaggatggactgcagcagtgagctactactgacttaactagtcagtacagttaagctttactatttcattcacccagtctggctaactgctctccctttttagtaactgttcctcaatacacacatgactcctcctttggnttctctgtttaaacaaggactcaggatntttcaaaggagnccaagttaaacctctaangggcttttttttgncaagaataaaaggntcagttctgggcgtttga

SEQ ID NO: 303353 - DNA, 488 bp, Homo Sapiens
  misc_feature (11)..(11): n is a, c, g, or t
  misc_feature (193)..(231): n is a, c, g, or t
  misc_feature (313)..(313): n is a, c, g, or t
  misc_feature (362)..(376): n is a, c, g, or t
  misc_feature (379)..(379): n is a, c, g, or t
  misc_feature (405)..(405): n is a, c, g, or t
  misc_feature (431)..(431): n is a, c, g, or t
  misc_feature (446)..(446): n is a, c, g, or t
  misc_feature (463)..(463): n is a, c, g, or t
  misc_feature (478)..(478): n is a, c, g, or t
aagttatagcngtgtggaaagacacaggactcataggtcaaatggtaacatcctacatacacagaaggaaacacacacacaaacaaagcctttgttcacaagcaaagaatttctttctcattcttgcctcatcccctgtatccagagatcttatttttttcctcttatcaccttcattttacactggtctgannnnnnnnnnnnnnnnnnnnnnnnnnnnnnnnnnnnnnncagagctcagctttctagagggtggagcagtgtctgtcacacgggcttctcatagctcaaactgtcatccctgctttagctncatctcttcctaattgttctctaccctccaccccccacaactttggccnnnnnnnnnnnnnnnccnggctgggccaaggatttccagggagnagggaaacgaacctttgcatttggtnccctcagatggggcnttctaggaactttggcnccggtttaactcaanggcgtttggg

SEQ ID NO: 303354 - DNA, 243 bp, Homo Sapiens
  misc_feature (203)..(203): n is a, c, g, or t
  misc_feature (224)..(224): n is a, c, g, or t
gaaaactagtgataacattcggatgttctcttggctaaccaagacttctttctagtatttatttttgaactaaatgctttaagcaaataaagcactctgggatatatttgaatgttacctaacaaccactggcacctagaataatttctcattttatagacttttcactttggacacttgaatttttctaataaacctctganggatactatggacctacacangtttaatggtgtccccttt

SEQ ID NO: 303355 - DNA, 412 bp, Homo Sapiens
  misc_feature (152)..(152): n is a, c, g, or t
  misc_feature (370)..(370): n is a, c, g, or t
  misc_feature (376)..(376): n is a, c, g, or t
  misc_feature (390)..(390): n is a, c, g, or t
gtgttttggctacaaattcatggccatacgcttactacatagcagatttagccaattaaaacaacctcttatcctctggctggattcacagtctgttcaatctgcagcagctcagtagacactgggatgcttctggctagcaggtagcagtntcacaggcaggcaggctggaggagcagctcgtgctgaggcagctgagcccatcctttccccagaggaagggtccttccgtgtcacagaggagtggaccttgagcctaagaaggatgactgttggggagggtgggatggggggtatcttttatatacaagatgcataatttactgcattattagattctttattataaggagtggggatgattgcacanttgggnttattttgattaanttataggggccagaatttaagg

SEQ ID NO: 303356 - DNA, 425 bp, Homo Sapiens
  misc_feature (289)..(289): n is a, c, g, or t
  misc_feature (323)..(323): n is a, c, g, or t
  misc_feature (339)..(339): n is a, c, g, or t
  misc_feature (367)..(367): n is a, c, g, or t
  misc_feature (405)..(405): n is a, c, g, or t
agagatctgtattcaaatcatactgcgttccctggagaactagggtccagctgcggcccattctgtcccctgcaagtcccccatccccaacaatctctacactccctagtctccacagtggaaagctgttcaaggtgtaagccatgaacggtgacagtcgtttcgcttattatgtctggttcctttccagcgtatgaacttcttgacacaggggccctggcttcgcacttctatcccccagcactccagcacctagcccctgtcagggcactgtccgtcttcccaccgnccaagtcctcactaaccaacctgcttcactcagnctaaacgcactgctgngcaaaatcttcaattcccttttcccctnttgttattttgaggggatacagcattcttcacaggggntaaggcattaaccctgggcg

SEQ ID NO: 303357 - DNA, 358 bp, Homo Sapiens
  misc_feature (175)..(175): n is a, c, g, or t
ttgattatcctgtagcacatccatggagcttggcaatagccaccaattccatcatcctcatagctactactccctccatacatctcaagtacctggcacattgtcccttagagtatccagttctactggtacattctcccaatttgctgccatttgtctgtgctctgcccacctncactaatgggatcctcatcatcagatgggtggtgatccagttccaaaccccatcttaccatctcctttctcatctactttgggtagcaactgtggaagaccagattctcaagaaggagatgctgagatagagtttgggagggcaaaatgtttattaaggacccatacctgtggaaaggaaggg

SEQ ID NO: 303358 - DNA, 329 bp, Homo Sapiens
  misc_feature (51)..(251): n is a, c, g, or t
  misc_feature (260)..(260): n is a, c, g, or t
  misc_feature (268)..(268): n is a, c, g, or t
  misc_feature (287)..(287): n is a, c, g, or t
tcaccgtagagatatttgttagatatcgagcatgtgctgaagaaggcatcnnnnnnnnnnnnnnnnnnnnnnnnnnnnnnnnnnnnnnnnnnnnnnnnnnnnnnnnnnnnnnnnnnnnnnnnnnnnnnnnnnnnnnnnnnnnnnnnnnnnnnnnnnnnnnnnnnnnnnnnnnnnnnnnnnnnnnnnnnnnnnnnnnnnnnnnnnnnnnnnnnnnnnnnnnnnnnnnnnnnnnnnnnnnnnnnnnnnnnnnnttttgaggncgcccctnctgcatgaccaactttcangtggtgacattcagcttttctttcctgttttttggacttgaa

SEQ ID NO: 303359 - DNA, 331 bp, Homo Sapiens
  misc_feature (201)..(201): n is a, c, g, or t
  misc_feature (207)..(207): n is a, c, g, or t
  misc_feature (211)..(211): n is a, c, g, or t
  misc_feature (238)..(238): n is a, c, g, or t
aggcagcacccatgggagtaagatattgaacgtttacagcatgtgtacataagttacctcaaaggataattagatgattataatgacactttctttgagatagctaattttaaaaatctattgctcccaagtctaattatttgagtaatgataacatattagcaatcatgaaacttcagtcacagccaaccccattgaagnaaaaanagtnaatcatagcattttctataaagacccnaaggattgcaccagaccaatccttgcattttctgctgtgtattctatgcccagcctcccatccgtgtgtactctaaactacctacacatgtat

SEQ ID NO: 303360 - DNA, 367 bp, Homo Sapiens
  misc_feature (335)..(335): n is a, c, g, or t
  misc_feature (355)..(355): n is a, c, g, or t
cttgagtcatcaaaaaccgctggcactgtggtgacttgactttttctctgccccatacctactacctcaccaaactcccttgtccctaccatcaaaatgcgtcttcagttgggccacttctcactacttctattgctaccaccctagttctaaatcactctcacttctttgggatcaatgcagtagccttaaactgggtctcttgggtgtgatttttgccctacttgggtctaggtctttataggaggcaggccaggattatccttctcaggtgtaagggaggaggtcatgttcctcttttgcaaaaagggctctcaggtaggctcctcatttcngggggttctttggcataggntggggaaagccc

SEQ ID NO: 303361 - DNA, 130 bp, Homo Sapiens
  misc_feature (51)..(51): n is a, c, g, or t
  misc_feature (66)..(66): n is a, c, g, or t
  misc_feature (112)..(112): n is a, c, g, or t
acgtatgtctggcatatcattggatgattttttagaatggattttgggggncagttatgggtatcnttaaagggggttttcagaatcattaaaaacattgtgttaacataanggattatggttcattttt

SEQ ID NO: 303362 - DNA, 161 bp, Homo Sapiens
  misc_feature (84)..(84): n is a, c, g, or t
tcattttatgggatgggaaattttaaattttaatatgggtcaaatttgagtgaggaatgtcttaatgatgggcaggggtagggnaaatgtttacagggtcaaggatgcacaaagccccagcttcataaggtgaaagctttgatgagcctgaaccgagttgg

SEQ ID NO: 303363 - DNA, 457 bp, Homo Sapiens
  misc_feature (370)..(370): n is a, c, g, or t
  misc_feature (420)..(420): n is a, c, g, or t
  misc_feature (426)..(426): n is a, c, g, or t
ttaagacaatttgccttttaggaccacgtaagtttagacatcatgctatgtcatgttctggactagaacgctccactagaaagacaggcgttgaccctaagggcactaccctacagtagggtggccatttgtcctgccttgccttggaccatctcagttttagcactaaaagtcccatggtctcggaattccctcagtctcagggaagctgggatggttggtcaccctcacctacactcagccggagccatagaagtgtggctgtgggtagctggccctgttctcatccagacagagaggaccatctccaaatatggattctggaaagcagcctcagagctagggaatgccctgttggagggcaatgggntggcctcactggcctatttttccaggttcaacattaggcaattttccttnattttnccagagggtggcacccccacaagggttttcg

SEQ ID NO: 303364 - DNA, 150 bp, Homo Sapiens
  misc_feature (90)..(90): n is a, c, g, or t
tgacagccatggcctagccttcgatggcttttaatgtctttaaactacagtggttccttggtatcctttgggtagtggttatagtacctnttcccctattcctggacaccctgggtaccaaaattggcaggtgcttgagtccttatataa

SEQ ID NO: 303365 - DNA, 122 bp, Homo Sapiens
tctcagttctgctaacagattggctttcagatgcttagtgacaccattgcttgaattaagaagccagagggagaatgttggggagagtgtgttattcctgagagttttaaatttagttctgc

SEQ ID NO: 303366 - DNA, 391 bp, Homo Sapiens
  misc_feature (302)..(302): n is a, c, g, or t
  misc_feature (313)..(313): n is a, c, g, or t
  misc_feature (321)..(321): n is a, c, g, or t
  misc_feature (329)..(329): n is a, c, g, or t
  misc_feature (337)..(337): n is a, c, g, or t
  misc_feature (361)..(361): n is a, c, g, or t
  misc_feature (371)..(371): n is a, c, g, or t
  misc_feature (377)..(377): n is a, c, g, or t
cttaaaatgataaatatcaaatatacaaaatgaaaaatcaagattcttattaaagaaaaagtaaccatcagcctttgcctttaaaagagattatagataaagcaagaatatgaccctttttgcagttcaaatgcacagtatctacttgaggggaaaaagagaagctcagatatggcaaagtgcaccattttttataattacttgggctacacatacaaggggaaaaagggacaagtaaacatacttaacaatattgtaaaagctccacaaaaggggaaaatcaactggcggaacaacttacntgtggggcacntttttccntattaaantaattccnctcactggggtatttttttaattntttaaatggntcgggncacaatttttcctc

SEQ ID NO: 303367 - DNA, 414 bp, Homo Sapiens
gacgttacaggatattttaagtgagaagattcatctgctccctcatatcaactcctccaaatgaccctgcagacacatcatcagagcagggagctggacgtgtttacaaaagcatacagcctgcagccccaacttcttcgtgccctccctagcagtttgagtttcatgcctttcactacattttgaaaagggtaaagtgggttagaatatatccataatcaccattccttaggaattgctttagttaaatttgctaggtattaacagaacaatatttcatcattacaaattcctaggttggctaaaatctttaggtcacttcatcaggcaatactggaaggactaggccacatctaccccttgttaaatttaaaattttaaatatacaaatttacatcctgggtagggtgtggc

SEQ ID NO: 303368 - DNA, 139 bp, Homo Sapiens
  misc_feature (125)..(125): n is a, c, g, or t
ccattataagtaggtgctacattaaatttacttcatatatgtggcttttactgttatagattaggattcctacatctgggggttaacagtcaacaggtatggcattttcaaaattataaataggnatttcggaggtagg

SEQ ID NO: 303369 - DNA, 342 bp, Homo Sapiens
acaatattgaagtattaatgcattcttaaatgatcttcaaatatgatcattatatctagagatattccaaaaatattcagtgaaaggaggaatcggtcttttttacctagtatcactgccatggaaagacgatatcactggatgggtgtcctggcagctctttctttcctggaacattgcacatgccctgctttaaatgaaggaagcttttactttaggcacttagtgttttttgaatatgctttctcatcctttcacgtgataaaattgatgttagactggggaacaatctagatccctttgacaggatatgccagaggtggggaagaaaaagtgggttca

SEQ ID NO: 303370 - DNA, 359 bp, Homo Sapiens
  misc_feature (114)..(114): n is a, c, g, or t
  misc_feature (194)..(194): n is a, c, g, or t
tctttttttaataaaaaaggttttactccccaggagcaaataaatcattttgaactactgataaacactgctgcagtgaaaagaaagatggctacatgtatgcaatagcacaanttcagtggaagaacagctgtgttgacgattagagataaaaatcacttatccattccctcctttcccacaaaccaaaccgnggattcccatagggaaaatgtctaactcaatagctcctcccttacatgacagggggtgtgtcattctcttaacagtgggaaaacaaatgccgggtctccgcccagtgggaggatgctctttaacaccctaactgggtaggcaaggactttctggcaaatgggggg

SEQ ID NO: 303371 - DNA, 428 bp, Homo Sapiens
  misc_feature (336)..(337): n is a, c, g, or t
  misc_feature (380)..(380): n is a, c, g, or t
  misc_feature (385)..(385): n is a, c, g, or t
  misc_feature (409)..(409): n is a, c, g, or t
tgatacattctctcacatgatcattacaaccaccatttcaggtgtatatattattgctcccattctgaggttgggagtaagtaatttgtccaggctcactctgctaacaaagaacaaagctgagatttcagcctaggtttatctaactcagaagcccgtgtttgtatgcctcttccccatgtggcttccctaggaccaaaagattagttttaatggaagttgtgcccttagagaagaaaaaagatgtctctgcttagtagaatttagactaaatgcttataggtgccagacaggcaatgtggatggggacacaggccagggaggggtctcaggtgnncaggaagttgtgccccatataggaaggcagtcactacctaggntgttnccatgtgaggaatctgggccccantttaggccttatccccccc

SEQ ID NO: 303372 - DNA, 475 bp, Homo Sapiens
  misc_feature (360)..(360): n is a, c, g, or t
  misc_feature (372)..(372): n is a, c, g, or t
  misc_feature (387)..(387): n is a, c, g, or t
  misc_feature (404)..(404): n is a, c, g, or t
  misc_feature (442)..(442): n is a, c, g, or t
gagaggaacaagaacttccattttatcttgcttacctgcacttatgaaaagtcaaactgagtcatgctgagagccagggaacataggagtcagttcttctgcagcagcactcagccagttgaaggcaatgtggagtgatggaaggagagcagtgatgcagtgatgctggcaccaactcctttactatggcatccattgtaccagctgccatacaccaggcaacttctacactttatctctaatcatcctagaataagtattagtttccccatcttctagaaaggaaaactcagacccagagacactaagcaagtagctcaacatcacacacgttatctgtgattaagcctgagttagganatgggagccttnggatttccacatttntgctctttttcatggangctacctggactttggtactcaagtttgtcctctacancacgggactgctgggactaggaattctctaagt

SEQ ID NO: 303373 - DNA, 408 bp, Homo Sapiens
  misc_feature (334)..(334): n is a, c, g, or t
  misc_feature (347)..(347): n is a, c, g, or t
  misc_feature (359)..(359): n is a, c, g, or t
  misc_feature (369)..(369): n is a, c, g, or t
  misc_feature (377)..(377): n is a, c, g, or t
tttgaaggagtcactctactcctggatcctcttctcttctgcccctctatccgacagtctgtcttccttgttcccagttggcagacctgagtcaggcaatcccactgggtctttttgtttagcctggggaagagaagacccagggagaatatcaccagcttcagatatctgaaggaagagggactgagtctttttttattggtgtggtaccgggcaaaacttgggataaatgaaaagaagttaacagttgggtaggagcttaaattatgtggcagagaaggacatttcttaacagatttactctgtcctagatttagggagctcctcaggggtnggagggccacatntttgttccatgnttgttttccntcaggcantgaggcagagggcctggggattaggcaggta

SEQ ID NO: 303374 - DNA, 339 bp, Homo Sapiens
  misc_feature (316)..(316): n is a, c, g, or t
  misc_feature (326)..(326): n is a, c, g, or t
gaatatctggaaaactgcctctgttatgtagtcactaaggttgggaataggaggaaagcagagaggtagggcaattctgatccctttagccaataagtttataaggtatcatagctaccttatttttaaaggagtttgaaaccctaggatgagagactgacgtcatcaggaatatatctttgcagtcttaggaactcaaatatatcaaatcagagaatagtaacagtaggcagaaaacacagactataaattcaggcttgctttctctgtcactcttaaatgctaatgctgctttatttgtacttatggacactanacataatctngcttccctgactt

SEQ ID NO: 303375 - DNA, 373 bp, Homo Sapiens
  misc_feature (73)..(73): n is a, c, g, or t
  misc_feature (76)..(76): n is a, c, g, or t
  misc_feature (344)..(344): n is a, c, g, or t
  misc_feature (355)..(355): n is a, c, g, or t
ttgtatttttaggtcaaattaaattgcaagtaagaaacctaaagctgatccctttccccattttctcagaganttnctactgaaccattacccacatcatactatcaacagttatacaggccaggccactacatgaactctatgtatggcagcccacagagaggcttttagtataaggtaaaatatactggtatgagtggaccagcgcaaacccacggtccacgtctacacaatgcgcccctttctcaagttgctcattttgaggctgaggtcactatccctgggcactagagactagaaagctccaggggttcttccccagatttcagccatttcaccctttncccaagatttngcaggtgaggatctccag

SEQ ID NO: 303376 - DNA, 460 bp, Homo Sapiens
  misc_feature (79)..(87): n is a, c, g, or t
  misc_feature (220)..(220): n is a, c, g, or t
  misc_feature (320)..(320): n is a, c, g, or t
  misc_feature (386)..(386): n is a, c, g, or t
  misc_feature (402)..(402): n is a, c, g, or t
  misc_feature (414)..(414): n is a, c, g, or t
  misc_feature (427)..(427): n is a, c, g, or t
  misc_feature (437)..(437): n is a, c, g, or t
  misc_feature (447)..(447): n is a, c, g, or t
gtacatcaactttaaaattgcgcagaattgtgttaaaatctactatttaaaaacctcacagaaatcttttcctgcttcnnnnnnnnnccaaaaattattccattcttttatttctactgtggtcatatgattgaatccctgaagtaaatactgtgcattcttcatactgatttgggatccttctgatactagagtgtacctagaaagcaaagtatatttngggattaacctgggaaatataaagaaagcaactcataaagaacaatattctgttagtatcacagtctgcacgaatgttatgtggtgcctgaatgtgagtncctctcggtctgtaattgctgggaggcttcctttggtgccacacctgggccttctggggcttttcnctgggacggggactcntttcaggggagntgccggggaaggngcatcctccnctgggaaagngggaataggggga

SEQ ID NO: 303377 - DNA, 279 bp, Homo Sapiens
  misc_feature (11)..(11): n is a, c, g, or t
  misc_feature (229)..(229): n is a, c, g, or t
  misc_feature (264)..(264): n is a, c, g, or t
accctgtggtntgaccactactatgtaaacaagccagagctagactgttgtgacaagagacacatggccaagccatcccatggccccagctgagactggaccaactaccagacatgtgagtgaggccaccctagatcatccattcccagccaagccactagctgaccacagtgattgaatgaaccagctgagaccagaactgccacgccagtgcacaaaatcataaganagtataaacatttattatttaagttactgagtttnggtgattggtcacac

SEQ ID NO: 303378 - DNA, 137 bp, Homo Sapiens
  misc_feature (63)..(63): n is a, c, g, or t
  misc_feature (79)..(79): n is a, c, g, or t
  misc_feature (93)..(93): n is a, c, g, or t
  misc_feature (120)..(120): n is a, c, g, or t
ttctaactcaacttctaatctgccttgctgtcagttattataaaatgtcaatttggattatancaggttgccacaattnaaaactattcaccnggagtataatgttaaaaccccttaggnatggatatataaggggt

SEQ ID NO: 303379 - DNA, 417 bp, Homo Sapiens
  misc_feature (379)..(379): n is a, c, g, or t
acgttcccaggtgactccagtatgcagccagactcgagccactgcaatagacccattttcctgttgaaaaatcatgctccccccagtgttagtaaatgtccttcagaccctgtggagtggccttctttaaaccacgacaatggactggcctttatgtccaaaggagacaatgctagcttggcttcagcctaggtgaacagtgaacagaggaagcaggcagtttaatccatccgtgggtccttcctctgcctcccaattaactaaggtgtgcctttgcaggtcaactctgacgtccttgggctgggtagggcagggcaaggggaggggaaggtacaagggcaagttttacaattcctgatttcaaaaccaggcccacttntccccgaaaccaggcacacaggggccgggcttcacctt

SEQ ID NO: 303380 - DNA, 358 bp, Homo Sapiens
  misc_feature (251)..(251): n is a, c, g, or t
acagatgtcagttgtttgaattggcccattaaagtatggggcttttcttgttaaaaagtcattccaaaaggcttggcaagagtttgctatacaacggagggacagagaaacatgagctggggagtaggctctgacagaaggtgggctgtcttcctgcctccactgttgggcatttgtcatatcagaagtggaggacaaaaagagcagggacctgaagctaaaggatttgccataataagtaccagcgttanctggggcgcaccatattttatgagaactcacttttaggggggcagaggaagtcaaaggcccctcccaggactacttccagtgggcccaatgctctgacctgaaggat

SEQ ID NO: 303381 - DNA, 374 bp, Homo Sapiens
  misc_feature (297)..(297): n is a, c, g, or t
aagccccccacaccggctgtgcacttctcagtgaggactgaagtcacacttggggactccaaatttgattttctgccaaccctggctgctaatggcacagcagatcatcctctggtaccaagacttggcagcaccaaaatgcccagtctcatgtgagactgttagaatggactccaaagcccccaggaacccagagagcttcctgcctccccgctcctgccactcctgctcctgcaaagggaaaccctgccctgggtgatggctgtctttcacaaacacactcggtggcctctactnggcatcttgcttccactgttgagggaaatgtgttttccatgggtgatggccggctctgtgttgttggttttcgggga

SEQ ID NO: 303382 - DNA, 388 bp, Homo Sapiens
ttgaatctttaaagcaaaccactaatgtcttggttttagagaaaattaagtaggtggagactttagcccatattaaggaatcatcaattttgctgacataataggcttgcttatcccatctagcaataactgcaaagtattaattctctgtggattttacagttcagaaactacacatgtattgaccacattacggaaaataagcagtttctgtcaaggctcagaaggtgaataatgcaatcctcctgctaaaactcatgcacctgaggaaccaaatactgtcacaacggactagggaaaaaatacattcttaatgacttctcctaaataaatgtccatggaaacattggaccttgcaggtattcctgtgtatttcatccagggtatt

SEQ ID NO: 303383 - DNA, 223 bp, Homo Sapiens
  misc_feature (26)..(26): n is a, c, g, or t
  misc_feature (104)..(173): n is a, c, g, or t
  misc_feature (182)..(182): n is a, c, g, or t
  misc_feature (190)..(190): n is a, c, g, or t
  misc_feature (212)..(212): n is a, c, g, or t
cagtttaccggcgtttactgcttctncatcctctcctattcaaattatcctgaagcttgatttaatatctttcattatctttataattggggacctaatttaannnnnnnnnnnnnnnnnnnnnnnnnnnnnnnnnnnnnnnnnnnnnnnnnnnnnnnnnnnnnnnnnnnnnnctgtgtgtntttcacantcttctctactaaataatagtnctttgggactt

SEQ ID NO: 303384 - DNA, 228 bp, Homo Sapiens
  misc_feature (182)..(182): n is a, c, g, or t
  misc_feature (194)..(194): n is a, c, g, or t
gtttcagtaatactaatagttaacttttcctgttaagacaataccagctgtgtgttttctgtccatttttccccatatttttggagagttgattctgcaacttgctttctccttgtattttcaggggcgtctgccttgggatataaaatcatagatggggtgttgttgctaagtaaaaagcntctttgcaaccnagtatttaacaccacaacttccatggtgacaagg

SEQ ID NO: 303385 - DNA, 356 bp, Homo Sapiens
  misc_feature (292)..(292): n is a, c, g, or t
  misc_feature (303)..(303): n is a, c, g, or t
ttaaaacatttattgctcatttccttgaactgtgtgaagaaataggagacttaaaagaaaagaaatccttctcttttaggaggagaaatggagagctctagcagttaaaagagacccttaagataaaagagaccacagttgttcagaatcagccactgagatttggaaaaagcaaatcacattgtctgtcctctgggtatatgattagggacagaaagcttctgggttggggtcagggaatggggcaggttttgatgacacgagggaagacaataagttggggcattgtgtnaaaggggaggncagcagggacctgggggcttatgccctttggtcacattctgtgtgaagccagg

SEQ ID NO: 303386 - DNA, 415 bp, Homo Sapiens
  misc_feature (318)..(318): n is a, c, g, or t
  misc_feature (383)..(383): n is a, c, g, or t
  misc_feature (393)..(393): n is a, c, g, or t
atttcatgcggatgtcagtggataagatgttgcttattcaacaccactcgaagaaacacaagctttgcatagccttagtactatggcattgcagaaaccgttagaacaatggcactattactgatgtttgttattggaacctgtaacatatttctgattgaccagccagatagactattgaattatgggagactgttagccttatggggaattttattactctttaggaatagtgtttgaaaggaagagtttaaaatcaaggcatttcactgagggaggaggataataagggcctacaaccctggctggcagtttccngtttattggggtcatggctttgtggtggaattatttgagccttctaggcaggctctgtggatgcngggtgggagnccgtaggatccctgtgttattg

SEQ ID NO: 303387 - DNA, 442 bp, Homo Sapiens
  misc_feature (157)..(157): n is a, c, g, or t
  misc_feature (281)..(281): n is a, c, g, or t
  misc_feature (383)..(383): n is a, c, g, or t
  misc_feature (412)..(412): n is a, c, g, or t
  misc_feature (419)..(419): n is a, c, g, or t
aaaaactttttcttagtggttccccaaaagtttgcaatatacatttacaattaattcaagtccacttccaaataacaatgtgtcacttcacaggtaatacaagtgctttataataacaaaataatcctaattcctccctctcattcctttctatggntgctgtcattcatttcacttatgcatacttaaggcatatctaagtttcaagggattgatcctgatttgcctaaaccaatcaccactgccccttgtctaacccaccaccacaagcctcttttggngatattacggggaagggtgttggggtttcccactacagggtaaggctgggggttcgggttcgaccattttaattttggattttagggtggtaggggtgaccntaggcagggttgggggcaacttggggggncatcccnttccggggttgtttagggatttt

SEQ ID NO: 303388 - DNA, 264 bp, Homo Sapiens
  misc_feature (225)..(225): n is a, c, g, or t
  misc_feature (245)..(245): n is a, c, g, or t
agattacatgagtatggaaatggttgattatccgaggagacgaaaacctaaagttttgtggggtagaatatacaggtcaaaatcaatttgtctgcttctgatacttcaatgatcattttgatgctgccagctcaaatctgtttccagccccgacattccttctccgggtgacctccgattattgtcattaccagctgggatgctccactgggtggactttaaggncggaacatgggcggggggcngaccaaattcatcttccct

SEQ ID NO: 303389 - DNA, 229 bp, Homo Sapiens
  misc_feature (47)..(47): n is a, c, g, or t
  misc_feature (52)..(52): n is a, c, g, or t
  misc_feature (72)..(72): n is a, c, g, or t
  misc_feature (103)..(103): n is a, c, g, or t
  misc_feature (108)..(108): n is a, c, g, or t
  misc_feature (118)..(118): n is a, c, g, or t
  misc_feature (139)..(139): n is a, c, g, or t
  misc_feature (150)..(150): n is a, c, g, or t
  misc_feature (152)..(152): n is a, c, g, or t
  misc_feature (154)..(154): n is a, c, g, or t
  misc_feature (161)..(161): n is a, c, g, or t
  misc_feature (187)..(187): n is a, c, g, or t
  misc_feature (199)..(199): n is a, c, g, or t
  misc_feature (210)..(210): n is a, c, g, or t
gtcctggacttcatttcgccattatgctggcgaacattcttgctttnctttnctccctgcagtagcttcttnagaaagagttggaagaaggttgttcattttngagancttatattgnccaactgtctttatataaaantggattatttntntnctagggnatagagttttaatttccatttcagangccatttttttncccctgaggantatcaaagggcattactcc

SEQ ID NO: 303390 - DNA, 509 bp, Homo Sapiens
attcggcacaggaaactcccatcatcaggctggtcaaagaatgacaagcgttctagtttgagaaagatctctgctgttagtttattggctttgatctctaaatggttaatctaactttaaatgagaggaagggagtgttggccaaggatccctgatcttttccagggagattttaatttctctaaagcattcaaagtaccatgaaaaggaagaagtacagtgcttaccagagcccaacaactgaccaagaggaattagaatgaagcccactccaagaagataataatggtgttcggcactctatcaagtttacccgggccaaggtttatggaagtttacaagcagctatgagctctctgacaatagaagcatttcacacagactatcatttgaccaagaatgctattactggggacttgttaaagcaggccaaggttttgtatctttttaccagctaattagccgggttgttatggtctctgacaggttattcccaccatatactcagg

SEQ ID NO: 303391 - DNA, 383 bp, Homo Sapiens
  misc_feature (349)..(349): n is a, c, g, or t
tgagaacagtatggaggaaaccgctccatgattcaattatctcccactgtgtacctcccacaacacatgggaattatgggagctataattcaaaatgaggtttggcgggggacagagccaaaccatattagccacaggaaagctgttgagccttgcagtgcctctgaggatccctggctgtggggtgggcccgggttctagtccaagggctcctgcgtgcaactctgcccagcttccgtggagggttattcttgtgtttaagatatgtgtgtgtgattctgatggcaccttcctgcctcgggccagctgtgtgctgacgggcactgccgctgcctaggtgttggttccngtgagcccagcaactttgtgactgatccttgttc

SEQ ID NO: 303392 - DNA, 484 bp, Homo Sapiens
  misc_feature (78)..(201): n is a, c, g, or t
  misc_feature (360)..(360): n is a, c, g, or t
  misc_feature (391)..(391): n is a, c, g, or t
  misc_feature (405)..(405): n is a, c, g, or t
  misc_feature (414)..(414): n is a, c, g, or t
  misc_feature (432)..(432): n is a, c, g, or t
  misc_feature (448)..(448): n is a, c, g, or t
actactgagccaattaggtggcaagcctcagctagggagggcactgggtctggaacaggtcgtgtacgttcaaagtcnnnnnnnnnnnnnnnnnnnnnnnnnnnnnnnnnnnnnnnnnnnnnnnnnnnnnnnnnnnnnnnnnnnnnnnnnnnnnnnnnnnnnnnnnnnnnnnnnnnnnnnnnnnnnnnnnnnnnnnnnnnncacatagtgtctttagacatattgagcccatagtggcactcaataagattacttgctcttgatgttattatgtttgtcactgtcccgcttattccaaaaccagtcagctcttccctcctgaggggccacagtaggcagcagcactgagggcatgcaccntattgaatgtgaagttggaatgattttgaantgtggcaggtccanttaggaggntttttttatattatattnatctattattattaangttaaaattttttccaaacctggatggcttgccaac

SEQ ID NO: 303393 - DNA, 540 bp, Homo Sapiens
  misc_feature (18)..(18): n is a, c, g, or t
  misc_feature (288)..(302): n is a, c, g, or t
  misc_feature (304)..(304): n is a, c, g, or t
  misc_feature (420)..(420): n is a, c, g, or t
  misc_feature (451)..(451): n is a, c, g, or t
agactcctgggctggaantctagcaagtgaggctcacctggcgagcagtggtggaggttggtgggatcacctgctctgctgtccaggtgcttcccaggataacaggagtctaagcttgatgggtgatttcagaaaaagtaggaccactgggtcaaagctggagcaagaattgtttgcttgctaccagtggtggtgggtggtgtcacttgccctgatatctgagtgcttccagggacatgcaattgcttttaaaatgagggtaagaacagagaaaatatgctgtaatannnnnnnnnnnnnnntnaataattgccttcatacttccctttacttctttggtttttcaaatgtagatttgaaactacagcctgatgtcacttagctttttagcctgaagaacttcctttagcctttattttnaaggcaggtatgatagcaacatattgttccngctttgggcatatcggggttaattttttttcatttcatttgttaaagacagttcatttctgtttctgttctcatgtttctaataggagt

SEQ ID NO: 303394 - DNA, 262 bp, Homo Sapiens
  misc_feature (84)..(84): n is a, c, g, or t
  misc_feature (249)..(249): n is a, c, g, or t
ctttgtaagtggggagaacaccaatctggtctggttactatagcaggtcatgtttccttcccgcctataaccacatgcttaggnacttcttgcaattgtaataatctgtgagttgtaatcattgtgtgggttaatcctttgtttctgggagtcagggctgccttggggtttgaatccttccttcatatttcatctttctatgtctttaattgggggttgttattactctggtacctctcataagggggntaatctataaagg

SEQ ID NO: 303395 - DNA, 326 bp, Homo Sapiens
  misc_feature (272)..(272): n is a, c, g, or t
gtagatgtatatttacttattaattataatgtgtgcatataaaagccatagatctaggcctgtgattaaaacctgcccattgcttatgtgtctaaaagttccttttctctctgtgctgcaatagctaaattttgccgattttctattttctgttcttactttgatttgggaacaaaccaaggcttcaaatgcacagggtcccagagtgggtagagtgggcttgcttatttgatatattttttaaggctaggtgatttctgggaaatcgggcngcccctcttgatgtgggcacacctaggaccataggtcaggttataaaggggtcc

SEQ ID NO: 303396 - DNA, 489 bp, Homo Sapiens
  misc_feature (383)..(383): n is a, c, g, or t
  misc_feature (430)..(430): n is a, c, g, or t
  misc_feature (435)..(435): n is a, c, g, or t
  misc_feature (446)..(446): n is a, c, g, or t
ttaaacccgtcgggctaccccttcaagtattcagaacagttttcccagctgttagttttcaagtgtcttttagaacgacagtcattttccattcatcttccatcttcctttggattgcgggagggcagccacacgcatgcctttggtttgcttatgagactggaaacagcacgagctgagctggatgatcccagccacagcccctcattcacggcactgtttgtctaatgatgataaaacatcctcatctgcccaacatcaggactctgccccagttctggcacacagcatgttgtgttaccaaatgtgggtgtctgcacctctggggtattcgaatttcccaaacagcttttcattaaattttaatttcatggagggagggntggtacacaagttaccttttggaaactctacccgttcatttcccttnccctnccatccagggnccaacattctaaggggtttttattaatggattttggggttggg

SEQ ID NO: 303397 - DNA, 290 bp, Homo Sapiens
aattatgctcgagaaaaataaattcagcaccccttgccatggtctgaatgtatttccccaatttatgtgttgaaacttaatccctactgtgtggctaagagatgaggccttttggaaagggctaaaggcatgaggcagagcttaatacagcatgagttccttctaaaaagagaaaaaggccttatacagcatgtattccttataaaaaatgctgcagggaactagtgtaggccctttttgctcttttgtttgtcccctgagcatttgtctcctctgcagaataggtgcca

SEQ ID NO: 303398 - DNA, 568 bp, Homo Sapiens
  misc_feature (60)..(277): n is a, c, g, or t
  misc_feature (358)..(410): n is a, c, g, or t
  misc_feature (417)..(417): n is a, c, g, or t
  misc_feature (435)..(435): n is a, c, g, or t
  misc_feature (453)..(453): n is a, c, g, or t
  misc_feature (471)..(471): n is a, c, g, or t
  misc_feature (528)..(528): n is a, c, g, or t
  misc_feature (558)..(558): n is a, c, g, or t
ggaatatatacagagataatttatgtcatgagcttattctgtagattagaaatacatatnnnnnnnnnnnnnnnnnnnnnnnnnnnnnnnnnnnnnnnnnnnnnnnnnnnnnnnnnnnnnnnnnnnnnnnnnnnnnnnnnnnnnnnnnnnnnnnnnnnnnnnnnnnnnnnnnnnnnnnnnnnnnnnnnnnnnnnnnnnnnnnnnnnnnnnnnnnnnnnnnnnnnnnnnnnnnnnnnnnnnnnnnnnnnnnnnnnnnnnnnnnnnnnnnnnnnnnnnngtaactaacttactgatggcacacagcaacacagatggaatcttcaaatgatttaaataagaagtcagacttcagggccannnnnnnnnnnnnnnnnnnnnnnnnnnnnnnnnnnnnnnnnnnnnnnnnnnnnggagggnttgctttgagcgccgggnggtcgagggtggcagtgnggcctggttgttaccttntattccggccacattgcggggcaggacctgtttcaaaaacaaagttcgggttcaaanggtttcatgtttaatggttttagggtttgnctttttgggt

SEQ ID NO: 303399 - DNA, 492 bp, Homo Sapiens
  misc_feature (434)..(434): n is a, c, g, or t
tgatccacctggctggggctccgaaagtgctggattacaggcatgagcagtacaccaggctgagcagcttttcgtatgctagttggccattcatatatttttggagaatgtctattcaagtactttcccactttttaattgggtagtttgaggttttttgtcattgagctgtaggaattctttatatattctggatattaagcccttattagattgtagtagtccattcttgcattgctataaaggaatacctgaggctgggtaatttataatgaagagaggtttaattggctcacggttccacaggctgtacagagagcacggcagcatctgcttctggggaggcctcagagagctttacttcatggtgggcagacaaagcagggagcaggtgttcttacatgggcaggggcaggaccaaggagagttggggnggaggtgctacacactttttaaacaaccagatctcatgggtaactcactcactatcct

SEQ ID NO: 303400 - DNA, 449 bp, Homo Sapiens
  misc_feature (389)..(389): n is a, c, g, or t
  misc_feature (406)..(406): n is a, c, g, or t
aattgcaatggagaaacaatcctgggcagatgtccaataactgttcccctatcacagggtgtctggctcagtgagtatcctaggcgctgcacagctccttccttctcccaaatggttccatagccccatggtgtggtatgtgtctgcagctccatcaccgagtgtctgtcttggttcggctcctttggggtctcagttggctctccttaattagtaggaagagtcttagttaggaagacttctcctcaatccagaagatttaggggagatttctcaggcagagaataggaggatagtttgggaaggggtactctgaaattattggttagggatcttgatttggaagctcttctgtctgtcttgtctttgtgtgtttctgtgatatggtnggggatctcttgaaggnactgcttgacaaaagtcaaaaatttattcttgagcaatttaaa

SEQ ID NO: 303401 - DNA, 170 bp, Homo Sapiens
tggagaacatgagtccattcatagcacagaggtggtgtctagactaattacatacatgccgattctttcagcaaatcatagttctcaatgtcattttaatgattatacataaagaagaatcttctcactctcgcgtaggaataattacattctccagcactttatatgcc

SEQ ID NO: 303402 - DNA, 396 bp, Homo Sapiens
  misc_feature (336)..(336): n is a, c, g, or t
  misc_feature (341)..(341): n is a, c, g, or t
  misc_feature (350)..(350): n is a, c, g, or t
attcacttttttcgaaggagacagttggcatgttaaaaggtgtctacttagaaaacccagggtttaacttgtttagtacaaaagtgtttgtatgtgtattttttatttcccatgaaggagggaaggaagtaaatctaaccttgttcctctcagagaagaacactgaaactatattaacatgaagtagaaacatgataattgatatgttatatttttcagccactttcttttaaaaagacagaacaagtatttgttttccgagttaacagatcagaataggcagtttgtctttttatgaacaggaaaaacgaggcttgtctaccgctaggcagaaancaggnaaagaaggnagtagtccttgctgtcttggttcctatcagggcaagtaggaccggg

SEQ ID NO: 303403 - DNA, 440 bp, Homo Sapiens
  misc_feature (420)..(420): n is a, c, g, or t
aaaaaaatctgatcattcctcagtgctacccatttctgtcctgtgtgggctgcttagctagacagcaggagaataaagtacaccgagaaccataatgaaaaaaccttccgtgtgttttgtcatgttttgttccagggaagcagttgatgagtgctgttactaatgctttctcccagatccattcagtggtggagaggaggaaaatgggctggttggatgtggtcttggtgccttgcagttactctgcactggttatgcatttaattctcctcttttctagttaaccttttgccagtgggttttccatagtctgggtatttgtccttatatcagttataccacctaaggcaactgggtgcaaaatggcattctgttcactcactgtctggggccttccccaccctagtcttgggcacattnccttcaaggatgtagttacc

SEQ ID NO: 303404 - DNA, 259 bp, Homo Sapiens
  misc_feature (207)..(207): n is a, c, g, or t
  misc_feature (213)..(213): n is a, c, g, or t
  misc_feature (223)..(223): n is a, c, g, or t
  misc_feature (245)..(245): n is a, c, g, or t
cctccacatgttactcattcagtaacattactacttgtttttaatcaagagtgatagaaattccttgacctgataaatacaacatatagaatatgttttaagttttctttggcgacttaacaccattattaatatcaattactatacttcatctctaattaaaaccataaatgggaattttaggcttgcttcaccaatttcattccnaatggnttggacattntttcaagttggacatatttgtncagggttgggaaag

SEQ ID NO: 303405 - DNA, 282 bp, Homo Sapiens
aataccctgtctctctagtacggaagtaatctcttccttcttcatgtatagaaagtacctgacagcttcttgctgaccttgatgtcattctattttgcctttaaaggacatggacctttcttaattccattaattgaatatgacttgcatcaggattcttattcgctttccatagtgccttcaatggaggaggcagtgttaaacacagactattcatctggaattaaagactacttgtccagcctcttagctaaagtctaagtctgcttctgccttatttct

SEQ ID NO: 303406 - DNA, 316 bp, Homo Sapiens
  misc_feature (80)..(122): n is a, c, g, or t
  misc_feature (258)..(258): n is a, c, g, or t
  misc_feature (264)..(264): n is a, c, g, or t
  misc_feature (270)..(270): n is a, c, g, or t
  misc_feature (279)..(279): n is a, c, g, or t
gtccttgaatatgttttcaacaaatagaaatatgaactcattctccaaaacctcaagactagccataactatttcctctnnnnnnnnnnnnnnnnnnnnnnnnnnnnnnnnnnnnnnnnnnngcatgtgtataaattcttttccaaacagaccagctgaggtccacagaaaatatattataaaagggtaacaaacaggcatcctttatggatttccacaagtaaggtcatgggtgaaaaatcttaggcagttatgggnacaccnttgggnactttgggnccctcattttggatggttgtagggaaatctaggtggc

SEQ ID NO: 303407 - DNA, 365 bp, Homo Sapiens
gtatattaacagtcagcacctactccagtacttaaactgttgaaaactaacctacttgttaaggagagaaaaaccttcacaaacactccatgtcctccctgctctggggaagggcctctgggtggagcaatcccacactagcctatgttcagtagggaatgtgtcacgggcacagtgggcacaggcaagcaacctaaggatgttgaagcttcttggggtcaggtctccaaatcatgggcttttattattttgtaaatattattttccaccccaggaactacccataaaaataaactgggaaaggttaaggtggtcaaaataaaagtgttttgttttaacctgccagggcaggattattctcacat

SEQ ID NO: 303408 - DNA, 273 bp, Homo Sapiens
  misc_feature (13)..(13): n is a, c, g, or t
  misc_feature (36)..(36): n is a, c, g, or t
  misc_feature (95)..(95): n is a, c, g, or t
  misc_feature (100)..(100): n is a, c, g, or t
  misc_feature (109)..(111): n is a, c, g, or t
  misc_feature (113)..(113): n is a, c, g, or t
  misc_feature (117)..(118): n is a, c, g, or t
  misc_feature (120)..(120): n is a, c, g, or t
  misc_feature (141)..(141): n is a, c, g, or t
  misc_feature (178)..(178): n is a, c, g, or t
  misc_feature (230)..(230): n is a, c, g, or t
  misc_feature (263)..(263): n is a, c, g, or t
atcagggctcacngcagcctcgacttccctggactnaagcaagcctcccacctaggcctccctggttgctgggactacagggggcatgctaccangcccnactaatagnnnantctnntnggatggactgaagaatattcnactgggtatatggaccatatttgccttacccactcanctgttgatggacagttaggttgcttccatgtcttgggctactgtgaataggngttgtaataaacatgagagagcagatatctctncaatatactg

SEQ ID NO: 303409 - DNA, 106 bp, Homo Sapiens
  misc_feature (50)..(50): n is a, c, g, or t
  misc_feature (75)..(75): n is a, c, g, or t
  misc_feature (81)..(81): n is a, c, g, or t
  misc_feature (95)..(95): n is a, c, g, or t
ggcgtgagggcaccgctacgttttaaatgggggaactctacgggaggggngaactatggtgtcaaggaaggctgntttaantttttttaaagggncttaaggactt

SEQ ID NO: 303410 - DNA, 225 bp, Homo Sapiens
  misc_feature (144)..(144): n is a, c, g, or t
tcctacaaacttttgaatcagcttatctagtatacaaatcctcttggtatttttcttgggatcatgttaaaatatagataaacaaacataactattacacttatgaagttaatttttgtatctaagagctttatgtgttttccngtttgttgaaaaattccttcttgtcccttagtatttcaatgttttctgcatgcgattttaaatgcttctttatcactaaat

SEQ ID NO: 303411 - DNA, 341 bp, Homo Sapiens
  misc_feature (61)..(61): n is a, c, g, or t
  misc_feature (238)..(238): n is a, c, g, or t
  misc_feature (286)..(286): n is a, c, g, or t
gctcattatgatattaggtttttgttcatttaatctgtgttttcctgttagtccatttttncctttggctggattagaagttatacactttcatggttatccttgaaactttaccttgcgtacttaaagacttgaattatgtcaactctattaattgatatcttaactacaaagagagaccttagaattctttaactttgtcatccacctctcgtcttacatacttttgttgtctggngttatttcatgtaatgtttgctcagattcaactatgtgtttacaattnctttgcccatcacttctatctcagactctccttctgaaggtaatttttctttctg

SEQ ID NO: 303412 - DNA, 431 bp, Homo Sapiens
  misc_feature (254)..(254): n is a, c, g, or t
  misc_feature (264)..(264): n is a, c, g, or t
  misc_feature (330)..(330): n is a, c, g, or t
  misc_feature (343)..(343): n is a, c, g, or t
  misc_feature (368)..(368): n is a, c, g, or t
  misc_feature (409)..(409): n is a, c, g, or t
  misc_feature (420)..(420): n is a, c, g, or t
tgtaaggctttatttaggagcttgcatttattaggaaaggtgaaagtgcaggtcactgagaggttatttcaggaaaaggctctgcagatgatttcgtcacttcaaacaggtgccatgatgtgtttgctcaagcacaatttgggatatcagatcacaaactcagggaggccacaaatgccaaatgggtacaagtaaaatacttaaaagacaaggcccttcctccatgttacgaaaggaaaaaaatccatatgaantaacaaaaantctgggctactgcttgggtgtgaccgacaacaacccactccccatactgggagaagggggcagggnaaatttaaatgcnggaaggaggccggtagctgaggagnggaggactcactttgggtttttgggggagagccctggaggnggagggctttngacctttttcc

SEQ ID NO: 303413 - DNA, 410 bp, Homo Sapiens
  misc_feature (174)..(174): n is a, c, g, or t
  misc_feature (221)..(221): n is a, c, g, or t
  misc_feature (313)..(313): n is a, c, g, or t
  misc_feature (350)..(350): n is a, c, g, or t
  misc_feature (399)..(399): n is a, c, g, or t
cttactgtgttgcccaggctggtcttggcttcaagggaactcttggcttcaagggatcctcccacttcagcctcccaagcgttaggtttacaggcaggagccaccgcacctggcctgattcattttttgaatgttgaagcagacttgcatacctgggaataactctcacttgancatgaatgaaaatgaaaatacaacatatggaaatgtgtgtgtttttntgttttgtttttccctttcatgtcagatgggttaatgtgctaatgttgtaacaagggtcaagggtgggcatatcccacatacatgcatggantacccaggtcatcacacttatggaactacggaaaagntccaccatgtgaaaatttttataacaaatctttttatgtgttgttgggnttccctttata

SEQ ID NO: 303414 - DNA, 488 bp, Homo Sapiens
  misc_feature (21)..(21): n is a, c, g, or t
  misc_feature (61)..(61): n is a, c, g, or t
  misc_feature (310)..(310): n is a, c, g, or t
  misc_feature (334)..(334): n is a, c, g, or t
  misc_feature (344)..(344): n is a, c, g, or t
  misc_feature (353)..(353): n is a, c, g, or t
  misc_feature (360)..(360): n is a, c, g, or t
  misc_feature (383)..(383): n is a, c, g, or t
  misc_feature (389)..(389): n is a, c, g, or t
  misc_feature (416)..(416): n is a, c, g, or t
  misc_feature (434)..(434): n is a, c, g, or t
  misc_feature (442)..(442): n is a, c, g, or t
  misc_feature (447)..(447): n is a, c, g, or t
  misc_feature (454)..(454): n is a, c, g, or t
  misc_feature (462)..(462): n is a, c, g, or t
aaatgtcagtagaaccttctntccaccaaagaggaacatcttgaaggagttgggctgcttnatttactctgtggagggatctgttctctctggctttactttgtctaatcactacccctttgctgtcgagccccgatatttaatgagtaaacaaactcatataaaaccagtttggccgggctggtgactggttttaagaaagtcagtgatgatttcacggtgtttggggagcggtacccacaaacctttagagccttttacaaagactgaagagttttaagtagagttcaacctgtgggacaagctggtnatagaactgtttgaaacaggtganacatgcatgntttctgctntcctttncagcattctattattgggaaagncgactnagcacaccctgctgccagcacctactnagggaaaaggaaagcccngggaaatngcgtntgaaccngtggagtngtggattgtacacagtaagcttattt

SEQ ID NO: 303415 - DNA, 364 bp, Homo Sapiens
  misc_feature (81)..(81): n is a, c, g, or t
  misc_feature (149)..(149): n is a, c, g, or t
  misc_feature (158)..(158): n is a, c, g, or t
  misc_feature (163)..(163): n is a, c, g, or t
  misc_feature (179)..(179): n is a, c, g, or t
  misc_feature (246)..(246): n is a, c, g, or t
  misc_feature (283)..(283): n is a, c, g, or t
tacctattcattgctatgaaaatcatgacagtaaatatgcctgggctcttggacttacactgctactttaccaacttcatnaaaaagttggccaagagaattttttaagctatttgaaacattctatttccttaaatgtatccttaccnatgttcctnaactntgttaactgtttagantgaaagaaaactggccttctcaacaattccaaaaatttaatgatcagctaggcctttctggacagtnactagtataagccactattcctttctgttttcaaggntactaatctacccacaaaccatttaccattatcacaaaagggctgagtatattggattaaaccaagtttttcttaattggg

SEQ ID NO: 303416 - DNA, 533 bp, Homo Sapiens
  misc_feature (436)..(436): n is a, c, g, or t
  misc_feature (468)..(468): n is a, c, g, or t
  misc_feature (495)..(495): n is a, c, g, or t
  misc_feature (516)..(516): n is a, c, g, or t
tggaaattattacaagattgttaactagaatatagacctaatttccaccattttacatgcatttttatgtgtgtgtgtttttctgtgtggtcttatcccatgtatagatttgtttaacaaccaccacagtcatgatataaaactgttcaatagaacctcccttgtgcttccccttcataatcatacccaccctgccccatccttgctccctgggcaatgattaatctgttctgtatctctaaaattttctaatttcgagaatgttacataaatagagtcctatacaatgtagtcttttgggattgacgttcttcaccaaatgtaatccttttggagtcatatctgggttgttgtgtgtatcagtaatttgttccaactgagtagtattccctgggtgggatagaccagaatttctttatccattactgttgaaggncattgggttgtttccccgttttgcattacagntaagttgcgtgaacatcagcaggcggnttttgtgtgaccataaggttncattctctggggtaaag

SEQ ID NO: 303417 - DNA, 302 bp, Homo Sapiens
  misc_feature (108)..(108): n is a, c, g, or t
  misc_feature (113)..(113): n is a, c, g, or t
  misc_feature (148)..(148): n is a, c, g, or t
  misc_feature (223)..(223): n is a, c, g, or t
  misc_feature (252)..(252): n is a, c, g, or t
  misc_feature (276)..(276): n is a, c, g, or t
attagcactgtgctgggccaaaagataacatttttcattcttttatgatttggtatcaagcgaataaaatccctttctcaaccccaatatcatattctttattgtttnctagnactttaatttagttatttataattaaatatctaanctaggctgaaatttatttttgtctaaggggtatatttgttttacttacctactgatgggaaatttagggttgttnccagtaccggggctattgttaataaagcngccaccaacatttgttttacaacnctttttgtagggcaaagggtttccat

SEQ ID NO: 303418 - DNA, 119 bp, Homo Sapiens
agttctctatttgcttgtcatagatgccagggacatgctgctagatgaggtattctggttgcattcctttcagaagggggtgctaccatttttcctgagtgttattagctgccttccca

SEQ ID NO: 303419 - DNA, 285 bp, Homo Sapiens
tttattttggctcagttctttattttatagttagcaaatgaaattagaaactgctttggcacaggtcaaaggtggctcccatatactcactagttttcctcaggattatcaatactcattatcaaaatgtacttttgcttggttaccatttaaagttgccaccaatgtaaatgacaggggttagggtgggtatgggtgtggggaacctgagcatacacacaattttttaaatcttttagatgtaatgcaattaaccatatctaatattcttttaggagaacacaa

SEQ ID NO: 303420 - DNA, 421 bp, Homo Sapiens
  misc_feature (331)..(331): n is a, c, g, or t
  misc_feature (409)..(409): n is a, c, g, or t
ctttatttctgaggtggctcacgtttggatagaagtagcaactctccgcttacacctgcacgtttaaaacgcatatcagattgtgttatttctgtcctcagaatcttcctggccttcccgttgctttcaggataatacacatttcttagcctaacttcaagggcctacagggtcttgattctgctgaatttttcagtctttgctactttcatggaaaacacacctgcaggtacactcatattatgctcccaccatgccagtctacggtaatttaataactttaggatatgggcaaagttttatatgggtttactcaagtttttaatttttnttctaggcatttaggccaaaatcggattggaatttcattaatatttgctaggggcactggttttttaaaaacgggggntaaaaatggata

SEQ ID NO: 303421 - DNA, 517 bp, Homo Sapiens
  misc_feature (327)..(327): n is a, c, g, or t
  misc_feature (359)..(359): n is a, c, g, or t
  misc_feature (381)..(381): n is a, c, g, or t
  misc_feature (413)..(413): n is a, c, g, or t
  misc_feature (436)..(436): n is a, c, g, or t
  misc_feature (458)..(458): n is a, c, g, or t
  misc_feature (465)..(465): n is a, c, g, or t
gaagatgcaaaaatagtagactccctgtgtacccttcactcagcttcccacaggagaacatcttatgcaaccctcagacatgatcaaagccaggaaactgacactggtacaatagcattaactgagctgcagaccttatttttcttattaaacctagggatctacagcattttagaagcattttagaatttcataagctttagcattgttgtttgtcttttagaggatgtttcaatcccttccaattgacaatcagttaaaattcgtttccgtaagttcaacaaatactggaggatgaatttcacaggttccacgggtccacatggncgctctatgggtgcatcgtctctgatggggtngcacagaggtgaccttctaccncaggttctgaggagattctggaggacattaanggaccttaggacagttagttttngttttatagggtcagaccgggngagcctnggagttctgataatgggttccgggctgtcatttagtattttagtatggtttt

SEQ ID NO: 303422 - DNA, 406 bp, Homo Sapiens
  misc_feature (265)..(265): n is a, c, g, or t
  misc_feature (346)..(346): n is a, c, g, or t
  misc_feature (360)..(360): n is a, c, g, or t
cttttttcaacaacatgggtttatacacccaaaatacataacactgacacagtattacttaacacgtagtcactattgaaattttcccaattattccaaaatgtcctataattatactttgtttaattcaggatcaaaccaagggatcatgcatttcatttgggtgggttatcttctgccccttatttttcagggactcaggttctggggaatgatattcccgggggaaggccctctgtggactccccctacccggtatgggggntatatggcctctttcaggatggcttttcataccaccactggtcaggggggatccattacactattttggcaatcatctggnttatctatgggccnctcacaataaacaggggaatctctttggagggggctttttactttc

SEQ ID NO: 303423 - DNA, 332 bp, Homo Sapiens
  misc_feature (238)..(238): n is a, c, g, or t
  misc_feature (271)..(271): n is a, c, g, or t
  misc_feature (320)..(320): n is a, c, g, or t
ataaaaccaggtggtgatttggcccgctaactgtagtctaccaacccctgctctaaagtaaagaaatcctaatttggagttaaaaggcagatgatctccattttactcctgtgctcaaaattattttaacaataaaacaaaagctaaatctatcacaataacacaatctcagggcagctgaaaaggaaaaggcaggatgtccacaggaatttctgattttgggtaaacaatctaaggnaatacaaatatatcttttatggacaggataccntctaattgcatttttatgggggaaaggttggaggtcccaacactggggnggataaatctga

SEQ ID NO: 303424 - DNA, 291 bp, Homo Sapiens
  misc_feature (13)..(13): n is a, c, g, or t
  misc_feature (45)..(45): n is a, c, g, or t
  misc_feature (217)..(217): n is a, c, g, or t
  misc_feature (269)..(269): n is a, c, g, or t
tgaagtttatttnctctggcagtatgttttagtttcttgtttttnattttgttgtgtgtgtatgtgttgtagattttatgatttgaggttaccatgaggcttgcaaataacataacatgttattttaaagtgacaacttgacactgattgcaaaaacaaacagggcgaagagaactaataaaaactgtacactttaacttcattcctcctgtttttnaaggtttttatgggtttctatttatatctccttgtactattttgaaaagggnattgcaggttatcatttgttca

SEQ ID NO: 303425 - DNA, 413 bp, Homo Sapiens
  misc_feature (148)..(299): n is a, c, g, or t
  misc_feature (302)..(310): n is a, c, g, or t
  misc_feature (388)..(388): n is a, c, g, or t
ttcaaacactatacacagagctcggtttcaaaaccagtctctattcctctcagagaaagagctgtgtgtctatctgctgtcagatgaaagacatgctgagactggaaaatcgcaaaagatacatttattactgctttaaagaaaatgnnnnnnnnnnnnnnnnnnnnnnnnnnnnnnnnnnnnnnnnnnnnnnnnnnnnnnnnnnnnnnnnnnnnnnnnnnnnnnnnnnnnnnnnnnnnnnnnnnnnnnnnnnnnnnnnnnnnnnnnnnnnnnnnnnnnnnnnnnnnnnnnnnnnnnnngannnnnnnnnaatctgtggcaattgatataataatgattctactttaagggggctgctatagtgtttgacatggaatatttgggtccntaataaccctttaaaaggaatgttt

SEQ ID NO: 303426 - DNA, 453 bp, Homo Sapiens
  misc_feature (398)..(398): n is a, c, g, or t
  misc_feature (407)..(407): n is a, c, g, or t
  misc_feature (418)..(418): n is a, c, g, or t
  misc_feature (426)..(426): n is a, c, g, or t
  misc_feature (436)..(436): n is a, c, g, or t
gggccttgtgtttctgaggaaaagtcagaagatgtattctgaagagccttagctttcatgtgagcttcagaagtatttaaacaatcgcggttggctggctgcagagttgatggaggaacggcttcattccgaggtgccgccgtgctctgaaaggagccgcgaccatgcgaggcatttgttagggcagcggttctcaagggggtcctcaggatcaaaactattttcataatcatacggtgtgagtctcttgtgctgttgacatttgcctgatgggtgaaaagcaatgatggggtgaaattgccggcaccgtcacgtgattccaggctgtgggtaccagaatctgccagtagccactgcattctttactgtcacctactcacaggggggtgaaaaagggntcatatcanttaaggatggnccttgaantaattaaaantgtttgatgttgattaa

SEQ ID NO: 303427 - DNA, 355 bp, Homo Sapiens
  misc_feature (150)..(150): n is a, c, g, or t
  misc_feature (332)..(332): n is a, c, g, or t
  misc_feature (342)..(342): n is a, c, g, or t
gctgagcaaactaaggtgagaaacactaaggctgctcattgctatggctgagtttctatcccagactggttacctttgtccttggtgtgaatcagtttgcaggagtaggctaggagaggcattctttccttttcctaaagcagagcatgnaatacaggtattcattaagccattgtttcctaggctgggtgttcatctactgggcattgtcaatgattgcatataacaaaaaggggaatgggagagaaaaatctgttctgagttcacaaaactcactggaaggaaaaaatgttaaagtccaggctggatatgtccaacagcaggggaaatanttcattgtcntcttagggaaaag

SEQ ID NO: 303428 - DNA, 361 bp, Homo Sapiens
  misc_feature (281)..(281): n is a, c, g, or t
  misc_feature (315)..(315): n is a, c, g, or t
  misc_feature (331)..(331): n is a, c, g, or t
  misc_feature (342)..(342): n is a, c, g, or t
tttatggcaaagaactctattacccatggcatggtaagcattatgagcattatcatccacatcagtttcccttgctccccatccccaagacccatagggtgaatgtgacatgggcccagatggatgcctgtacatgcaattggttgcattgcagaagaggtacactggacttggggaattcatctgttttatatcaagctgtaagaaagcctgttctttgtcccagagtgaaacattatctcatacctcaaagttgctctctgcaaacacaactgtaaganacaaacgtgataaggaaatgatcaggggcttggntttcttaggccttctnagggtagggtngtgtaggccaggcaggtac

SEQ ID NO: 303429 - DNA, 115 bp, Homo Sapiens
cttgataaggaaatacgcaacttttaaatgttaatttagaaaataaccagcaaatgtagcagatttttagtgtcccctaaattagtgttcaaggggatcaatctggacgcagaga

SEQ ID NO: 303430 - DNA, 364 bp, Homo Sapiens
  misc_feature (238)..(238): n is a, c, g, or t
  misc_feature (281)..(281): n is a, c, g, or t
  misc_feature (296)..(296): n is a, c, g, or t
  misc_feature (302)..(302): n is a, c, g, or t
acacattcctttgagaagctgagaaacattatgaatgcttaacccagaaaactgctcacgcgcgcttcctccccagatgtgtgcgcaattttagaaggctttatcctcacacacctattgttgctggagtgagaactcctagtgtatagggcagtgtttttaaaaatatctttcccccacggaacataggaatatttagtcccaaatgacagaatgcactcctgaaggtagggcaccngcctatatttggggaaagtttattatgggattttaatattganctttctgcagatccntagggncaatctgtttaggaaagatcgggcaaagggctttgggcatcaggaaagggctccaggaatcc

SEQ ID NO: 303431 - DNA, 413 bp, Homo Sapiens
  misc_feature (318)..(318): n is a, c, g, or t
  misc_feature (338)..(338): n is a, c, g, or t
  misc_feature (368)..(368): n is a, c, g, or t
  misc_feature (393)..(393): n is a, c, g, or t
aattctaattagaaaatatacacaaaaacacgtcctttcattgcagccagctgaatgccacaattcacattcgagctggtgtggtcaaacgcagcacactggagtacatctgaatgaaggagctcatgttaactgctgcttttcacgtcaataacacagctacccaaacaaaaatccgtcaaacagacaccgaaagaggaaaagtaggagctgaatccacacacacaaggattgcatggctacaaaatctgcgggtttctgaaggggaatgtggaaggatttaaatggggaaaccaaccaacttctcctcccgggggntggatggacaaggtgggggnatctggctggtcaccgctgtaggctggggnattctgggggcacccaagggagggnaaacacgttttaggtggaca

SEQ ID NO: 303432 - DNA, 301 bp, Homo Sapiens
  misc_feature (48)..(48): n is a, c, g, or t
  misc_feature (131)..(131): n is a, c, g, or t
  misc_feature (254)..(254): n is a, c, g, or t
  misc_feature (278)..(278): n is a, c, g, or t
  misc_feature (289)..(289): n is a, c, g, or t
atacattgtattattattccagaagttttggtttaacagaagcatttnctatatctttaatcatgtaatttaaaagtgctaattcttacccaaaatgtataattctctgaatgaaaataaatatataatancaagttgtgagtaggtcaacatacagttacatagaaattatggagtggaaagttacaataaccaaggataaaaaagtttactaaactcaacagtaggatttgagggtgacagaaggaaaggantcaggcaaactttaagggtaggancaatagggggntaaataatcaga

SEQ ID NO: 303433 - DNA, 171 bp, Homo Sapiens
ttggtaaggtaagaggacacacaaaggaagtaactgcagtaaaccttagctggcagcacaagtgaggaggtgtgcttgaaagagaaatggagtgtctggaggtgggtgagtatattctggtaggtgtgacaaaggcactgttcctccaacaccagtcctgggaaaggcata

SEQ ID NO: 303434 - DNA, 363 bp, Homo Sapiens
  misc_feature (340)..(340): n is a, c, g, or t
tcaaaacattttaagtcagtgtaatgcacatgcattttacactaacatccatagatttccacaatatagtaaaatgaaaacagctctatcttgatttactttgaaaactcaaagaaagctacctagtttgagacttctgaatttttttacattattgtcgtgctcaaattctactacatgggtgaaaattctaggcattttccaggaaatatattattgtacatagggtaaaatgataaaactgattctagggaagggggaatttaaaaaaccagaaaaggcttaaattgggaggggaacataatctgggattaactattccaatttattgaggtatccnctggttattctgggccttgccaa

SEQ ID NO: 303435 - DNA, 188 bp, Homo Sapiens
  misc_feature (132)..(141): n is a, c, g, or t
atgagacagggtcttgctatgttgtctaggctggcctcaaactcctgaattcaagtaatcctcccacttcagcctcccaagtaactgggactacagatgtgtgccactgtgccccactaattttatttaacnnnnnnnnnnaattacaggagctatatagtttactttagaaagtacatacaaaaaaa

SEQ ID NO: 303436 - DNA, 110 bp, Homo Sapiens
acatttgtgaattagttcaagaatgctagaaaagtgtcgagttgtgcacatccatttcttgtttcacaatgtttaaaagtgacagtaattcattttgtaaactaaaaaaa

SEQ ID NO: 303437 - DNA, 316 bp, Homo Sapiens
  misc_feature (12)..(12): n is a, c, g, or t
  misc_feature (170)..(170): n is a, c, g, or t
  misc_feature (245)..(245): n is a, c, g, or t
  misc_feature (252)..(252): n is a, c, g, or t
  misc_feature (258)..(258): n is a, c, g, or t
  misc_feature (290)..(290): n is a, c, g, or t
  misc_feature (300)..(300): n is a, c, g, or t
tggtcttctttncatctcactggctgcttcttttcaggtctcctttgtggggccctccttctctctcccatctataaatgtcacagtgcttgggtttcagctcttgttccttgctccacccacattccctcctcagtaagcgcattatcttctgaccacctccttttctnccctatgtcctcaaaacaataactcacattccttgttccattgggttcccccgttagatccaggttcaatgcaanattaacnatgtangcttctctttcctttgagaggtgccaggaacngtggaattantttaaaattaagggaa

SEQ ID NO: 303438 - DNA, 152 bp, Homo Sapiens
  misc_feature (44)..(44): n is a, c, g, or t
  misc_feature (68)..(68): n is a, c, g, or t
  misc_feature (75)..(75): n is a, c, g, or t
  misc_feature (80)..(80): n is a, c, g, or t
  misc_feature (90)..(90): n is a, c, g, or t
  misc_feature (122)..(122): n is a, c, g, or t
ggtttatacattttaagtatctgctataaagttgggggaacagntagggatcaagtttattttgatgnaaaaatnaaagncctcagacanaatttttgggggggagaaaaggcaattcccanttatgttgaaggtttaggaaagtttagatt

SEQ ID NO: 303439 - DNA, 414 bp, Homo Sapiens
  misc_feature (304)..(304): n is a, c, g, or t
  misc_feature (341)..(341): n is a, c, g, or t
  misc_feature (350)..(350): n is a, c, g, or t
  misc_feature (374)..(374): n is a, c, g, or t
  misc_feature (382)..(382): n is a, c, g, or t
  misc_feature (392)..(392): n is a, c, g, or t
aaacaactttgtcatacttttgttttaccactttagattttgatagcatatgctcataattaataccttatattgtaaaatggcaagtactttaagcaaaccaaaagaagattaagtaattaaatcaagcttttagattaaaaacataaatatttggtcatatgtttgcctaatgtttatgcatactgtaccaggcactaatgctcaacagtattcatgacttcagtttatgtggaacttagagtgtagcaggatatatagaatatgtggtaactcttaagtaactagaatttttttaaaaganaccttttgttttagtacagttttaggatttacagaanatataactntaatgcagaagacaaacaactccncttatttnggactaggtntattggtttacatatccgctag

SEQ ID NO: 303440 - DNA, 336 bp, Homo Sapiens
  misc_feature (16)..(16): n is a, c, g, or t
  misc_feature (71)..(71): n is a, c, g, or t
  misc_feature (87)..(87): n is a, c, g, or t
  misc_feature (90)..(90): n is a, c, g, or t
  misc_feature (119)..(120): n is a, c, g, or t
  misc_feature (178)..(178): n is a, c, g, or t
  misc_feature (273)..(273): n is a, c, g, or t
  misc_feature (293)..(293): n is a, c, g, or t
  misc_feature (301)..(301): n is a, c, g, or t
agcatgcttagtgatntctatcttcagcccaatcattttatatttgaaacctatatttcttatcactagtnattagtacctttatanatnaaaaatatcttccactcaccttagtaagnnaaggacaaaactcaaaattttcaagtaagtgccaaacgatgtacagagaaggaaaaanactacattatttcttggagtgtattaaagttaactaaattcgaacttgggcaaatgaaaggcagtttagggagctgaaagcatggggttatagtntttacaggaggtaggatggnataaaaanttgaaggctatggtccttatggggtgggtcgttgg

SEQ ID NO: 303441 - DNA, 414 bp, Homo Sapiens
  misc_feature (265)..(305): n is a, c, g, or t
  misc_feature (326)..(326): n is a, c, g, or t
  misc_feature (388)..(388): n is a, c, g, or t
  misc_feature (396)..(396): n is a, c, g, or t
gcaggcgctcctctcctccctctgtgcctgttctcagactctgattcaaagcaggagccccgagcacccttcactgccccgtggtctttttccttaagtattttcaagtttaattcaagtccttgttggcttcatttttcatattaataaggcatttattaacaaacccattcatgatgtgcaaatctgaaggctttaaactacggtgaactgttattttacagagagggtgtttttggtgctaattggagcattgttacagtcnnnnnnnnnnnnnnnnnnnnnnnnnnnnnnnnnnnnnnnnntcagtgggtattaagtgcatntatagggttatgcagccagcaccactattttgcaatattttgggttacctgaaaatgaaacnctggtaantacaagggtcactccccc

SEQ ID NO: 303442 - DNA, 143 bp, Homo Sapiens
  misc_feature (86)..(86): n is a, c, g, or t
  misc_feature (100)..(100): n is a, c, g, or t
  misc_feature (114)..(114): n is a, c, g, or t
ggaagaactggagggtttccccttagaatagagaagggccggttcttctaacactttttgaaatagctggcttttgacttagattnagccccaaaatttngagctctttttcantttacacacaaaaactagctgcagaaaaa

SEQ ID NO: 303443 - DNA, 236 bp, Homo Sapiens
tcccattaaaacatttcaattatatttaaaagaatcactgccaataactatactccttttcattccaggaatgcacatttaaagacttggcttatgttaaacatatgtagagagacatttttagcatctagaactgaatttcttacccatactgtctctgctcactctcgagtgattctctaataagaggtaagcattctagggcaagtcaagggatggaagaggcaaaattgttg

SEQ ID NO: 303444 - DNA, 310 bp, Homo Sapiens
  misc_feature (83)..(83): n is a, c, g, or t
  misc_feature (107)..(107): n is a, c, g, or t
  misc_feature (149)..(149): n is a, c, g, or t
  misc_feature (151)..(153): n is a, c, g, or t
  misc_feature (161)..(161): n is a, c, g, or t
  misc_feature (169)..(170): n is a, c, g, or t
  misc_feature (184)..(184): n is a, c, g, or t
  misc_feature (221)..(221): n is a, c, g, or t
  misc_feature (225)..(225): n is a, c, g, or t
  misc_feature (263)..(263): n is a, c, g, or t
  misc_feature (266)..(266): n is a, c, g, or t
  misc_feature (298)..(298): n is a, c, g, or t
ctcttagtttattctttggtactataaatacagtcaagtagccaaggcagcaggcttagcgttattttgacacattgattttncaaattaatgagtagcgtaagagnttgtaagtcaaatataagtggacttaattctctctatatatnannntatatatnggggcgtnncctttctatttaanagacacatttttaattttaggtaaagaatagattgantaanatgttttttaaaataaatgattatggaatttaataaangtnacatgggttttggtttcataaaactcaaggantttttaaagtat

SEQ ID NO: 303445 - DNA, 205 bp, Homo Sapiens
  misc_feature (144)..(144): n is a, c, g, or t
  misc_feature (173)..(173): n is a, c, g, or t
  misc_feature (180)..(180): n is a, c, g, or t
atgagccaccgtgtctccagccaagacaagttttatgttctataaaggatcggcttattatatgcttcttctccatgggaagtaatatattaaaattcatttttatctacagtgtgggcccttgggtgggggaaaagctccccnttcctgctctgaggagtgaactccataantgggggntgccatgggtgctgccacaacccag

SEQ ID NO: 303446 - DNA, 432 bp, Homo Sapiens
  misc_feature (78)..(115): n is a, c, g, or t
  misc_feature (400)..(400): n is a, c, g, or t
  misc_feature (421)..(421): n is a, c, g, or t
ttatcatcttcatcatagacattggcttggtctcgtggtttgctcagttttccctgcactattctgagtgaaatgggnnnnnnnnnnnnnnnnnnnnnnnnnnnnnnnnnnnnnnactggaggtcattgtatggttttctgttgaaagctaccattcttgaagtttcttatatattgaggataactaaaggaaaatgtgcccactactgttttcttttatgaagaaagagtcccctctttttccccgggaacagatgggccagtttgtcgagggaggggagagcaggcctggggagcaggcttgcatcgcctctctctgggggtgtgggcagcacccatggggcaagccccagtattgggagttcaactcctcaggagcagggaatggggggagcttttnccccaccaaggggccacactntaggataaaaa

SEQ ID NO: 303447 - DNA, 492 bp, Homo Sapiens
  misc_feature (391)..(391): n is a, c, g, or t
  misc_feature (411)..(411): n is a, c, g, or t
  misc_feature (449)..(449): n is a, c, g, or t
ggcacgaggggaaagagaaggcttggaggatcttctttataaaatacacgtaagtatggactgaattccaaacaaaccgcaaaatggaaggaacctcgttttatcgcatccaggtaaaggatagaaaaggtatcttcagttttcccagaagcaacatccacaaggacaactcgtaattttaaatgattaaaagtaattgcagtagatcagtgtcattcatagcaaattagttctgattgatggagaatgctgcatctgtggatttttatgttataaaattaatttaagacttcttttgttaaactcgtttaatcttctgcactactccgttctttccattatccttgtgcagttttaaggggctgggaatatctttgtacaacttaaattncagttgacttcttctggganaccccaagttggaacagacacatatattagtgggagcnctggttgggaagggggcacccgtacacactatttagtagcctt

SEQ ID NO: 303448 - DNA, 313 bp, Homo Sapiens
  misc_feature (75)..(75): n is a, c, g, or t
  misc_feature (94)..(94): n is a, c, g, or t
  misc_feature (216)..(216): n is a, c, g, or t
  misc_feature (228)..(228): n is a, c, g, or t
  misc_feature (274)..(274): n is a, c, g, or t
  misc_feature (288)..(288): n is a, c, g, or t
  misc_feature (302)..(302): n is a, c, g, or t
ataatcatgtcatgggcagatattatcttgatccccattctaccatcaaataatggagacctggaaagacaaggncacctgcctaaggtccttnctcttcataaatgcacagccaggaaactgaagcctgtgtcttttgggtcctccttcaaggacctctccacaccctaacctaagctaagctgttcctcagtctttcaagcctgaagagatgantcttatattggntacgattatatttgaatggttcaaacaagatagtgtatttttctcncacttcaaagtctnaaggtttggaagtncagggactagt

SEQ ID NO: 303449 - DNA, 418 bp, Homo Sapiens
  misc_feature (366)..(366): n is a, c, g, or t
  misc_feature (396)..(396): n is a, c, g, or t
gaatctagaaaagtcacaaatatagaaataaaaccttcattttaagcatttttctcttcttcatggatgtttataagaaaacagtagaagtagggttcgaaagtgaaaagtgttcaatcttgcatacacttgtgatatttgtacctatggctctattgaagttgaattcaaaagtgagtcaaaactaggcagaactgtaatctatttccctctcagctgaacttctgacagatctaagagattcaaccctctgcagaacatgggaaaatctggatagggcagaacccacttgaaagtagaaatagagtcagtctaatttggggaaacaaaacaaaacttaacagaaaggaaggtttaacatcagtncttttactggctattttttgccaaattccnggcttacctttaaatatggagg

SEQ ID NO: 303450 - DNA, 471 bp, Homo Sapiens
  misc_feature (360)..(360): n is a, c, g, or t
acgtatgtaacaaacacatctgaccagccaagcagggagactatgtaacaaacacaacttaccagccaagcagggagactatgtaacaaacatatctggccaaaatggaaactaaaagccagatgagcttcccaaggctataatttgtttcactttcagtcacaaaccagctcacagcaagggcactttccaagccacacagagactgagattcttcaacaaatgcaccagaacctaactccccaggactggaaaggcactgtcagactgcggaggtcagacctgagctgctccttccacgcagtcccccacctccctcctgggacccacccctggcaccccaaggttcagcctgcctcnccacaggcactgttccacagggcgattgggttggttttagggacccagttcaggggtgtgttcccaagggagggccattccattgtgggacaaacaacccaaggattaaaa

SEQ ID NO: 303451 - DNA, 137 bp, Homo Sapiens
  misc_feature (113)..(113): n is a, c, g, or t
atagtcatgaaccaccatccctgggccaatacattttaatgggaaacaacattgaagtcattgtttcagccacttaaccttggaaagcagtttattgaattgtgttgtgaaanttagaaagatggatttcagataaa

SEQ ID NO: 303452 - DNA, 117 bp, Homo Sapiens
  misc_feature (45)..(45): n is a, c, g, or t
  misc_feature (80)..(80): n is a, c, g, or t
  misc_feature (88)..(88): n is a, c, g, or t
  misc_feature (95)..(95): n is a, c, g, or t
ttagtttaatgactgtagcttagcattctaaaagtttaaaaaganaaccacagttatatatatggcttattatgcctttntaccaggnacaaaantatgtgtcttaaaacattgtaa

SEQ ID NO: 303453 - DNA, 405 bp, Homo Sapiens
  misc_feature (354)..(354): n is a, c, g, or t
  misc_feature (361)..(361): n is a, c, g, or t
  misc_feature (366)..(366): n is a, c, g, or t
  misc_feature (372)..(372): n is a, c, g, or t
  misc_feature (382)..(382): n is a, c, g, or t
ccagaacggcatcagaccctgtccctgccttgctccagctctgttctcaaggctgctttcctggtgtgggagcagcatccgctcagaagctccaagttctggttttgtcagatttttccttgttgtattgatggcccaactccatgaggcaaagttccttaaaaggctaatatggaaggcacattgtgaatttgttatgactctatgaagacgtgaattgatacttaaatataagctgttgctcaggtagaagtcattgttttgtgcgttgagttaactaaatgaaaagcttggttaccggcaccatgggatggccttcgatctacccttacctaacaccacatgggatttttnttatttntattnttcttnctgaacaganagacatttgggccaagacagggt

SEQ ID NO: 303454 - DNA, 338 bp, Homo Sapiens
aatgactaatccttcactataaaatgacctatgtggtttattaaaccgtgaactgaaacataaatgtgtaccaaaaacataactaaagtgtggttccagttttcattgcagttatatctaaagaactcttaaaagtttcagccatatgaagttaatagaattcactctgttctggttctatcgtgggtaagcaattctgctatactattttgccttatgtttgttaacctcagtgtccaatgatgcagtacatccattgcattctcaggcagcattggttcatgggaatgggtataatatgcattcatccatttatatattctacaagtttttgttga

SEQ ID NO: 303455 - DNA, 232 bp, Homo Sapiens
  misc_feature (19)..(19): n is a, c, g, or t
  misc_feature (25)..(25): n is a, c, g, or t
  misc_feature (39)..(39): n is a, c, g, or t
  misc_feature (51)..(51): n is a, c, g, or t
  misc_feature (56)..(56): n is a, c, g, or t
  misc_feature (63)..(63): n is a, c, g, or t
  misc_feature (71)..(71): n is a, c, g, or t
  misc_feature (88)..(88): n is a, c, g, or t
  misc_feature (126)..(126): n is a, c, g, or t
  misc_feature (134)..(134): n is a, c, g, or t
  misc_feature (136)..(136): n is a, c, g, or t
  misc_feature (140)..(140): n is a, c, g, or t
  misc_feature (172)..(172): n is a, c, g, or t
  misc_feature (196)..(196): n is a, c, g, or t
  misc_feature (204)..(204): n is a, c, g, or t
aacgactttaaaggtaagnactttnataatcatccctgnattacacatgtnaatangtgaatnataaacangatgaacaatgtagctngcacgttggggatgcagacctttgcagatggactacanctctcaantncctnctggcccttcttcctacctcccagcctctgangattaatcagataaagggggaganacagcctnagcagcacctgggaatcagcatgtgttt

SEQ ID NO: 303456 - DNA, 137 bp, Homo Sapiens
gtaataaaaggaacaaatcagtttctgatatgtgtgtacttggtatttctttttaatgcatatttactgtagtcaactagcagcaggcataactaattcctcatttcttcaccacagatgcacatgctcatacatac

SEQ ID NO: 303457 - DNA, 348 bp, Homo Sapiens
  misc_feature (272)..(272): n is a, c, g, or t
  misc_feature (290)..(290): n is a, c, g, or t
ctcattccagaaggaagagctaatgtggagaagcaggccttaaagaagacaacatttggctgaacaaaggaaaccatttcccccatttagaactatttgaaaatggaatgagctgcctgtcccaggaggtccctcaaccaaagatgacttcttagtaggtagagactttgtagagcagattaaagaattgcctttgcaggggaggggaaaaactgggtaaaataagctctacagattcaatgtattatcctggggatgactgctggcttgangagctaccttttgggccnggcatttttatagggaatgtaggctttagttacattatattcaggacattttaccttg

SEQ ID NO: 303458 - DNA, 307 bp, Homo Sapiens
  misc_feature (61)..(61): n is a, c, g, or t
  misc_feature (75)..(75): n is a, c, g, or t
  misc_feature (92)..(92): n is a, c, g, or t
  misc_feature (120)..(120): n is a, c, g, or t
  misc_feature (123)..(123): n is a, c, g, or t
  misc_feature (129)..(129): n is a, c, g, or t
  misc_feature (143)..(143): n is a, c, g, or t
  misc_feature (155)..(155): n is a, c, g, or t
  misc_feature (212)..(212): n is a, c, g, or t
  misc_feature (217)..(217): n is a, c, g, or t
  misc_feature (219)..(219): n is a, c, g, or t
  misc_feature (252)..(252): n is a, c, g, or t
  misc_feature (258)..(258): n is a, c, g, or t
  misc_feature (286)..(286): n is a, c, g, or t
  misc_feature (293)..(293): n is a, c, g, or t
tccatacgtttaaaaaacacttagggcaaatcaaatcaagtaataactcataatctctttnccattccatagttngctcatacataaaatanggctgcgctggcccggcgtcgctgggtnttncctcanggggtccccgagcngcgtcgcagagnggaccgacttccgggagggaagtgaccagcgactgagcggacggccggcgcgtttgncttgnanacatgcggcagtccctgcgggcgaaccccgggntccggnacaggcagcggcggaggcggcggctccngaggganggaggcggcggcgc

SEQ ID NO: 303459 - DNA, 330 bp, Homo Sapiens
gcggaaatgtctactcagatgtttgtccatatttaatcaggttttctttattactgggttgtaatggttctttatatattctataaacaagtcctttatcagatatataatttgcaaaaatcttctcacattctgtggtttgccatttcacattcttgatggtctcttttgaaaccccaaagttttaaattttgattacgtacagtttatgtatttttcctcttgttgcttatgcttttggtgggcaatgctattgtttttatttggtaacatttaggattcattactttaggaatcaaaaataaagtatttattgatattgaaactcta

SEQ ID NO: 303460 - DNA, 425 bp, Homo Sapiens
  misc_feature (400)..(400): n is a, c, g, or t
  misc_feature (405)..(405): n is a, c, g, or t
ggatgccctggccgttggtgctctgggctgctccctggataccattctgcttaaggccctagaaatctgaggctgtgatggacatagaagggtagatctccaaaatgtgtttagagtcattctcccattgtcttgatgaatagcttctggcttccttctacacatcctaatttccttatcccatggttgcttggccccacttttgtttttctgtcctaaacacactttttattcttcatacgaccaggctgagaatttttcaaaatctttttattcttctttccttttgattgtaagtttcatctctatattatttctctcttctcttatttttataagcagtaaagagaagccatgtagcactctggaacattttgctagagatttgttaacaacaaanattcnaattcattgctgtttaaatt

SEQ ID NO: 303461 - DNA, 202 bp, Homo Sapiens
  misc_feature (142)..(142): n is a, c, g, or t
  misc_feature (147)..(147): n is a, c, g, or t
  misc_feature (186)..(186): n is a, c, g, or t
tccaagataccaactaagaatatcacattacatctaatcatcatatctctttggggctctctttgctgtgaaaatttctcaaacttttctcattcttgatgatcttgactattttgaggtacttttgaggaaggtactgggncgggngttttgtaggaatgtcttctcatttataatttgcttganggtctttctcataata

SEQ ID NO: 303462 - DNA, 386 bp, Homo Sapiens
  misc_feature (183)..(183): n is a, c, g, or t
  misc_feature (370)..(370): n is a, c, g, or t
agtttttcagcacagcactggttccatggcaaacaaacatcccttagccccaacaatttttagaagtacaggcaaatcccaacattgctcttctactggcttcattaccagcagcagctagcatcttttgccctttaaatagacctgttgggagccacactaccaaaagcctcaatgcggganaaccatatgaaattgcccaagtatccttgggaagcctcatcattagggtttgatgataggggagcagggcaccccgcctccagggtgtataggctcataacataggctttctccaaggataccttctcccctggaaatccacttctctttccaatccacactctacctcggtcttatatcttccatnggggtgaggggggtcc

SEQ ID NO: 303463 - DNA, 293 bp, Homo Sapiens
agacattataggcctgagtcaccactctgagccactttttaatacatacagtttgaagtgtctgaacgttgaagcggaggatttgagaaggtcgttgggtatctagttctcaggcttagtagagaagcttgacctggagataagagcatttcctctgagtatttgaaaaattgtgttaggcaatatcattcactaaaaagggcttctgggtgaaataaaagttaggaacagactctcaaaaacctgtgcaactttataagcagagcatcaagaaaagtaataattttcaaaaa

SEQ ID NO: 303464 - DNA, 403 bp, Homo Sapiens
  misc_feature (185)..(185): n is a, c, g, or t
  misc_feature (209)..(209): n is a, c, g, or t
  misc_feature (294)..(294): n is a, c, g, or t
  misc_feature (310)..(310): n is a, c, g, or t
  misc_feature (317)..(317): n is a, c, g, or t
  misc_feature (326)..(326): n is a, c, g, or t
  misc_feature (331)..(331): n is a, c, g, or t
  misc_feature (347)..(347): n is a, c, g, or t
  misc_feature (357)..(357): n is a, c, g, or t
  misc_feature (362)..(362): n is a, c, g, or t
  misc_feature (386)..(386): n is a, c, g, or t
ggcaggatcagatgatacaccgggatgtgttttcagtgtgatggaaagattgtttccagtgatcttagtgatggtaaagatagaggagaagacacctaagaaatgtgtttttctggagttatattagtatttttgttgccagtatctaatagtgtttccagaactattctggaagcaagccaganctcctaaaacaataattaacagangctttttacctagctttattcattagagtaactaacaggagtttctatataaacaactccaaaaccctagtggcttattaaactntagattttattacctntataaangttcagtgncagantaaagggggtgtttanttccataaanttatnacagggacccgggtctttccatcntagtggttctgtcctcc

SEQ ID NO: 303465 - DNA, 446 bp, Homo Sapiens
  misc_feature (361)..(361): n is a, c, g, or t
ggcacgagcattgatgctgctctgaaactaccaagaaaaggcaatgtagaactctgattggcctgggcttagctcagaccataccatctgcattgatgctgctctgaaactaccaagaaaaggcaatgtagaactctgattggcctgggctccatgtccctttgttccctaacctctaagctccacttcagctccatagctgcaaagaaactcatgacgtgcatcaagagtcaccctttggtcccaaagtgaacactattttgccctgatgcctgcccctggccgtgtctgcgtaactgcttcaaatatacccatagtgttacacgcaggtaggagagactgttgagaagttctgctattnagaggtgaggacagaggtggtttgttactgatctttagcagttttgaggaatcttattcattgttgtgttgggctatggttagga

SEQ ID NO: 303466 - DNA, 446 bp, Homo Sapiens
  misc_feature (12)..(12): n is a, c, g, or t
  misc_feature (379)..(379): n is a, c, g, or t
  misc_feature (435)..(435): n is a, c, g, or t
attcggcacagnaaattagggataataataataaatacaacatggaacagttacagtgttaaatgattgaggcatgtaatttgccttacgaaatgcctaactcatggggtgcccttaagaaatactactctcccccacctcctttacaaaattgcatgtctaatgcagtgagaaatgccaggcgtggaagatattctaggtttgatcatctgtggtttcttggccaaaacaagaagtttgagttctacattttattttgagttattaaacattgccatgcatccacaagagctgtattgtggcctgtagagaaacataggcatagtaatcaagagtgcaggctttgggcccacagctctggacctgagggcaatttccntacctctctgggccctcagttttcctaatttgtaaaagtgtgtatatgtgtggggngtgggcattga

SEQ ID NO: 303467 - DNA, 266 bp, Homo Sapiens
  misc_feature (243)..(243): n is a, c, g, or t
ttagcagaaaccagatggatgtttctgctaaagctcctccatacctgagcatgatttatccttgcatgtaacattttaaaccaccaaaagactttgcaattacaaatcatttccattttccctctctgactttatccttataattttctagagcaagtatcattatttcaactctgaaaaataaaaactaagcctcaggaagattaaatgactatgccaaatatactcagatagtaaatgttncatggcttttggatagacccggg

SEQ ID NO: 303468 - DNA, 141 bp, Homo Sapiens
  misc_feature (53)..(53): n is a, c, g, or t
  misc_feature (80)..(80): n is a, c, g, or t
  misc_feature (112)..(112): n is a, c, g, or t
  misc_feature (123)..(123): n is a, c, g, or t
aaataccaaaaattgggtataataatgatatataaggacaatgagaccatttncatctgtctggatgatgcacttttttnatctgaaaaggttaaatactcaatcttataangcttataagangcattagactcaacttat

SEQ ID NO: 303469 - DNA, 356 bp, Homo Sapiens
  misc_feature (44)..(110): n is a, c, g, or t
  misc_feature (279)..(287): n is a, c, g, or t
  misc_feature (297)..(297): n is a, c, g, or t
  misc_feature (308)..(308): n is a, c, g, or t
  misc_feature (326)..(326): n is a, c, g, or t
agagcttttgatttaggcagttctgagtttatattccaggtaannnnnnnnnnnnnnnnnnnnnnnnnnnnnnnnnnnnnnnnnnnnnnnnnnnnnnnnnnnnnnnnnnnttgtgaaaattagaggtaatacctttaataaactattgtgcctggcaataataaattaaattgcacactatagctggaattattagatgttattgacttaaatcattataattttgctgtgagttattttaacagcaatgatgatggcttgtcatgcctcctgtattcnnnnnnnnnatgaccagtngaacatatctngttgaatagctcactttntttaattgatgtatttctgtgttttgtttt

SEQ ID NO: 303470 - DNA, 349 bp, Homo Sapiens
  misc_feature (327)..(327): n is a, c, g, or t
  misc_feature (332)..(332): n is a, c, g, or t
tatattgtcttctattggttagagacagtgagagaagagacagaatgcactgaggtctcaattatttaacagatcctacttaacattttatattttaacataaacccgtgccaacaattgttctcatgagctttctaaaccattaagctacactgctctccttcttctaaatcaaatataagtaatttgttgtcatagcaatgcttcttcctactccaaaacagttcaatacatgctttgttttagccggcaactatctgtctaccaaaattgggcccataatcttccatctccttggacaaatgtcttattaaatttaggctgccnggggntttttacagtcatcggg

SEQ ID NO: 303471 - DNA, 417 bp, Homo Sapiens
  misc_feature (87)..(162): n is a, c, g, or t
  misc_feature (168)..(168): n is a, c, g, or t
  misc_feature (366)..(366): n is a, c, g, or t
  misc_feature (384)..(384): n is a, c, g, or t
  misc_feature (393)..(393): n is a, c, g, or t
  misc_feature (402)..(402): n is a, c, g, or t
acctcttagcacctagattcagttttagcaaaatgtggtcaaaccacctggggcatatgttaaaaacagactccagatcctagttgnnnnnnnnnnnnnnnnnnnnnnnnnnnnnnnnnnnnnnnnnnnnnnnnnnnnnnnnnnnnnnnnnnnnnnnnnnnntgtggntctgctttcatttgaaagccatttacctagatcatgcttatttagaaaataattttaagaagtttttggttcagtcttgatttataatccttgaatcattctaagggaccataattgggccaacatttattttcatttgtaaggaaatctatatcgggacaacaaaatacctttgtacggcatattttcttttggcantaggtaaatattcagggnaccgggggnaaaggtctnctctccattattttt

SEQ ID NO: 303472 - DNA, 300 bp, Homo Sapiens
  misc_feature (31)..(31): n is a, c, g, or t
  misc_feature (57)..(57): n is a, c, g, or t
  misc_feature (79)..(79): n is a, c, g, or t
  misc_feature (180)..(180): n is a, c, g, or t
caagtttaattgtatcattaactcaattttncgtagtataattataatatacaagangaaattgctcatattcaaagantgtcttcccagttatctttccatgttaactttttgaaaacaggaggcaggaggtaaatctatgttttgtcactagttatgtgacccacaaaaaatgctganggaattcttccactttgtttttacttccatagtactaggctccaaaatagtcttctgatgattagggtaaggacaatgtataggaaaggtgttctggtaacgccaactattattaatatt

SEQ ID NO: 303473 - DNA, 352 bp, Homo Sapiens
ccattctactttccgtcttctatgattttgaatattctaactacctcatataagtggaattatacagaatttgtcgttttgtgactggctttagcgtgtcgtcaaggttatccatgttgcagcatatgtcagaatttcctttttaaggctgaatattattctgttgcatgtatataccacatttggaacaaatccattcatttgttgataaacacttgcttctaccatgtaggctattatgaatagtgctgctatggaacatgggatgtacaaatatctgtttgaggaccctattttcaattcttttggaatatatacccggaggtgggaattggctgaatcggaacttggg

SEQ ID NO: 303474 - DNA, 205 bp, Homo Sapiens
  misc_feature (41)..(41): n is a, c, g, or t
  misc_feature (50)..(50): n is a, c, g, or t
  misc_feature (58)..(58): n is a, c, g, or t
  misc_feature (60)..(60): n is a, c, g, or t
  misc_feature (64)..(64): n is a, c, g, or t
  misc_feature (73)..(73): n is a, c, g, or t
  misc_feature (111)..(111): n is a, c, g, or t
  misc_feature (159)..(159): n is a, c, g, or t
  misc_feature (173)..(173): n is a, c, g, or t
  misc_feature (179)..(179): n is a, c, g, or t
ataagactcaatatacattgtctacaagagacccactttangtgtaaatncacatatngnttangagtaaatnggtagagataggtgtaccatgttaacattaatcaaganagggcgttgggtagctataggatgggagcatacttcagaggcaagggnaaattacccggggntaaagnggagacattacatatggttagtgggg

SEQ ID NO: 303475 - DNA, 260 bp, Homo Sapiens
  misc_feature (31)..(31): n is a, c, g, or t
  misc_feature (73)..(73): n is a, c, g, or t
  misc_feature (82)..(82): n is a, c, g, or t
  misc_feature (87)..(87): n is a, c, g, or t
  misc_feature (122)..(122): n is a, c, g, or t
  misc_feature (135)..(135): n is a, c, g, or t
  misc_feature (159)..(160): n is a, c, g, or t
  misc_feature (194)..(194): n is a, c, g, or t
  misc_feature (230)..(230): n is a, c, g, or t
gcaaaacattaccttgatatttttttcttanttgcctgatttaagcaaagtttcagaagcctacgtaaaagantcttttaanttttnttttgcttaaacagtatttactagtaatataattncctaatgaacaantctaaaatactgattaattttaanntcataaaaggctccattttcattgtatatacatngttaggcgtgaaattaggaaggggatacaaccaganatcatggtgttgccagatgaggatggcaac

SEQ ID NO: 303476 - DNA, 482 bp, Homo Sapiens
  misc_feature (61)..(73): n is a, c, g, or t
  misc_feature (343)..(343): n is a, c, g, or t
  misc_feature (349)..(349): n is a, c, g, or t
  misc_feature (357)..(357): n is a, c, g, or t
  misc_feature (369)..(369): n is a, c, g, or t
  misc_feature (384)..(384): n is a, c, g, or t
  misc_feature (392)..(392): n is a, c, g, or t
  misc_feature (399)..(399): n is a, c, g, or t
  misc_feature (413)..(413): n is a, c, g, or t
  misc_feature (440)..(440): n is a, c, g, or t
  misc_feature (447)..(447): n is a, c, g, or t
tgtattttgctgcttctgacaaggccagaccacatagtatgctctggggttaaatgttcannnnnnnnnnnnngcttaagaacagtttcttcttcactccctctctcctaccacttctgctgccctatatagtagctttacactccctttgtgttattcttgaattgttaccgctgcttctcaatttttctctctaccctaccacttattcccagtctggaaaagtaaatagtgattgaggaggtgaggaggagcccaggaggaaggccgtgtatttcagaacacccctctctctcttccacccagatagcagtcccctggagttcatgtggctttcccactncacttntctctctngccccacccttnaggaagttccaaaanttcagggntcctctngcccgttgggtggntccttatgtgggtaaacattgggcgtnggcgatnaccttacccgtggcatcataggaggggggcccaac

SEQ ID NO: 303477 - DNA, 282 bp, Homo Sapiens
  misc_feature (114)..(114): n is a, c, g, or t
  misc_feature (222)..(230): n is a, c, g, or t
  misc_feature (250)..(250): n is a, c, g, or t
  misc_feature (263)..(263): n is a, c, g, or t
tccaagagtgagccagccaaactaataacgcttagctaagaaacatcctaaggctagctcagagattattttggatactattgaaatttgggcattaaagttataactgtgggnctccaaagtatattaatgaagaagactcaaaaccattctcttaaagtgagccagttattgtcagccttttgcttttgggttgcagttcttataacttagagttacacnnnnnnnnngttagaagatacttttcctncagataaatagantaataatgttttataatta

SEQ ID NO: 303478 - DNA, 473 bp, Homo Sapiens
  misc_feature (142)..(142): n is a, c, g, or t
  misc_feature (144)..(144): n is a, c, g, or t
  misc_feature (312)..(312): n is a, c, g, or t
  misc_feature (374)..(374): n is a, c, g, or t
  misc_feature (384)..(384): n is a, c, g, or t
  misc_feature (397)..(397): n is a, c, g, or t
  misc_feature (412)..(412): n is a, c, g, or t
  misc_feature (418)..(418): n is a, c, g, or t
  misc_feature (451)..(451): n is a, c, g, or t
agaacagctccctaaatacctctctcatctaattggacccatccatagtccattctcaaacatgtgacattttcccctaagtagatgtgattatctcttaggcatttgttgaaaaataattcttaggtccatggtgcttgcntntgtgtcttttctataaaatgtttgggtcttacaggtttcatgtcatttaagctgcacttctcagcaagttaaaagattaggcagttaatctttattcatttgggcctttgtgaatttgtatttaaattatttttttcagggattgggcaaattattcttgtttctccnttacaaaaaaataaatgcggatattttgttcaatgacccccaaacccacttgaaactagggngggtcatatngggcttgccaagncatgtcccccaatgnacccgnccaggcacacagggggttccagggcccgcttgnccagttggcccgtcacccaggt

SEQ ID NO: 303479 - DNA, 387 bp, Homo Sapiens
  misc_feature (353)..(353): n is a, c, g, or t
  misc_feature (359)..(359): n is a, c, g, or t
gctacacagatatatgtcagaaggcaactggaaaactttaataacttttctagaaggttggtctgggcacctcttacaataccccatgtccaacgatgctgccattctgatctgtagatatggggccagctccctgcctaccagacctgggctttgatatgctgcttatccaagccacagaccttccacccccggcagacaccatccctctgggctatatccaaacacctgcagaggccttgatgtttttttctgtctggggttaatttgtaaaggggttttccagtatacccagagttactaaattttgttcaattcagtgtccttgggggaaggtactaatgtaccatgcnggggcngggggtttactttgggcttttataggtt

SEQ ID NO: 303480 - DNA, 206 bp, Homo Sapiens
  misc_feature (20)..(20): n is a, c, g, or t
  misc_feature (64)..(64): n is a, c, g, or t
  misc_feature (82)..(82): n is a, c, g, or t
  misc_feature (103)..(103): n is a, c, g, or t
  misc_feature (111)..(111): n is a, c, g, or t
  misc_feature (147)..(147): n is a, c, g, or t
  misc_feature (152)..(152): n is a, c, g, or t
  misc_feature (180)..(180): n is a, c, g, or t
cagtgaaaaaggcaaataantcctcattgttattcagatagccttacataatgggacttctganctgtccctcaggtgtttnctatgtgtattagtccatttncatagtgntatgaaggaaatacccaaaactgcataatttataanggaanagaggtttaataggatttacagttccanatggggtgggggagggactttacaat

SEQ ID NO: 303481 - DNA, 415 bp, Homo Sapiens
  misc_feature (185)..(185): n is a, c, g, or t
  misc_feature (297)..(297): n is a, c, g, or t
  misc_feature (312)..(312): n is a, c, g, or t
  misc_feature (358)..(358): n is a, c, g, or t
  misc_feature (380)..(380): n is a, c, g, or t
  misc_feature (397)..(397): n is a, c, g, or t
aatgccgcctcactagcagtatagaaactgtgataaatggcctcagttagtcatccttcctttaaaattatactagcaacaatgaaaggggcttttgttgggaatctccaaaaacttctaaaccttgaccctccagggcctgggaaaatgaagagatgtaggatgtgaaaagatgaaggtgtttnctttaagatagtcaggtggaaatagggttagagaaagtgatttgaacccagtggctttccctctttacaaatgtgtaaactaaaatgatttgaccagggtgagagacatttncttgggaaatatttncccaagaaaatatcactgtttaatgaatttaaaatcactgtttaanttcatatgagttgggtaggccnggcattgttaaggcagntggacatttccgacagag

SEQ ID NO: 303482 - DNA, 391 bp, Homo Sapiens
  misc_feature (25)..(25): n is a, c, g, or t
  misc_feature (88)..(88): n is a, c, g, or t
  misc_feature (194)..(205): n is a, c, g, or t
  misc_feature (217)..(278): n is a, c, g, or t
  misc_feature (379)..(379): n is a, c, g, or t
ttatcactagttctaactagccttncatcagtcattccaaagtaatggtctgtaatgagaaatcactatgtataattatacacaatanaaatatatacaacaggtattgtgataatatgataattaaaaccaaatatagtcattgaggcttagaatttttaaaaactgtattatatattgtaaaatcccatccnnnnnnnnnnnnagatggagtctnnnnnnnnnnnnnnnnnnnnnnnnnnnnnnnnnnnnnnnnnnnnnnnnnnnnnnnnnnnnnntggggttcaagcaattcccttgtctcagccctccgagtagctgggactacaggcacccaccactgtgcctgaccaacttttgtatttttagtgggagacgnggtttcaccatg

SEQ ID NO: 303483 - DNA, 330 bp, Homo Sapiens
caaaggttaagaatgcctttttgttcagtttcactgctgatgaagatggtgggttggatacaatggtgttttcaaaacacttggaaataataatgcccatgttggtattgcagtacttttttagccacatacagtatccaagtcacaaatcatttctcctgtacttagtaattttagatgtattataatctagtatcatcccacttgtttcaaattactcccatgaatttacattacaaaccattttgagagcccagggaatctcaggtgtaattctaatctggtattgattccatatatctttgggggtaaatatttgctgtattaaaa

SEQ ID NO: 303484 - DNA, 420 bp, Homo Sapiens
tttaatctgtgcttttctccaccctcttcagactttgttctagtctacaatttccctcctgcagcttctctctgatgacgtccccacccagcccgtcagtccaaattagcctggtttaactgcgtttgtcagtttctgtagaagaatgaagaaggtgatagcacccacgttatagggctgttcacgggaggttgaagtgagatcttacagagaaagtgcttagcaggtgccccaggtccagagtgtggggttggctgggagtcgtgtgcatttcctgccctgaccccctctgcaagcttggttcctgagtgcttgagaggcacacttgacctgcttatgtgattcccatgggcaccatgggtgtgggggaatgtctccccaacaagacaccttattcaaggcgttctctctccactctgg

SEQ ID NO: 303485 - DNA, 182 bp, Homo Sapiens
  misc_feature (29)..(29): n is a, c, g, or t
  misc_feature (36)..(36): n is a, c, g, or t
  misc_feature (43)..(43): n is a, c, g, or t
  misc_feature (141)..(141): n is a, c, g, or t
tcttttattgctaattattttcagttttnatatttnctttttnctgaatcaacaatgaatgcaatgtttctgctcggagtctttgaagaatattacataaacaaacacttgtcttcaaatttttgcttttaagaaaaagancatacaatttaaaagccatgtgcttgattagctagagtggg

SEQ ID NO: 303486 - DNA, 432 bp, Homo Sapiens
  misc_feature (402)..(402): n is a, c, g, or t
  misc_feature (407)..(407): n is a, c, g, or t
gcgtggcacaagtaggcattcaatgatatggttgctattatgtcattaatagagataatacatggaagtagaatttctggatttagcataaaagtaagatctgccagagggcacatgtaataaagtgatatatcttgtccaaataacatcttattttttctggaaaatttttgcttgtttgattttgtttattaaagcttaaatatactaaaaagaacctggatttgaactgaacaaaattgccaaatgatattcaatggcttttgacctataaaaacaactatttggtatggtttaacccaacacaactcaactctaacattacagacaagaacccttaggaaaactactgtaaaatcagggattatggaaacaaggtatatggattttccaccacacatnaacanatagtatttttttaggagttttggg

SEQ ID NO: 303487 - DNA, 270 bp, Homo Sapiens
  misc_feature (189)..(189): n is a, c, g, or t
  misc_feature (192)..(192): n is a, c, g, or t
  misc_feature (243)..(243): n is a, c, g, or t
  misc_feature (258)..(258): n is a, c, g, or t
tacaatgtcttttataattaagtttcccacatgtccttgctagtttattatgacccatttttgaaccatgctagaaagatacttttttattaggtaactagtgcttcaataaagcaagattctaattaatcaccactagttgtgtataccaaatacacatcctttaagacaatacagttcttaaaaganganaaattataattattctaatatttatacaaatcatataacgatttcacaggnaccaaacacttacangtagaatttcta

SEQ ID NO: 303488 - DNA, 403 bp, Homo Sapiens
  misc_feature (46)..(93): n is a, c, g, or t
  misc_feature (247)..(247): n is a, c, g, or t
  misc_feature (256)..(270): n is a, c, g, or t
  misc_feature (359)..(359): n is a, c, g, or t
  misc_feature (378)..(378): n is a, c, g, or t
tagcttcatagttttgaggattttactgctgagtaacaagttttgnnnnnnnnnnnnnnnnnnnnnnnnnnnnnnnnnnnnnnnnnnnnnnnntaacttttagaaaacatagatcaattaatgtagatagtatagatcaattaacttttagaaaacatagcaagtaatacatgaaaagtatataaaacatacatggacagtttaatgaatgaataaaaagtgagcacccatgtagccaccatcaaantattgttgnnnnnnnnnnnnnnngagacagggtctcactatgtcacccaggctacagtgcagtggcacagttcttggctcactgccaacctctgccccctgggttccaagtngattctcctgcctcagccncctgcgtagtggggatttacaggtg

SEQ ID NO: 303489 - DNA, 442 bp, Homo Sapiens
  misc_feature (204)..(204): n is a, c, g, or t
  misc_feature (381)..(381): n is a, c, g, or t
  misc_feature (391)..(391): n is a, c, g, or t
  misc_feature (398)..(398): n is a, c, g, or t
  misc_feature (424)..(424): n is a, c, g, or t
tagtccaacacttcaccagcgccttggggttagtttagcaatgagtgtttagagctctggctgctatgaaggggggaaagaaactgatgacacagcgtgcatgtaactgtaaagctaggcgctgtacctgtctgtctgcagctcccctgccatgttctagaacaaaggaaaagccaatgagactgacaatgaggcacgcacgtngttcagaccacaagccatcagtaacatcgtactactcatgggctgaacagaagaggattatttcaaagtgtcatggcaagacctggggggggcttcacggagggcttccgggtgtttccccaaggtgaaggaggctggcgtcttcttattcaaaggcacagggccagggtgccaggntaggcttaantcttgtngccttctttttaacttaaggaggggnttacggcagggagcttta

SEQ ID NO: 303490 - DNA, 394 bp, Homo Sapiens
  misc_feature (298)..(298): n is a, c, g, or t
  misc_feature (361)..(361): n is a, c, g, or t
  misc_feature (379)..(379): n is a, c, g, or t
tttgcttgcacttttaatgattccatcaataccatgtagattgaattagcaaggagaagtaaacctttcatttctttgccagactatattgggaaatgaaaatccgtcattacttttccttgctagcaattgttcgaatatctgggataaagaaatacatacaggaaaatgttagggcagaccaagtattaaaagctagggacagagcaggacaaaggaggaaggataattctacttgtttgggcaaagttacatcagttgtcttactgacacatcagggtactatctataggtgggnaattgagggcccggagagggttaaatgggcatgcccggtgttcacttgctatttttttcaggnacaaaaattaggattccngatctggatcccggg

SEQ ID NO: 303491 - DNA, 209 bp, Homo Sapiens
  misc_feature (74)..(74): n is a, c, g, or t
  misc_feature (149)..(149): n is a, c, g, or t
  misc_feature (160)..(160): n is a, c, g, or t
  misc_feature (171)..(171): n is a, c, g, or t
  misc_feature (179)..(179): n is a, c, g, or t
  misc_feature (195)..(195): n is a, c, g, or t
gatgtttaggcacctgccgtgagggcttaaccacaatggggagatgggtgaaggtgtaggaaaatgaatgatanttgttccctgcttgcgggaacctgccagttttattaggggctgggcagaagtgttccagtaattaatttaacagncaagtgttgangagtcttgtgntggggagnggttggattaggagcntttgggggaccccg

SEQ ID NO: 303492 - DNA, 410 bp, Homo Sapiens
  misc_feature (378)..(378): n is a, c, g, or t
  misc_feature (385)..(385): n is a, c, g, or t
  misc_feature (393)..(393): n is a, c, g, or t
cccctccctccctccatcaccactgaagtattttaaagcagatcccagccatcaccttaaagtcatgcacttcattcataacaacgttttggtcattgacagaccacatatatgacagtggtctcataagattataatactgtgtttttacagtgccttttctatgtttagatatgtttagatacacaaatccttaccattgtgttgcctacagtattcagtacagtaagtaatacattgtacaagtttgtagcctagggagcaacaggctatcccatatagcctaggtatatggtaggctattaccatctaggatttatgtaagtacactccgtgatgtttatacaaaggtggaattcacctaaaagacatattttntcaggancatacccngttcgtttaagtggatg

SEQ ID NO: 303493 - DNA, 206 bp, Homo Sapiens
tgagcctggctttaaaaaactagatgaatggcatatgtaggatgatattaaaatattatcctggctgttaagtagaggagattgaaggaaagacttggtcagagtgaatgtgtagagaccaagtagcaaataatttttgtcgtctgtatgagggatgatggtgcttagatctagggtggtgacagagggtttagagagacactaag

SEQ ID NO: 303494 - DNA, 354 bp, Homo Sapiens
tgtggacttccaaagcagttgatgcagatgatctcactcaatcattccaattatcctgagcaagaggtggggaaagtattttatgactatttttaagattaaaacatttgaggcataagacattaggactttacctaatggaatctcaactagtaaatcaagccatttagcaaacgtctaccacagtgctagggttcggcactaactgctttaccatgttttgttattaatctgcctaacaacctttgaggggagggtacctggccttttgctcagtctcgggagggctaggaggcgattaaggcgacctgccaggatccagcccaaggatccaggcccctcctaggctcacag

SEQ ID NO: 303495 - DNA, 414 bp, Homo Sapiens
  misc_feature (61)..(81): n is a, c, g, or t
aaaaaaattaaatcttcctgcctgagagtacgtgtggtctgacttgaaatgaagagggacnnnnnnnnnnnnnnnnnnnnncctaagtccttttaccttgaatctgtcatgtacataggacaaactatagtattggtaaaagggagattggaaacattttgatttgcaattgaggggaggagctgttatggtcttgacctcattttctttatcagcatgcttcctgttaataaaaagaatgggaaataacagaagtggatattctttggcttaaaagatgtattaatatttattcagatttccttaatatatcactgacagaatacttttaattactgaggaactaaatgttgttttgggtctgcccttctccacaaattcctaaccatcccggaaaagtttctggggatctcc

SEQ ID NO: 303496 - DNA, 132 bp, Homo Sapiens
agcgtttcagggagagttgccaacatatgagaggccatctcgctccagttccccttttgtcccagtgaaagagcttctggcagggctggtgacttcaggagaccaccaatgaagaaaggcacacgcattatg

SEQ ID NO: 303497 - DNA, 351 bp, Homo Sapiens
  misc_feature (26)..(26): n is a, c, g, or t
ttcggcacagcatggcagaaggcaanggaagagcaaagggatgtcttacatggtggcaggcaaaagaacatgtgcagaggaactgccctttatagaactatcagatctcgtaggacttattcactatcttgagaacagcatgggaaatactcgcctctatgattcaattaccttgcattcctgacccatgtaaatccctagtctacattgccctgcataatggtcttgtagcattttctagttattactgctatttgtgaacacatctattctccttaactattaatagtataaacaatttgagggtagggcatactatattttattttttaacccttagggaccacaatg

SEQ ID NO: 303498 - DNA, 381 bp, Homo Sapiens
gaacaaagtcttatattccttacccttgaccttaaaggaggttgagttgaatgtctcaaattttcctccttgaggggcaaaatgtttttaaactactaggttaaagtcattttgtgaatgtttctcattagctttttactgagggtcagttgccactagtgaagttattccatcctgtctagttttcagttgccatattcctgagaaaaacaattgcctcacaaggaatccagaccctacgtctgctacacacattactttaatccacaaactagaatcaagacccactaatggttttgcatgatgggatttggctctttggcttttctgtcacggggagggaaaaataacaagaagggcagcccagccagttcttggggg

SEQ ID NO: 303499 - DNA, 434 bp, Homo Sapiens
  misc_feature (34)..(34): n is a, c, g, or t
  misc_feature (37)..(37): n is a, c, g, or t
  misc_feature (111)..(111): n is a, c, g, or t
  misc_feature (392)..(392): n is a, c, g, or t
tcaatgtcatgcttcttagcagactggcctcagnaanttaagaatctagttcaggaagtgtaaggtcagatttcctcgttgccccgtctcatacttcctgttcctcttctnggctctgcagaagcggtaactccactcttgtggcctctgctatgaacaaaccccgctctcttcccttcctgctaccctatggccccttaggtttattttgttctcagcagccctcttggctctggcttctgttagcagctacacgttttctcggtaatatttcaagttcaacctcatcggcgagggtagctgtttggtttagcctttgtcctctagcacgtgcctttcctgcagggaggggcattcccagccttggtaacaggttcccatcaattaagggncacagacagtgccagagggagttgggggtttttgcagccatt

SEQ ID NO: 303500 - DNA, 328 bp, Homo Sapiens
ttcggcacagtagaagaatgtgtattctgctgctgttacatgtagcagtctactgatgttcatcatatccagttgattcattgttttgttgagttaaattatgtccgtactgattttctacctgccgggtctatttatgatggaggggtgaaatctccaattatattagtggattcatctattttttcttgcaattctatcagtttttgcctcatgtgttttaatgctgtaatggtgcatacacattaaagattgttacctgtattaaggctctccagagagacagaactaatagaagatgtatagctatagatacatatacacatac

SEQ ID NO: 303501 - DNA, 358 bp, Homo Sapiens
  misc_feature (298)..(298): n is a, c, g, or t
ttcggcacagtgattgttcgtattttacaatagtatgataatttaagcttaaggaagataagagctttacaatcacctattagatcatttttgtttagatttcctttaaattgttatctacttagaaaaattattctaaagattatagttatagttcacaacataataaaagatacttttgccttccttataaaatgttattttcagggttaggaaattacctaaaaaaataagctttaatcatgatttatgttctgagactttggaagagggtctatattaatataaatatttagangaaaaaaatgtatcatcttgaaaggccctgaatattttcatggtggtgtttcttttttac

SEQ ID NO: 303502 - DNA, 318 bp, Homo Sapiens
  misc_feature (143)..(143): n is a, c, g, or t
  misc_feature (157)..(157): n is a, c, g, or t
  misc_feature (163)..(163): n is a, c, g, or t
  misc_feature (178)..(178): n is a, c, g, or t
  misc_feature (189)..(189): n is a, c, g, or t
  misc_feature (209)..(209): n is a, c, g, or t
  misc_feature (237)..(237): n is a, c, g, or t
  misc_feature (251)..(251): n is a, c, g, or t
  misc_feature (289)..(289): n is a, c, g, or t
cagatagtctagacgactcatcctgttgtacctaatgctatttctaattggctagaaggatggtccggtcaatagaaagaaactgtagcctcaattcttacttctatagcaactgtaataggcatactccttcttcttgggtnttgtattataccangcatcngggaattagtaatangattaacaaanacaactcttactaaaacccntcttaactctcctccaccttattcaganaaaattctcctttnagaaattcaatcagagcaattaagccatgaagtattanaacagtttgaagaggataaactattattt

SEQ ID NO: 303503 - DNA, 355 bp, Homo Sapiens
  misc_feature (196)..(263): n is a, c, g, or t
ggcatattatagttcagttatgattttcatggtagagttacaatacttgtttttgccctaaagaagtcattcacatggtttacaaatgttaaggcaattgagataggacagtgagtaggaaatccagggatagcagattctagtccttaattctcagctaacattttgggtaatactcacagaaaagttacttttnnnnnnnnnnnnnnnnnnnnnnnnnnnnnnnnnnnnnnnnnnnnnnnnnnnnnnnnnnnnnnnnnnnngttatagttggaggcagggataggatggaagaaggggaaaggtatgagtgttcaattaggtcagtttctagttttttgaagaacaactcaaa

SEQ ID NO: 303504 - DNA, 355 bp, Homo Sapiens
taatcatgattcaagtgactaggctgtagcacccaagaaccttgccttaaaacagtttattttacccaataatactactttgccttcttacttaaaaatgtcctgtgcttaacccttttgctctttattttgatttaagcacttgaccctaaagtcctgcttctgtcttacagaagattgttgtcatttaaaaaataaaacaatcagtactagaactagcataaatagtaatatctaacatgatcatttgtattatataggcatatttaagtaaaatgtgtttcattccattcagtatttcataaaaggacaggcctctggaaaattagttttactccttaggttttctcatcca

SEQ ID NO: 303505 - DNA, 200 bp, Homo Sapiens
accttgtactttatatactgtactcaatgtaatttgtataacaaagttatactgtattaagccaagtatatttcactctgataattttgagaagtctactatgtcacaaaatctaggaaaatgttaccttagaccctaatctaatcatccttgattgagtcttagtcaccgtagaaatctcacatgatttaaaaaacaca

SEQ ID NO: 303506 - DNA, 243 bp, Homo Sapiens
  misc_feature (216)..(216): n is a, c, g, or t
acttatttatcttgacacataattgtacatattcatggggtacctaggtgatgttacaatacatatcatgtatagtgatcagatcaagataatcagcatatccatcatctcaaacatgtatcatttctttgtgttgggaacattcaatgtcttccttctaggctttttgaaactacatattattgttaactatagtcatcctacagcggtatagantagcagtgcccaacctttttgggcacc

SEQ ID NO: 303507 - DNA, 305 bp, Homo Sapiens
  misc_feature (255)..(255): n is a, c, g, or t
taacaattatttctaattatcaatgataactggcatagcaactcttttccggttatctcccccttctttctgacttctctttaattctttgcaatttgtaacccacaactaaccttttcgcctaaagaattgctcgggcaaaaagagaaaattctttcaatgtccctttgaaaattcttcagcaacatgactgattaacatgagtggggtttgttgttgtttaccctacacactctagaaaccatcagtaaaatngtaaaattgtgttcagagacattcagtaagagtacgactaggcgtggtct

SEQ ID NO: 303508 - DNA, 509 bp, Homo Sapiens
  misc_feature (406)..(406): n is a, c, g, or t
  misc_feature (432)..(432): n is a, c, g, or t
  misc_feature (440)..(440): n is a, c, g, or t
  misc_feature (450)..(450): n is a, c, g, or t
  misc_feature (482)..(482): n is a, c, g, or t
  misc_feature (490)..(490): n is a, c, g, or t
ggaaaattgcatccgtgtgagtagatgtacagaactaatctaaaagtgactgctagtaatattttagaatataataatttcaagaattattctgagtgttttaaatgtgccctgaaatgttggcatgtcatttcagcatttccatttgaattgctcttgtaatatttttgcacaaaaaggactgagaaaaagactactttggttaaaggaaaaaaatagtataatttggtctttaattttaatgtctcctgtggaaacactggggatgaattttgttggcacagttattcaggatatttaaaacagtgttgaacagttcacaagaaattaagcaaacttgggattttaaaaattaaaatactttctttccatgtgactgttttgcatagttttttccccctatgtncttaacactacattccctgtttttcntaaataanatactctgcnggttttgttgtgagtgtttataacagtatttntgttaggnggccggggtttccccgggg

SEQ ID NO: 303509 - DNA, 415 bp, Homo Sapiens
  misc_feature (362)..(362): n is a, c, g, or t
  misc_feature (382)..(382): n is a, c, g, or t
taaacaaatgtctgaattgagagcaaaagcactctttctcaaagactattctttgtttagctagtaactggaatattgtagaaaacaaaagagaaatataagatagtctagaaagacaaaaattttacatggctaacttggggtttttattcaggcaaggaaatgagagacctacagcacagtacgtgggagcaacactaaattacagatacgaagattaagcttcaatgtagtaaaactccagtaataccaagtgggtatgttaaatctaaggatataatctgaaacaagtctttaggcaacctcttcttgaccttgggtctttcactgaagggggtcaaaaaataaaggtttacagggtntccaagggggtggggttccnggaccctctggaaggttaacgtctgtagggtgg

SEQ ID NO: 303510 - DNA, 503 bp, Homo Sapiens
  misc_feature (42)..(50): n is a, c, g, or t
  misc_feature (107)..(168): n is a, c, g, or t
  misc_feature (228)..(397): n is a, c, g, or t
  misc_feature (430)..(430): n is a, c, g, or t
  misc_feature (476)..(476): n is a, c, g, or t
cgatctctaacggcatttgaatattgttatgatgttaaatgnnnnnnnnntggaatacagcattttccacaatatggtcacagccatggaaaaaacatgcattagannnnnnnnnnnnnnnnnnnnnnnnnnnnnnnnnnnnnnnnnnnnnnnnnnnnnnnnnnnnnnactaggagacactagaaagaagattaaagaaaatttcaagagtgcttggcttgagtgccnnnnnnnnnnnnnnnnnnnnnnnnnnnnnnnnnnnnnnnnnnnnnnnnnnnnnnnnnnnnnnnnnnnnnnnnnnnnnnnnnnnnnnnnnnnnnnnnnnnnnnnnnnnnnnnnnnnnnnnnnnnnnnnnnnnnnnnnnnnnnnnnnnnnnnnnnnnnnnnnnnnnnnnnnnataatctatagggcaaccaacagctgggtggtnggcagtacttattcgtaggtttcaggtgttctcagttgtattcttngactttgggcttcttctgttacggttt

SEQ ID NO: 303511 - DNA, 512 bp, Homo Sapiens
  misc_feature (19)..(19): n is a, c, g, or t
  misc_feature (130)..(130): n is a, c, g, or t
  misc_feature (192)..(192): n is a, c, g, or t
  misc_feature (231)..(270): n is a, c, g, or t
  misc_feature (374)..(374): n is a, c, g, or t
  misc_feature (432)..(432): n is a, c, g, or t
  misc_feature (446)..(446): n is a, c, g, or t
  misc_feature (493)..(493): n is a, c, g, or t
ttcggcacagcacggcganacttttgaatgccttaggtatgatttcactttcgctcacatcaatgctgacctgaatgcctttcatatctgatccgctgtgtctctcccagtaaacatcccctgagggagnaacaaagaaaggagctcttcttcttcttaatcacaattcagccctttcaccgccggcagtcncatttgcattctgccacagaaagccaagatgaaaagaannnnnnnnnnnnnnnnnnnnnnnnnnnnnnnnnnnnnnnngcacagggtagtagctgagtaaaataacttaggtgtttgtggctgtttgttgggcttcccctagttaccagccttatatagctgatgctccaccagggccctgntccctcctgacaggcatattagtgttacaagatgggcatgtctgtactattcatgggncacccgttcaacanttgaggtaaaaagtgttcaggaggggttcgatttttcccccagaagncctgttagattttggggtc

SEQ ID NO: 303512 - DNA, 405 bp, Homo Sapiens
  misc_feature (390)..(390): n is a, c, g, or t
tttttatttggggctgaattatttttaaatgtaaagcaagatgtctaaattacattaatatgttactaaattactatgatttttccagaaaaatattagcccatgcaatattctttaattcctgtgattaagttggtcttctgcaaagaaatttctgttgacttccttagattaaatgcagccctgagataggtgtgcaggtccaggaagtggcctgtgcagttctccctgtgcctgcaggggtggcttcttgaggatactttcgcagtaagggcttagcaatatgcgcatgtctaaggagtctatcagaaaactacctccactgtggaagggcttggggatttgtattttttgtgcttttgaagcaccctgtacacttgctgttaactnccatttaactgaaga

SEQ ID NO: 303513 - DNA, 277 bp, Homo Sapiens
  misc_feature (121)..(121): n is a, c, g, or t
  misc_feature (183)..(237): n is a, c, g, or t
accgtgcccagccaatccttctttttcttaatcctgaatttgagattctggcccaggcacttgtgaaatcacgtcctttgtcttgttttccagaggacaggctctgatgagtggccagggnaaggcagtggcaggagggcaaagctcgaaatgctgacctgccacccacacccacaactgccnnnnnnnnnnnnnnnnnnnnnnnnnnnnnnnnnnnnnnnnnnnnnnnnnnnnnnntgacctgtagggccccacctttgacttccctgaccctgtt

SEQ ID NO: 303514 - DNA, 351 bp, Homo Sapiens
  misc_feature (330)..(330): n is a, c, g, or t
ttaattttaatgctcaatttatccaggtttggttagatagcatcccttcaagctggatagtggaaatcccttcaagtatctttgacatctatgctgcataatacaggctgattaaatgctctaatttaagccttgatttgagaagagatagctttatttgtgaccttcacttggtggataaagggtctaaataaatatgtgagctttgtaggggcaaaacgagttctcagttattaatacttactaagtttcatgctaatgatatataaggcaactccacggctttgcctaaagcattcccaggaaagtgtatcaaatggcatattgganaaggtaggatcctatgtgccc

SEQ ID NO: 303515 - DNA, 317 bp, Homo Sapiens
  misc_feature (171)..(171): n is a, c, g, or t
  misc_feature (201)..(202): n is a, c, g, or t
  misc_feature (282)..(282): n is a, c, g, or t
  misc_feature (291)..(291): n is a, c, g, or t
  misc_feature (307)..(307): n is a, c, g, or t
gatgtcttttattcctctgagtgttagaagcgtgtgatccttagagcaccgtaagcagttcactgaagaaagaactgtaccacctctggtgcttttgctttagacacttcattggtgtgtaattcttgaagttcttgtaaggagagtggataaatgaagagaacaacaganagaagggtgggaaggagttagggactacanngaaagagaaggtggagagaaaacaaggtgctgtgttacttcaaatgacattcattgtcctaataggcccatgagagggangtctaatgnaggactttgaaagtanaatgctttta

SEQ ID NO: 303516 - DNA, 439 bp, Homo Sapiens
  misc_feature (393)..(393): n is a, c, g, or t
  misc_feature (405)..(405): n is a, c, g, or t
  misc_feature (411)..(411): n is a, c, g, or t
ttcggcacaggaaattaagaaatagaaataccttttctactctgtactctctgggactttattttcaaagtgttgagttctcttattctaatgtcactgaaaatgtagggattttttttgttcggggtccaactctttagggataaagtatccatccttattgttttcctagttcaaactcttgtttgttgtaaggaataaatggagaatatgccagaaggctttcaaactgttcatttctttgcacattagggttgcttttctctcaaataataacaactgctaccattttttcaagctttatgtgccagaattgtgatgagcattttatatatgttatcacttctctacaacaaccctagaatttaggattattcttttcattttggcccnggagaaaatgcnggattnggaggggtaaagtggacttggcccaggg

SEQ ID NO: 303517 - DNA, 533 bp, Homo Sapiens
  misc_feature (398)..(398): n is a, c, g, or t
  misc_feature (427)..(428): n is a, c, g, or t
  misc_feature (447)..(447): n is a, c, g, or t
  misc_feature (467)..(467): n is a, c, g, or t
  misc_feature (486)..(486): n is a, c, g, or t
  misc_feature (513)..(513): n is a, c, g, or t
tttcggcacaggggacaatggaatgagagctctccaaggtcacaggctattaactcggtcctttcatgggtaaaactaacccctttgaagggaatgcagtcccaatcaaagtcagtaataaaagccacctcagagatatggctcatgagcatgcagttcgaatgatttcttcaccacctgccatgtgcttggtactgtcctgggtgcaggcgacaacaagactcatgaaatggtgtccctgctctaattctgggacagaattagagcagattcacttcaatacaatgtgggatatttggggacagagacatgtcatcaggggcagcagcaaaagccatctggccatctgggatgaggtggatggatggtgaccataatgatgggctagtgtttattgngggcttactctgtggcaggttttgctcanngcacttcacatggcaccanctgattcattctcacaacancccgtgaagctggtactanctttatttcctttttaaagttggggtnggggtgcgactgaggtttgg

SEQ ID NO: 303518 - DNA, 468 bp, Homo Sapiens
  misc_feature (99)..(140): n is a, c, g, or t
  misc_feature (343)..(343): n is a, c, g, or t
  misc_feature (399)..(399): n is a, c, g, or t
  misc_feature (410)..(410): n is a, c, g, or t
  misc_feature (424)..(424): n is a, c, g, or t
  misc_feature (446)..(446): n is a, c, g, or t
ttcggcacaggattgttttattttgcttagacaatcaggtactgggatgaaggatttcctgaagtctttttacctctttatcttatctctttctctgcnnnnnnnnnnnnnnnnnnnnnnnnnnnnnnnnnnnnnnnnnnatttagaattatgtctgacacaccgttaagaaccataaagtattagttatcattgttatctcctttaacaaaatcctttcagaaaaatggtccccatgtgctagcatgtgaacccccagggaggccatgcatggtctgtctggttgtctgttcttacgaacctttccaattcagagttgcatgccatgcagggcctcggctgnacttggcttattgaagtatgttttaattgtatagtgagtgttcattaggccccttngtgccttgtgnaaaggagagttgtnggtgcagccgggacaagttctntcacaggagtagcatctctccc

SEQ ID NO: 303519 - DNA, 507 bp, Homo Sapiens
  misc_feature (388)..(388): n is a, c, g, or t
  misc_feature (484)..(484): n is a, c, g, or t
cggcacagctcaaatgagaagaagagagaaaacatggagaatgaagaaagttgggtgtattcttttcagtcttcccctcccatatctccgtctgaggccagcatggtagatattgagaaagagtaaggcaaatgagtaattattgtgctctgtcttttactgttattgaaggtcactgtttaacactccctcgccattcccctaaccactcccctttgccttaaattcattaagctgtattctttgtatttcctgataacagctgacaaggacccactctcatctgtaatgacaggtgagggtattgatgataagtagagttaataaagcttctccagtgatttagaattataacgctctgagtattatcatcaggggaatagatganaaagcccattttcattttgtggcagtgtccttcaaactgctgggttatggaatcattttagggggtctgtggaaatcactgtgggattacgatganacgtaataggaagtattcggcag

SEQ ID NO: 303520 - DNA, 300 bp, Homo Sapiens
  misc_feature (233)..(233): n is a, c, g, or t
  misc_feature (285)..(285): n is a, c, g, or t
tttttcataattgttgctggctgcatgtatgtcttttgagaagtgtctgttcatggcctttgtccactttttaatggggttgttgtttttttcttgtaaatttaagtttcttatagatgctggatattagacctttgctgggtgcatagtttgtgaaaattttctcccattctgtaggtagtctgtttactctgtcgtagtttcttttgctgcagagaagctcttttagtttnaattagaccccatttgtcaatttttgctttgttgcaattgcttttggtgccntttgtcatggaaacc

SEQ ID NO: 303521 - DNA, 349 bp, Homo Sapiens
  misc_feature (64)..(120): n is a, c, g, or t
ttcccctagagatgggagacttgctatgtggccaaggctggattcgaacttctgggctcaagcnnnnnnnnnnnnnnnnnnnnnnnnnnnnnnnnnnnnnnnnnnnnnnnnnnnnnnnnncagcttaccataatttttaaaacacaattgtaattcctctcctttaaagtggctctctttgacctaggagtcaaaagttgttagcatagctcataaaaccttaaagactccttctcacccaacctttcaagactcgggtctagtgctgacctcctcctgtgctcttgttactttgaacccacctttcataaaggcaactgctatactgcaatatgacagctagctcaca

SEQ ID NO: 303522 - DNA, 350 bp, Homo Sapiens
gaatgcatcatagtcattaagctgtagcaatgggcaaatgatagcatgtggcgtttggcttagcttggagcaagaggaagaaaggaaaccaacttagtggtggcaatatcccaagaacttgccacatttgcatgatcatctctgccatagcagcttataccttgaaggcttccaaagttgtcctgtggagcaaaaggaaggaagagagatattggtacattctttaagggatggaaaaagtcatgaagaagcccagaggtcgtttgaaaatgcagtcatgattacgagttgcatgcctggccttgttattgggttgtatgagctcttttggcaaggcaccagaatggtca

SEQ ID NO: 303523 - DNA, 228 bp, Homo Sapiens
  misc_feature (13)..(13): n is a, c, g, or t
  misc_feature (75)..(75): n is a, c, g, or t
  misc_feature (88)..(88): n is a, c, g, or t
  misc_feature (122)..(122): n is a, c, g, or t
  misc_feature (157)..(157): n is a, c, g, or t
  misc_feature (162)..(162): n is a, c, g, or t
  misc_feature (179)..(179): n is a, c, g, or t
  misc_feature (192)..(192): n is a, c, g, or t
  misc_feature (212)..(212): n is a, c, g, or t
ttaaagacagganctcaccctgtcgcccagactggggtgcagcgatgcaatcatagctcactgcagcatcaaccnccggggctcaagngatgctgccaccttagcctcccaaattgctaggnttgcaattgtgagccaccatgcctagcccattttnttagngatagaaaggatgtggngaaatgcacaaantttaatttagctgttctcgnactcattttctctctt

SEQ ID NO: 303524 - DNA, 109 bp, Homo Sapiens
  misc_feature (32)..(32): n is a, c, g, or t
gtagaaacaaggtctcaccatgttgtccaggntgacctcaaactcctggcctcttgaagttctgcctcagcctcccaaagtgctggggtactggcgtaacaacaacacc

SEQ ID NO: 303525 - DNA, 356 bp, Homo Sapiens
  misc_feature (263)..(263): n is a, c, g, or t
tgaaagagtgacaatgcttttactagccaatggttaaactaatacaccacaacttaattattcaataatacattattttattcactaaaataaatatagatttgtaaaatagttcatgtatctgctaggcctgatatttatcacatctacagataacatttgggatgcatatttttcagagtctacctaaaataactctgagggcgtcatggaccatgaactactgtaccatatctgtaatacttgggatggttactaaggantaaaggaaaatgaccacagggatttggggaattgtctttttaccatttataaagtttccacgttatcagggcacatttcatgttttcttgggc

SEQ ID NO: 303526 - DNA, 341 bp, Homo Sapiens
  misc_feature (236)..(236): n is a, c, g, or t
gaagcatctatctgaaagtgtgttgatacgaccaggtaggcccacctagctatgctatcttttgtggtatgactatcgtgattatttcatggatttttctctacagtctcaattttgagccattttgctagcttcaacaaaggtgatatgtattaatgtatttgtaagctttgatatttataacactttcatataaataaatacacagccagcttttaaaaaattacttttaagancctgtgtcttaatgtgggagctggggaaaagatgctgtgtgggaattccataagtgggctgagtcctctttgggaattttctgcaaggcaattccatacgtgggt

SEQ ID NO: 303527 - DNA, 366 bp, Homo Sapiens
  misc_feature (11)..(11): n is a, c, g, or t
  misc_feature (323)..(323): n is a, c, g, or t
tattaacatgngagctacaggcacacaggtattgacacacttttaaaatgtgcatcatcatagacagggctagacagagccaatctggggttgcacctgttcactgctactttggcccctgaaaagttttgtagcaaatcatctggccctgtgttttcagcactgttctgatctgaactcttagtcctctcagtcctttgggtccagctgttggaccacctcagaggcctactctgcattcatgtcctgggcacatctgaccctgttgtttgattcaaggcacacctaccatgttctaatacttaaattattgtatagctacnaagtattgtacactaaatgccattcacagagccttgtttacag

SEQ ID NO: 303528 - DNA, 343 bp, Homo Sapiens
  misc_feature (286)..(286): n is a, c, g, or t
  misc_feature (330)..(330): n is a, c, g, or t
ggcacgaggagagagctagcaccattaccctggtccactcgctgacatcatctacctgcttaaaagtgctagtagttctcggttgcctcatcaaggtagcatctcattctcaggaaggagttaggccctcctcaacttgactccaggaccctctggggttgacctctcgtgccccttcccacacagcatggaggagaccagcatttctgccctgcctcatgctactttcccatcctgaaatggtctccccagccttgtttacccagcgaactcctactcagtcatnaaggcccagctccaacagccattcccttcttagagtattgtctngagcccagtgaaa

SEQ ID NO: 303529 - DNA, 457 bp, Homo Sapiens
  misc_feature (274)..(274): n is a, c, g, or t
  misc_feature (391)..(391): n is a, c, g, or t
attcggcacagtgtgtgatagctaatttaaaatgtgtcagataattctgaacatctctgtcattttggtggttgcaagtattgattgtgtttttgcattccatttgagatcttggtttgacaagtgattttttaaattgaaacctggatattttgggtagtatattatgaaactctggatctctggatcgtatttaaagcttcagttttagctagcttactctaatgctattctggcaagagaaatcagggctgccaccttattactgccaggnacaggtagaaattgaattttctactctgcattcattaacatctaaggaaggatatcccttgtgactgctgggcaggggatgagagttctgggttcccactacggttttactgatgcnttcttgttctgaaaggggatagggagtgccctgtttaccactgggtgatgggggaaagccccgacc

SEQ ID NO: 303530 - DNA, 249 bp, Homo Sapiens
ggaggtttccagataaaagtagactcaatagatatgttaagcatttggaagaaaaatctgttgatgagtataaatagcatctaatgtaaaaaacgaaggatagggacacaacaggaaaagcgaaactttttataaaaaaggagacattatcacagtaaatttcttgggctttacagtaaggcagtatttccctaatcataatgcagaactacagccagtttaacccaaaattgggggtggaatatagtg

SEQ ID NO: 303531 - DNA, 110 bp, Homo Sapiens
taaggccacctcacgtggcccgccactttttttcttttaatcttggggcagtaggtttaggcatgggcaggaaacaccttccttgcactcaaacttctaaatcccaggct

SEQ ID NO: 303532 - DNA, 464 bp, Homo Sapiens
  misc_feature (241)..(241): n is a, c, g, or t
  misc_feature (414)..(414): n is a, c, g, or t
  misc_feature (450)..(450): n is a, c, g, or t
ctgaatggatgtcatgactatatatctaataattacttaggaaatcctctcaatctctgggcatggggtattaggctatgaaaaccagaattttccattttaatcataacaactctgaacatttttatgctaatggtgaaagcagaaactttgttcttgtcctcaaatcaaatttaagctttcctgttgattacacatatccttggacgagtaagattcactctctttcacctgcctggtnattgatcagctcatgagcagatggaagatctaagcataaatcactcatgaagatgatgaataagctgaaagtttattcatatgtataccctttcttatccagtgatagtagaagcttcatatttaaggaaggggattaatggacataatttattattgtttcttgttcttttngtttaaaggggattaaacattttagtggaataattnatttgattttgtag

SEQ ID NO: 303533 - DNA, 341 bp, Homo Sapiens
  misc_feature (317)..(317): n is a, c, g, or t
  misc_feature (323)..(323): n is a, c, g, or t
taaatcaataaagccagcctcttaaagcttactatttctcagatctaaaaggaacactttcttactctctttcccagagccctttgcctttgcttctaacacacacccgtgcaatgtctgctggccttgggtttaatgacaagggttcctgtctgtatctggcaggtcttttctgaacccttcctacaaaattcaattaattattcacttatattgtttattccctttaacgaaaagaacaagaaacaataataaattatgtcattaatccccttcttaaatatgaaggttctactatcactgggtaaggaaagggnatactntggattaaacttttcttt

SEQ ID NO: 303534 - DNA, 327 bp, Homo Sapiens
  misc_feature (237)..(237): n is a, c, g, or t
  misc_feature (317)..(317): n is a, c, g, or t
tgacaccacgcccagcgaaacaatggtttttaaggcattggtcatcaggtagtgaaggaccctgagaggggaaacagtaaggttggcccttcgattgtgccagctttctgccttgagagatttatgggttgtggtactatgagagggaacctaggtagagtccagggaacttcctcagttgaagagatgaagctaagggtcaggggagaccaaagtggctggagttcacagacagantatcagggtgaagagagagctgcacagaggatccctgagatctgcagaggcttccactgtagtgttcagcagagtttaantcagccctat

SEQ ID NO: 303535 - DNA, 527 bp, Homo Sapiens
  misc_feature (355)..(355): n is a, c, g, or t
  misc_feature (420)..(420): n is a, c, g, or t
  misc_feature (428)..(428): n is a, c, g, or t
  misc_feature (443)..(443): n is a, c, g, or t
  misc_feature (450)..(450): n is a, c, g, or t
  misc_feature (471)..(471): n is a, c, g, or t
  misc_feature (476)..(476): n is a, c, g, or t
  misc_feature (495)..(495): n is a, c, g, or t
  misc_feature (507)..(507): n is a, c, g, or t
caaaaataacaataacaatccttgaaccactactaaagaaggtaaattgtagggactttatttagaacccactgagacagaattaaatatcaggattttcttattttacattgatgcctttccagacagtagaaataaattcaacagaagtctttagtctggtcactcagagacaatggtagcacattagacagtgtctctaccttagttgtatctcttgaaaacacacttatccaaaacattattaaggttttgaaattcagtctcaatccctaagaaatgttcacttcagcattgtttttcttacttctgtgagagctgggaggttaaaactctgtggaatagtggctggganatgaaggatggacttttctgtctattcaaaagtatggaaaatagggggctggggtatgggtggcntctggccngttattcctaggcanttggggnggctgaggtggggtgggttcngctgngggtccgggagtttcgagnccggccggggcnacctgggtggaaacctcgtt

SEQ ID NO: 303536 - DNA, 485 bp, Homo Sapiens
  misc_feature (13)..(13): n is a, c, g, or t
  misc_feature (393)..(393): n is a, c, g, or t
  misc_feature (418)..(418): n is a, c, g, or t
  misc_feature (448)..(448): n is a, c, g, or t
  misc_feature (460)..(460): n is a, c, g, or t
  misc_feature (467)..(467): n is a, c, g, or t
tgggggaggaatnaagaatatgcacggcatgatgcacttggtaaagatataaagaagcagtaatccaatccctgcccatgttcaggattagttttatcaaattaaatggtgctgatcaatatctgatagtgaattattaattattgattatatccaaatattagagtcaaagtgggactgatagaatgtaatctaaaatctagtattacaaatgagaatagtgaggcccatagaaataggggatttttttctgttttatagaaagcattttccaagccactattatgtatttttatgacttatcataatgggatgtcacagtaagtctgttctcgttgggtataactttttaaatgtaactcgatccaaggtttttctctctgctacttttcngggcatatttatggccttaaaatgntgtgtttgggcccagccccgtgggctttgncccttatggccngcacttngggggggccggggtgggc

SEQ ID NO: 303537 - DNA, 262 bp, Homo Sapiens
  misc_feature (19)..(19): n is a, c, g, or t
  misc_feature (46)..(46): n is a, c, g, or t
  misc_feature (78)..(78): n is a, c, g, or t
  misc_feature (118)..(118): n is a, c, g, or t
  misc_feature (141)..(141): n is a, c, g, or t
  misc_feature (196)..(196): n is a, c, g, or t
  misc_feature (200)..(200): n is a, c, g, or t
  misc_feature (226)..(226): n is a, c, g, or t
  misc_feature (246)..(246): n is a, c, g, or t
gctgattcaaaagtaagancccggctggatgactctcactgcaganggaatatctgactatgcctcaaataccttgtnctttgctaaaagctttgttaactgaaatagttataagaantcccaaataattaacctgctcanggatttaagattctgtttaagatgacatatacctcagtgcttctggaaactcttnctanatcaagcattttcccatcttccatgnggggcacagagtaaggacantccaattcttttcagc

SEQ ID NO: 303538 - DNA, 490 bp, Homo Sapiens
  misc_feature (305)..(305): n is a, c, g, or t
  misc_feature (324)..(324): n is a, c, g, or t
  misc_feature (330)..(330): n is a, c, g, or t
  misc_feature (351)..(351): n is a, c, g, or t
  misc_feature (375)..(375): n is a, c, g, or t
  misc_feature (392)..(392): n is a, c, g, or t
  misc_feature (397)..(397): n is a, c, g, or t
  misc_feature (410)..(410): n is a, c, g, or t
  misc_feature (425)..(425): n is a, c, g, or t
  misc_feature (453)..(453): n is a, c, g, or t
tttgaatgttatattcctgtagttaaggtctgttagttttttcaactggaagttcagtatcctgagctaggtaaatattttaacattgtggaagaaggagggtaaatatagttgtattatgttttatttccagcctttaaaagttaaaattacagattattcatgtctacaggagtagacattgaatggatttctaattcaattaaagattttttaaataagattctagcaggccactcctgtccttgttgctcagttgtctctgtggctgggactatttctggaaatttttaattttcagcccnccagcttttactgctcccnggtggntggtcaggattccagcttctncacccacccccggatggatgctgnagcaggcagggctgcanttccngctgggcatgctnccggagacattcganccggcatctttggcctccggtggaacangtacggttctttttgaaggcttgcaggtgcacagggg

SEQ ID NO: 303539 - DNA, 409 bp, Homo Sapiens
  misc_feature (329)..(329): n is a, c, g, or t
  misc_feature (339)..(339): n is a, c, g, or t
  misc_feature (345)..(345): n is a, c, g, or t
  misc_feature (358)..(358): n is a, c, g, or t
  misc_feature (372)..(372): n is a, c, g, or t
  misc_feature (383)..(383): n is a, c, g, or t
agacaaatgtctttgttctttatatttagattaagtcctcagaaaacctgagattgcttccactgagatatttgctcaacgaaaaatcctatttgacttcacactcaattaactgatagtttcatttagatttaaagttttcacaggtaaccaccagaataaatttttagaactgtgcattgaacacaaaatgagctggttttatcatgtcagcaaaatgagagtaacagagtagtatattttaattggctaccatagaaattttgtaaatctttatccaaacctatatgttcgggtttgtcgtaaaactgaagtgaaggtttaatgancactaaatcnttgggnggtttttaaaacntgtggttggacatntgtggcatgcntaggcttttgtaggggtgacatcttt

SEQ ID NO: 303540 - DNA, 524 bp, Homo Sapiens
  misc_feature (384)..(384): n is a, c, g, or t
  misc_feature (393)..(393): n is a, c, g, or t
  misc_feature (405)..(405): n is a, c, g, or t
  misc_feature (454)..(454): n is a, c, g, or t
  misc_feature (461)..(461): n is a, c, g, or t
  misc_feature (466)..(466): n is a, c, g, or t
  misc_feature (494)..(494): n is a, c, g, or t
ggagatgcattaaatacttaaaagattgctgaagtccggtagttttgaagaattaaccatctcttcgaatgttgaaacgtggaaaagaattttggcacttctggaccctgatgaaaagtaaataacttatacatacgtggaacttgtaatttactggtgacaggccattcaatccagcagtaataatttctgttttcagctacagccattgaatagtacaaattaggctcttttttctttcaataatgtttttgtaaagctcactgggcttttagaaagggaaattttaggtatgtttctcactggttaagcagatttcttgggattcattcatgggagtgtgctgttttccaactttatggtcacacaagtctagggaaggcntaaatgtgnaacaggaaaggntgactctatgtgttgcgtatgtgtttgccggtgaccacctgtttagtcntttatanagccntgtgacagcttgggcccagtcctgagcntacttccccaaaggtccgccagtttgaccc

SEQ ID NO: 303541 - DNA, 102 bp, Homo Sapiens
  misc_feature (36)..(36): n is a, c, g, or t
atggagtctgatgctttgagacacagagccagctgncaggttatagggtgtaaaagtcaacacactgagttcagcatggtttcctgtgatgttctcaaacca

SEQ ID NO: 303542 - DNA, 340 bp, Homo Sapiens
  misc_feature (324)..(324): n is a, c, g, or t
ttatgataaccataagctttatttaactataattttctatattaacaagctcctttcctatttatctaaatcaaatggcttttattccacaccaataacctgcaaatatgactgccttggactcacaactcacccctaaggaatctgccttatgtttggaatcttattttcactgcattaaagcagtacagaaaaaacattaccatatatatgacaaggaataagaagattcacaaacgtaaggatagcataaactcattgttcaggaatgtgattgggttaccccatctaacagtctggtgaaaagtgcccgggggaaatgancacacaacacagaaat

SEQ ID NO: 303543 - DNA, 262 bp, Homo Sapiens
  misc_feature (120)..(120): n is a, c, g, or t
  misc_feature (130)..(130): n is a, c, g, or t
  misc_feature (159)..(159): n is a, c, g, or t
  misc_feature (176)..(176): n is a, c, g, or t
  misc_feature (187)..(187): n is a, c, g, or t
  misc_feature (218)..(218): n is a, c, g, or t
  misc_feature (227)..(227): n is a, c, g, or t
  misc_feature (249)..(249): n is a, c, g, or t
atgagccaccgtgcctgggaccacctgcattattcttttgccttctccacttactagccctgaggctgaaagtatttaagatcaatgaagagtgacttaggtctgagttgcaggttcctnatttacagantacgtaatatctgctatgaggaagggtanctgaggacattgaattnaggtgattatnttaaagtgtataccaagcacaacataatttntttttcacntttccctcacagtggcaatttnaccctttaacttg

SEQ ID NO: 303544 - DNA, 349 bp, Homo Sapiens
  misc_feature (178)..(178): n is a, c, g, or t
  misc_feature (311)..(311): n is a, c, g, or t
  misc_feature (328)..(328): n is a, c, g, or t
ttcttaaattttgtttacccatttctgaggcaaaggaaaaatattacatgcaatattctttgcaatctagttttacagagttaaggggttagatttgcactgtgatggatatgtgagaagaaagttatgttgtgcttgtatacactttatataatcatcttatttcaatgtctcaggnatccttctcataggcagatattatcgtattctgtaggataagggaaggctgcaactcaggacctaagtcactcttcattgatcttaaatactttcagcctcggggctaggtaggtgggaggagggccaaaggnattaatggcgggtgggnccgggcacggtgggctcaggc

SEQ ID NO: 303545 - DNA, 226 bp, Homo Sapiens
  misc_feature (134)..(134): n is a, c, g, or t
  misc_feature (154)..(154): n is a, c, g, or t
  misc_feature (165)..(165): n is a, c, g, or t
ttcacctgacatattggcctgcagacagctgccaggcaggtagaattacagaagcataatgaagagatggtgatatttaacaaatattctcagcacggaaaattattctgcagttaacctgagccaaagagctngctggcagtggcacactctncaagttgggtngcaagttctgctactgcttcaaggcagggacaagtgagaggtatggcttccttcctgggct

SEQ ID NO: 303546 - DNA, 363 bp, Homo Sapiens
tcaaacatggatgttttcaattttcactcatctagtagtatctttattttcaggtactgagaaactataatactggcttgattatgtagtcagagtaagcatattcaacaagaagggtctcattgcccttgtggttttatcttaatgaccgtctcttgataaggtaccatgactaaaaattatttgagggatttgagtagatcctataggccaaataaggcccataggtaaaaataggcaaaggattattttggaaaataaaggtgtctttcttatacttaaaggaaacagttcataatctttaacccctaccccaaatggaaacaggtgatggggtgattggttcccccggggctattttgt

SEQ ID NO: 303547 - DNA, 307 bp, Homo Sapiens
  misc_feature (197)..(197): n is a, c, g, or t
  misc_feature (277)..(277): n is a, c, g, or t
  misc_feature (291)..(291): n is a, c, g, or t
ctggccgtcatttttaatcagggttgtgattttcaacctattgaagtttgagaattgctgccttagagtcttctgaaaccaatcaattgatcatttattggctgtcccagtcattttcactagccaaataaaaagtgagggctggctaagtactacattggggataatattttcttattttgaatgagaaattgggnctgcccttatgttccagtgagtttttgagggccttattttcccattgttatgtgaagacagccagatactttgcaaaggnttgaggaaaaagcnttgtttatgggaggtt

SEQ ID NO: 303548 - DNA, 458 bp, Homo Sapiens
  misc_feature (28)..(29): n is a, c, g, or t
  misc_feature (63)..(63): n is a, c, g, or t
  misc_feature (65)..(65): n is a, c, g, or t
  misc_feature (68)..(68): n is a, c, g, or t
  misc_feature (445)..(445): n is a, c, g, or t
aattaaaagcttgcaaatgtcaggatcnntttccaagcttacagaacctgacaccctgggggngnatntcccagtctgctctccgggtgccctccaggtgatacttgagcttgtgaaacactgacctaatccctaaatgagaatctccaaggagtagaacccaggattctgtactttttaccaggtcccacgtgatttctatgtgtgttgcccagaaggctggttggtagccactgctgtaagggaacccctagaccactgtgagcattactttgagcaggcaatagttaccataagcctatgtaggacaatctctctctagtcacactgtctggggtttgaatcctaattgggccttgggcaaaatatctcaggtatctgtttcctcattttacaaaatgagggataatgggtgataaataccagtaaactacaccttttcaanttccctctgtgtt

SEQ ID NO: 303549 - DNA, 323 bp, Homo Sapiens
  misc_feature (310)..(310): n is a, c, g, or t
aaggtattaggtagcaataggtgaaaaagctacaaatgaaaaattgtagcagcccccaatgaaatcattaggaactaaatgtctatttgtaataagtggcttcagagattccagaaaacaaattggagatgtgtggtaatgactataaccccctaagtaattcagtgattcaattatgtatagcatttgcagggaaaactctacatttttgtgtcatattagccaaacctgacttcactgtacattattttagcccaatgctaaacaaggaaccactggctaatctggcacatatggaaggccgggggcnataagggtcttcc

SEQ ID NO: 303550 - DNA, 375 bp, Homo Sapiens
  misc_feature (284)..(284): n is a, c, g, or t
aaaaacttaaacaacagaaatttattttcccagagttctggaagctggaagtctacgatcaaggtgtaagcagggttggttaatcctgaggcctctccttggcttggagatggctgtcttctccctgtgtgtccacatgctttccctctgtgcatgtctgtgtccagatttccccggcttatatcatatttgataagcacccgctcatatgacctcattttaccataaccacctctttaaaatccccacctccaaatacagtcacattctgaggtacagggggnaaggacttcaacatataaattttgaagagacacaagtcgggtccataggtataatatttacataaaatataggggtgttggggttggggtg

SEQ ID NO: 303551 - DNA, 356 bp, Homo Sapiens
  misc_feature (63)..(63): n is a, c, g, or t
  misc_feature (227)..(227): n is a, c, g, or t
  misc_feature (231)..(231): n is a, c, g, or t
  misc_feature (299)..(299): n is a, c, g, or t
  misc_feature (321)..(321): n is a, c, g, or t
tactccattccattttccatacagcagctgaaatgactgatttaaagtaaaaatctctgaggngactctttctcttaaaagccttcaaaagtatctcattatagttaagataaaatatgaataacatttgattcatattccttgtgatctttacgtttcaaaatcattatttttcatgaaattgattataattggttaatgcattttatatgagtgggctctatttngggnttcattttatactttgctgtttgtttaatcatcccctaggcggacattaaggttccatgtataaaagnccatgggtctttatatacatantctcatttaatactcaaggtaaccctgatgtgggg

SEQ ID NO: 303552 - DNA, 455 bp, Homo Sapiens
  misc_feature (398)..(398): n is a, c, g, or t
  misc_feature (434)..(434): n is a, c, g, or t
ttcggcacagtgacaaaggattgattctcagtggagccctgagatacaagtgctcatagttcacttagtttgatgaatggccctaaatgagtttcttagaaataggtggttttaaaaacttgtggattgtaattaaaatgtaattatgataatgattatgagcataagcagaattcttaggagataggaacaggtgaattagctggtaatgggacatttgaccccacagagctgtgcacagactgttcgaagttcagtgaatattaggtgaattgctttaaagtgatacccttgtgacctgttgggagttaataatttttcaagtacctaatctactagtagggaaacaacttattccaatacatagtagtaaaaatacagactgtggaaagccagangaggtttttaacattcgtgatctgggccgttccttncataaattttaaagggtgatc

SEQ ID NO: 303553 - DNA, 408 bp, Homo Sapiens
  misc_feature (284)..(284): n is a, c, g, or t
  misc_feature (375)..(375): n is a, c, g, or t
tttttacatcacaaaaagatttctctgaagtttgcgcaggggtctatttgtaggcagtttccaacttactaataagtaaggttctgaaagttataagttagctgtctggaatagatagtctcatagaaaccaggttgtagatggtgatttggttccttgggcaacctactgaaacccatttactatataatgtggctgaataatattattgatagtgctatagtatttagcaactgtctgtcaagtgattttgaactctcattttgaaatctaactttcatagncattattctgatgaatttttggtagtgcgatttgactttttctacctccattctaccagttcacagtgcatctagcagtgggaattcaaanaaccctattgagagggattttggggagggaagg

SEQ ID NO: 303554 - DNA, 232 bp, Homo Sapiens
  misc_feature (79)..(79): n is a, c, g, or t
  misc_feature (96)..(96): n is a, c, g, or t
  misc_feature (110)..(110): n is a, c, g, or t
  misc_feature (214)..(214): n is a, c, g, or t
taaaaatctgctttctgaactattttaatagccatttaaaaatacttgctttatacttttttttccagaaaatgtaganatgtgcattagaaattnttttttcacttttngacagttatgtaaaatgacttacaggttttagttatggccattaactccttttactgtcactcacttcctatagttttatctttttaaatgtatgcccgctttnctggcactgtatttaaaa

SEQ ID NO: 303555 - DNA, 174 bp, Homo Sapiens
  misc_feature (42)..(42): n is a, c, g, or t
  misc_feature (73)..(73): n is a, c, g, or t
  misc_feature (107)..(107): n is a, c, g, or t
taaagcttaatgaacaaatgattataagcataaaatgtaggntatgtgctggcatttgggtatttaagagttngctaacttttatggcaagattttcagactcttantcagaggaatactgtggttctagtaagtgcatctgcattgcgctaggtagttaacaaagtatcttga

SEQ ID NO: 303556 - DNA, 391 bp, Homo Sapiens
  misc_feature (376)..(376): n is a, c, g, or t
tcaagtgtttcagggttctttaacctccacggtctccttgaaaagagagaggtgtgctctaccacttgtctaaggagcaagatggaaaaacaatgcaggagggtctatctttttaacagaaataattgctaatcaaaatgaacctttagaaactccaggcagtctcatggagataattttgggcagcacgttcttatgtaagccaaataaccctgcagggagcctgttgtggaactgggtcccctaagaccttcctaccttatctagagtgttccacgccattgcctcaaacccacacattttctaaaagttgaaggttttttcacaacatttcttatgggtctatgagggcaagagaggtgcagcctttgttccngttcatttgtggagt

SEQ ID NO: 303557 - DNA, 348 bp, Homo Sapiens
  misc_feature (209)..(209): n is a, c, g, or t
tacattgtgagctataacaagtggaggtgtaaacagaccgtagtctacacttgtgccaatcactgtgttttggccagtcagttgtgttcaaattatattcaaataaggcaaacactaacctgtaaccaatccagctgtttctgtcctcacttctgttttctgtatgtcactttcctttttctgttcataaatcttcttccaccatgtgnctgcgctggagtctctgaacctactctggctcgggaggctgcctgattcatgaattgttcattgctcaattaaactcctttaaatttaattcaggctgatgtttttcttttatcatgtctaaagggatatacttcagga

SEQ ID NO: 303558 - DNA, 356 bp, Homo Sapiens
  misc_feature (24)..(24): n is a, c, g, or t
aagaacccagaggcttctgggganggatgggcggtcaccatcccttagcctcacttctaggtggctcctccactgtagttgttttaaatgtgattgttttctggaagcagctggagctgactagagtcagtgagcatagggttttaccttctgtaaacgaagcctggaacttgttttttatgtcacctttttttgtggttactcacttcttcacatccttcctgcttttgactattttcttgtaatacaaatctaatcacttctcagatgaaaaatcccgttgcctactgaattggttcagacactgaggcattcaggtcctctgcagccgggcctctacttactgcagccaccgg

SEQ ID NO: 303559 - DNA, 436 bp, Homo Sapiens
taaccatttaaaaatatacaattcaacagcatttactacattcaaaatgttcacaaatacctcctctatgtggttccaaaacatttcattttgaaactacaaaataggatccattaagctgcccctccctattctccgctccactatctcctggcaaccaccaatttcctttctgtctctgaatttacccgttctggatatttcgtataaatggcatcatagaatgtgtgaccttttgtgtcaggcttttttcacttaggcataatgttttacaggttcatctatattgtaggcatgtgtcagtagttcattcatttgtgggctgaggtaatattctgttatatgtatttaccacattttgcttaggccattcatctgttgatggatatacatataacaggatattactgtggggttggattcccaccttttgggg

SEQ ID NO: 303560 - DNA, 436 bp, Homo Sapiens
  misc_feature (300)..(347): n is a, c, g, or t
  misc_feature (404)..(404): n is a, c, g, or t
  misc_feature (422)..(422): n is a, c, g, or t
cactgatatattacccagaaacactcaaatatcgtattggcttgttaactaaatgtgcatgcctgtgtcttaagtttttatatatgtatataaatgttgtagcatatgaaatatatgcctacgtatgtgtttatgtaatagcattaaaatttgcatgtatggcctgtgaacatacttgcatatgtgtgtgtttcacattacctgcaaagtaactgttattttctgctgcctcagaatttcagacttctaaatgcttgacttttaggtgctaaattattgttagtgctaaaggaattgttnnnnnnnnnnnnnnnnnnnnnnnnnnnnnnnnnnnnnnnnnnnnnnnncatcttattacgggcatgttaacaaattccaaaaggcaggtttgcaggcatgtaggntggtctaatccccttttnaggggaattctagg

SEQ ID NO: 303561 - DNA, 137 bp, Homo Sapiens
catttaagagaggatatttagggatgggaaggtagggggaagaggaataaaggttgaggtggaaagaacaatctaagggtggaaagaaacctgagataggtataaagagatggagaagggaaatcatggaacctatt

SEQ ID NO: 303562 - DNA, 396 bp, Homo Sapiens
aaaaaataaaagggaagggggaaatatgtcagaggcattcgaacctgagtgactccatcttgaataggggctgggtaaaataaggtttacccctactgggctgcattcccaggaggttaggcattcttactcacaggatgaaataggaggtcagcacaagatacaggtcacaaagatcttgctgataaaacaggatgcggtaaagaagctggccaaaagccaccaaaaccaaaatggtgatgaaaagttgacctctgggctgtctcacggctcattgtatgctgattataatgcattagcatgctaaggggacactcccaccaggcaccatgagtttacaaatccctgggcaatatcaggaaagttacttctatatgggtctaaaaagggggaggg

SEQ ID NO: 303563 - DNA, 370 bp, Homo Sapiens
cctgactattaataatttatgtagttctgggtaagtctctgagaaatatatctgtaagttaggaggttggaccaaatcatagctgaggttccttcaagtagttattaaattaaggcataccttacaggcctatgctaagtagtacaggtgagtcacctgtatttcgaagaactgtatcatcccatctctacttcctggcaaaacgcaaaacctctgagtgcattctgaaagtgcattaacttttttagggttgcttgtggaatctctgggtaggactgtgggaaacagtttcactaaaaagggacctcttattggattttggggaaggtaaggggtgggaggaaagtatttctaggacaatttttaaccc

SEQ ID NO: 303564 - DNA, 383 bp, Homo Sapiens
  misc_feature (287)..(287): n is a, c, g, or t
  misc_feature (316)..(316): n is a, c, g, or t
  misc_feature (329)..(329): n is a, c, g, or t
  misc_feature (356)..(356): n is a, c, g, or t
agccaaataaaaatcatcaaacacatcgaagatatttttgggagtcaccaggttaaagcaaagcctcagtcactgaaagcaaaaactgaattggccaggtctccactgacaaaacagagtaaatgatagtatgacagataatttcaagttttccaagactccaatttctgaaaaatgtctcatgactccaaaaaatcacgtacttcctaaaatgttgccagtggaggaccgaatcaaggttattgctgacctcattttttcaacctttttcagttatttgacctgantagggcaatcccccagggatttctgattngaattctacctgnaaagtttaggatttttaaaaggaccancctgtagggaagctaagttttcagggc

SEQ ID NO: 303565 - DNA, 385 bp, Homo Sapiens
  misc_feature (48)..(48): n is a, c, g, or t
  misc_feature (112)..(112): n is a, c, g, or t
  misc_feature (125)..(125): n is a, c, g, or t
  misc_feature (141)..(141): n is a, c, g, or t
  misc_feature (180)..(180): n is a, c, g, or t
  misc_feature (199)..(199): n is a, c, g, or t
  misc_feature (205)..(205): n is a, c, g, or t
  misc_feature (225)..(225): n is a, c, g, or t
  misc_feature (260)..(260): n is a, c, g, or t
  misc_feature (290)..(290): n is a, c, g, or t
  misc_feature (332)..(332): n is a, c, g, or t
  misc_feature (337)..(337): n is a, c, g, or t
  misc_feature (371)..(371): n is a, c, g, or t
tttacatacaataatgattcagacttagtccctgttctctgggatctnacagtctagtagaattggattcattgaagaagactgatgatacgcagtttgaggaagagacgcnttgaccaccagangaaatatgtactgganttggttggtaatagctgtgaatgttaggatcctgtggtnctggaacagggtagatgtntgagtngagggagtaacaacaaatgntgtagcaataaatgaaaggagatgtccggagaagngtagatatggcctcagagaacgcagggctnctgttctgtagtatgtgccaatgttgatcagggatatcatgntgtanatatacacccggctgctgtgtcctacaccatatnagactggatgttcc

SEQ ID NO: 303566 - DNA, 436 bp, Homo Sapiens
  misc_feature (411)..(411): n is a, c, g, or t
  misc_feature (426)..(426): n is a, c, g, or t
ttcggcacagggagagagctagcaacggtacagcggcattccgagccactgctactccacgtacaatgtagcagtcctctactgagcccttctcgcctactaacttgagtgctctttaacaactctgggcagtagtgacagcccctcccagggttgcagagggtggggtcacctgccaaggaggcagcaggtgcatggtggggccgggaagtgagaccaggtctgcgaccccacgaccctgcccttgtccgcccctgctgaggacaactggtgaaggccccagattctgggtgtgatggacataccacaggcccaccacggcctgcgggagggcgagacggcctgcttttgagcctgggccgaggcttgcggagcccctcaattacccttgcggttatttacggattgagncgtgcacagttcgtngcggcatttt

SEQ ID NO: 303567 - DNA, 428 bp, Homo Sapiens
  misc_feature (206)..(206): n is a, c, g, or t
  misc_feature (346)..(346): n is a, c, g, or t
  misc_feature (353)..(353): n is a, c, g, or t
  misc_feature (362)..(362): n is a, c, g, or t
  misc_feature (393)..(393): n is a, c, g, or t
tacagtgtactcgaggtaggcattagctgctggcaaggtttatgatacaatagtgacactacaggacaattttttagtcaaacaacacccgttagatatttcagggtccagcttatatgttaacttgtaaatataggttaaaaatataggtatcaagtgactaaattcagtatcagacaaattgaacatctttttatttcccagangtgccctactctttctctccctttggtgacctcttagtctggaatgctctgcatccggggcccctgggaacacatagtttttaaagtacctattagtgatactctcctcccgttgggcagtgcttccactgtgttttctngcatgtnaataaaggntgggcactgttttttttgcatagggtctttnccttaataggctgaggcactcttgggggtgttagg

SEQ ID NO: 303568 - DNA, 251 bp, Homo Sapiens
gctgactagagcagtaacctatttttattatgcagtaagtctgcctagtaattacaagattttgtaattatatcagtctttaagttgtaatgctttccccaaaatgtatcactattataatatctagttttatgcttataataaagcgacagtttctgtcataaacatctgctggtcgttttcttagtcctcttccttgttttcagatgggcactcatagtaacccatttagcagattgtacattctctct

SEQ ID NO: 303569 - DNA, 349 bp, Homo Sapiens
  misc_feature (108)..(122): n is a, c, g, or t
  misc_feature (125)..(199): n is a, c, g, or t
  misc_feature (224)..(224): n is a, c, g, or t
  misc_feature (228)..(228): n is a, c, g, or t
  misc_feature (299)..(299): n is a, c, g, or t
  misc_feature (337)..(337): n is a, c, g, or t
gaattttatctatctaaattcccctttccttctccctaacacgaaaagctctatcctgttaaccatgttttgaaactccataaaccaacacatacatggttagttgannnnnnnnnnnnnnnaannnnnnnnnnnnnnnnnnnnnnnnnnnnnnnnnnnnnnnnnnnnnnnnnnnnnnnnnnnnnnnnnnnnnnnnnnnggtcagctggtttttacaaaatggncaangacaatcaaatgggataaatggtagttcatgtcaacaaatggtgtttgcagctgggcatggctgctcacgnctgtaaattcccaacactttggggaggctgagggcagngaggtttggctt

SEQ ID NO: 303570 - DNA, 476 bp, Homo Sapiens
  misc_feature (368)..(368): n is a, c, g, or t
  misc_feature (377)..(415): n is a, c, g, or t
  misc_feature (436)..(436): n is a, c, g, or t
  misc_feature (443)..(443): n is a, c, g, or t
tcagcaataaaccaagccaagcaactaaaatgtataatgtggacctgactcatgttgggaggcagaattcagacactcacaggtcaatcttgcaagttttctcttctttaagttgagctgctcaactttatgaactgtgaaatttacttacattctttcaacccacatatatcattgcagtttatgaagttgcagtgaactgcccattcagctaaattgcagtgtttattcttgtctcatgtcgaaatacaacaatcttatgggaaatattatgacagtccgttccaactgttctcagacacatgcataaacagtctctgcttcacattccacagccacctggcatgttatccatacaggctccctgnggaagtccnnnnnnnnnnnnnnnnnnnnnnnnnnnnnnnnnnnnnnntcttgcatttttctaaaacantttgttntaaggtcactactccttcgtgcctaggcaagtt

SEQ ID NO: 303571 - DNA, 410 bp, Homo Sapiens
  misc_feature (12)..(12): n is a, c, g, or t
  misc_feature (363)..(363): n is a, c, g, or t
attcggcacagnattttaaattgatacaaagcattgaaattttgatatctttaagatgttactgttatcacatgacttttgagaatcccaaaaccctaaaaataagtctcgataagaaataataaaacagaaatattttagaaatagttcttaagcctttctgattacatgcaccattacaaatatgatagaaacagtgacccctcctcccagaaaaacgcacatgaacacagaatgtcacatccagttttagggatttcatgaacttcaagaagttcaccttggggtccagggctgatactcctgctttaaggattttgtttttctttgatagtctgttttgtccttgcctcccaaattttnggtgcaagttgtaatataatgagtttcgtttcgttttttggttgttt

SEQ ID NO: 303572 - DNA, 156 bp, Homo Sapiens
  misc_feature (34)..(34): n is a, c, g, or t
  misc_feature (43)..(43): n is a, c, g, or t
  misc_feature (51)..(51): n is a, c, g, or t
  misc_feature (53)..(53): n is a, c, g, or t
  misc_feature (111)..(111): n is a, c, g, or t
  misc_feature (122)..(122): n is a, c, g, or t
  misc_feature (138)..(138): n is a, c, g, or t
gcagtggtgcaatcatagctcactgtagcctcancctcctggncccaagtnancctcccatctaagcctcctgagtagctaggactacaggcatgcaccaccacgcccctnacttggcactnaacatgggaaagtggntctccaaggaaggcctgg

SEQ ID NO: 303573 - DNA, 162 bp, Homo Sapiens
  misc_feature (27)..(27): n is a, c, g, or t
  misc_feature (42)..(42): n is a, c, g, or t
tgagctgtttctattcggccattttgntgcttcccctgtttnttctccttttttcccccttttaggagactgggtcttgctatgttgtccagactatagtgcaatggctactcacaggtatgatcatagtgtactacaaccctgaactcctgggctcaagca

SEQ ID NO: 303574 - DNA, 260 bp, Homo Sapiens
  misc_feature (65)..(65): n is a, c, g, or t
  misc_feature (85)..(85): n is a, c, g, or t
  misc_feature (100)..(100): n is a, c, g, or t
  misc_feature (118)..(118): n is a, c, g, or t
  misc_feature (171)..(171): n is a, c, g, or t
  misc_feature (178)..(178): n is a, c, g, or t
  misc_feature (198)..(198): n is a, c, g, or t
  misc_feature (211)..(211): n is a, c, g, or t
  misc_feature (242)..(242): n is a, c, g, or t
ctagtggtccttactcccagtcccagtcctcttagagtaaaaccttgggcaattatacagtttgnctcattggctcacatatctnaaactcaggagaatnctcaagagaccatctggnaccactctggctctgattagttcctctaattccagtgtgccaacatgcaaaangtctgtngcaatggatccatttaaatnttccatgttagtnctgaatcagatcctcaaagttatttggcagntgtgcagtaagagaaatt

SEQ ID NO: 303575 - DNA, 186 bp, Homo Sapiens
  misc_feature (31)..(31): n is a, c, g, or t
  misc_feature (41)..(41): n is a, c, g, or t
  misc_feature (49)..(49): n is a, c, g, or t
  misc_feature (51)..(51): n is a, c, g, or t
  misc_feature (53)..(53): n is a, c, g, or t
  misc_feature (69)..(69): n is a, c, g, or t
  misc_feature (78)..(78): n is a, c, g, or t
  misc_feature (98)..(98): n is a, c, g, or t
aaaaagactgaatgaaaagccttaaaaagancatgtaaatntatacaanantncattgccatgaagganagataaatnctcccagaggagtgtaaatnaaggtggctggggctatccaggaagaggttaaaaagggtttcctgacaaaatgatactcaaaattggtttatccgataaactacgtaa

SEQ ID NO: 303576 - DNA, 163 bp, Homo Sapiens
  misc_feature (58)..(58): n is a, c, g, or t
  misc_feature (89)..(89): n is a, c, g, or t
acatttttaaagacctactaggtctttatcatttgagtaagagctcaaggtgattaanctcaccggataaagatgagtctttccaaaangctctggttctcacttatgtgctaaggcctgtttttacaaacaaatgtctattagaaactttacaaatataaaa

SEQ ID NO: 303577 - DNA, 232 bp, Homo Sapiens
  misc_feature (51)..(51): n is a, c, g, or t
  misc_feature (61)..(61): n is a, c, g, or t
  misc_feature (96)..(96): n is a, c, g, or t
  misc_feature (100)..(100): n is a, c, g, or t
  misc_feature (105)..(105): n is a, c, g, or t
  misc_feature (129)..(129): n is a, c, g, or t
  misc_feature (131)..(131): n is a, c, g, or t
  misc_feature (136)..(136): n is a, c, g, or t
  misc_feature (141)..(141): n is a, c, g, or t
  misc_feature (153)..(154): n is a, c, g, or t
  misc_feature (165)..(165): n is a, c, g, or t
ctctccccacccccaaatcccattaaaatgagaagaaacagaaggtaaaancctgtaacancaaagtgaataaaaagaagaccaaaagcaaatganaganttaantacaattctaggagatgaagagananctgancaganaagattactaanncagagcatganacagtcatagcctagagtccaaaggagcctgaagcttaagacgttgtgaacaaccttgtctaacttt

SEQ ID NO: 303578 - DNA, 391 bp, Homo Sapiens
aagaactgactcttagtagaaacaaaactcagatctgggtggtgtcatgtgtagggtcaaccccggagtagctatcagccaggagtattcggcacaccatgggcatcagtcagcatatttttaaaagggagtagagggtgttggttaatttggaaagtcagttacatggaggtaattttggagtttctactgcacactgcttaaaatcacacagcagagccttccagaatcaaatgctaacgctattcagggccacgtgattcattactgactgatgaggatgaggccaacatgtctccttccatttaacttaaataacttgggtatgtcaagttcagggtattaaaatatggcctattcattcctcagggcttccatatattacttcccg

SEQ ID NO: 303579 - DNA, 416 bp, Homo Sapiens
  misc_feature (223)..(223): n is a, c, g, or t
  misc_feature (252)..(252): n is a, c, g, or t
  misc_feature (339)..(339): n is a, c, g, or t
  misc_feature (351)..(351): n is a, c, g, or t
taaaaaatagggtatcttctaacttccaaaaaatcctagaaatgtcataatccaatatctgtacacggtataaatattgaaaagaggaggactcctgtcaatctaaaataacatgcgttatctggttcttataaagaattttaagaaaaaagaaacaaggaaataactactatctatatttgtaacttttgtaaggcaggatgctttttaatatacaattagngtctctatgctctgcaaaacttctaaggntttagtattagggtcctctgggtatatttcctacttaattttttcccccaattccattctaggtactcctaggatacactaacattnggtctccaaacnatcgtttggctttttccacactctacttgtcaaatggctaggttgggcttatatgggcctcaccc

SEQ ID NO: 303580 - DNA, 425 bp, Homo Sapiens
  misc_feature (388)..(388): n is a, c, g, or t
  misc_feature (400)..(400): n is a, c, g, or t
gcagtgcttacctccaggccgtgtgtggaaatgcattgagccttctcagtgtgtcctgatgttgtaagtttccactttaatgcagctgcagagactgcgtcccacccgaccgcctcccaagatacagcgctcgaggcccgtgagtagctggtggttctgccctccccacctaacactgcctgagccattctccctcagcctgactaaacctccagagtttggaccctcctgcctgggcaaaagaaaactgggaattgggtttttcagcttccctctctgtgtgggcatgaacttgagcttgcattctctgggcttctcttgctttttcgtgaataagtttgggtgacttgcagatcagagccataggtagcaagggggccatgtgtgntgcgtgtgctgngtgttgcattatttgagcaagtttc

SEQ ID NO: 303581 - DNA, 377 bp, Homo Sapiens
aaacaccaaccacccagtgcatgctaagctcacactggcctcacaaagtagacatgatggggcaatactttccaaatcaaattgaagtatttgacattagccccacatcattcacacacacttatactaataaggatttttagccacagaaaatgaatttttagtctaactagtttaagcacaaaggatttattgagtgtgaagacagcttaaagaattttggggaagagtgaaacaacttccagggtatgatttcaaaagtccctagactgcccaggggagctgattcccctgcttgattagggaagttgcagctgccaactccagaaccttattacctctttataatttaccatggaggaagttaccaattcagg

SEQ ID NO: 303582 - DNA, 413 bp, Homo Sapiens
  misc_feature (66)..(66): n is a, c, g, or t
  misc_feature (379)..(379): n is a, c, g, or t
  misc_feature (384)..(384): n is a, c, g, or t
aacactaaagtatcactttataaattcagaaaatccagagtagggaatttctggcccaaggcggangctttccagttgaagtctttattttgcatattctgtggcttttctgttttagttctacttgcttacatttatttttgctttccatagcttgacataatataaaactgaatatatcttagttgtactttgcattgactatttaattttttgtctttttaacttaaaatgtgaaataaaattaatcttgtcttcattactgtatctctgatagtttttgtttcttcatctgttgcttaaatttattccattgtattactggaaaccctaaaaaaaccaggacaccttgggaccaggactaggtacaggttttttnattcnaggtacagttggcggactgtgtgtttgtt

SEQ ID NO: 303583 - DNA, 427 bp, Homo Sapiens
  misc_feature (310)..(342): n is a, c, g, or t
  misc_feature (349)..(349): n is a, c, g, or t
  misc_feature (391)..(391): n is a, c, g, or t
  misc_feature (413)..(413): n is a, c, g, or t
attcggcacagaaaacctttaaccaggaacaactctgtgaaatgagaactgacagtgtggccttgacctggaccgagcgaaagtccagtgactggcaaagaaagccattcttttggatcacaggtccttctcccctgttggcatgtgtagaaacactttgaaaggatctcaaacacctagtcagttggacttaatttccaaggaagcatcgatatttctaaccattaccttaataaaccacttgggttataagaaattcagaaatcattatatgctcaagcccaaagaaataagtttcttaggtgaaagnnnnnnnnnnnnnnnnnnnnnnnnnnnnnnnnngtctggntcgttgtttcatttatgtggaaacggggtgaagggattgcantgcatgtattttaaccctaaantttgggtagtgggg

SEQ ID NO: 303584 - DNA, 450 bp, Homo Sapiens
  misc_feature (49)..(353): n is a, c, g, or t
  misc_feature (385)..(385): n is a, c, g, or t
  misc_feature (403)..(403): n is a, c, g, or t
  misc_feature (413)..(413): n is a, c, g, or t
  misc_feature (421)..(421): n is a, c, g, or t
ccatggaatggagaatatattcacaaagattgtacctgataagaaactnnnnnnnnnnnnnnnnnnnnnnnnnnnnnnnnnnnnnnnnnnnnnnnnnnnnnnnnnnnnnnnnnnnnnnnnnnnnnnnnnnnnnnnnnnnnnnnnnnnnnnnnnnnnnnnnnnnnnnnnnnnnnnnnnnnnnnnnnnnnnnnnnnnnnnnnnnnnnnnnnnnnnnnnnnnnnnnnnnnnnnnnnnnnnnnnnnnnnnnnnnnnnnnnnnnnnnnnnnnnnnnnnnnnnnnnnnnnnnnnnnnnnnnnnnnnnnnnnnnnnnnnnnnnnnnnnnnnnnnnnnnnnnnnnnnnnnnnnnnnnnnnngcacttccaacctgggggcggacagagtgagnttccatcttcaggaaaantaaaataaantaacgcanttttaaattgaggaaagggtttgagggcc

SEQ ID NO: 303585 - DNA, 388 bp, Homo Sapiens
  misc_feature (208)..(208): n is a, c, g, or t
  misc_feature (350)..(350): n is a, c, g, or t
  misc_feature (356)..(356): n is a, c, g, or t
  misc_feature (371)..(371): n is a, c, g, or t
taactgtagagaatatattgatacaattccatcactaggatttgaggcctgcagttttctaattagtctagactttatgacaagcatattttttgtgattcaattaggaaccatccatatagctcttcccaaaaaatgcttataccttgacaagtgttattattccattagaaagtaggaaattattgaggctaaagaatgactcagnccaaaaggctagggactaaaaaaggcttgacagggcactgttctaaggggtcctcactctgggctatggatgtcggctaatgtacggggcaaggtcttaggccccagccaggcctttccacatggaaccaaatgtgggccanaagganctcaggattcggggntcagtcctgtaagcagt

SEQ ID NO: 303586 - DNA, 273 bp, Homo Sapiens
cacactatttaaaaaatgggttaaaaagttgattgggataggtgcagacttgcttggcaatatgctatatggaaacatgcctgtaccagcagaaattctgtgtctgattgctggccagcttacttccagccattcctaggcccttctcctttacccaccttcattatgaagggctacttgttttctctgcctgtcttacataattcagggccaacagaacgtaaacagatacgaggctggggagcttctgggaaaaacttttactcttcgtac

SEQ ID NO: 303587 - DNA, 459 bp, Homo Sapiens
  misc_feature (365)..(365): n is a, c, g, or t
  misc_feature (377)..(377): n is a, c, g, or t
  misc_feature (413)..(413): n is a, c, g, or t
  misc_feature (422)..(422): n is a, c, g, or t
  misc_feature (445)..(445): n is a, c, g, or t
ctgtatcacattccttagctcacaattgttttattattcaccttaactattaatatatacatagcacttacggataaagattctacagaatacagtacagttctgagtcccctttcctaactggaggtttttcagtcctgctatgaggtgatacttatttcccatggctactcaagttaatttaccagagttctaggatatttgtccattcaggaccattttagggactccatggctaaaggggcaggataatgagggtaaagggtcaagggtgggttgggatttttgactacaaggggtaggtaggaggtcttggggcaggcctaaggtcttgacccctttgttagggggataatggactatangccgggggactncccaccctggccgtgtacttgcaggggttacaaggnaggcagggncaccctttcaaggaaacccgggnttttatgggttttg

SEQ ID NO: 303588 - DNA, 330 bp, Homo Sapiens
  misc_feature (27)..(27): n is a, c, g, or t
  misc_feature (32)..(32): n is a, c, g, or t
tttaattaacacaataatcaagggtantaaanaatgtactagttcttgtgctctctctgcaatggattatgttcccagagcaaggactctgctccttctttttaaaaaaattactcacaatagccaaacacagataacctatgccttatatccaataaagcaggtatcaacatttatcaacagtagtttaccctttcttattccctacattaacaaggaatactatcaattaaggacctctctagtatcctctagatcattttaacttctgtaaaactttgaaagtttaaacaatgtaattcaaagggccaaatgttttatttctgaagg

SEQ ID NO: 303589 - DNA, 127 bp, Homo Sapiens
cgtgcccggcctattctcccagtaattcttgatgtgtagggtgcatgggaagggcaggatgtttgaaatatgtatatttgtgggaatgggttataattgaggctaattaaggtatggcctcatatac

SEQ ID NO: 303590 - DNA, 363 bp, Homo Sapiens
tacatacatggccttatttgaagataatattaaagtccagacccttcataatataaggcctgagtgagaagacaggggtttggggtacaggcaggccctcaagctctctctgccttcccgcatattaagaacctaccttcagacaaagatctaagtgaaaatgactgctaaggccccccaaattatcccttcattaggatatttaaggatttaaattgttaacctaagggaatgaactccaatataaaatttcagggcatcaggcaactgaggaggttcaggccattctaggtatggcttcaaataggggaaggtactggcctcttatccaattcactggggaatttatatatacatataatt

SEQ ID NO: 303591 - DNA, 300 bp, Homo Sapiens
  misc_feature (121)..(121): n is a, c, g, or t
  misc_feature (125)..(125): n is a, c, g, or t
  misc_feature (139)..(139): n is a, c, g, or t
  misc_feature (144)..(144): n is a, c, g, or t
  misc_feature (147)..(147): n is a, c, g, or t
  misc_feature (151)..(151): n is a, c, g, or t
  misc_feature (155)..(155): n is a, c, g, or t
  misc_feature (171)..(172): n is a, c, g, or t
  misc_feature (177)..(177): n is a, c, g, or t
  misc_feature (201)..(201): n is a, c, g, or t
  misc_feature (209)..(209): n is a, c, g, or t
  misc_feature (217)..(217): n is a, c, g, or t
  misc_feature (233)..(233): n is a, c, g, or t
  misc_feature (240)..(240): n is a, c, g, or t
  misc_feature (260)..(260): n is a, c, g, or t
  misc_feature (280)..(280): n is a, c, g, or t
  misc_feature (286)..(286): n is a, c, g, or t
acccagaagtggtagatcatatgttaattccatttttcattttttgaggaattgccatactatttttcacactggctgtactattttacattcctatcaacagggcacaagggttccaatntctncacatctttgccancactngtnattnattngataatagccaccctnntgggnttaaggtgggtatctcattatacnattaattngactctgncactcagggctggagngcaattnttataattgctcatggcatngacttttactaaggagtttnatttcngccatacaacttag

SEQ ID NO: 303592 - DNA, 218 bp, Homo Sapiens
  misc_feature (126)..(126): n is a, c, g, or t
  misc_feature (148)..(148): n is a, c, g, or t
  misc_feature (160)..(160): n is a, c, g, or t
  misc_feature (178)..(178): n is a, c, g, or t
  misc_feature (183)..(183): n is a, c, g, or t
  misc_feature (192)..(192): n is a, c, g, or t
aaagtgtcttttgcaatcaatttttctctgatcagtgctttcaatgtatcttgattctggatacatagtgttttcaatgtcgttttttaagtttctccttttctttagggagttattagggaggtnttttaaaaatttcccgggttgnatgtaacctttnctggttgttttgtttttntattncgttaaatnctaggtttttatttgcatttttgggt

SEQ ID NO: 303593 - DNA, 423 bp, Homo Sapiens
  misc_feature (120)..(120): n is a, c, g, or t
  misc_feature (192)..(192): n is a, c, g, or t
  misc_feature (207)..(207): n is a, c, g, or t
  misc_feature (388)..(388): n is a, c, g, or t
atttgaaaattaagagagatgaaagattatgaaaagttttcctcccattctgttccctatcttccctgtttccatgacaacccctaaaggtaactattactagtttcttttgtatttttncagagtttctaaaattttatatgtataagcaagcatattaaatatagattatgtctttgtcatttataaaanagatatcattctttncttattatttgtgcccttgcttttttgcataacaaaaataccttcccattccacacatagagagcttcctcattaaaattttataggtatatagtgttacattttatgggatttatcctaatttgtttattcaatccctattcgatgggacattgtggcttgttcttccttccattcactnttaggggctgtaggtgtggtttacctttaaactgt

SEQ ID NO: 303594 - DNA, 250 bp, Homo Sapiens
  misc_feature (63)..(63): n is a, c, g, or t
  misc_feature (137)..(137): n is a, c, g, or t
  misc_feature (202)..(202): n is a, c, g, or t
ctatttgttcctctgacttaataatctcaaatgacctgtttttgagttcactgattctttttnctgcttaagtctgttattgaacccctccagtaaaattttaaattcagttattatagtcttcagctctagaattnctgtttgatcttgtattatagtttctaacttttttgatattgtcattttgttcatgcatcatttncctgattttatttagtttgttctatttgtgtccccttgtagcacattg

SEQ ID NO: 303595 - DNA, 380 bp, Homo Sapiens
ggaacctccatattatttttcataatggcagtactaatttacatttccaccagcattgtggaagagtttcgttttctccacatcatcaccaacacatatctttcatctttttgataacagtcattctaacaggtgtgaggtgaatatctcaaatgtggttttagtttgcctttccctgatgaatactgatattgatcattcttccatatacctgttggccatttgtatgtctttctttgacaaatgtctattcagatcctttgcccattttctaaatagtttatttgttttcttgctattgagtcatggtgagtttccttatatattttggaatgttaaccactttatccggatggtatggggtttacagtaccaatatt

SEQ ID NO: 303596 - DNA, 416 bp, Homo Sapiens
atgcttcatattaacatagaaaagaaatttcttcacctatctcctgagtcttttgaaatcttcacatatattattttctaaattattattatttaaaattttcttaaagatggagtcttgctctgtctcccaggctggatagagtacagtggcatgatcttagctcactgtaacctcagacttctgggatcaaacaattctcccctcagcctcctgaatagctggggctacaggtgcatgccatcatgcatggctaattttttaaaatttttcgtagagatggggtctcgctacgtagtctaggctgttctcaaactcctggggctcaagcaatcctcccacctcagcctcccaaggcgctggggattattaggtgttgagtcaccatccctggggcttctatttttatttatttt

SEQ ID NO: 303597 - DNA, 342 bp, Homo Sapiens
  misc_feature (296)..(296): n is a, c, g, or t
  misc_feature (301)..(301): n is a, c, g, or t
atgagccacgggaccaggacagaaaacaattttaaaatgacaacctccctgtgaaataaaacttgactggcacctgggtttgtatgactgtaaggattaaaaatggtcaagacaccctataaatagattaaggttccaacctaagtagaaacaatctggaaaacagaagtgtgtaagtttggacctcaattctgaaaatatactttttaaaaaacccgattttccaactcccaaacagattttaggaaaccttaagggtatttttatggctgggcttccaaaggtttaaaacaaantacantccttttcacctatggaatactgttcaaggctttttaattt

SEQ ID NO: 303598 - DNA, 452 bp, Homo Sapiens
  misc_feature (128)..(128): n is a, c, g, or t
  misc_feature (152)..(152): n is a, c, g, or t
  misc_feature (190)..(190): n is a, c, g, or t
  misc_feature (346)..(346): n is a, c, g, or t
  misc_feature (374)..(374): n is a, c, g, or t
taatggatggagtgaggaaagccaaagaatagaattaaaagaaatcagggagtaaggaggataggttgtaaatcacatagcatgaattttcttccagaatgtttcatcagtgtagatgcttaggcgtncaagtttaatttttgtttaaaatnggggaaaaaccctacatgaatagattcctgggattaantttagtatcagatttaatttttacagtcaagaacaattagattgtctgctcgtattttctggatcatgagatctattcacactgaaatgtctaacattttgctcattgtcaaaaaaagccttcaagtgctgacatgaaggaattgtgctttatttncaaattgtgcacatcactggcagtagcngaggcttcatgcacacatggagaggaagacatactgggagttaaggttcctgcttcttctttggttttgaccttaggc

SEQ ID NO: 303599 - DNA, 334 bp, Homo Sapiens
aaggtttttggtttgtgtatctgaaagtgcttagtatatatgaggaaccacaaaccaagtgtatgagtttctaaatatttgaattattaagggatttttcattcattttctagagagcaaatttatctaggcatttataacattttaatttagacagtgccttttcagtttttatctttggtgaagcaaaacatgaatttaatctttagtaacaaatcccatatctatcttcctatttaaagactaattgtatttggtcttttcacattaattttgaaaaaatgacggcttatgtgttataaaccacatgtagttctcatgttctgaattatca

SEQ ID NO: 303600 - DNA, 450 bp, Homo Sapiens
  misc_feature (194)..(194): n is a, c, g, or t
  misc_feature (381)..(381): n is a, c, g, or t
  misc_feature (428)..(428): n is a, c, g, or t
atcaagttgacactcagtattaaccatcacaataagagagaattggctcacacgattataaagcaaagtcccacgataggccatctgcaagctggggaaggagagaagctgatagcatggctcagtccaagtctgaaagcctcaaaaccagggacgctgacagtgcagccctcagtctgaggccaaagccaggnagcctctgggaagcaattggtgcaagtcccagagtccaaaggtggaaaaacctggagtctggtgtccaagggcagaaggagaggaagtcaagcattctgcacagcacaggaagaaagagagggagcagactcagcaagcacgctgcttatctccattcgtccacctgctgtgttctagcctcactgngcagccaattcgatggtgcccacccacattgagggtgggtcttcctnttcccattccattgattccatt

SEQ ID NO: 303601 - DNA, 159 bp, Homo Sapiens
taagaatcacagttccacagtcttaaatgcctattacattttttgtaataatagttcttgaggaaagtgctgaatcttgtattctgagtgttggggaactgtctctttccttaaccttggcccttgagaaaatatagctaattcacaactagcggtatt

SEQ ID NO: 303602 - DNA, 186 bp, Homo Sapiens
gacaagaataacattggtttacatttttgcgaatctctctaatgacctggcttaatagaaacagctggattcttacatctacttctgcattcattccattgtagtattttattttttatatttaagtatatgaggaagttctaatttcatgcaaataagtggttggaaagagaggaatattttggc

SEQ ID NO: 303603 - DNA, 344 bp, Homo Sapiens
ttgcagttttcagcatctacatcagcctttagggtgaagatgctgcatctccagcaggcccttatgacaatgccaagctgtccttagatgtcaaggcagtttcatggtgtcctggacatctcagcctttcccctttactgctctctagtccactttctctgcgatgatgttaggacaacatattctagggcagctatttcgagggagaaaatacttgtctagagtctaaggactcacagagagcaagccacatatgagtggataagctgccagcacacagctcaagcccagctctgtggccactgatagatgtgtgatcttgaccaagtccttcaccttctttt

SEQ ID NO: 303604 - DNA, 470 bp, Homo Sapiens
  misc_feature (37)..(37): n is a, c, g, or t
  misc_feature (372)..(372): n is a, c, g, or t
  misc_feature (398)..(398): n is a, c, g, or t
tgcagcattttccagtcacatatcagggttatactgnactgcaacaaagatcaacttttaaaaattagccttcttaaaatacaaaatgatttaagtattttaaagataatttatttgccttgctcttgccttctaacattagccatttcatggagaggctaaaacttatactccaaaaaatgtggaagcacattttaatgggagtaaaattaaaaaattttgagaaagggtaaaatcttatgaatatgcatcttcttagctttatcttccctttgataggtaggcacttatgctcttccatctgctcaaatagggctcagggaagccagtcatttccttagcgagatgattactcctttggcctttgaaacntttattggggcccaccatgtttgggntccagtgtgtggtagtgagtcctactcccaaatcagtgattcccaagtcttgggctttggggacccgttttt

SEQ ID NO: 303605 - DNA, 358 bp, Homo Sapiens
  misc_feature (312)..(312): n is a, c, g, or t
  misc_feature (325)..(325): n is a, c, g, or t
ttctgtgaagaatgatgatggtattgaagcaggatatttccctgaccccttcatgagactctcaacaggggtgccttgtttacttagcccgccactctcaactcctcaagggagggagcacaagcaaacaggtgcgggaactggagtcaacaagcactggaaagggctagccacttcagtgacagcgggatcaaactccactcactcaagacttgctgtgttccactccttgcaggagggagcacacaggtgagtggggtgctgggaaccagctaggatgctttagcacagggcagggggcaaactccatgnaaggccccacagncaggcatccgggcagggttgcctgcccacttcc

SEQ ID NO: 303606 - DNA, 384 bp, Homo Sapiens
  misc_feature (32)..(32): n is a, c, g, or t
  misc_feature (36)..(36): n is a, c, g, or t
tccgcctcactgagccggctcagccagcgcantttncctggaacgccagtcccttaggatgggagagagcggagaaggcaaagaggaacagactgggaaagagactggatagattctaatatggtgaaaacatcagaagcagttcagggactaggaagtgggaactctagagatgacagacattctgctgggtggtttttaaagtttcttccagagtcatctgcctcattaacaacaatttttgtggaagaagtccgtctttgattttatgaactcacgtgactccttggtctgttacgaatgcacaatgctccagtccttcaataagcccattacatacttttcaccatgttcatctataggtgctttttctccagtgttaaa

SEQ ID NO: 303607 - DNA, 340 bp, Homo Sapiens
gaccagttggggacaataggattagcttaccagctgttgagtattcataggagttactttttaggaagtggttgatttaataccaggctattccatactctcttgtccagttcacatgttaatcaatagcatactctgtgacattagtgatctagaaccacgttttcatctgtgcacagtgaactggcttatattgggatgaaaatcacaactttgacttaacacttaatctaactagcattaactagtccagacttacacatgtatttgcactgattttattcatgcccgggtagctttgtttatctggggtcacaaaagctgaaattgtgggtgtgct

SEQ ID NO: 303608 - DNA, 298 bp, Homo Sapiens
  misc_feature (66)..(66): n is a, c, g, or t
  misc_feature (217)..(217): n is a, c, g, or t
aaataggtctaaataaccaaattaatccacagaataatgttggtgtcaccatcacagctatttctnagcttccgaaattatctgtgcctagtcctggaaagctttatcctgtgcaatgcaagaggcagaactgggaaaacatggagaaggtaagacctgtgccctacattaatctgctcatcgaggaacagcaggaaaggcccttctatgggggagnaccatgagggaaatttatcctgcaggaaactggggtatctggcaggatattaggaaggaacgttatgttcctacaggtggg

SEQ ID NO: 303609 - DNA, 406 bp, Homo Sapiens
  misc_feature (195)..(282): n is a, c, g, or t
  misc_feature (335)..(335): n is a, c, g, or t
  misc_feature (357)..(357): n is a, c, g, or t
ctgtctgcaaaatgaaaagcttgaactggatggccttaagggtgattttcagctcgaaaatcccaatatcctaaccctcaagcttgggttagatccaactcctctgtgctcttcctgtaactaagcaatgagcccagtctatggtaaatcccccacccctaatcctagcctgtgacagagggagaccaagtgtcnnnnnnnnnnnnnnnnnnnnnnnnnnnnnnnnnnnnnnnnnnnnnnnnnnnnnnnnnnnnnnnnnnnnnnnnnnnnnnnnnnnnnnnngaaaacaaggcatacatggtctactcctctatttctttctcttaggtgacttngtttatcgtgtgagccattctngcaggaagttaggacttcatgtaaccccataatgaatttcctgtctagt

SEQ ID NO: 303610 - DNA, 431 bp, Homo Sapiens
  misc_feature (58)..(58): n is a, c, g, or t
  misc_feature (378)..(378): n is a, c, g, or t
cacttcctaagactttgcctgtgacattctgaagtttctttcccctttattataagangctcttatctttgaaactatccaaatatgaaggaaatctcctgcatggatgtagcttttgcataatccctcagccatggaccaagaagtaccatggcccactggagttcttgatatctgtagctgcagcaaagtcacaaagagtggttaggagccacagcatttaagcaggtgggccaggggaccagtttgatagtgaccccagtctctgaagccggcagagggtagctggcgatatgttttgcctattaggagtgatctactaggacagggaattcattatggggggttacatgaagtctaacttcttgccagaatggntccacacggttaaaccaagtcacctaagggggaaaggaattagaggggtagga

SEQ ID NO: 303611 - DNA, 469 bp, Homo Sapiens
  misc_feature (368)..(368): n is a, c, g, or t
  misc_feature (408)..(408): n is a, c, g, or t
  misc_feature (421)..(421): n is a, c, g, or t
  misc_feature (458)..(458): n is a, c, g, or t
aatctgtatacagttttagctccatttgatattagtcccctttaagtaagtttaaagtgattatgattaggaaatctatgaggctttaaaaaatttttcttttaattttggtgaaatacacataacatgaaatttaccatcctcaccatttttatagtatacagttcagcaatgctatgtacagtcacattattgtgcaaccggtttccagagctctcagcttacatgactgaaactctgtatgtattaaacatctccccagcacccctttttctagcctctggcagttcattattctggctttccatatctataaatttgactactctacatacctcaaataagtggggaggcatacagtatttgtnccttttgtggactgggctcgtttcacccggcgtatgggtnttcaagggtttcntcccttttgttgggctggtattcacaattttcttttncctttttaggg

SEQ ID NO: 303612 - DNA, 227 bp, Homo Sapiens
  misc_feature (189)..(189): n is a, c, g, or t
  misc_feature (196)..(196): n is a, c, g, or t
cttgtcaactaaagatgtttgatgattgttattaccatactatgtcaccactgagaaagacaacattaagtaatgctatacactaataaataagtgacccgaataattagataatatagtaagacacgtcttaatgaaatttacttaattcagatattttgcaaatgcaaagaggtgtaaacacttttnaattttnaggatttgcatttaaatgctaaggggtatta

SEQ ID NO: 303613 - DNA, 384 bp, Homo Sapiens
  misc_feature (42)..(42): n is a, c, g, or t
  misc_feature (60)..(60): n is a, c, g, or t
  misc_feature (89)..(89): n is a, c, g, or t
  misc_feature (109)..(109): n is a, c, g, or t
  misc_feature (199)..(199): n is a, c, g, or t
  misc_feature (279)..(279): n is a, c, g, or t
  misc_feature (302)..(302): n is a, c, g, or t
atctccccctcccatttaaattcatagccaatcttgtattgnctatttaccattctcttnagcctcctcgctcccttctctaacctctnccctcacctctccccaaatnattttgaagcaaataacaggcactgtctgacctcatttttgttttaagagccaagctgtgacctggggaaggaggggcagtgaaagggancaaggagagatactcgaggatcttcaaacgtatctgtgatttaaaaagaaaggatgaagtatatgggatgggtaaaagtnatgggtttaacaaaggatagggncatgaggtattcaggatacggggatactctgtatggcttgaggctatttcatcaccatcatcatccatcaaaaagccagttg

SEQ ID NO: 303614 - DNA, 304 bp, Homo Sapiens
  misc_feature (270)..(270): n is a, c, g, or t
caaacaaaccaaagaaattatacaggtttgcctctgaagaagagaagagaagtttgaataagcacaatagtattttctagatttagtgtaattagctaaatatatcaatttataaaaagtatgaaaccacatttttgacacgtttattatatttaaaatatagcgcaataaaataaggttagggaaatgattgcatattaatctctgagagggaaggaatgttatctgttgggtaggatttattaaagttactcctttccttattagggnggttaaaggtttttttggccccggtgccgttggc

SEQ ID NO: 303615 - DNA, 421 bp, Homo Sapiens
  misc_feature (335)..(335): n is a, c, g, or t
  misc_feature (396)..(396): n is a, c, g, or t
aagacagtctcgctctgttagccaggctggagtgcagtggcagacccatgccggcacccaggccaccctggaagctggtgctgctgctgcccaattgggagacaatcaaggagctgatgtgggcactgggcctgctcatgtaggaggagctgctgaaggcccaggggcagaagttgaacaccttgtagggctgctgggtcaccctgatggacatggtggaggcagaagtggaggcaggcaggctgaaccagggaggagatttgaaaaggagcagaggagctgcttttaggtcagtctaatttttccaaaattatgggtaatgttagctttctctnaaagtacttgaggagcaattttaagtaatttattaacttacttatgtagtactaaaaggancccaacttgacagcctaggcttagt

SEQ ID NO: 303616 - DNA, 369 bp, Homo Sapiens
  misc_feature (48)..(48): n is a, c, g, or t
  misc_feature (278)..(278): n is a, c, g, or t
  misc_feature (291)..(291): n is a, c, g, or t
  misc_feature (294)..(294): n is a, c, g, or t
  misc_feature (298)..(298): n is a, c, g, or t
  misc_feature (304)..(304): n is a, c, g, or t
  misc_feature (314)..(314): n is a, c, g, or t
  misc_feature (342)..(342): n is a, c, g, or t
atatgcaacacgtttattgagaggcagttgtgctccagccttccaggnggtcacagtcttaggggaagcagtgcaatggaggttggaagcaggggaaccctttactgaaggctgagcgctggctggcacactaggcctggcagcactggagggcaggcagggaaagtagggtgggtaacccagcctggcaaatgcatggcagctagaaaacctcttcaggttctggggtggctgggcatgagaggggaggccaggcagggctttcaaggtaaccgggntcagatcatgganttncctnccaggntccacaggantcggggacagaagcagagcaaacccagntaccagccgggccctgagctccctcag

SEQ ID NO: 303617 - DNA, 164 bp, Homo Sapiens
  misc_feature (42)..(42): n is a, c, g, or t
  misc_feature (127)..(127): n is a, c, g, or t
  misc_feature (143)..(143): n is a, c, g, or t
cactaaggaaaacattcttttacctatcatattgggcccaantccaaaagtttaataacatgctctgttgggtgatgcggtggggaaaaacaggcttgtccctaacattgctgggtgaggggtacanttaggttaggtcctgngggggtacatttgggcatttt

SEQ ID NO: 303618 - DNA, 121 bp, Homo Sapiens
  misc_feature (41)..(41): n is a, c, g, or t
  misc_feature (78)..(78): n is a, c, g, or t
  misc_feature (100)..(100): n is a, c, g, or t
gaaggtatgggttccctctgggattgggctgctcactaagnctgatgagtgtgtgtcccatctggccatctaataaantgggatatgagtcttgggttcngtggtcttctgaattgccaag

SEQ ID NO: 303619 - DNA, 428 bp, Homo Sapiens
  misc_feature (145)..(214): n is a, c, g, or t
  misc_feature (412)..(412): n is a, c, g, or t
agctacctttcaagtactcagtaactacccatgtctagcggtgacaacatcggatggtgcagatggagagcagttccatcctgcagaaggttctgtaagacagtgctgatatgaaggtgaaggagtagcttgaagcttgagggtnnnnnnnnnnnnnnnnnnnnnnnnnnnnnnnnnnnnnnnnnnnnnnnnnnnnnnnnnnnnnnnnnnnnnngtaggctacattattcagtcataataagggattatctgctctgggaggcactcacaataatggcttatggataatggggtaaacacacaccagatgggaggccctaggaatgggacggacaggacacccttatggggtgcacggtgggattggctgcgaggggttaggaaaggactttttattagggaaaggcacctncccacagggccccaac

SEQ ID NO: 303620 - DNA, 417 bp, Homo Sapiens
  misc_feature (129)..(129): n is a, c, g, or t
  misc_feature (328)..(328): n is a, c, g, or t
aaattggccttgtccttcctaggttctctattgagatgagaaagcctcattatgctgacattttccacgccacattaaatagttaaaaaggatgcagcctggagccagagagcagaaagctgggctggnttctgaagcttcttccatacttaagttgcctccaagcagtttgtgaaagtatcagatcttgggtatcctgggtgattgattcacctaatataaatatatttgtgtcatgaacctcttatcccgttgctgggagttgtaatctccatcatctaggaaaacgtgggtctgggtgctattcttttccaagcaggtaccttgnaagttccatttttgggttcatgagtagctataggaacgcaagggtgatacatctttgggtgttttgccagagaagttgggcagccccac

SEQ ID NO: 303621 - DNA, 372 bp, Homo Sapiens
  misc_feature (80)..(88): n is a, c, g, or t
  misc_feature (153)..(153): n is a, c, g, or t
  misc_feature (177)..(177): n is a, c, g, or t
  misc_feature (336)..(336): n is a, c, g, or t
gtttatatttatttgaatattaggggttgaacatatgtttgagtcattccagtttcctttttatatcctttgcctgctannnnnnnnngctttggttatttgtctttttctagttgattcgtaggaattattttgtacattctgatgctgganctttgtttatatgtattgtaaatnatctcctgggtctgggctcactccactctttccgataatttatcataagtgttaaaacatacatccatgcagaaagtcttctctctgtcttaaatgcaggaagcaaagggcatcttcacaggactcaccatttaacacaaaatccttattaggctcacnggggtcttactgaaaggcatgtatggggtcgggggg

SEQ ID NO: 303622 - DNA, 383 bp, Homo Sapiens
ttgacacttggaggctttcatgaaggagacagtctatcagattctgattatccaaaccaacagttttaggtatgtctgctgtacaagaagagggatgctgcttactaatacaaaattgatttgttcactatcaacagaactagcaatacaaacagaaaacagtgtgcacatggctatactcacatgtacgcacatgttccagggaagaggaaaggtacatatgtgtgaagatgagtaatcttcacacatataagggccacgcaccattttctgaggccaccatctcattcctcatccactgcctgactttttgccttcgttgttcttggggaacagaggggatttctcttgtcttacttcaggggtccttccgtctccttcgg

SEQ ID NO: 303623 - DNA, 128 bp, Homo Sapiens
ctgagcgaccagcccagccacagaactcttactacataattttccacgtgattgtcagagattgtgttttagatgtatagcacacacctactgtttctaatagtatctttgttgttttttgcaagtat

SEQ ID NO: 303624 - DNA, 288 bp, Homo Sapiens
  misc_feature (69)..(69): n is a, c, g, or t
gaattatatgttcttaattagaaagtgtttctccatgagtatgattctaaaagtcttcatcctttaccntgtggaataataactttgtaaacaataacaaaagaaggaacaatttatatttttgaatatttgtccttcaacccgtattataaaattacttaaaactcaggaattgtgattggatgctaagtctgccacagtttatgagtactgggctccaaataggtcaaataaaatacatttgggctacttaggaccaacaccaaaactggaaattcattaggcatc

SEQ ID NO: 303625 - DNA, 462 bp, Homo Sapiens
  misc_feature (84)..(84): n is a, c, g, or t
  misc_feature (114)..(114): n is a, c, g, or t
  misc_feature (208)..(208): n is a, c, g, or t
  misc_feature (341)..(341): n is a, c, g, or t
  misc_feature (367)..(367): n is a, c, g, or t
  misc_feature (380)..(380): n is a, c, g, or t
  misc_feature (385)..(385): n is a, c, g, or t
  misc_feature (398)..(398): n is a, c, g, or t
  misc_feature (403)..(403): n is a, c, g, or t
  misc_feature (409)..(409): n is a, c, g, or t
  misc_feature (431)..(431): n is a, c, g, or t
gaaaaaattaaaacagatgaaacatgtctttaccaatatatcctgaagacagggcataattaaagcaatggctaccaagaggtngaagtggtccagtcaaagcaaaatggactngtcatggcaacagttttttgggatgctcaaggtattttgcttgttggttttctggagggccaaagaatgataacatctgcttattatgagaatnttttgataaaaccaaagctttagcagaaaaacactagggagaaatttgttaaagagtccttctccaccatgacaatgctccggctgcattcctgtcatcaaacaagggcatttttaaagagttttcaatgganagatcaatattagtcctgatttggcnccttctggacttnttttntgtttcctaatcnttttngtatgntttgtttttgaggatagtgtcnttgctctgtcacacaggctggtgttgcagtg

SEQ ID NO: 303626 - DNA, 139 bp, Homo Sapiens
  misc_feature (20)..(20): n is a, c, g, or t
  misc_feature (62)..(62): n is a, c, g, or t
catttgaacatatgactatnctcccagagtgaactgtgagtttcataggggtgtgggtgganttgggactaagtcttatgcatttttgtgttgatacattttcatgtgggttggtgcataaaagacactaagaatcgat

SEQ ID NO: 303627 - DNA, 386 bp, Homo Sapiens
  misc_feature (175)..(175): n is a, c, g, or t
aaaaggaaataactgattgttcacatttctaacatataatggtgggaccaatccctagacagatatgtaaagaaggtaaactttgccttcatcaaaaacctttcctcttagcctcttcccttcactctgtgaattccttcttttccttggcccctagaacagcccctgctgtggnagccctacccaggtctgtcctgctcaagacactctatgctgatgattgcattcccctaagacagtgatctcagctggctttcaaccccagctcaacaccagcaatggttctgacagcaaactgagctctgggcgaggcagcgagataatgacaacaaagccaaaatctaggcacaggcctttatatgttggggctgcacataacaaggtgt

SEQ ID NO: 303628 - DNA, 442 bp, Homo Sapiens
  misc_feature (93)..(93): n is a, c, g, or t
  misc_feature (112)..(112): n is a, c, g, or t
  misc_feature (191)..(200): n is a, c, g, or t
  misc_feature (380)..(380): n is a, c, g, or t
  misc_feature (416)..(416): n is a, c, g, or t
ctttaacaattctgcctttttggggttgttataattttccattaacttttcttacagaatatggtattactaaaaaacaccccaaaagttctnctgaattctagacatcttncttaatttctactggtagtaatagctcattttctcctaagaatcaggattaattaccccagccagtatggtaattgtcnnnnnnnnnncatgttggtttattggtatgaggagaacaagatggtcaggtggcagtatcagtttccattttaatattggtatgtactttggtggaaacgttcttcctgtggaaactaagaccattatatctgcagagcacaaaggtacaaagaagggacaggaaggcaaaattttcactagtgggatcntttaaaaggttaatttttgaggaggggagccacttnccattttctaaccactttaattaccc

SEQ ID NO: 303629 - DNA, 136 bp, Homo Sapiens
caatgtagcaaagtacattcatttttattgctagaacagcctctcaaaacctcattcaaatcctctctactcttattcaacatatagtatgcagttacacaatttcccaaccccagggcaaattagagaaagcttc

SEQ ID NO: 303630 - DNA, 240 bp, Homo Sapiens
gctcatggtcattttatacatgaggttggtctagtggattgtaagtaaatcgagcaccctgatggcaggagaatgaggtgagcacctgagagtatagctcagatcacaggaaaaagttttgtttgtgatgtcacaggctttatatttgagcccttcttaaaatactaggggacatttgtccagagtgttctgcttgttatcacagacctcctaaatggggttcatcttgcttcagttagg

SEQ ID NO: 303631 - DNA, 423 bp, Homo Sapiens
  misc_feature (162)..(382): n is a, c, g, or t
  misc_feature (390)..(390): n is a, c, g, or t
agtttatccaataagattaataaagatttgagaaatcctagcctacagaatatattcctacttgtacaaagtcaccggttataaagtttctgaataaatacttaaagtatttccaaatacaattcacaacgatcccaagcttgaataaaaatgatttttgcnnnnnnnnnnnnnnnnnnnnnnnnnnnnnnnnnnnnnnnnnnnnnnnnnnnnnnnnnnnnnnnnnnnnnnnnnnnnnnnnnnnnnnnnnnnnnnnnnnnnnnnnnnnnnnnnnnnnnnnnnnnnnnnnnnnnnnnnnnnnnnnnnnnnnnnnnnnnnnnnnnnnnnnnnnnnnnnnnnnnnnnnnnnnnnnnnnnnnnnnnnnnnnnnnnnnnnnnnnnnngactttgncagttgaggccgaatttgccaccagttgcattc

SEQ ID NO: 303632 - DNA, 287 bp, Homo Sapiens
agctaacatacaccttttgctaacattcccgttcttcagcctagagcttcttaggagctagacttccaacactatctgaaaagctcttagtccggctgacttccctgaacatagtaaggagacatgtctttagctatattttacctctttggctagtttggattgtctaagctcagattaaaagaacctctttattcagttaaagtttaatgacacaatatactttgtctttttttctacttttcagggtcagggaataaattaggatgggtcagtattatggcaat

SEQ ID NO: 303633 - DNA, 359 bp, Homo Sapiens
  misc_feature (113)..(113): n is a, c, g, or t
aaccttttttggtctctccagtctttgattgtcctgtaacatttctgggggcttatccgggattggagatggcagattttctgtcttctttgcctgtgggctagagcccaggnatgtgggagatctggggtccttggcaccgctgggagagtttcagcctggaaggagaatggccctcccgcattccagagccttcccctgacagcaccaaaggaaccagtggaaagtgttgcaggacagtcacaggagcagtgcacagacatctggaaccatgttctttgaagaaatgccttcaggatgttggattcccacttgttttaaaattttccattgggaagctctgctgttgttttgcagct

SEQ ID NO: 303634 - DNA, 441 bp, Homo Sapiens
  misc_feature (407)..(407): n is a, c, g, or t
  misc_feature (426)..(426): n is a, c, g, or t
aatgatattgagcttgagtatgtgcagaaattaacgatgtactaactatctaactgcctaaaataaaaacgggtagtcagtgatttgtattttactgagcagaagtggcaaggtttcttatgtgcagctgagattatgtactgttgtaaatgaaacccaaactctagttttcaggatcttagaagggagctctttgagcctgcatcttcccttcctaatatgagcctacatattccctgaatatctgacttactccctttccaacaatgtcatttttccatttgtagttggtaatatataaccatgaggcaatttctaaatcatgttaaactaaactagtgaccatactccatgccaagggccttaggaaattatttcaagttagggtattaatggaaaataattantaataatttgtatttaccntttattactatcctt

SEQ ID NO: 303635 - DNA, 415 bp, Homo Sapiens
  misc_feature (180)..(180): n is a, c, g, or t
  misc_feature (204)..(204): n is a, c, g, or t
  misc_feature (255)..(255): n is a, c, g, or t
  misc_feature (289)..(289): n is a, c, g, or t
  misc_feature (297)..(297): n is a, c, g, or t
  misc_feature (318)..(318): n is a, c, g, or t
  misc_feature (342)..(342): n is a, c, g, or t
tatttagtgtcgggtatgcgtttccccaaacaactgaaggactcagccggggctttcactgtctacctcttcctgtgtagtgagggtgggacttgcaatgagcaatgtatgggagggtctggtttaaagacctggttagatgagaggctcttcggggaatcaagaccaaccctacttccnctaggaaggtgctgcccaactccngagggaattttgggtagtcttttcacactctaggccgctccatcctctaanttgcgtggtgaatctcggtagctccctgtctttnagatagcnttgatattgggtgggtgtcanggtaaaggcccccttttaggactnaaggaaaaagggcattggggccactattagagacatttatagagtttttccctcctttgcatgagaggagtac

SEQ ID NO: 303636 - DNA, 411 bp, Homo Sapiens
  misc_feature (20)..(20): n is a, c, g, or t
  misc_feature (41)..(42): n is a, c, g, or t
  misc_feature (78)..(78): n is a, c, g, or t
  misc_feature (290)..(290): n is a, c, g, or t
  misc_feature (341)..(341): n is a, c, g, or t
  misc_feature (351)..(351): n is a, c, g, or t
  misc_feature (361)..(361): n is a, c, g, or t
tgtcatttcaaagttctgtnttcatatttcctctacccttnntcagaaatttaaagaatactgaaaatcctatgaganctccatttgataaaagtactgcttccttggcatgaactagagggaaatatttaatactcattatgctcaaggcattgcgccttcatccttaccaggggtctaaaatgtgggtattctaatgatagaactctagagtttaacacaggcaaatggaaacagaggtaaaatcaggaagccattgatatgtgaacattcccttgcatacaagggcntttcatgggcacaatctaatgggtatttataaggtgaactacatctatccntggatggggnaatgactganaataacaagttcagggctagttatagccctttacctatataaggcacaag

SEQ ID NO: 303637 - DNA, 235 bp, Homo Sapiens
  misc_feature (152)..(152): n is a, c, g, or t
  misc_feature (189)..(189): n is a, c, g, or t
atcttataataaagaggcttctaggttagtgattatagagtactaaaattcttaaaagacatcacactatttagttacttttatttcagtaaacacttttcagcacccattataggttaggatttaagctggtatttggatatcattacctncttggtattttactgtacagtcagtccagtttacaanacaggttcattctgagatttttaggatacttacaatatatatccca

SEQ ID NO: 303638 - DNA, 355 bp, Homo Sapiens
  misc_feature (338)..(338): n is a, c, g, or t
taatacctctattgtttggttaaacaaagaacactattaagtatttttaaaacaatgtacatcagtgttgattatggtaagcatacagtttataatcagataggtttctgtgtaaaatttcatgttattatattgatttgttttaaccatacaagacttgcttggatgtgggtaccattgaataccatccccattccctcctgtcccacaggctttttgaaatgtatggggggctttgttctaggactgaacattccttttccctcaaatttcatatggttaaaggccctaccccacaatgtggacagtattgggggaaggtgaggggcctttgaggnattaattaggggttagg

SEQ ID NO: 303639 - DNA, 408 bp, Homo Sapiens
  misc_feature (70)..(70): n is a, c, g, or t
  misc_feature (361)..(361): n is a, c, g, or t
  misc_feature (366)..(366): n is a, c, g, or t
  misc_feature (396)..(396): n is a, c, g, or t
taatctttgtctctatggattcccaagacatttcatagaaatagaatcaaagtatgtggccttttgtgantgacttctttattgctagtacttttagagtttcattttaacattttacatcatactctttatggaatttactttgatgaaagaagtagagttatacagcttgactctttttttctcccagatagtcctgccatagtctcaacactgttttctgaataattcatctttcctctgatggatcagaaatgtcaccattatcatctactaaattctgcagtttatttctggatttcctattttattccattatctatctaaatctttggctaggaatcaaactcggttttttttncactntatttaactgattttagtgatgggagtctnacgatgttggct

SEQ ID NO: 303640 - DNA, 409 bp, Homo Sapiens
  misc_feature (13)..(13): n is a, c, g, or t
  misc_feature (308)..(308): n is a, c, g, or t
  misc_feature (380)..(380): n is a, c, g, or t
tcaataccctggnatccatttgaacaggtggctgaataagacagcttcagaaggggcagcagctgctgggagtggatggtgtcccagcacaatctggggttgtggtcatgaaaaacaaaataggaaatgatgtatacagtgaccttgaaagagttcatttttactaaattagtcccaaaaggaaaagggagaaatatttcagggcaccgtcaagcagccctgggtttagcaaggtgagcatgttttctgtaatgtggacactcaactggaatgtggcatgctaattttagaagggcaccagcctgttngaccgactttccattataaattttacatggccgcctgcatgaactaaccaggttattcaattgtgtattttngactcacattatttcttttaggatttcaa

SEQ ID NO: 303641 - DNA, 452 bp, Homo Sapiens
  misc_feature (186)..(381): n is a, c, g, or t
tttagaggtgcaccagtttctttcaaatcttgaaacagcgcaactaagagatctaggagattgctacattgttgaggttgggctccttgaaagccaatttcccatgaaaatcaggtgcatatgcacagtgatataagctattcaacaagtatctgaatgtatttgtcatcaatgatctttgtcccnnnnnnnnnnnnnnnnnnnnnnnnnnnnnnnnnnnnnnnnnnnnnnnnnnnnnnnnnnnnnnnnnnnnnnnnnnnnnnnnnnnnnnnnnnnnnnnnnnnnnnnnnnnnnnnnnnnnnnnnnnnnnnnnnnnnnnnnnnnnnnnnnnnnnnnnnnnnnnnnnnnnnnnnnnnnnnnnnnnnnnnnnnnnnnnnnnnnctttcacttctggcacttgtctcttcctggccaccatgtgtaaggaaaggacgtgtttggctttccccttt

SEQ ID NO: 303642 - DNA, 365 bp, Homo Sapiens
  misc_feature (14)..(14): n is a, c, g, or t
  misc_feature (307)..(307): n is a, c, g, or t
cctagtctcatttnccttgagtcaaataaggagtttattgaataccacctgtgtgcagagagtgtgccaagcactagagtccataccaagatatataattccatattgtgattctaaatcgtgtagtctatttgggctctcacaaattaaataacagtacaaaacagtactgtgccaagtgagcagtgaaaataggggctagagaagtcaggaggagagcagtcacgtcgtgacaggacctgttaattgctggaaatgtttggtttgatgagggttagtgagcagatggtccagtatctcccagggngtctgtttgtaatcatcccctggctcctccctctttcagtgcacctcccaggcccatt

SEQ ID NO: 303643 - DNA, 366 bp, Homo Sapiens
gccattttaatgtttaaaaaaatactaaaagaggccattgaatagtcatggaaaaagaaagcaaattattgtttttctttaagtatcagttcatctgatagatgtgggttaccacaaagcattggtggctcaccaaaaattgcctgttggtagcctgtgtttgcaaactgatacctctctatttcatggagtgatatcaattaggttatacttaaatacttcaaatgcttttggttgtctattggtttgggttttaaattagtacacgttaattgttgaattgggtagccacattttgtttgttttatgtatatttaaacaatgtgaccaaaaatactttttccatttgcggcacattggtggaat

SEQ ID NO: 303644 - DNA, 111 bp, Homo Sapiens
attaagacatcacattaacaaaataatgggacaaaaaccacatagggccagggggcagtggcttcatgcctgttaatttccagtactttggggagcccgtgggtggggcag

SEQ ID NO: 303645 - DNA, 351 bp, Homo Sapiens
  misc_feature (21)..(21): n is a, c, g, or t
  misc_feature (57)..(57): n is a, c, g, or t
  misc_feature (82)..(82): n is a, c, g, or t
  misc_feature (193)..(193): n is a, c, g, or t
  misc_feature (289)..(289): n is a, c, g, or t
gagctccttttttaaaaaatnttttgaagttcaatgagctcctttatttattcattncttattatactttaagttctagggnacatgtgcacaatgtgtggtctcggtacataggtatacatgtgccatgctggcccgctgcacccatcaactcggcatttacattagggattgtctcccagtgctatcccgnccccatccctcaccccatgacaggccccagtgtatgatgttccccacccggtctccaagtgttctcattggttcaatttccacctatgagtgaggnacatgcggtgtttggtttttctgtccctgtggatagtctacttaggagtgatggggaaccta

SEQ ID NO: 303646 - DNA, 409 bp, Homo Sapiens
  misc_feature (365)..(365): n is a, c, g, or t
  misc_feature (380)..(380): n is a, c, g, or t
  misc_feature (395)..(395): n is a, c, g, or t
tgcttcctcattgcaaaaccagcattcctctcacggtcagctatgcacaaaatatccttctgttctcctggtcacatcaaagcaccttcacgctatgcagacaggtcattgagggaacggagaaaattaacaaacgcacctaggttatttctattaaaattagcccctcagccggtagtctgttcagtttccattgaacacaaactctgacaagtctgttgaaaacttttaacctttccaggttgtgtcaacagcttgcaaacacaacaggaggatgggtgcctctgagttctgccttttccttttgggaataggagggaggtatcagggatttgttaccaccagttttcatgtttatctttcantggcttctggttcanttcccggtggcccantttaagggaggcat

SEQ ID NO: 303647 - DNA, 278 bp, Homo Sapiens
  misc_feature (223)..(223): n is a, c, g, or t
  misc_feature (230)..(230): n is a, c, g, or t
tgacacttgcacctggcctagctatattatttaacactaacaaattatttgtgaaacatctcacaagtgagtgaaataaaccaagtctgtctatgtatgctggggttgagaacctccttattataccaagctctctcctagctaaggaaatcatgcccatcccagaggtctgggccgtaataccatgagtgggtgccaagggttttgctccttggaaaagganaagggtnaaaccccaaggctctggtttcattcaaggcccaaccggggttagggca

SEQ ID NO: 303648 - DNA, 356 bp, Homo Sapiens
agcacctgagcttcaatacctgtaaggatgaatgtataccatatgtgctcatttccagtcactgtccacaatgacccacagacaaaatgggcaggtggatacagacaaagactactatgtgtcctggggtaaaagcacaggagtaaaactggagatcacagcctactctcagctttacactcagaggcccagtgccaactgagacaagccagggaaggtcaacatcaccttcatacttacctcagagaaatgccagggaagagagacgacaatcccggtttgaggacttatgggaaggcaagggccttttatacggcattctttcatttttgaagttttctttctgggaattacca

SEQ ID NO: 303649 - DNA, 418 bp, Homo Sapiens
  misc_feature (381)..(381): n is a, c, g, or t
  misc_feature (389)..(389): n is a, c, g, or t
atgaaaataatattttaaattaatttatatactgctgaattccacaatggatttgaatcaggtattccaaaaacataaggctgcagaatttttcctctgtttgggctcttttgttctctttattaatgcatgattttgctttcactcgttaaggcacacacatttgatctcttgagcccgaggtatagtatgactaacaagctggcccatctctagaggtactgacttttccttttcaagtgctagagcggctacaaactccgatattgtcatgggattgggtgatgtgacaaacttattgggtaagtttcataggccacaggagggattactgggaacgtctctagggtttaggaaggctttgtggccaattttcctagnctaatagnagtagggaggttcaactcccaggggtgtc

SEQ ID NO: 303650 - DNA, 141 bp, Homo Sapiens
atcagccacctatcaccctgtttctttcttgttagataagtgtatgctttacaaagcaggatttcagaaaggccttacattggttttgaaagcccagcatttaagctcacttcatccatccttcatcataggcactcttct

SEQ ID NO: 303651 - DNA, 405 bp, Homo Sapiens
  misc_feature (91)..(91): n is a, c, g, or t
  misc_feature (340)..(340): n is a, c, g, or t
tgaagggagaaaaagatatgagctatagtagacagcagtaatattgaatggcccagaaggtgggaaaaagccactcttaaatgtatttttncttttggatattttacaagcaaataataacttctgcctaagttcgccatctcagtggcatcagcagcacagcactttcttatcccagtgagaaacctgggaattttaggatgactcctaccgccctcttttccccctggtttggaagtatccacaaattcctgtgacgttacattctgtgtcttttatgtcatcattagttcaggcccctatcatttcttgttgggactgttagaacctcctatttggnttaccagttgctgccatcattcattgtgaaaccggagaggtacactttaaaggaatgtctttttg

SEQ ID NO: 303652 - DNA, 253 bp, Homo Sapiens
  misc_feature (116)..(116): n is a, c, g, or t
  misc_feature (187)..(187): n is a, c, g, or t
  misc_feature (234)..(234): n is a, c, g, or t
gttttgtacagcttaagtttaagattcctattatgtatcctaaaggatttgtcacataagtatttggatatgtgagtctgaggatgagggaaaggtaggacctgggaaatacaaanttggggaaccctcagtttactgacggtacttaaggaaggaggttagggtagggagtcacctaaagaggggngttttaggcagagatggccaagaggcccaaggtccccatcccggggncacatgtctttattaggtt

SEQ ID NO: 303653 - DNA, 401 bp, Homo Sapiens
  misc_feature (345)..(345): n is a, c, g, or t
ttcggcacagcctcaggtgcatagaggaagaggttttacttcagctcttaaatccatttccaagtaatttttgtacatggtgtccaaaatttttgtacataggagtccagtttcacagtccaattttcccagcaccatttattgaagattatcctttcctcagtgtatgttcttgttgactttgccaaaaatcagttggctgtaagtatgtggctttctgggttctctattctgtccattgatcaatgtgtctgtttttaacagcagtaccatgctgttttgattactatagccctgtagtgtaatttgcagtaaggaaatggctccagctttggttcttttttngctggctattgctttagctattttgggattcctttttttggggtcccatatggaac

SEQ ID NO: 303654 - DNA, 342 bp, Homo Sapiens
  misc_feature (16)..(16): n is a, c, g, or t
  misc_feature (169)..(169): n is a, c, g, or t
  misc_feature (260)..(260): n is a, c, g, or t
  misc_feature (290)..(290): n is a, c, g, or t
  misc_feature (297)..(297): n is a, c, g, or t
  misc_feature (304)..(304): n is a, c, g, or t
  misc_feature (314)..(314): n is a, c, g, or t
atttcggcacaggganattaacaaaaagagttacagtggttcaggtgagaggtgacctgaaagaagaatattatggtcaggatagagggaacaggtgggccctagcaatgcctgtggagttagataactggtaggatggggacattgcatatgactggaggttgcagtnggggaaggttaatgggaaggtcaaaggcgaactggaatcactgagagttttcttatatgtcagtctctgtacctactacctggtgacactnagccatcttgactaactccagcttacctcntttctgncactctntcttctaccntttatgtatgtttgttttttcttacacg

SEQ ID NO: 303655 - DNA, 633 bp, Homo Sapiens
  misc_feature (245)..(245): n is a, c, g, or t
  misc_feature (308)..(308): n is a, c, g, or t
  misc_feature (364)..(364): n is a, c, g, or t
  misc_feature (393)..(393): n is a, c, g, or t
  misc_feature (398)..(398): n is a, c, g, or t
  misc_feature (440)..(440): n is a, c, g, or t
  misc_feature (445)..(445): n is a, c, g, or t
  misc_feature (482)..(482): n is a, c, g, or t
  misc_feature (545)..(545): n is a, c, g, or t
  misc_feature (565)..(565): n is a, c, g, or t
  misc_feature (606)..(606): n is a, c, g, or t
  misc_feature (611)..(611): n is a, c, g, or t
attcggcacagaaatgaagcaagaaaaaacattttaaaagtaacatgaaaattgaaatataaaaactcatttcttggctctgtctgccaggccctaagattacctcattaatgaatctattacctaatcagttcaaattcaggaaggtagactaaacacacttggggtgcacagagaaaagagtacctgcctcccagccctgttctacgaaggctgcagaaaggctcattacctgcctccctcanctcaaaccacttcctgagtaaggctttctggggtaagcttctctgaggtctaaggaaagtttnggtatatgccttgttctatccaaaattggagctcatagcatggcatttaggactcntgatacctttcaggttcattaaggaaggncttancttctttcggtcagggacagggctaagtttaggccacaccancaggnagttagttggcagagaaagggaagtttagggccagantcctaatttcctgacccattcaagggcagccaagggtgttagggaggtcgaactcaaggcagnaggtatgttctcttcacatntttgcaatatgggtttctcaattcttaatgtagctgggggngcccngtcaggtgattactttcccatt

SEQ ID NO: 303656 - DNA, 315 bp, Homo Sapiens
  misc_feature (98)..(98): n is a, c, g, or t
  misc_feature (167)..(167): n is a, c, g, or t
  misc_feature (178)..(178): n is a, c, g, or t
  misc_feature (208)..(208): n is a, c, g, or t
  misc_feature (216)..(216): n is a, c, g, or t
  misc_feature (253)..(253): n is a, c, g, or t
  misc_feature (263)..(263): n is a, c, g, or t
  misc_feature (271)..(271): n is a, c, g, or t
  misc_feature (290)..(290): n is a, c, g, or t
tgacacggttgcccggccaagcatggcccataattaaattggttgtggatattttataacaatgtccatttctctaattttaaatttaatttagaatngcaaaatcaggaaatgtttagtaacacacattatataattaggcacttgttttcacaattcatcagganctacaggcatnttacagtatctttttttcagtactaatgtngttatttnccagggattcctacatttttcttgaatttacacattntcatttcttnccaaggtnttttataattttttggaanggtggctttcattcaggaggtcatt

SEQ ID NO: 303657 - DNA, 340 bp, Homo Sapiens
  misc_feature (276)..(276): n is a, c, g, or t
  misc_feature (319)..(319): n is a, c, g, or t
  misc_feature (328)..(328): n is a, c, g, or t
agttggtctttaagggcttttatgaggacataattcacatagaccacatcatactcacttctgttttctacctgttggctgatcgtcctttatagctaatctatcttcaagcctaggagtgaggtttagaaaaagacttggaacactcagaccacagtagggaggagagttgaaaagcttaatccggcaggtttttgacagtgtattagtttgtttagaataaaggtatatgggccctgtgaacggtgcgtggggagctgtcttgttctctcaagntcggggaatttggaaggtatccctattccccttcatgggctcngggagtatnccaagtcagata

SEQ ID NO: 303658 - DNA, 340 bp, Homo Sapiens
  misc_feature (156)..(156): n is a, c, g, or t
  misc_feature (216)..(216): n is a, c, g, or t
  misc_feature (295)..(295): n is a, c, g, or t
atacaggagctattttgctccactgtactgggacttgagtgtaatggaatttgaaggcatactgagatgttaatagggtgtgcaatttggtgtcatgctttattcgacatctggtaggcaaagtttgaatttgcagtgagggcaataataaaagtntgcttgaggagaaattaagagtcatttcttgaaaatatgtgatgtttagggataaaaganaggaattagttatggttcagagatttattgacaatctgttaagtgggaacacagtgctagggaaacagtcacacaaaantaattacgacatgatacctaccccatagtaaggcaaccatatagg

SEQ ID NO: 303659 - DNA, 441 bp, Homo Sapiens
  misc_feature (101)..(101): n is a, c, g, or t
  misc_feature (213)..(213): n is a, c, g, or t
  misc_feature (296)..(296): n is a, c, g, or t
  misc_feature (391)..(391): n is a, c, g, or t
  misc_feature (425)..(425): n is a, c, g, or t
gataatgtaactttaatgcaaaacacagacgaaaagtttacaatactgtaatgttgcaccaagatagtatataaatagatttaataattttaaaattagtnctggggcaggagtgtcaggggcaccagcaggcagtgttccagactgccttaagtggcagctgtcacaggagctgtagcattcagtgttcaatgttagcagtgactgcaggtncgataaaataggccagtggcaggggcttaggttgtgatcctgattattgtttagggcccctttattttgcctattttctgagntgtatttctccgggcttcctaggaggcaatgggctctttaaaatgtgatctcacactaggcaatatcaggcatcacgggggcaacttgtaagganagggcaaatcactgggggcctcatcccaggaccnactggattcgggaacc

SEQ ID NO: 303660 - DNA, 120 bp, Homo Sapiens
  misc_feature (102)..(102): n is a, c, g, or t
aggcaaggtggtaggaataggaagttatcgggcctcattctctgttcccctctctcccaggaaatttcaactaacaactattcattcagggcaagaataccnttgtggaataacccagaa

SEQ ID NO: 303661 - DNA, 534 bp, Homo Sapiens
  misc_feature (274)..(274): n is a, c, g, or t
  misc_feature (445)..(445): n is a, c, g, or t
  misc_feature (517)..(517): n is a, c, g, or t
tcaggcatttgaaagaaagaattcgagatctagtttgtatcagatattataaattagtatggtttagtctttgtcatgaaattctacttaatttttggactataggtttaagaatgtaagcagaagttctgcaccaatcagaataagctacattatgcttgagtgacaactactgtaatgacaaaatatcagtggcttaatacaatggtttttctctcatacttgttcataaagagtcagcaaggaccctgctcattatggtccctcagggccnagggttgttggaagctccaccattttagatagctcccttcaaagtcagccatctttggcagtccatgtcccccaacaggctggcaaaatttggctctggatggcttcaaggattgagcatcgggcagtttaaatgctttcaacatggaaagtggacaccggccactcccantcacatcccttgggccagaactaggtcactgggcccggacctaacttcggagggttggggaattgtaattcntcctgtacccaaagtgg

SEQ ID NO: 303662 - DNA, 311 bp, Homo Sapiens
ttccaacacatttccgccacacctaagtaaaattccttacccattaagcaatttcttcctatccttcccatcccccaggccctggcaaccaccaatctgtgttctgtctctatggatttatttatcctgggtatttcatataaatgaaattagacaacatgtaaccttttgtgtctggcttcttttatgtagcgtaattttttaaaggaccacccacattgcagccatacttcattcttctttatgactgaatgatattttatagtattatcatcataatatttgtgtgccacaaattatccatttcatcc

SEQ ID NO: 303663 - DNA, 303 bp, Homo Sapiens
  misc_feature (250)..(250): n is a, c, g, or t
  misc_feature (276)..(276): n is a, c, g, or t
gttgttgctttaaagtctgctttatctgatatgagaaaagctactcctgtttacttttggtttccatttgcatggaatatcttttttcacccttataccttgaatttatatgggtccttgtgtgttaagtgagtctcttgaagatagcagatatttggtttgtgattttgtatccattctgccaatctgtatcttttaagtggagcatttaggcccatttatgttgaacattaatatcaagatgtgaggnactgtttcagtcatcatgttaattgntacccacatacggtgttttcctcaatg

SEQ ID NO: 303664 - DNA, 454 bp, Homo Sapiens
  misc_feature (114)..(381): n is a, c, g, or t
  misc_feature (389)..(389): n is a, c, g, or t
  misc_feature (398)..(398): n is a, c, g, or t
  misc_feature (444)..(444): n is a, c, g, or t
ctgactttcataatcagaacatttagtattttaaaatacagtagacaaaatgtcctactctctgaactctacaatgcttcaaagaagtaagatccccttaaggctacgacatannnnnnnnnnnnnnnnnnnnnnnnnnnnnnnnnnnnnnnnnnnnnnnnnnnnnnnnnnnnnnnnnnnnnnnnnnnnnnnnnnnnnnnnnnnnnnnnnnnnnnnnnnnnnnnnnnnnnnnnnnnnnnnnnnnnnnnnnnnnnnnnnnnnnnnnnnnnnnnnnnnnnnnnnnnnnnnnnnnnnnnnnnnnnnnnnnnnnnnnnnnnnnnnnnnnnnnnnnnnnnnnnnnnnnnnnnnnnnnnnnnnnnnnnnnnnnnnnnnnnnnnnnnngcaggatntcaggcatncatgcatcccgttattcatccagtacagcgtgcaggaggccaaggnacccaattaa

SEQ ID NO: 303665 - DNA, 237 bp, Homo Sapiens
acctgaaccaagcaccatgatctggtgactatattgggaaggattctggaatattgctctaagcaaattcaggagtaagtataggatatactacctacacgcatttggggctcattccaaaggttgcctggagaaaaacaccaggttagaattatgtaaataactaacacctgggagtcttctgccactctcattagatccagggtaaaactgctgtgactccacctcatcaaccct

SEQ ID NO: 303666 - DNA, 387 bp, Homo Sapiens
  misc_feature (278)..(278): n is a, c, g, or t
atatttcatccagcactggcttcactgctgaggctctcgttatggtcttgttttctcctcaactgggagataagaaactcttcatcccagaatctttacaaactccccagtgctgtaataaacagtcagggttctcttgatataccactgactcttactttggacctctatctgagaaaattcacccaaaccattattggagtaaattaaaaactaatcttttcctaccagaaactaacatttatagagcacctattctaatatgacctacatattanggagtaggcaggcatacactggggaagggaggaagggggaaaaataaaatctcggaaggttgcttttttcactacaaggaacagagtgggggggaaattttaatcttct

SEQ ID NO: 303667 - DNA, 372 bp, Homo Sapiens
  misc_feature (279)..(279): n is a, c, g, or t
  misc_feature (294)..(306): n is a, c, g, or t
  misc_feature (326)..(326): n is a, c, g, or t
  misc_feature (340)..(340): n is a, c, g, or t
  misc_feature (360)..(360): n is a, c, g, or t
taaatggaaaagtcacaataaccatatcaggatttctttattcttttaagctattaatgccttctttgtgtaaagatttaacctcaattgaatgacttcttttgttgactctcctcagtgatgtgaccagagaaacctgttacaaatcattttctcttctatgcaaattgataaaatgctaagagaaaacagggaagagtgcataattttaaggaacaaaggcctgtgaacacaattaaagttactatggccatccattaacaatcggcattactacgntgggaacaaacactnnnnnnnnnnnnncacatctttaataggcatantccacttctttttnacaatgtttccttttggggntaaccggttttt

SEQ ID NO: 303668 - DNA, 413 bp, Homo Sapiens
  misc_feature (350)..(350): n is a, c, g, or t
  misc_feature (362)..(362): n is a, c, g, or t
  misc_feature (383)..(383): n is a, c, g, or t
agagattaagaaacttctattattttaatagttagcagagttcggatttaaactcaatcctgttagacttcaaagccatatttgtaaccattttactatgccgatttgttctgtctggtctacaaataagaatgtatttgtttgtttaatacttatttgttggatatctactatgtgataaaaaaacaacgcatatataaccacaggcaaggttccaattaagaaataaatcttaggaggggcctgtggtgaaatacaatgtgaccaaatctttatatatctttttcaagtggtataaactgcagatgggttatacacagacataaatattgggtaacttccatataccnggtttcaggttnggccaaggtctgtttggaggnattttcacccaaatttatttatttattttg

SEQ ID NO: 303669 - DNA, 238 bp, Homo Sapiens
aggaaaggataactttaatctgtttattggaaaaactaattactgtatgaacttcagactattttatattatgtgaaaggttaatttggtttgaaagcctatttttttggtacttctcggcttacttggagattacgtgtctccaaactactaaaaagaactttctacttcagtcagcaaagtatggatttctcagtaacataaaaactgttaactctaagaaaaataacttctattg

SEQ ID NO: 303670 - DNA, 348 bp, Homo Sapiens
  misc_feature (319)..(319): n is a, c, g, or t
  misc_feature (333)..(333): n is a, c, g, or t
aaaactttgtaaaatacaaatagacactttctcaaaattattgaaaaaattagttttaatagttaatgtcataactattattattcctttcaaaatcagggacaatattgagttgactgctctccctttttgttgtgtagtattatggtatttagtagtgttagtgcaatcaggacaaaaacaccccaaacaggttaggaaagaaggcaaaacttattattttcaggtgggtattatctttttgaaaaatccaaggattctaatttgaggaactattataaccaaaaggggtcaaaataaacagttcccaactacgggnaaaaggtggaaatntttccacattatttt

SEQ ID NO: 303671 - DNA, 484 bp, Homo Sapiens
  misc_feature (183)..(205): n is a, c, g, or t
  misc_feature (337)..(337): n is a, c, g, or t
  misc_feature (414)..(414): n is a, c, g, or t
  misc_feature (438)..(438): n is a, c, g, or t
  misc_feature (470)..(470): n is a, c, g, or t
actatttctcttacggagcatatatgcatgcaaaattgactaaagaggactcatttaaaacatttctaaggggaaatttgagttaacacaagggtgaatatattttaagccagtttatattttaaaccactcaataatgtggttttgaaaagtgactttttagaatatgtatgtatatgtctnnnnnnnnnnnnnnnnnnnnnnntgcaaatgatgtgtttaccctgctaagcagttagattggtaactatgaggtagcagcttctgtatcttgttaccttgttaggtcagtaaagcaagtgagggggcactttattagtttgtgggaccattcttngaagctggtgacgctgcaaagggtccaagggcttgccctctctggctaggtctaggatccactgttttctggaggantgttaattgtttgtgttaaatcancggggggttcttgtttaaaagttgtaggaccnttgtttttaggagt

SEQ ID NO: 303672 - DNA, 565 bp, Homo Sapiens
  misc_feature (503)..(503): n is a, c, g, or t
taaattcaaataggatacttaacctctctgttcatccttcctcttgtacaaaaaaatacaggaaataattgataaccgctagtcaatcggttattgcaaagagtaagtgagataacgtctgagaacatacatgcaagcacctagcagagtgttggccccaggctccttcctgcggcttccctgctcccccagcttccaccctccccctgccctttatagaatgcaaagttcatcctggttcattttgaatcaggcaacgaagctgttccagtagcttccattgtgatgggaggagggttagaaataagaaatgaaggagtctaaggcagcactatcttaactcctgggtcaacaggcaccaccctggggaaagttcatttgggcttctgtggagggctcagtgttccttcatctgttcaagtgggaaattagtggtaatgcccttcctggccaaattcccctgggtgtttatgagattttaaggtcaaagtgttttatggggnaagtactttgggaggattaatattaagttcttgtccatgtttaggggttttctagtctataa

SEQ ID NO: 303673 - DNA, 286 bp, Homo Sapiens
  misc_feature (43)..(43): n is a, c, g, or t
  misc_feature (77)..(77): n is a, c, g, or t
  misc_feature (227)..(227): n is a, c, g, or t
  misc_feature (236)..(236): n is a, c, g, or t
  misc_feature (264)..(264): n is a, c, g, or t
atagggctcgcgtggggaaatgtgaatcaaaatcctggtattncctttacccaacaacggtctatagtctatagatnatcctgagggtgaaggcttgaggtctgccaccatacataccttttgaaactcattgcattatttgcattagttctcagaagagaactctttttttaaagtccatactaaaggcaatgaactgcttcatgtaaagtaacactaggtaagtntggtaatangttgtgcctttagggtcttgaaatatanaattgtgagcaaagattatctg

SEQ ID NO: 303674 - DNA, 323 bp, Homo Sapiens
  misc_feature (281)..(281): n is a, c, g, or t
  misc_feature (308)..(308): n is a, c, g, or t
ggattcagacaagcaattttactcccaccatatttaatattctggatatttcagagcatttaaacaagaataagtgtaaaaattaagtagccaaacaatatttttccaggtatatcaaaagagtcaaataaaagatattcccccatgataattcaacaagatagctgaaatcaatagcttttctatacacaactagttacaaagtatagcaggagaagaatcccacttaaaacatccaagagacaaacctttaaaaatatgcgagacataaatggtaaaantttgaaaactgagacatacaaaggccnttgggaacaaatggg

SEQ ID NO: 303675 - DNA, 146 bp, Homo Sapiens
  misc_feature (126)..(126): n is a, c, g, or t
  misc_feature (131)..(131): n is a, c, g, or t
taagccctgcacccggcctatttcctccattttcatatccatttaaaaggctgtagatttttactttttcattaggcagactctccagaagcatattatcagttttacccactagataactaagantatanttggcataaaatatg

SEQ ID NO: 303676 - DNA, 167 bp, Homo Sapiens
  misc_feature (71)..(71): n is a, c, g, or t
  misc_feature (142)..(142): n is a, c, g, or t
attcagaggtagtacaagtagctgaccacagacactaatgacactctgggataaaggaagccacgggcgangtggggttttctaaatgtttgccttgtggggtctttacagctttccttgtgcttgggtgctcgctctgccngggtttttacccttgttcagacttc

SEQ ID NO: 303677 - DNA, 194 bp, Homo Sapiens
gtataagcgtattgtcttcctggaaggatacataggacaccagtaacattggaacactggttccccatgaaaaaggcaaacaactggggaacagctatccacgtataattctgtctattattcatatatacacatacttcaatttatcctacattttttaaaaaggggaaagtttcacgttatcaaattcttta

SEQ ID NO: 303678 - DNA, 393 bp, Homo Sapiens
  misc_feature (375)..(375): n is a, c, g, or t
gtacacatacaacagtggccccataagattataaaggagctgaaaaattcctatcacctactgacgtcattgctaatgtcacatcatggagcaattcattattcacgtgcatgggggtgattctggtgtgaacaaacctatgtcactgccagttgtataaaaataaagcacatatagttatgtacagcacataatacttgataataaaaatctgtgttgctgttttatgtatttactatactatacgttttattattattttagagtgctttccttctgtttataaaagaaagttaataaaacagcctcaggttgctccttcaagagggtattttcaaaaggaaagccttgttatttattggggggtggaccggntccggggtttgtttaccg

SEQ ID NO: 303679 - DNA, 291 bp, Homo Sapiens
  misc_feature (186)..(186): n is a, c, g, or t
  misc_feature (271)..(271): n is a, c, g, or t
gtggctacaaaagtgtgcaaggtattcgatgccatggagaccaaatgccagcaaagacactcctctgcagaggccggaaccataataccatctgggtaattgagatacagtgtctaaagagaatggtgaatgtaactgtggatcacgcaggattttagttgaggaaatctgatttggcagacagangaatatccagagaaattctcagtgtcagatgtgctcttgactgggagagaaatctaatgccccatggggccaaattggtgaaccnctgagggaaggaaggggggt

SEQ ID NO: 303680 - DNA, 171 bp, Homo Sapiens
tatgctcaagtattcatcaagtatttactgaggcttactatgtgttatgatgatgagacacttctttgagccatcaaaggtttctggcttcctctgcaactaaaaataattaccctccccaatgaagggtctgtgtgttccacaggtatagcagcagaagagacaacttgg

SEQ ID NO: 303681 - DNA, 495 bp, Homo Sapiens
  misc_feature (390)..(390): n is a, c, g, or t
  misc_feature (421)..(421): n is a, c, g, or t
  misc_feature (473)..(473): n is a, c, g, or t
aaagtaattcctcatggatagatggagatgggttctactaagggaatgggaaagtatcagctgagctggttgctccccagctacattatgattgagaagccatatttgcaatagtgtgagagacatacttctgcttgagttcgacctcctactccttgctgccttgattgggtcaggaagtaggagtctggcctaacttcctttctctgccactgacttcctgttgtgtggctaacttagcctgtcctgaccgaagagtaaggcttcttatgacctgaaggtatcagagtctaatgcatgctatgagctccattttgatagacaaggcatataccaaactttcttaggacctcagagagcttacccaggaagccttactcagggagtggnttgagtttgaggggaggcaggtaatgaggcntttctgcagccttcgtaggaccagggctggggaggcaggtacccttttctcngtggcaccccaagtgtgtttag

SEQ ID NO: 303682 - DNA, 439 bp, Homo Sapiens
tttcaatattagaaagtttatcttctcatgactctagattttataagggttactatgtattgttacatctgtcaattgtgttaacaaactgtcgacattctcagtattcaaactgcaggagtaaaaaaatcggttttaatgaacaccttcctcaacctactgatgtttcaagagctgttagatacaaaataagcacttctaacttttcatttggaagcaagaaaaatactgtgcacaatgatatgagtaattgtaatttttaagattggcaaaaattttttgttttcattgaaagtttttcctgatgcttctcttcctttgaccttattttaagtctttatataattgtcggaggctgtttaacattagggcattttgacgcagtaaaggggttccattttaaaattaatgttattggtaattatgtttaatactagtg

SEQ ID NO: 303683 - DNA, 484 bp, Homo Sapiens
  misc_feature (63)..(422): n is a, c, g, or t
  misc_feature (441)..(441): n is a, c, g, or t
  misc_feature (458)..(458): n is a, c, g, or t
  misc_feature (472)..(472): n is a, c, g, or t
tggaagaattaattaaagatctttaattaattcttccattctggaagaattaattaaagatcnnnnnnnnnnnnnnnnnnnnnnnnnnnnnnnnnnnnnnnnnnnnnnnnnnnnnnnnnnnnnnnnnnnnnnnnnnnnnnnnnnnnnnnnnnnnnnnnnnnnnnnnnnnnnnnnnnnnnnnnnnnnnnnnnnnnnnnnnnnnnnnnnnnnnnnnnnnnnnnnnnnnnnnnnnnnnnnnnnnnnnnnnnnnnnnnnnnnnnnnnnnnnnnnnnnnnnnnnnnnnnnnnnnnnnnnnnnnnnnnnnnnnnnnnnnnnnnnnnnnnnnnnnnnnnnnnnnnnnnnnnnnnnnnnnnnnnnnnnnnnnnnnnnnnnnnnnnnnnnnnnnnnnnnnnnnnnnnnnnnnnnnnnnnnnnnnnnnnnnnacaccaccgcttaccagcnggggttgacaggacgtngaaccatttggagncgggtagtaccc

SEQ ID NO: 303684 - DNA, 318 bp, Homo Sapiens
  misc_feature (221)..(221): n is a, c, g, or t
  misc_feature (224)..(224): n is a, c, g, or t
taaaataacagactcagtatttgtgctatgaagtgaaatttcaagctaggtaagtaaaatgttttagtttattttttcattctagcacaatcttccccaactgtacagctttatgggagttttcctacagtgtttcataattaaacacagaaaatttaataatcaaaacataaaatatgccaccaaattaaaaatacttaagtatctactatgtgctacangancatgaaaaatgacaactctgtctgtaactatggcttacaagttgggggagatgaaggctattataagttttgtttattttaacagctttaggta

SEQ ID NO: 303685 - DNA, 461 bp, Homo Sapiens
  misc_feature (377)..(377): n is a, c, g, or t
  misc_feature (382)..(382): n is a, c, g, or t
  misc_feature (424)..(424): n is a, c, g, or t
ccattctggacatttcacacagtgcaatattataatacagggccttctgtgtctgacttctttcacatagcataatgtattcaagggtcatccacgtcatagaatgttactagcacttcatttcttttttatggctgaataatattccattgtatggatatacaacattttgtttatctgttcatcagttgatggacatttgggttgtttctgctttgttggctattataagtaatgctactttgaacattcatgtacaagttttgtgtgtacatatgttttcaatactcttgggtatacctaggagtagaattgctgggttatatggtaaccctgtgtttaactttttgaggagttgtcaaactattttccatagncagcngtaaccattttgcatttcccaccagcatgtatgagggttccnatttcttttttatctttcccaacacttgttttgcctt

SEQ ID NO: 303686 - DNA, 422 bp, Homo Sapiens
  misc_feature (377)..(377): n is a, c, g, or t
  misc_feature (382)..(382): n is a, c, g, or t
  misc_feature (399)..(399): n is a, c, g, or t
aatagcttatagtggagaatcatataaaagaattgaatggagcagccatccaagtataatgaagattcatctggagggcagacttcaattaaacccccacaatggatactcagccaaggaaatggagaaaatatatagatattttgtatccagatttaaattatatctgctaatcacaaggtagtgggcacaaagatcagggccaaaagtgttttgctcaggtagctaggacatataggaccagcctgagaagtattggataaccttctcagactttcatggaggtttacctgtgccaaggcttggtaaccgtattctgtcccgcccagtggataccccatttgggactgagggggagttaccatttaggcttgggncccanccacccagttactttcntatggttcaactttgctgtttgc

SEQ ID NO: 303687 - DNA, 305 bp, Homo Sapiens
catgcaaagcacaatataagtggaagatactttttagtgtgacagagaataagaaaaggtttgaaacaggcttaccgattccttcttttccagcttcagttttgaatttgtaagtggaggataataatgcctatctcacagagaagttgagaaaattaggaaatgacagatctaacgtgtgccaaagcataggacttgacacacggttggcacttaataaatgccggttctcttcttccactccatttttcagagatgcagtgaaaagaaagaaatcaatcctgccctcagtaagtttgtaattt

SEQ ID NO: 303688 - DNA, 547 bp, Homo Sapiens
  misc_feature (384)..(384): n is a, c, g, or t
  misc_feature (391)..(391): n is a, c, g, or t
  misc_feature (509)..(509): n is a, c, g, or t
  misc_feature (532)..(532): n is a, c, g, or t
taaagagtagcttgttaatgccattacataggcccccacgtcctatagtgctgtggtgaaaacaacaaggtcctaataatgggccataccaatgaactaatttctactatttaaaaggacacgggaaactgctttcagtggcctgccttcttagttctggtatattctgctctatactcaagagttattctgtttcctgtgccttcagaggaccacattcccagctttatgcccagagaagtctatgaaactaccccccaccggcatcctacagagttggggatttttttcagcctcacaaagccctctgttgtttcctctttaaacagtcagcttaactggaagtttaggggagaagtgggtgggggagcacttctggccctnttccctnttcctttaggatttttaggagggtttccagcagcttggaccttaccctttgtgtaaaaatatattttaggtcaattcatttacaaggttggcaatcccttttttgggtcctggggttncagatggggggattggaaaaggngtttttaggtgtcag

SEQ ID NO: 303689 - DNA, 112 bp, Homo Sapiens
  misc_feature (67)..(67): n is a, c, g, or t
attttattttaatcccattaggactccaagtcctggccatgcagcttaatagctatatggccttggnagggcagttctattagaggtgacttccttgggcttccctttcctc

SEQ ID NO: 303690 - DNA, 434 bp, Homo Sapiens
  misc_feature (346)..(346): n is a, c, g, or t
  misc_feature (356)..(356): n is a, c, g, or t
  misc_feature (373)..(373): n is a, c, g, or t
  misc_feature (384)..(384): n is a, c, g, or t
  misc_feature (393)..(393): n is a, c, g, or t
  misc_feature (417)..(417): n is a, c, g, or t
acagattactcaggcattgtggaatgttcctgtagtctcaggaagttggaggctgacgtaagattattccttgagttccccaggaacttgaggctgcattgagctataatcatggtattgtattcctgtctgggtgagagagtaagacctctttttagaatttcaaatttattttagatttaggaggtacttacacaggttttttacatgggtattttgtataatgctgaggtttgaagtatgagtaattccatcaatcagggtagtgagcatagtactaagtagacagtttttcagttcttgggtccctccctctctccacccctctaagagttgtctattattnttgtttttcngtccctgtgtaccccgngttaatttccntttataagngaggatatgcagtattttcctttnccctttccgccttaatt

SEQ ID NO: 303691 - DNA, 481 bp, Homo Sapiens
  misc_feature (100)..(239): n is a, c, g, or t
  misc_feature (378)..(378): n is a, c, g, or t
  misc_feature (396)..(396): n is a, c, g, or t
  misc_feature (410)..(410): n is a, c, g, or t
  misc_feature (415)..(415): n is a, c, g, or t
  misc_feature (433)..(433): n is a, c, g, or t
taccctggatctgccaacagcttctgcacaccctgcaccttgctcacactggttcctgtgcttctctggcccacttctttccttgaaatctggtgggctnnnnnnnnnnnnnnnnnnnnnnnnnnnnnnnnnnnnnnnnnnnnnnnnnnnnnnnnnnnnnnnnnnnnnnnnnnnnnnnnnnnnnnnnnnnnnnnnnnnnnnnnnnnnnnnnnnnnnnnnnnnnnnnnnnnnnnnnnnnnctaatcgcagttctgacctcacggagttactgatatgggctaaattagtttacacagaccactcagaacactgcctgggcacaaagggcagggctgaaattagtatcatttaaggtccccaccccttccttgggaggtnacttttttccaggaaagnctttcctttaattnccctnttgtggagtttaactggntccccagtgggagcctgggagcttccagcttgctggttaacatccctt

SEQ ID NO: 303692 - DNA, 534 bp, Homo Sapiens
  misc_feature (448)..(448): n is a, c, g, or t
  misc_feature (461)..(461): n is a, c, g, or t
  misc_feature (468)..(468): n is a, c, g, or t
ctgactccccacacagcaaaatctctgtatataacttttgactcctccaaaacttaactacgaatagccttttgttgaccagaagtcttactgataacataaacaattaatacatatttttcatgttatatgttttatatgctgtattcttacaataaaataagctagacaagtgcaaacattaagagaatcattgggaaagaaaatatatttactaagtgtaagtggattctcataaagatcttcatcattgtcttcatgctgaggaagaggagaggttggtgtggctgtctcgcagaggtgggaaggggcagaagaggtggggagatagaatgggaggcaggatagggcaggtacacttgggtgttagcttttattgggggggaaaaaaacacatgtggagtgggacccctggcagtttcaaacttgtgttgtttcaagggtccanctgccgcttttcnttgattnctaaattttggttttaatttacccattccttcctttaacctttattgactgtctaccaaggtcccg

SEQ ID NO: 303693 - DNA, 452 bp, Homo Sapiens
  misc_feature (110)..(191): n is a, c, g, or t
  misc_feature (230)..(371): n is a, c, g, or t
  misc_feature (435)..(435): n is a, c, g, or t
aaattcagtcatatcaactaaagaaactttagagttttgaattattcatcacagtcactctttacctactttattcttttttaaaataagccccaagagcttatgtgttnnnnnnnnnnnnnnnnnnnnnnnnnnnnnnnnnnnnnnnnnnnnnnnnnnnnnnnnnnnnnnnnnnnnnnnnnnnnnnnnnntggtaaattatatctaaatttagaatcaagaaaagctgnnnnnnnnnnnnnnnnnnnnnnnnnnnnnnnnnnnnnnnnnnnnnnnnnnnnnnnnnnnnnnnnnnnnnnnnnnnnnnnnnnnnnnnnnnnnnnnnnnnnnnnnnnnnnnnnnnnnnnnnnnnnnnnnnnnnnnnnnnnnnntctgcggggacaggccacaccaacctctccttttcctcaggctggaagggcatggtggaggtcnttatggggattccctta

SEQ ID NO: 303694 - DNA, 478 bp, Homo Sapiens
  misc_feature (348)..(358): n is a, c, g, or t
  misc_feature (396)..(396): n is a, c, g, or t
  misc_feature (411)..(411): n is a, c, g, or t
  misc_feature (459)..(459): n is a, c, g, or t
attttattaaacctatgcaaagaaaggaatcaaggttgactcctagatttttagcttcaatagctggttagacagttgtgctctttactgagatggggaagatgagagaggattaaaaaatcctgtctttgagaattattgtgttattcagccttcaagaattattcctgttataaacctaaccgccatctttatttcttaatgagaatgttaataaaaactcatttgactttcagcattttggaatttgttcatgttttgatgttgaataaacctcataactatgagttagttgaattataaagcagatataaatcttccagagaggatatgttaccctttacttcnnnnnnnnnnnattatactttaagttctggggatacatgtgccggaacntacaggtttgttacntagggtatacacgtgccctgggtgggtttgctgcacccatcaaccctncatctacattgggtttttc

SEQ ID NO: 303695 - DNA, 411 bp, Homo Sapiens
tcatgaaaaaagatttagagaattacaagagtttaggttaataggaaacacaaatggaggtggaaatttaaaaacaaaggaatggaactcaactctccacagattgaacccacacaggtgtcactgtttactgaattagcaccacttttgtgcagtgaagacacccgtggctgagatttcttaaatctcactttttccatgcttttcttctgacaaactgaccacggagggagagctctcctcccccctccctatcccagactgctgctgctttcctgcaattctggtggtctttttgttgcctcatctgattgaggactttggggggaaacaacacagcagcaaaccaggggcatattatttcccttttaaaaacagctttgaaatttaccaacacaaggttcttcaata

SEQ ID NO: 303696 - DNA, 112 bp, Homo Sapiens
  misc_feature (46)..(46): n is a, c, g, or t
  misc_feature (68)..(68): n is a, c, g, or t
  misc_feature (79)..(79): n is a, c, g, or t
  misc_feature (92)..(92): n is a, c, g, or t
ccagtagagaaccattgccttaggagcgtacctttttcaccccagnaggaaaaaagccaactggctgnagtgccaaaantaacccttcactncaatggattagttggaattc

SEQ ID NO: 303697 - DNA, 365 bp, Homo Sapiens
  misc_feature (12)..(12): n is a, c, g, or t
  misc_feature (46)..(46): n is a, c, g, or t
  misc_feature (88)..(88): n is a, c, g, or t
  misc_feature (312)..(312): n is a, c, g, or t
  misc_feature (332)..(332): n is a, c, g, or t
  misc_feature (346)..(346): n is a, c, g, or t
aaaggcttcctnaccgatagaggttgttatgtggccctgaggagtnaagactgcctgggttcatgctgctttgttacatttgtgagtnaggggcaggtctggagagtgtctgatggcgcataaggagctgtttctgtgcagttgttggttctggtttgcaaaaccatgggatatcactagtttggtttactctggggatatctgaaaaatctctggaagacttagagtagcatcagttgtaggtcatcttaactgtacggtttcaatgcacgcacctacatctcgcagtgtacacaggtcacacggtgtgtncatagagacaggaaagactnggacagatggttgncagccccgtgggaagcccc

SEQ ID NO: 303698 - DNA, 277 bp, Homo Sapiens
gggtgctaggttgtctcacatctaggaaagagaatgttcatattatatagaaatgggcattttccctgtggcctgatatgaggtatccagaatattcctttaggtattattaagtcataggtttctgttttgatagaaacagcaggtggttcagttagtatttttgttgttgtaatagtagcttagatctcttgtttttgttttctttggccaagacagaaaacattctgccacacacattacttcatgactctggttatatattgagagcagcatt

SEQ ID NO: 303699 - DNA, 360 bp, Homo Sapiens
  misc_feature (37)..(37): n is a, c, g, or t
  misc_feature (40)..(40): n is a, c, g, or t
tcaggacagttgtcctctgctggagagagctatcttngtngaatgcgttcctgagggcagaccacatccacagactggtcaatgtgggggtagaaagatcagctctattataaaggtatagtggttacaccccaacctggtgtaactgtgcacggccattccgccccagaactccctgtgggattgtctcagacctgcgttgagatcatctcctcgcaggccaaagtcatcctcttcccagtcccgtttcctttattctcccccagatgttgatcctggggagcatcaaggggaactccatctgtgaaacctgggaggtcccctcaggatttgcagagatctaggggaaaagacccagac

SEQ ID NO: 303700 - DNA, 138 bp, Homo Sapiens
  misc_feature (118)..(118): n is a, c, g, or t
caaaacatatattttaatctggaaacatttgagaatagcttttttttcctcctggaactcccttgtctagcctaaaacttaggatcctccccaaaggaactccaattgttcattaacnttccagttgttcattaaatg

SEQ ID NO: 303701 - DNA, 117 bp, Homo Sapiens
  misc_feature (78)..(78): n is a, c, g, or t
aagggacttttgactcttgcactatcgtctctccatcagctgggaacagtatctaggcaaacactaggcctttgggtngttttgctggaatggcaaggaatctggacaggctgtttt

SEQ ID NO: 303702 - DNA, 116 bp, Homo Sapiens
  misc_feature (59)..(59): n is a, c, g, or t
  misc_feature (101)..(101): n is a, c, g, or t
taaccctaccccaaattcatggtaatacttaacttgacttttatacaagttgcacaggntgtagagggggcaggatttggaccccaaaactttccacaggnttttcggggggtgat

SEQ ID NO: 303703 - DNA, 210 bp, Homo Sapiens
tcaaatgtggatagactgccatagacatgtatgtttctacataaacactccaaagctggactgattaacactggtccacctggctcaactacctccatgtcacttcttctgcctctaatgctttcacagctttaaagtgtctatatcggacaaccagcactaataacagactagagatttctcaaacactgtaaaaactcaaatgtttaa

SEQ ID NO: 303704 - DNA, 441 bp, Homo Sapiens
  misc_feature (405)..(405): n is a, c, g, or t
  misc_feature (416)..(416): n is a, c, g, or t
ataaaatctttaaatgcccatttgagagggtattatgctgatatcttaactgagatcctttgtgggcaaaacaagtgttcctcattttttaactgtgaataacatcttgcatctgaaaattagaaaataagaggtttcaggttctctctgctaaatccggtttagctactaagaagtgccaaatcatagaactgactctgtgctctgggtggtgtggctttctctgcccttcagagattccaggtcagggttccaggttggcttcctaagtagaaatccatttgtcaaaaccagacaccctcagttagtgaatgtttagggcatgggtttctgcccatgcatagggaaaggtcttcccaagtggggcagggctccacaaagaggagggatgggccttgggaggtnggctgaacatnctgcttttattacctgaacatcttg

SEQ ID NO: 303705 - DNA, 424 bp, Homo Sapiens
  misc_feature (249)..(249): n is a, c, g, or t
  misc_feature (251)..(251): n is a, c, g, or t
  misc_feature (402)..(402): n is a, c, g, or t
aactggaagaaaggcgggcagggagagtgcagaaagggggaccaaccagaagagaaaagcacatacacaacactgtctcctttcggaaatcccatactcgaggactctcctgcaacatggctgtgtcctttgcaataacgaatatcccatctaaagaacaactacagattcaactgtagtcaaggcccccaaactcaaactctagacaaggaaatgaaattatgctctgtggatatgaaagcgctaggncnagcagcaaaatagaatgtaagtggtggctttcggtatatcctgctctaggttttatagtttacaaaagttctaaatgtaggattttttcccttagtattatttcaaagacaggattattactcaaaggactattattccccgggccggagntttccacccaaaacatctatgg

SEQ ID NO: 303706 - DNA, 211 bp, Homo Sapiens
  misc_feature (57)..(57): n is a, c, g, or t
atcatgttggtcaggctagtctccaactcctgacctcgtgataccgcccgcctcagnctcctaaagtgctgagctgggattacaggcatgagccactgcgcccagcctgaaatcagcttttttagtgagtgatagctccttctggtttgctttgatttattaataatggagagagatgtgttggaaatctcctatccaaatgggtggggtt

SEQ ID NO: 303707 - DNA, 307 bp, Homo Sapiens
  misc_feature (191)..(191): n is a, c, g, or t
  misc_feature (285)..(285): n is a, c, g, or t
ttcggcacaggagaatgagtgccagcaggggaaataccagacacttacgaaaccatcagatctcatgagaactcactcactatcacgaggacagtgtggggaaaaccgccctcatgattcagtcacctcccgccagtccctcccacagcacatggggattattacatttcaagatgagatttgggtggggncacagagccaacgcttatcattctgtttcaaacatatgtcagctgaagaatacaaaattaaacaaatacagtatagacaagagtcaagcacagntgtaagtgctccagtgggatga

SEQ ID NO: 303708 - DNA, 227 bp, Homo Sapiens
  misc_feature (86)..(86): n is a, c, g, or t
ctcgagagatgcaatgctccatcagtgtctctagctgttttatctctaagtaatagtttgaagaactggggaacctgccgtgcttngacaaaaattactctattgatgctctgaaaaaccaccatgtttttatttaacaaagagttttctgaggacttcataaatgtaatttcacagtgggtgattcctctatggtttatggaatggcaggaaggcttactaactag

SEQ ID NO: 303709 - DNA, 417 bp, Homo Sapiens
  misc_feature (356)..(356): n is a, c, g, or t
  misc_feature (389)..(389): n is a, c, g, or t
gcagccctcttatttgtgctactagtaaaataatgataatgctattgaatagctggattgttgaccctctggctaatatgatttgatggattttattatatggcattttaatcaaaggataagcttgtctcatttgaaatagatagaaaacctgaaaaagggacagtttaaaggtagcaatcaagtcaaaatagttttcttcttctggaatgtgataaatgtatttagtgagaggtatcttggagagcgtgattttaccacttactcatttgacaaattgctgagcttaggggccaagtcctgtaatatttccctgttgcttcaaggcaggtatactggaaaaaaatcagttattnaaatatttgccatatttcctaaataacctattncattctttgcccgataacagcagttttt

SEQ ID NO: 303710 - DNA, 313 bp, Homo Sapiens
  misc_feature (240)..(240): n is a, c, g, or t
  misc_feature (256)..(256): n is a, c, g, or t
aaggatataaaaaattatagggagtcattgtaattctggtataaaaaagtaacaatttagtaatgacctatatgtttattttgttttatgtattttatgttagttttcatctccaaatttaattgtaatgtattcgtttctttttgagtaatatgagtagtttcaatatatctacttgtctgtaagttattatattacagcctgttgtcctttgattgacaaaatagcaagtctataaantaagctactacaaganataaataaatgctgcagggttttatgtataacttcattggaatttccaaattatcca

SEQ ID NO: 303711 - DNA, 403 bp, Homo Sapiens
  misc_feature (98)..(118): n is a, c, g, or t
  misc_feature (177)..(177): n is a, c, g, or t
  misc_feature (216)..(216): n is a, c, g, or t
  misc_feature (225)..(225): n is a, c, g, or t
  misc_feature (293)..(293): n is a, c, g, or t
  misc_feature (310)..(310): n is a, c, g, or t
  misc_feature (316)..(316): n is a, c, g, or t
  misc_feature (380)..(380): n is a, c, g, or t
  misc_feature (393)..(393): n is a, c, g, or t
aaaattggtccataatgttcaaattccaaaaatgaagacatggttagcatggtttttgtttttctcgtctatgaatacaggagtaaatgtgtattatnnnnnnnnnnnnnnnnnnnnncacgtgttaatgtctcctctatgtatatctgatacctttacaattaataatataataanctctcaaataacctgtagaaagaagtttgccaaaagtgnctgaggttnatatacatattcatatttcacccaaagtattcctgggcagtgaggcagcaaagggacatctttgaccntatcgatctgtggcccnaggggngaaataactatatgttgaggtccaggctagcatcagaaggttggcccgggttatatggggtacntcagtagtttccnctaactgagg

SEQ ID NO: 303712 - DNA, 388 bp, Homo Sapiens
  misc_feature (261)..(261): n is a, c, g, or t
  misc_feature (277)..(277): n is a, c, g, or t
  misc_feature (333)..(333): n is a, c, g, or t
  misc_feature (349)..(349): n is a, c, g, or t
cattccactgctaggtatggagaggggttagtgctatcccaaatagtccacaagtttgaataatgcattgtcagtggtttttgcctgggacatacatcagaatcagctggaaagatttttcaaaatacattccagatatgtagaattagaatgcataatggtgagccctggcatacgtagtctaataaaagttccacaaatgaggattgtgcacacaaatgcccttttagtgccatggtttcatatgttcaccttggggangcacaaccacttcccnggcttcaaccgacttctatgttggggagagggcctgaaaaaggtggtcacggtggncttaaagaggagaganttcaggccagttatgaggtagatttcctaaggttttcct

SEQ ID NO: 303713 - DNA, 230 bp, Homo Sapiens
  misc_feature (151)..(151): n is a, c, g, or t
  misc_feature (205)..(205): n is a, c, g, or t
aaaggctctcttataagttggagaaaatgaaattagtcatagtctaaaatgatttttttgaattatggtgaaaattgagaaggcctgagtgcttacctacctaccaaaatatttgttttgcatagatgttctaacataatacacaaaaagntctataactcatgttaatttgccattcataatcatacataacataacggaagtntagaaaaatcaacctgactccatta

SEQ ID NO: 303714 - DNA, 389 bp, Homo Sapiens
  misc_feature (117)..(117): n is a, c, g, or t
  misc_feature (356)..(356): n is a, c, g, or t
  misc_feature (366)..(366): n is a, c, g, or t
  misc_feature (374)..(374): n is a, c, g, or t
gtgactttcagtaaaaggtaatgtattccctgagaacaagtaaatacttgggcagggagggatggtttgagtagaggtgaaaacagagaaatgatgggaagctgaccatatgtagangaagctgaaaggtcatggtttcaaggccactgtgtttcctttcatttagagcatccacttttaaagatttatcattttcagtgacctgaaggcgtacaagataatctgtgtagatacctgaaaccgcctttcaacaaggccagtcctaggtattgacagcatcctaggttgtcccaccctaaacattacctcaagtcccattgggtagggagtctagtgggactttccaaaaggccccngagttcattnttgcaatntgcctgtctttggca

SEQ ID NO: 303715 - DNA, 312 bp, Homo Sapiens
  misc_feature (90)..(90): n is a, c, g, or t
  misc_feature (116)..(116): n is a, c, g, or t
  misc_feature (123)..(123): n is a, c, g, or t
  misc_feature (133)..(133): n is a, c, g, or t
ggagaaaatagttttgtcatctcgtatatgctaaaataattccagattaatttaacagtaactattgttaacattttggttataactttncacactgttcatacacctatatttgngcatttncacatatgantttataagctgtaaaaccactatattctggattttcatccagggtcttcacatagagatgggcattgctttgaatgactacataggcacctccttatcccatgggatgccagcctcccttgggcactgggtgtgggcacaggtggctggtctggaccctggaaagggtgtttctggggg

SEQ ID NO: 303716 - DNA, 354 bp, Homo Sapiens
  misc_feature (125)..(125): n is a, c, g, or t
  misc_feature (210)..(210): n is a, c, g, or t
  misc_feature (253)..(253): n is a, c, g, or t
  misc_feature (271)..(271): n is a, c, g, or t
  misc_feature (295)..(295): n is a, c, g, or t
  misc_feature (307)..(307): n is a, c, g, or t
gcaatgtaagcatagatttattgatgtgaaagtacactccacagagtggcagcaggcttgagaaaggggctcgagagcactggttgcagaattttctgggttttaaatatcctctagaggtttcncattggttagtttgtttacatcctacataaatcatatagtggcccacaagcagtttgattggttgttgaaggggaccatccagangtactttccgtttttcatctgcaatgcgtgggaaagtgggganttgggtgggcatgatttncaaaaggggtagcctctgatcccntttgttacttgnattgtgggagaggtgggggattttcccttttgattccagttctaggg

SEQ ID NO: 303717 - DNA, 122 bp, Homo Sapiens
  misc_feature (97)..(97): n is a, c, g, or t
cggccgggggaggaactttgagggagggtaaaatgtgccggggccttgggtcggtgggtgggtacataactggtgccttttgttcaggctccgtgcntttacgctggaaaggggcggttttt

SEQ ID NO: 303718 - DNA, 376 bp, Homo Sapiens
  misc_feature (274)..(312): n is a, c, g, or t
  misc_feature (339)..(339): n is a, c, g, or t
  misc_feature (356)..(356): n is a, c, g, or t
aaactgtactgaaaatcctgtatgttcaggagccattttctccagagattccaacaataatacttggaattcaatatccatttctacagtggtctctctcccattttgtccccctcccttcaccactgccccagtaatgcaggctaaatattaagcttattacccccacagaaagcgtgggttctgccaactgaacattgtgccaggataccaaggaattgagggcgattatgccctgcatggctgcttgggtatactgaggatgggggcgttnnnnnnnnnnnnnnnnnnnnnnnnnnnnnnnnnnnnnnnattaaaggggaggttctactgtagggncaaacaacccggggggnttgtttggagggaaaagggg

SEQ ID NO: 303719 - DNA, 222 bp, Homo Sapiens
  misc_feature (71)..(71): n is a, c, g, or t
  misc_feature (135)..(135): n is a, c, g, or t
  misc_feature (195)..(195): n is a, c, g, or t
actatgaaagtaataaatgtttctcttagcaaaatgtaacaaaagaatgcaaactgcaaacattcccaagnccaccactgttcataccatgttgtattgtctttccagatctatttatttatctgggacccatgnttttggcttattcctgacatttcccactccactgagggcactggcccacatcctgttganactgggaccaaggacaactcttcctcc

SEQ ID NO: 303720 - DNA, 356 bp, Homo Sapiens
ttggcattaataatatgaccaggaataaatttatttaagaaatgtagatgaagtatcgatattatcatgttatagggatcaggtaagagttatcaccaaattctgcccctgtcatttgacccttttgtttaagaattcctgagggcactgtacacactacagatgttatcagaaaaagttacgttttaatgggtgacttcagtagcacaataacaatagcaggtatttcaaaaagtctgacatgcatcatgcagtttaggtttgccatattatccagcctcagatacttcctctacattttgggcataggcctatctggaatggatgttcaggctactatttcagaggaaaggagt

SEQ ID NO: 303721 - DNA, 199 bp, Homo Sapiens
  misc_feature (121)..(121): n is a, c, g, or t
  misc_feature (158)..(158): n is a, c, g, or t
cgtgcccagctgcttttgacattttctttggggaggtttctgggggtacaattaggctggaaatctggaagtttgggtttttgcatgggtcttgccccaagctgggtgggttgggtcattntgggcctttctgattctgggtgatccccaaggaacantctggaaaacataccccaaaaacacattaaaagggcgttac

SEQ ID NO: 303722 - DNA, 447 bp, Homo Sapiens
  misc_feature (12)..(12): n is a, c, g, or t
  misc_feature (395)..(395): n is a, c, g, or t
  misc_feature (405)..(405): n is a, c, g, or t
  misc_feature (410)..(410): n is a, c, g, or t
attcggcacagngtacctctgtagcttgtcttcctaaggttttgttttttgttctcgtagcccatagggtttaagtctgaccagcttaccctggcatttctttatttttctcagtggaattgtctacagttgagccaggagacattcctctttgggacatcctagtagaatggcatagtctgtcttctgagttgatagaagaggatggaagactcctttagtactctgagaaagactgatttcttttttcaggaccaggtttgccatttggcctatatacacccatattggcttcccactcttttcttccagtaccgaggtcaagccactgattgtattcttaggaattaaaaagggcagtgttgataagggtgttttagggagggagtttgatngggagtcttnatttnaacttaaatgttttttagggctgcccagggtattttt

SEQ ID NO: 303723 - DNA, 459 bp, Homo Sapiens
  misc_feature (359)..(359): n is a, c, g, or t
  misc_feature (371)..(371): n is a, c, g, or t
  misc_feature (402)..(410): n is a, c, g, or t
tctcttgtcattgactagaattgacattcactgagcaactgcttgcctgtctgtggatcaggccatgtgctggtcattatatattcattacctcattttgtcttcacaaaacccttcaagttatgaatataggtccagtggcatgggaaaaaagtagaagaggatatttcaggaggactgctcagggatcgaaaaaggtttaaaacccataaccaccaaatacaatacgtacatctgctttaggaacttgattcagtcaaccaaaatgcagaaagacattttttaaaggacaatcagaggagatacgaatgtgggactggggtattaggatgtttaacaaggaaattatttgttgggtnagggtgtgggtnatggaattggcagttattataagttggccannnnnnnnnaggttatttggcccagtatgttggggggtgttattgacccaagggtctt

SEQ ID NO: 303724 - DNA, 348 bp, Homo Sapiens
  misc_feature (317)..(317): n is a, c, g, or t
agtctctccttaactggttgattccccatatcacaccaaagttatcttcctaaaaacaaatttgatcatcgcattcacttgctttaaaaagtccgcttactctctgatgcctgtagattttcttattcaagaacctttacagtcgagtcctaacacatttcaccaatttcacatctagctactctgtttttacctgtctacattggcttctcactgttccttacaactctgttctttcctccacctaggaatatttttttcttaggaccaattcctaactatcctttaaggaccaactgcatgacatcatctactgnattaaagtcttctgtggacatcctcagttaa

SEQ ID NO: 303725 - DNA, 402 bp, Homo Sapiens
  misc_feature (375)..(375): n is a, c, g, or t
  misc_feature (389)..(389): n is a, c, g, or t
gatattttatttatccatatcacccagtgatttaaaggactcaagaaagttccctttgtcctaaaatgcacctctgcacacaaagagtaggcaattactcttccaacaagtagacctccataagaattagatcattacattttgacacaaggaaatgtaagttttcccaccctcttgctgtatcactcacaagaacaatatcactgtaaaacagacccaaacacacagtactgtaaatatgcaaaaagtctagtcaaagaaactatattggtgacaataaccaattgtaattaatgacagttacttcagtaacgggtaaaagtagcccaaattctttatccaagggttatttatggctagtctctaggtatcctnccacaatggaaatnggtttatgatttt

SEQ ID NO: 303726 - DNA, 404 bp, Homo Sapiens
  misc_feature (190)..(190): n is a, c, g, or t
  misc_feature (253)..(253): n is a, c, g, or t
  misc_feature (272)..(272): n is a, c, g, or t
  misc_feature (325)..(325): n is a, c, g, or t
tccaaaaggatttgaaacagagtgtaacattatgaatctgggaagcaaagcatctctgtcattatacaacattacacctcagtaaaaggggagatgtgagggctgtttaaatgccatgaagagaggcatgagaaaaatcaatactgaaatgagtaattgaatgatgttggcaggggctgagtaggtcctnattaggcatgacatgattatgacgacatttctagagttattcgacctaatgtacatgatatcnagtaagactaggaaatttncatttactggctttggatttacataacgctttaaataattaggaatgtagtcntcagggctaattatggatgccggagggagatgggaattaatccagacagtaaggataattccgttggccatgggtggtc

SEQ ID NO: 303727 - DNA, 309 bp, Homo Sapiens
  misc_feature (146)..(146): n is a, c, g, or t
  misc_feature (163)..(163): n is a, c, g, or t
  misc_feature (183)..(183): n is a, c, g, or t
  misc_feature (190)..(190): n is a, c, g, or t
  misc_feature (229)..(229): n is a, c, g, or t
  misc_feature (249)..(249): n is a, c, g, or t
  misc_feature (281)..(281): n is a, c, g, or t
ataagccactgaacctggctgatactaactcttaatttaaccattgagctatattctgaaataatgtaacagtaaggttttctactcaacttcttatgccaaatcgatttcagggcagtacatatggctgtcaccacaccatgggnggaaacaatacttaggnaatctgaagagggagggggnaaagganttaattccacacaggattaatgtttaaattaatattccnacggtttaggtcccttcatnccctactttcttgtggtccctggccactctanttagggttaggtaatggggggagtgggg

SEQ ID NO: 303728 - DNA, 289 bp, Homo Sapiens
  misc_feature (67)..(233): n is a, c, g, or t
tgaatatagaattacagagttctttgcatacatatttccctcttactagactattacagacttaagnnnnnnnnnnnnnnnnnnnnnnnnnnnnnnnnnnnnnnnnnnnnnnnnnnnnnnnnnnnnnnnnnnnnnnnnnnnnnnnnnnnnnnnnnnnnnnnnnnnnnnnnnnnnnnnnnnnnnnnnnnnnnnnnnnnnnnnnnnnnnnnnnnnnnnnnnnnnnnnnnnnnnnncagtgggggcacctgttaggccccagcttacttcagggagggctgagggcagggag

SEQ ID NO: 303729 - DNA, 415 bp, Homo Sapiens
  misc_feature (61)..(97): n is a, c, g, or t
  misc_feature (99)..(360): n is a, c, g, or t
  misc_feature (386)..(386): n is a, c, g, or t
agttagtaaggtaaaattcctgcagctttcattgtcttgttaatctttatgatcaagaggnnnnnnnnnnnnnnnnnnnnnnnnnnnnnnnnnnnnnannnnnnnnnnnnnnnnnnnnnnnnnnnnnnnnnnnnnnnnnnnnnnnnnnnnnnnnnnnnnnnnnnnnnnnnnnnnnnnnnnnnnnnnnnnnnnnnnnnnnnnnnnnnnnnnnnnnnnnnnnnnnnnnnnnnnnnnnnnnnnnnnnnnnnnnnnnnnnnnnnnnnnnnnnnnnnnnnnnnnnnnnnnnnnnnnnnnnnnnnnnnnnnnnnnnnnnnnnnnnnnnnnnnnnnnnnnnnnnnnnnnnnnnnnnnnnnnnnnnnnggcatgagccacctgtggcccggccngattcaagagggtttttccagggggacca

SEQ ID NO: 303730 - DNA, 372 bp, Homo Sapiens
  misc_feature (141)..(141): n is a, c, g, or t
  misc_feature (187)..(187): n is a, c, g, or t
  misc_feature (213)..(213): n is a, c, g, or t
  misc_feature (230)..(230): n is a, c, g, or t
  misc_feature (269)..(269): n is a, c, g, or t
tttgaaaacaataagcaagtttattgagcgaagtaacaattgagtaatgcaggtacatcaacaatgatctatacatatttactaaataatcctgtacatgtcacaaacactttcctgcatgttatctcttaatactcagancaatctgtgacaatgttattatagtttctcctattttgtagaaaangacctcatagttcagcaaagctaggncctatccaagttccccntagctgggtttgtgggcaaagctgggtgtgcatacccantctcctggactcctaggtcgtgtgtgttctatggctggcaccatgggcagcaaagggctaagggcaggtgctcttacctcccaggtcaaggccatatacacct

SEQ ID NO: 303731 - DNA, 276 bp, Homo Sapiens
  misc_feature (201)..(201): n is a, c, g, or t
  misc_feature (215)..(215): n is a, c, g, or t
  misc_feature (235)..(235): n is a, c, g, or t
atttttgtggtgagtggttgggagaagttagtatatatcacatggctttcactgctattcaataaaaaatctcctattgaatgcaccaattctctccagaagtggcgacccctaacagatgtcaatagtctgggcatgtgttaggcccagagggtttgtgaagataatgaagggcagaggagggacagaaggaaccagagntcagctatgcacantaaagagacaagtagataanttgagttttactgtctccttgcttttcatattttccgttgc

SEQ ID NO: 303732 - DNA, 444 bp, Homo Sapiens
  misc_feature (204)..(204): n is a, c, g, or t
  misc_feature (370)..(370): n is a, c, g, or t
  misc_feature (418)..(418): n is a, c, g, or t
aggcttctcatccccctgaaatgtctcaatgggtcagaaaggcagggccaagagagaaactctctctttgccatgtccatgcagacagcagatacccctagaaactaaactaaaggattagggctaccaagtggcttccctcatcctaggaccaccatatctgcaggaggatgggagtgaggcaggctatgcgggccccttggnacccgcctgccctggttgctgccctgatcctgcagggagagcctgggtgttgctgtgaatataggcgagggcattagggctgggtattggagagtaatgaagggaggacaggctatctttcattgtggtcagagggctacattctggtagtcaccaccacaatatnacaattttgtttaatttatttcccttttatttccctttttcaccaccntccttcatattcctttatttgtacgt

SEQ ID NO: 303733 - DNA, 163 bp, Homo Sapiens
  misc_feature (119)..(119): n is a, c, g, or t
  misc_feature (145)..(145): n is a, c, g, or t
ccgggcctggccaccaaattttcaaacaagtatataaggagacttgtgtgaggatgtgcactgcaacattattttgcagtgtcagagagttgggaggcactctggggtgcccatctctntgggagtggagtggtagaaagtggtnggtgtacacgatgaaatt

SEQ ID NO: 303734 - DNA, 373 bp, Homo Sapiens
  misc_feature (155)..(186): n is a, c, g, or t
  misc_feature (340)..(340): n is a, c, g, or t
taatggaaagaacccttgtcttcgcaacatctagattaagaaatggaatattacaaatagaaatatggccaccttcatgtttctctttgatctgattttcctcctttcagtctcagagttaatctaatcttaaattcagtctctcttaattatgnnnnnnnnnnnnnnnnnnnnnnnnnnnnnnnnctttttaacattttcatgggtctcaagtctatacatagtattgtttttcatttataaaacatcataaactgataacatactgtatgtattcctctgttcctctctttctggctggaccctgtgtgtgaagtttatggagatagcacattttttnctgtggctgtgcattgttcccatccatgtggaa

SEQ ID NO: 303735 - DNA, 323 bp, Homo Sapiens
gattgactaaaagatagactgattcagtgatactgatagtacagcagtatgcttaaaataataaaggtgtagttcctcacaaatggaatattaaatctcattaaggattcagatgctacagaaggaagagcccaaaaacagacccacatacatctgaaaacttgatatgtgatgtaattggcattgcagaccaataggaaaaagataggctgcccagtaaatggggctggtaaattgtttattcacaaatatataaaaggttcaatgcttacagtacaggatatttttatgaatctaaggttgtaaatattccttaagccgga

SEQ ID NO: 303736 - DNA, 160 bp, Homo Sapiens
  misc_feature (135)..(135): n is a, c, g, or t
tgagacactgcgcctgggccagaattacttttcaaagaacaaaatgttttagtatttaaatttgtgaaatgaactcaggagtgaacacttccattaatcccgaaatagtaaccttataggcttaaaatgtagganggttttgtgtgataaagtccttatt

SEQ ID NO: 303737 - DNA, 183 bp, Homo Sapiens
acttctctcagtattagttacctacctgtaacatgaggttacatggtacataatggtcattcttccctcttggggagaatcacatgagataatacataaaggaactttaataagctctaagagttatatagatttaaaaggcccatagtacctatatgttggagttaatgtgccatcacttct

SEQ ID NO: 303738 - DNA, 123 bp, Homo Sapiens
ctggcacctgggctagccactcactgttttcatgttaggctaagtaagcttttttgaagaccattaacataaatatacaacctaaatgtattttacctgaataattttactcatgttccacag

SEQ ID NO: 303739 - DNA, 342 bp, Homo Sapiens
  misc_feature (24)..(24): n is a, c, g, or t
  misc_feature (123)..(123): n is a, c, g, or t
  misc_feature (133)..(133): n is a, c, g, or t
  misc_feature (171)..(171): n is a, c, g, or t
  misc_feature (188)..(188): n is a, c, g, or t
  misc_feature (200)..(200): n is a, c, g, or t
  misc_feature (205)..(205): n is a, c, g, or t
  misc_feature (212)..(212): n is a, c, g, or t
  misc_feature (229)..(229): n is a, c, g, or t
  misc_feature (273)..(273): n is a, c, g, or t
  misc_feature (300)..(300): n is a, c, g, or t
  misc_feature (328)..(328): n is a, c, g, or t
tgcacctgggagagattctgaagnccaacttaatggactgctaaagtgtgtatacacaggctagggtatatttaactctgtaactgcatccttagtcacagaactacctacatacattggganccctctcagngcccccttcccgacatatgagaaacaaacttttatggnacaatacttatcttttnacatgctctggnatttnatatttnattcagtttcatttagnggcaaaaattagggacaaagaaacaacagcaaaccttgatctanggctatccaaagtaaatgaggcgcttntttaaaagggataaaatcgggtgaaggnaaataggtatggct

SEQ ID NO: 303740 - DNA, 352 bp, Homo Sapiens
  misc_feature (257)..(257): n is a, c, g, or t
  misc_feature (265)..(265): n is a, c, g, or t
  misc_feature (333)..(333): n is a, c, g, or t
taaccatagctcttaattatattctagagtaactcacatctcaagcatctaaaaaaagtccttaaataaataaacaatcatcactagaaacagactatccagtaacacattcaagttgccagaacggctggagatattactcagtcataattattagaaattcattacagccatagcctacaaatgagaaataaagcaaatcgaaagtgctgatattctacatccccaaacaaacaacactctcagtaaaatctgantaaaatanatgggaaatatgggcctaaagctggtactaaattattatatgttcattaaaactaccaggcaatgctnaatcttaacttcatttttt

SEQ ID NO: 303741 - DNA, 142 bp, Homo Sapiens
gtcaatcatcaagactagaaaaaaggcataggtaaataagagatggaagtggccctatgggaccaaccgtacagagaaaagaaccaattattctctctcaggctcctagcccaccatttagcacctgaataagatcatttac

SEQ ID NO: 303742 - DNA, 289 bp, Homo Sapiens
  misc_feature (41)..(42): n is a, c, g, or t
  misc_feature (67)..(67): n is a, c, g, or t
  misc_feature (194)..(194): n is a, c, g, or t
  misc_feature (225)..(225): n is a, c, g, or t
  misc_feature (232)..(232): n is a, c, g, or t
  misc_feature (245)..(245): n is a, c, g, or t
  misc_feature (250)..(250): n is a, c, g, or t
  misc_feature (262)..(262): n is a, c, g, or t
tgccgtcttatttcatctctctccgttatttggttccccannccttagtcccctttcttccccaatngcatcccaagatgcacaatagtggcaagtgcccagcctgtttccacagcctgatccccaccactgcgttggccagtcacccaagaagcagctggacccatcatctggctctagggatgacccagttncagcacccccgcaaacctccgttctgtcccnctacctncctcagcagaggnccagnccaatgcaggtnccgtggtgggatgggagtagctcttcc

SEQ ID NO: 303743 - DNA, 180 bp, Homo Sapiens
  misc_feature (99)..(99): n is a, c, g, or t
cctcactctcactccaccccataggcgctcgcttgtgggcctgctttggcgggggacacagagctgggagagcttcacctacccggggagctcactganggcccggctggtgaggggccagcatggatggccattcccctctgctgacagcagggccagggcagcctgccactgaggaga

SEQ ID NO: 303744 - DNA, 285 bp, Homo Sapiens
  misc_feature (190)..(190): n is a, c, g, or t
  misc_feature (212)..(212): n is a, c, g, or t
  misc_feature (222)..(222): n is a, c, g, or t
  misc_feature (241)..(241): n is a, c, g, or t
  misc_feature (256)..(256): n is a, c, g, or t
  misc_feature (266)..(266): n is a, c, g, or t
cagcctgcaaccatctttaactctggatttttcacatctctgcccgttgtttgggatctagaagcagtgcttacttggggcagttgtgggtaaaggcggtagattgaacagagaacctttccttctccctctccctcgccacctgctgtcaggccctttctggaaggcccacatagtctggcccctgttncccttagctagcttagcatctnccgctttccnttcgtgaacagggcattcngggagttttgaatgntcttgatggntgagcaggaaagttcaatt

SEQ ID NO: 303745 - DNA, 249 bp, Homo Sapiens
  misc_feature (36)..(36): n is a, c, g, or t
tacaaccagagagggggaaacccaaccaggattatncctgagacagccagcgccgaaccgcaaggacaacagactaccccagagtctggcaagcagggttgtcggcgcccagtggctcgagacgtcctggctgatggctcttctcgcaactctgtgaacagctggggcctccttcctgtcacctctccccacctgcagggacacgaacactcagggcgttcatgtcctgctgcccccttgggccgggca

SEQ ID NO: 303746 - DNA, 313 bp, Homo Sapiens
  misc_feature (209)..(209): n is a, c, g, or t
  misc_feature (213)..(213): n is a, c, g, or t
  misc_feature (295)..(295): n is a, c, g, or t
ctcatgaatatgagctgaggttgctagaagcaggtcaggctacatcttcaacactgctgcacagaaatttcttctgccagatgccccaaatcatcactctcaagttcaaagttccacagatcccaagggcaggggcacaatgcctcaaacatctttgctccagttcccaaaaagcaccccatcttcatctgagaccatctcagcctggncttnattgtcaatatcactatcagcattttgggtcacaacaatttaacaagtctctagggaagctccaaaactttccttcatcctnctgtcttctttctaaggc

SEQ ID NO: 303747 - DNA, 391 bp, Homo Sapiens
  misc_feature (322)..(322): n is a, c, g, or t
atacatccatgtgctaggagggtgatgcatcctgacttcacagggagaaggcactggaagctttgtgttgggaccctcccagaccttgtcctacacatgttttctttggccggacctgatttttatgttttttgccacaataaaattgtaaacctaagtataggggttttctgagctctgtgaatcattctagtgaattactgaactcaggaggtagtaagaaacctcaaatttgtatccattttgtcagaagtatgggtgacctggggaacccccaaacttctgcttggtgtataaagtgaggggcagttttgtaggcagnccggggcccttgttaaagtttgggcctaatttggggatagttagtgttcagaagttcattgttaccagc

SEQ ID NO: 303748 - DNA, 122 bp, Homo Sapiens
tttaaataataagaaaatgtcatgcatctttttccatgtagttaagtttcccattgctcttcattcttttgtgcagatccatatttccacctggcatcctttgcttctgcctaaaggacatt

SEQ ID NO: 303749 - DNA, 324 bp, Homo Sapiens
gtagagttagggtggagagatgaaattttatgagaaactatagttgtatttactaattgtgatcaaagtatttaataagactaaagggaaacaccacattttgaaaataccatcagaagtcttgggcttctgaagcttggaagacatttaactgacattgaaaaaggaaacctatgtgtggcaatgaagttatggtatgtaagaataaagaaaaggtgggattataaagtcagaaatttctgaagctacttaacttgatctcagaggtattatcagctaagacctatgaattggggctataaatccgttacgttattgggtcta

SEQ ID NO: 303750 - DNA, 338 bp, Homo Sapiens
  misc_feature (311)..(311): n is a, c, g, or t
tagtaacaacttattttaactgaatgaacaagtgaatgtagcctattgtctaccattttctgcattgattccacaagtattatttgagctctgctgatgaaatggaagagttccctgatccccctcacaggacctgtgacagtggtttggctcaccactgctcaaacccctgacaggagggggagcatgcagacaggcaggagcaggagctagggtgagtgctttgggctctggcccattagtagtatctaggggtgggtgcctgcagcctcagtgttacagtgttcttttaaccttgccatccacagatnggttttaagtgttaaccagcttcagtg

SEQ ID NO: 303751 - DNA, 413 bp, Homo Sapiens
  misc_feature (274)..(296): n is a, c, g, or t
  misc_feature (347)..(347): n is a, c, g, or t
  misc_feature (361)..(361): n is a, c, g, or t
  misc_feature (376)..(376): n is a, c, g, or t
  misc_feature (382)..(382): n is a, c, g, or t
gcatcaatctctgctgtcttcagatagccaagtttatttataagtttaggtttttttccttaggcaccaggatattatttgtcaactattgtgtaacactgaccccttttggggcacgtacatatacactctttaacacgatctcattctctcactaaatattagtaagggatcagtgcaaataatatctgcacagctgagtgctgggcctggtgcaaaggctgggcactgtgcaaatgtgacacatttgctgtggggggagaggtacacaggnnnnnnnnnnnnnnnnnnnnnnngctcagcaacttcaaatctattatttacaaatctgtcacctcctactaggnctaaggctcagggncagagggctgtgtcntcaatncacccttttaacatcagtaccggggggcctt

SEQ ID NO: 303752 - DNA, 383 bp, Homo Sapiens
  misc_feature (69)..(69): n is a, c, g, or t
  misc_feature (96)..(105): n is a, c, g, or t
  misc_feature (192)..(192): n is a, c, g, or t
  misc_feature (350)..(350): n is a, c, g, or t
  misc_feature (372)..(372): n is a, c, g, or t
ttttgttgggttgtttcttttaatactcagagaaagtcaaatatgttttgactcgcatgacaaaaagancaaaaagttggtaatacaaaagctgannnnnnnnnnaaatgctagacagaaataaagagtatacaaggccaagagcgcaaattaaaagataccagcactgcacaccaccgtcacacatgcagnaaggaattaaatttttaaaatgcctcaggggcaattgtatgcaactgatacaaggcatacacttctgggtaggtatcataagttgaaaaggcaggcatgatttaaggttaggaaaatattcattattgggccgggtgtgggtgggctcacacctggtnaatcggccggtactttgggggngttctgggggg

SEQ ID NO: 303753 - DNA, 201 bp, Homo Sapiens
  misc_feature (137)..(137): n is a, c, g, or t
  misc_feature (150)..(150): n is a, c, g, or t
cctcctgaacaattctaagaccataatgacaagcagagtcagaatctgagggggataaagagagcatctgtacagaagagtttcctggggtgggatgttggggctcaagcatcccttgggctgacaaggggcatccnccatatccggggnggtctaataccagcccaatgtcagaacctaagtaagaggaggagggcctcc

SEQ ID NO: 303754 - DNA, 367 bp, Homo Sapiens
  misc_feature (197)..(197): n is a, c, g, or t
  misc_feature (213)..(213): n is a, c, g, or t
  misc_feature (259)..(259): n is a, c, g, or t
  misc_feature (267)..(267): n is a, c, g, or t
  misc_feature (298)..(298): n is a, c, g, or t
  misc_feature (312)..(312): n is a, c, g, or t
  misc_feature (318)..(318): n is a, c, g, or t
  misc_feature (338)..(338): n is a, c, g, or t
  misc_feature (349)..(349): n is a, c, g, or t
taattgccctgagtcaactaattgacaaaggaaaatgctatgcttaaaagctcagttctcagtgtaattatttttctctccccacatataatcatcctttaaatataaaagctattatagagatgcagtttccagcaaactttatctcacattgaggcccttgactttatgtggtgtttcagatcagcttttttgtncaagggtcacacattncattccagcatcacttaattctttagctgttagtcttccatccagncactaggngttaggaccctgggagttgcaaaaggcaagncttggaggacagtnaccccnttatttcttcatgggagctnaaacatttggnggagggtatttgggtgta

SEQ ID NO: 303755 - DNA, 430 bp, Homo Sapiens
  misc_feature (319)..(319): n is a, c, g, or t
  misc_feature (329)..(329): n is a, c, g, or t
  misc_feature (346)..(346): n is a, c, g, or t
  misc_feature (352)..(352): n is a, c, g, or t
  misc_feature (396)..(396): n is a, c, g, or t
  misc_feature (409)..(409): n is a, c, g, or t
  misc_feature (416)..(416): n is a, c, g, or t
gtttagtaatcctgtatgtaactaatctttttatctgtgttgctactccctctgctgcacagaagtcatctttattttgctgaaactctgactcctgtttcagtccatcaccctctgatggatgccctcttctccctgcttgtgttgcagcacaccagttcaggatacactctgtctaaatgccctccttatgcctctctggttctgactcttcatgttggaccatcctctcactttatactgtcatatcccacaccagggccactgctttgtgggtcatgtcctccttaccctttttctgggctctggactctgcctnctgggtctgnctcccttgtgtggggangtcctntttgacccaccttcagggttttgttcaatttccacatcaggaantgcccgttttttngaggtantaaaccctggtttt

SEQ ID NO: 303756 - DNA, 127 bp, Homo Sapiens
caagtaacaagtgtggaaacagaacagaatgcagaatgattcatcatatatgggaagttaataaatgttggggttggtattacagtcagtggggataggatgaactattaaaaaattagatttctcg

SEQ ID NO: 303757 - DNA, 331 bp, Homo Sapiens
  misc_feature (138)..(138): n is a, c, g, or t
  misc_feature (176)..(176): n is a, c, g, or t
  misc_feature (248)..(248): n is a, c, g, or t
  misc_feature (288)..(288): n is a, c, g, or t
tttatgaaaagtttatagaataatgacgtcccaaaattagcagcttataaatgggtaacttgttttaagaaggtattagatgatgtaaaagatgaagcccacactggcagaccatccacataaatttgtgaggaaaangtaatcttgttcatgcctgaactaaaaaggaccaacanttcacagcagaaacagtagccaacaccgtagacatctcaattgattcaactttcatgattctgactgaaaanttaaagttgaggtaaatttttctcttcaagggtgccaaanttattgctcccagttcagctggcaggcaacagcagggcttccc

SEQ ID NO: 303758 - DNA, 325 bp, Homo Sapiens
  misc_feature (157)..(157): n is a, c, g, or t
  misc_feature (159)..(159): n is a, c, g, or t
  misc_feature (214)..(249): n is a, c, g, or t
  misc_feature (288)..(288): n is a, c, g, or t
  misc_feature (314)..(314): n is a, c, g, or t
cagcaccatgcttcttaaaggagggccacagccttccactttccgtctcctttccactaacctgttatgatccttgaccaaaggccaattaaataatcagaggagacccaagagatccctctcttctccctctgaagaaaaacaaagagcagagggnanactgaggatttggggatgtaaaattaaaaggatctaaggaaggagggccatgagnnnnnnnnnnnnnnnnnnnnnnnnnnnnnnnnnnnnaggaggacagggtcttcactatgttggaccggggtagtnttggaaccccaggggtcagtgatccntttggcttagg

SEQ ID NO: 303759 - DNA, 358 bp, Homo Sapiens
  misc_feature (86)..(264): n is a, c, g, or t
  misc_feature (309)..(309): n is a, c, g, or t
  misc_feature (322)..(322): n is a, c, g, or t
  misc_feature (328)..(328): n is a, c, g, or t
  misc_feature (342)..(342): n is a, c, g, or t
ttaaaggggaaactcaagtttgctatcaggaaaacacaaaaagaaaccatgcatgaaggtatgttcatatcatgaaattaacaacnnnnnnnnnnnnnnnnnnnnnnnnnnnnnnnnnnnnnnnnnnnnnnnnnnnnnnnnnnnnnnnnnnnnnnnnnnnnnnnnnnnnnnnnnnnnnnnnnnnnnnnnnnnnnnnnnnnnnnnnnnnnnnnnnnnnnnnnnnnnnnnnnnnnnnnnnnnnnnnnnnnnnnnnnnnnnnnnnnntcagggagggctgaggacatgaggaataggctttgaactcagggngggcagagggctntaggtnaggccaagattcgnaccacttgcacttcca

SEQ ID NO: 303760 - DNA, 159 bp, Homo Sapiens
ccagaacccaaatcttaaaactaaaaatcatttcacggaatttgcttttcaggttctcctgtacagcgttcactaggccttgaaaaacatgtttcaagtcttctaactaaagggcttggaaatgtttattaaggtgataactcaaaatgagggctcacc

SEQ ID NO: 303761 - DNA, 161 bp, Homo Sapiens
  misc_feature (21)..(21): n is a, c, g, or t
  misc_feature (53)..(53): n is a, c, g, or t
  misc_feature (66)..(66): n is a, c, g, or t
  misc_feature (81)..(81): n is a, c, g, or t
  misc_feature (111)..(111): n is a, c, g, or t
  misc_feature (115)..(116): n is a, c, g, or t
tttataatattacactttaanaggtttcagaaggctccgtggagaaatgctantaggctgaaatgncagaatcgagagggnttcagttcgcgctcagccgatctaatcctntttnntgctctgattttttgttggcgggggaaggagaggggagcgcccac

SEQ ID NO: 303762 - DNA, 472 bp, Homo Sapiens
  misc_feature (119)..(119): n is a, c, g, or t
  misc_feature (419)..(419): n is a, c, g, or t
  misc_feature (441)..(441): n is a, c, g, or t
aattttaaaactcaaaagagaaatagctaggcctcagtgttcctagccagccccatggaatcaagagagtgcagctgatcaatgtacatcaaaaagccaggccctacctgggactgcancagcatggggacagcatgcaggaggtgcatgggacaaatggcacctgggtttgggcttgagaggcatagtgaaaagacccactagcagtcactttccattttctgtttctgactccaagcaagcagagcagcagttcttcttcctggggtgggacaggttaagaagaccagtaaagggtctctccctcgccacttgtagctacactatctttcctgttcacattcaggtgtgtcttcctcatgagggacttgaggatggaagagggggtccagacttaaaggcactgttttgcacggggnttttttttaaataggatttttnttataggccttttccagttaaagccagagtt

SEQ ID NO: 303763 - DNA, 130 bp, Homo Sapiens
caaaccttgacactaacattgatctattaaaataagctaacatatttctatttactattaatttccttaacagagcaaatggatttccctgagaagtctaagtcttaactggtggcagtattgagtgggg

SEQ ID NO: 303764 - DNA, 442 bp, Homo Sapiens
  misc_feature (72)..(166): n is a, c, g, or t
  misc_feature (411)..(411): n is a, c, g, or t
tgggagagaagaagatgaaggtttaaatgcaggtattttcacttctatgggcactctaaaacctcccaatcnnnnnnnnnnnnnnnnnnnnnnnnnnnnnnnnnnnnnnnnnnnnnnnnnnnnnnnnnnnnnnnnnnnnnnnnnnnnnnnnnnnnnnnnnnnnnnncttgcatgttaacatccccaggggatgaatataaccatgggtgtctgaaaagcactattgtagaacattcttctgtttgccgtgctgacagcagagcttgtctttaaagccagagagaaatgtcttcttcttgacttgggaccctttgcatcttctcttagaataacttccctggaaaacttcaattggatgtcttctgtctctttgagttggcagtgtagtcatcccctctgctaggggaggcnttctttgaatctcccacagtaggatttgggg

SEQ ID NO: 303765 - DNA, 420 bp, Homo Sapiens
  misc_feature (46)..(46): n is a, c, g, or t
  misc_feature (132)..(132): n is a, c, g, or t
  misc_feature (365)..(365): n is a, c, g, or t
  misc_feature (397)..(397): n is a, c, g, or t
ctatcaggaaaaaactttattcaagtagtacagaatttattatccngatatctcagaagaaattgagatcaaaattctttctttttacattccaaattgttgcagtccaatgcagaatgttgaccatacttnggttgttgtatccatcagcaattgctacaaataaatgcttcataacaaataactcctgaaactcagtgtctgaaaaatgatactttcttgctgctcctcagtctgtttatggggttgggctgaggcagggtctgctggatgttgggctggggctctctactgtggattaaaggcaggcaaggttgggcatgggtgggctgggctgagggacaacctccaccagtgttaactgncgggtgacttacccttcattctggtgtttctnaggtccctccggcgggcggggtt

SEQ ID NO: 303766 - DNA, 299 bp, Homo Sapiens
  misc_feature (287)..(287): n is a, c, g, or t
tgagtaaaagagtcattcaaagtacaagacagacaaatggattttaatgtagcagggtacaaaaagtttaatggtaaagtttcagattctgctctgcgcgaaacctttagaaaactactacctgttttggccaaaactatgaaaagtcagttttcgtgtggtattaaggaggagtatccacaatgatccaaagtgatcaaagtagtactacacatatgtgtgaaacaaggttttttttcatttacctcaaccaggaaggaacggtattcacaataggatttaatgcnggggtaaactat

SEQ ID NO: 303767 - DNA, 331 bp, Homo Sapiens
  misc_feature (274)..(274): n is a, c, g, or t
ctggccagtatcatggatttatgcatatttctccatacttctttgacctctttcccttgctccaaaagagtacattttaaagatgaatgataggatttaagctgcagcttggtttcatttgaacaacaacaaaaaatcagttcgtatacagggattgaatctgtgattttggcttccttttatacaatgctctaaccacatgagcctatcacattcaaatttatgctactcaggaacttttaagctattaacttttccatcctaatgtagtgtnaaatatgaaacatgcccctgggtgttttcccagaaggttaggcctcaggcaagtgga

SEQ ID NO: 303768 - DNA, 434 bp, Homo Sapiens
  misc_feature (76)..(77): n is a, c, g, or t
  misc_feature (311)..(311): n is a, c, g, or t
  misc_feature (366)..(366): n is a, c, g, or t
  misc_feature (406)..(406): n is a, c, g, or t
  misc_feature (420)..(420): n is a, c, g, or t
tgggcagacacctccttctcagcctttaataacataactgcttggctaggagggatagatttacccccagtgggtnncctcattaatggcacacattaaactaaggtgccaggtaacactacatatcattccactatcctcccactgtgtgtaagttataaaggttctaaccctgtgtacctgcccaaacacaattatggctacatcatggcaaaggagatgccttaacattcctagctgcaggtagcctcaaaccgggcgatgcaatcaatgccactttcccaaacattccttcctgtgttaaagaacanagcccggaaagtaatgggtttccacttttagcttgggaggtctgtcatggggggnataaggcccatatggttcccagtttggggcatttattaancatctttaggattnggaggccccccaca

SEQ ID NO: 303769 - DNA, 399 bp, Homo Sapiens
  misc_feature (47)..(47): n is a, c, g, or t
  misc_feature (356)..(356): n is a, c, g, or t
ttagacaggttcttgctctgtcacacaggctggagtagtagcacgancatggctcactgcagccacaatctcctgggctcaagcaatcctcccccttcagccttccaggtagctgggactatgggcaaacaccatcacacctagctaatttaaaaaggtttgcagagacagggtctccctatgtggcctaggttggtcttgaactcctgggctcatgggatcctccctccttggccttccaaagcactgtattaatagggtgcgggccaccatgcccgattccattttacttttaaatgaactttattaggaaatttcttccacctaaataatgtaattgttgtataaaagaacgnatttttaaaaggttactgtctttccctttataaaaaggggata

SEQ ID NO: 303770 - DNA, 373 bp, Homo Sapiens
gagcttcataccctgccactgattattaactaagtttatataatattctaaatcctttgttgtcatttcaacaatattcacagcatcttcattagcagagtgcatctcaaaagaaaccactttctctgctcatccatgagaagtaactcctcatccactcaagttgtatcatgagatatcatgcagcaattcaatcacatgctcaggctccacttctagttctcttgctattcccatgacatctgcagttacttcttccaatgaagtcttgaacccctcaaagttatccattgggagttgggaatctaattcttccaaactcttgttaaatgttggatatcttggacctcctcccatggaatcatggaatgtt

SEQ ID NO: 303771 - DNA, 127 bp, Homo Sapiens
tcagtacacatatcattgtttctcaatgagatgttattagtattctgggccaacgattcctccataaaatgctcccacatattttgttttttaaatccccaggtaagggtggtaccagccttgactg

SEQ ID NO: 303772 - DNA, 435 bp, Homo Sapiens
  misc_feature (365)..(365): n is a, c, g, or t
  misc_feature (384)..(384): n is a, c, g, or t
  misc_feature (389)..(389): n is a, c, g, or t
atttcgatacctttggtatgaaagctgttattttttagaagtccacttgacattttgcttcttgtcctcatcctagtagtatagcccattttgctcttcttaggaatatgccagaaaatttttcataattgaataaaacaatttcctgctggtcctctggctcattgacctattgggatttcagcttgggaccacatcatgtctgggtaattatttcttaagggcacttaaaggcaccgggtagtttgtttacttacttacttcgtgtaggttgttctcctaacatcccaatgaagtagggtacaccctactttgtaggactctaaaggattcttgggttatggctcattgggcagggcaaggantccattttatccataaggnatccnttaatacaggggagggaattaggtggcattcctaggggtttatcca

SEQ ID NO: 303773 - DNA, 422 bp, Homo Sapiens
  misc_feature (408)..(408): n is a, c, g, or t
catcaagtttttccttgagggtgggacagcttcagtcactaagcagcacacgtaggtggctaaaactctgataggaattgttttctttctggtcagaggaagcagggaaaggagccaaagaaagacagggagtcagagcaaactcctggagcagaaacagcaggtgaaggagctctccacttttatgtatgcacctacacgggtctcaccttaacctctgaatcacacatgcacaggacaaacccaaaccagtttaggcaaaggctttgcttttgataactgaattggggatttgaattcactgcctgcaaaaggcaaaacaatgtattaatccagccttacctgagtttgatttgcctgcttaaaaccaaaggtaaatgcctttcaccagggttttttttaaggggnccccgagtcttttt

SEQ ID NO: 303774 - DNA, 222 bp, Homo Sapiens
  misc_feature (85)..(85): n is a, c, g, or t
gaaagtttgaacatgtagaagctgagaagcagggaggtaaagtatgctggccgaatgtgattgtgagtcacagaggcagagcctngcccagggctccccatctccaaggccaaggttctttccctcacactttcagctgacatgtccaatgctccctgctgccctgcagaaaaggtcgttccccaccttccctgctgctttagctacaacataatcagagag

SEQ ID NO: 303775 - DNA, 341 bp, Homo Sapiens
  misc_feature (134)..(135): n is a, c, g, or t
  misc_feature (244)..(244): n is a, c, g, or t
gagaagggtctatattaccttcatgtagtaggactgacatgagggtgctagatcaggtccaacaatgattagacagaataatagggtaatagtaggcatttgtttggtattgccatattccaagtactgagcanngtgcttgctctatattatctcatgtaatcccaataataaccctttgggaaatggcatttgtattcaggcatgatgtgattctagcagagggggattaagtagggaattngtgcaaaggtataagtaggattgaaggtgcaaaaagcagagagtggtgtaactcaagagatctagctgcttttactgcctcttggacttgaaggaat

SEQ ID NO: 303776 - DNA, 270 bp, Homo Sapiens
  misc_feature (15)..(15): n is a, c, g, or t
  misc_feature (51)..(51): n is a, c, g, or t
  misc_feature (64)..(64): n is a, c, g, or t
  misc_feature (73)..(73): n is a, c, g, or t
  misc_feature (78)..(78): n is a, c, g, or t
  misc_feature (129)..(129): n is a, c, g, or t
  misc_feature (148)..(148): n is a, c, g, or t
  misc_feature (184)..(184): n is a, c, g, or t
  misc_feature (241)..(241): n is a, c, g, or t
gattttttggcccancatctcttgctccaatatcaaagggactaacacagnaaagtgaggggangcttcactnctgantgcaaataaaaaatagcaatgaatatttgcttccagtagagcactcttccntatatctacagtcaagaangaggctgctaatgaaattggcaccagtgggtttatngtaatggagacttctttatgacttgctggttctggggctgaattgtggtcacccccnaaatttgtatgttggaaggcactaacccc

SEQ ID NO: 303777 - DNA, 404 bp, Homo Sapiens
  misc_feature (25)..(25): n is a, c, g, or t
  misc_feature (122)..(122): n is a, c, g, or t
  misc_feature (169)..(242): n is a, c, g, or t
  misc_feature (291)..(342): n is a, c, g, or t
  misc_feature (352)..(352): n is a, c, g, or t
  misc_feature (386)..(386): n is a, c, g, or t
catatccaagggtatgtgtatattnccatcagttaacactggctcactaaattaataagggaagtggaagggagggaacagtgtggagaaaatctcccaggttattctaataagcaaccttnttaagaggtactaagttaattgatgtggttactacatctgaaaccannnnnnnnnnnnnnnnnnnnnnnnnnnnnnnnnnnnnnnnnnnnnnnnnnnnnnnnnnnnnnnnnnnnnnnnnntagagattctgatgtattagtctggggcttggtctgagcttacagagcnnnnnnnnnnnnnnnnnnnnnnnnnnnnnnnnnnnnnnnnnnnnnnnnnnnngagacggggngagcagatatgcagaaagaatggggaaaaaaagnttgaaaacaagatgtatt

SEQ ID NO: 303778 - DNA, 274 bp, Homo Sapiens
  misc_feature (148)..(148): n is a, c, g, or t
  misc_feature (176)..(176): n is a, c, g, or t
  misc_feature (182)..(182): n is a, c, g, or t
  misc_feature (222)..(222): n is a, c, g, or t
  misc_feature (248)..(248): n is a, c, g, or t
attcattgcaaacagaattcaaatgtcaataaatggcaatttgagaaactgagacattttaaaagacaacctgatcaggatcaggtaatatttcagtaacataatcaataaattacaataacatccaactgaatagaaacaaacaaanacagaaaataatttcaaatgggctaaangcaagntatacattctattttttctaacttttgaccacagtctaangtttccttttcatctttctctagggnactttcaaaatgcttatttattaaca

SEQ ID NO: 303779 - DNA, 163 bp, Homo Sapiens
cgaacaaatgtccttgtgacagctgagcatcaacagcagcagtaagaacctgaacttttagcaatacaatgtgtcatgtgacaaagctttctccatgggcagctttggtctgcagtatcatgtcatttttacctatatgaatgtaaacagtcagtgtgattcc

SEQ ID NO: 303780 - DNA, 177 bp, Homo Sapiens
ggagtatccataattggttaagcaagatgaaagtataaaccattaaggaaaatgaataatttgtacattaaagtgaaaatcctgtttctcaaaagatatcataaagccaatagcccaggaaagtatatgtggagcaccagtaactaacaaaagacttgcaaagaacttctaccaatt

SEQ ID NO: 303781 - DNA, 321 bp, Homo Sapiens
  misc_feature (253)..(253): n is a, c, g, or t
  misc_feature (277)..(277): n is a, c, g, or t
  misc_feature (282)..(282): n is a, c, g, or t
  misc_feature (297)..(297): n is a, c, g, or t
  misc_feature (308)..(308): n is a, c, g, or t
gagtagccaccacattttgtcccaccccacttttataacagaaaatgttattgaacaagcaaggaaaagtgctaagaggatgttctcattcccaaaaggcagaatgactggatctgggaaggacaggcaagcctcacagcctgagatgtgctgaacaaactaaactgtgctcagagttcacccaccaccagctttagctaacgccacagtctgctggctcttatttcaatgtgcctaggttttgatagacccngtgaggccttttacatcctgtttncaggnttaaattgtattccntcaaaaaattncattgttgggagg

SEQ ID NO: 303782 - DNA, 341 bp, Homo Sapiens
  misc_feature (125)..(125): n is a, c, g, or t
  misc_feature (241)..(241): n is a, c, g, or t
taaacagggtgaaacaagacgtgcatgttaatttaagatatgataaaaggttaattcggaaaacataggaggtggagaaagatattgggttctacatatcatgacatcaaaagggaatgagaganaaaaaaggcagaggctaattatcccttttgagaaagctttataaaagaccaaagaaaagggtatttaacaagaccctaaaatttctatcaggataaaaaaagcaaacgtggcaggntggggacagggtatcactgagattgaggctttccgtcccagtaacagcaaagatttgctcagttgctgaacagctttcaatatagtttccatacccatag

SEQ ID NO: 303783 - DNA, 393 bp, Homo Sapiens
  misc_feature (27)..(27): n is a, c, g, or t
  misc_feature (98)..(98): n is a, c, g, or t
  misc_feature (237)..(339): n is a, c, g, or t
gaccatctaccccattgagccctgggnatttccagtatttaaaggacagaaagataagaaggtttcagcaaagagaatgtgaaattgtggccaacaangtaagagaaggataagctctgagcactttagccttcaccttactctatttcctatatgtagaattattatatattccccctgttgcttttctaggcagaccagagcaatgctaaaaggtctgtctatggggaggagaannnnnnnnnnnnnnnnnnnnnnnnnnnnnnnnnnnnnnnnnnnnnnnnnnnnnnnnnnnnnnnnnnnnnnnnnnnnnnnnnnnnnnnnnnnnnnnnnnnnnnnactctggtgaccaacaccctaaatatcctgggctttgatcactacacattgatg

SEQ ID NO: 303784 - DNA, 480 bp, Homo Sapiens
  misc_feature (116)..(125): n is a, c, g, or t
  misc_feature (404)..(404): n is a, c, g, or t
  misc_feature (417)..(417): n is a, c, g, or t
  misc_feature (443)..(443): n is a, c, g, or t
agatttaaattagttataaagcatgtgtacatatgtgcctatttacacatgcgtgagaaaaaaccagcaggaaatatactgaaatatgactagtggttgggtggtaagcttcttannnnnnnnnnaatactttcctattatcttcttactgtagcatggattacttcccaaatcaagggggaaggtagatgctatctttaagacagtcattccctgtcttttcagtcctctgctgccaccatacctaactccccccaactccccttcacttggtaccatgttgagctgagctctaggtatcttccaggcatgggcctttaaaaagatcctttttccttgtacctcttgtactttcatggtaatcggggccatctgtggaccttgaaaggacaggttttctcccnggttattatgganatttcagggaaggggtaattggatgnccaggggacttacccacctggccctgggggccccctt

SEQ ID NO: 303785 - DNA, 111 bp, Homo Sapiens
  misc_feature (24)..(24): n is a, c, g, or t
  misc_feature (41)..(41): n is a, c, g, or t
  misc_feature (46)..(46): n is a, c, g, or t
  misc_feature (50)..(50): n is a, c, g, or t
  misc_feature (52)..(52): n is a, c, g, or t
  misc_feature (54)..(54): n is a, c, g, or t
  misc_feature (56)..(56): n is a, c, g, or t
  misc_feature (60)..(60): n is a, c, g, or t
  misc_feature (66)..(66): n is a, c, g, or t
  misc_feature (68)..(68): n is a, c, g, or t
  misc_feature (76)..(76): n is a, c, g, or t
ggagaaggtcaaggagcagcaccngcagattggcaagggtngcaancatnancntngccngggggngnccaagaancttggaccaccccctgccaagggtcccttccaaca

SEQ ID NO: 303786 - DNA, 307 bp, Homo Sapiens
  misc_feature (144)..(196): n is a, c, g, or t
  misc_feature (293)..(293): n is a, c, g, or t
tcaggcattagattcttcttgtaaggagcacacaacctagatccctgggatgcgcgtttcacaatagggttccagctcctatgagattcaaatgccatggctgatctgatgggaggtggaggtccccagagtagccccatgccnnnnnnnnnnnnnnnnnnnnnnnnnnnnnnnnnnnnnnnnnnnnnnnnnnnnngagatgggagtcttactctttcacctgaggctgggagtgtaggtagtgcgacctccacttcactggcaacctctgtcccccgggttccaggggtttntcccgcctcagcct

SEQ ID NO: 303787 - DNA, 221 bp, Homo Sapiens
  misc_feature (166)..(166): n is a, c, g, or t
  misc_feature (173)..(173): n is a, c, g, or t
  misc_feature (178)..(178): n is a, c, g, or t
  misc_feature (184)..(184): n is a, c, g, or t
  misc_feature (191)..(191): n is a, c, g, or t
gggagaaagataaaacttaaatcctactgtctgttttcaagtgacaacaaacttttattatgtttcagaatttggaaaacttaggtctgcaaataaggaagtttgtcataacatctaaggcataaacactcacctttattgtttaatagagcatctgaggatattngatgganaattnttccanttcttanttgcggcgccaaagtttttaccccaaacag

SEQ ID NO: 303788 - DNA, 307 bp, Homo Sapiens
  misc_feature (80)..(80): n is a, c, g, or t
  misc_feature (82)..(82): n is a, c, g, or t
  misc_feature (149)..(149): n is a, c, g, or t
  misc_feature (195)..(195): n is a, c, g, or t
  misc_feature (286)..(286): n is a, c, g, or t
aataaaagaaaagaatagtctctgtggaaacttatgttggaaaggcttagttacagtgcagattggacagaatatttttntntttagttgctgtcaaatttaggctaggtaagatacctgtgcacagttgaatgccataatcgtaaaantctaggattctgctttagtttggcttgcaaaattctggtataatanactcgatgtacccttatccagtttcagggattatcaactcacagccaattttgttttctctcttccccaacccaggtaatttcaaaacaantcccaggatatcctatgtttt

SEQ ID NO: 303789 - DNA, 382 bp, Homo Sapiens
  misc_feature (195)..(195): n is a, c, g, or t
  misc_feature (324)..(324): n is a, c, g, or t
  misc_feature (343)..(343): n is a, c, g, or t
  misc_feature (367)..(367): n is a, c, g, or t
gaaatagtagtaatggcctaagaccatgttcagtttgacaagctttatatactgtacataatttcattgtaacccttaaaaatagagccaataatagaatttccacagtctcatttatacggttaaagcattattgctattatgtaggtcacggatgtttataatactaaagtattttaaaatgtgcaagtaganaaaacagtagaaagtgatgcatgcatatttatatataagtaaagcaggattgtgctgtttttgcactttataatttcaattaagttgcggctttttactacaagttaactttattagtaaaaggagcanattagacctaatttcattngattctcggttaaggtgagtcagnctgcatgacttgtgt

SEQ ID NO: 303790 - DNA, 388 bp, Homo Sapiens
  misc_feature (180)..(180): n is a, c, g, or t
  misc_feature (282)..(282): n is a, c, g, or t
  misc_feature (286)..(286): n is a, c, g, or t
  misc_feature (350)..(350): n is a, c, g, or t
  misc_feature (373)..(373): n is a, c, g, or t
aaaagtcagaagagcatacatttaagtagtatctagggcaatcaatcagcatccttggcatctgatagggataaaaattattaaattttccaatctaattagaagtgatggtgattgtgcattaagttgtggtattagcatcatcattatctgaatgataaccatggtcctcatggactnagcccaggcgccctgacagctcagcacatatgacaaccccagcaggcaggtgcgtatcatgaccctcatcttccagatgaacaccggtgatcaaaaatacgnaagncgatgtgacttcaggccacacagccagtaaggatggcacacacaaaatgttcagcctggagttnctgcttcccacccatggtttatncacaagggttgtttt

SEQ ID NO: 303791 - DNA, 464 bp, Homo Sapiens
  misc_feature (366)..(366): n is a, c, g, or t
  misc_feature (392)..(392): n is a, c, g, or t
  misc_feature (406)..(406): n is a, c, g, or t
  misc_feature (419)..(419): n is a, c, g, or t
  misc_feature (429)..(429): n is a, c, g, or t
  misc_feature (439)..(439): n is a, c, g, or t
aatgtagaaagagagatcaaaatatcttgagttataaattcaaatagaaagaaaattatgatgagtttaggccaggatatggtgaaactggcatcgtcatatgccaggttattgagtaaccttcctcaaaagttctttactatctttgaaccactacaaatgcataatcgttcaacagtgtcaaaaagtatttatttgaatgtggtgggagaatgaaacttcttctttgggttataacctgggagtatgcttccagatggtgattgtgcccatttgtacaaataggaaagctacaagaccagtcttccgagcccatgtctgtgatctgcctatgtaaggaaggattagttttgtaataggagtttngcttccaaggggaatctctatgggcntagtatttcttacntcccttttatacntctgggacantgaggacacngagggtttaggttaacttgccccca

SEQ ID NO: 303792 - DNA, 350 bp, Homo Sapiens
  misc_feature (46)..(46): n is a, c, g, or t
  misc_feature (64)..(64): n is a, c, g, or t
  misc_feature (96)..(96): n is a, c, g, or t
  misc_feature (265)..(265): n is a, c, g, or t
  misc_feature (304)..(304): n is a, c, g, or t
cagcctggcctggaaacagagcacgtgcttgaggatggcggtgttnggggacaggatgtgagcnttttgtgtggggctgctaggacaggcctggtngggtagggggtgtctaagtcagtttacttgtttcacaggttcccaggcccacccaggtacctagaattggccaccaggatgggactagaaatctggttttgcatagaaatggctagcagcaggcaccatgccactgtccactctctgcccgcgtctgccccagcacttngcacagcaggacagaagcagagatctgaacccacatctnacctgggcttgctcagtcaacttcactctttcacaaagcttagaaa

SEQ ID NO: 303793 - DNA, 133 bp, Homo Sapiens
ccagttcacatatatcttttctaaaaacagagatgtaaaaattagccattttcaaaactaatatataacaagttccaggaccacaataaaaaatttagtattttaagcatctcaggttaaaaagatactcatt

SEQ ID NO: 303794 - DNA, 205 bp, Homo Sapiens
  misc_feature (137)..(147): n is a, c, g, or t
  misc_feature (155)..(155): n is a, c, g, or t
atgaatgtctttaaagtcagtatcagcagcaaagaaggtactgcacatacgatgtcagggggaaaacctttttaccaggcacagaccaccaccaaagcccctctgcctaaatctgtatttgaaaagctaattaaagnnnnnnnnnnnctttgggntcttgaaatactttgcctttgaaagctctttgttaaaatgaaaatgcctt

SEQ ID NO: 303795 - DNA, 195 bp, Homo Sapiens
attattgaggtagttgtgaaaaatgcttaccagttgaggatctcttttatttgtcttaaccgtgaaactaattttgagttaaaaagcccatttggagttcttaccacacctcaaagctgtctgttttaatactttgagaatgtgaggaagtgtatttgatagactaagtctatcaaatactctttagggacttaa

SEQ ID NO: 303796 - DNA, 399 bp, Homo Sapiens
  misc_feature (346)..(346): n is a, c, g, or t
  misc_feature (387)..(387): n is a, c, g, or t
tcacccacccttaaaatataaaatttaaagattaggcagtattactaatggccagtacttataaagtgacatgtaaataggacaagagtttaacaaatgtaaacatctcactaaattttagtacttcacttaccaacccttggatgtttagctaataattgctaattataactatgcatttgtttgcttatactactctggcaggaacaggcctctctcagcttactcagtaggccaagttagagattctgggttgggccctagtttttcagggatgtagtattgggctcattgggatttaaaatcttaggggaaaatctgggtgggagacactttgcctccaccnggcagcctgctggtgctgggatgtgttaggtgaggggatgnagacagggttag

SEQ ID NO: 303797 - DNA, 438 bp, Homo Sapiens
  misc_feature (360)..(360): n is a, c, g, or t
  misc_feature (373)..(373): n is a, c, g, or t
  misc_feature (382)..(382): n is a, c, g, or t
  misc_feature (424)..(424): n is a, c, g, or t
acccaaggagcttttaaaaacacagatttctggtttgggaaccagagctttagagtctatccctcgctagactctggccaccccacaagataggtctatcttcagaccttcagataggtctaatttgttttagcagtttatttcctctgtatttttttgtcttctccgtagtctccaacttcagtgcacaaggctcataaactcataaagacttctacagccttgcctcgaactgtccttatatgcttctgagccccgtattctactcttcaatctcttctcttcggactcttgtttctgtcctggcttctccttttccctctgagggtataggaggcctaaaaattggatttcaaggantcaagccaggggngcctgattnaggattggcatgtaggcaggggcaagttttgtccccgttccngttgttcacatccc

SEQ ID NO: 303798 - DNA, 447 bp, Homo Sapiens
  misc_feature (346)..(346): n is a, c, g, or t
  misc_feature (423)..(423): n is a, c, g, or t
gcaatagctgagttgagaagacctcaaggatatttaaaggaatttttctgctactgaaaatatattgaagaatcgctgcaaaatttttccattccatcccctttcccccacccccgttttccacagcaagaatcaatttggagggagatgtgtaaactagaatttttaaagaaatagtaagacttcaggtgttttctacccagggatagcctacataattgagaaagaggagttcctgctatttttctgttccagagagaaatgtatcaaatcttttttaggaattccactgggagttttgattctcaaagtgggaaataccccatccctttggggtgcccggggnaaaggaaaacttcaggcttcacagttttcaggaaatttgggactgttttttttcccccctctgtctttctattttgnaacgtcttcacaatttaaagagcc

SEQ ID NO: 303799 - DNA, 370 bp, Homo Sapiens
  misc_feature (103)..(123): n is a, c, g, or t
  misc_feature (136)..(320): n is a, c, g, or t
tctttagctgagggtgttggggtttgccttcttcctcagaaaatagttcaggggaagagatgcatggttaatttggttcctaactggtcctctatttactggnnnnnnnnnnnnnnnnnnnnngagacggagctcnnnnnnnnnnnnnnnnnnnnnnnnnnnnnnnnnnnnnnnnnnnnnnnnnnnnnnnnnnnnnnnnnnnnnnnnnnnnnnnnnnnnnnnnnnnnnnnnnnnnnnnnnnnnnnnnnnnnnnnnnnnnnnnnnnnnnnnnnnnnnnnnnnnnnnnnnnnnnnnnnnnnnnnnnnnnnnnnnnnnnnnnnatttgaactcgaccttcgcagcctagtgctatttttaactagggggttct

SEQ ID NO: 303800 - DNA, 342 bp, Homo Sapiens
  misc_feature (123)..(136): n is a, c, g, or t
gaaaacagcaaagtgataaataatatggcaacagataataaaggaaatacacatattaaactttttgaatccaggatctttgaaaatagaaaaagcagtaatagctttttgcatttctgaggnnnnnnnnnnnnnnacaagttactctagtttgtgtaccatataatcctgttatcttatctcttcctgcctaacagggattcttgtagcatttctagtgccttcttttgaactatgaatatcatctggcccccgggataaagacaaggctaggcaagtcaggattaggcttgtgaaacagggacctctagggatgactacaggtaaacaataatttcttgt

SEQ ID NO: 303801 - DNA, 174 bp, Homo Sapiens
tgggacactatccacaaaataaggaagcatagaaatcactgtccctaaaaggcatatttaacatggtgaccaacaactcattctgacctgcctctccaagcagtccaacccaggttttatcaagtggtgccagtgctaacgttcttgtgggtggaactggcactgaatgtaaag

SEQ ID NO: 303802 - DNA, 118 bp, Homo Sapiens
  misc_feature (103)..(103): n is a, c, g, or t
acataaagagctttattttttttctagctatgtattatatctttgtagggatgaattttaatttatataaccagtctccctattgatagatatttagggtttntcccctcactcaccc

SEQ ID NO: 303803 - DNA, 106 bp, Homo Sapiens
  misc_feature (67)..(67): n is a, c, g, or t
aaaaagaactattttcccacaaatatttgagtataaatgcggttcatttatcctgtctttgggcatnctcgagtttgaggaacaactcctagcccagtgcctcccc

SEQ ID NO: 303804 - DNA, 257 bp, Homo Sapiens
  misc_feature (183)..(183): n is a, c, g, or t
  misc_feature (205)..(205): n is a, c, g, or t
  misc_feature (240)..(240): n is a, c, g, or t
agatatttacactcttaaacaattaaggtaaatttttatgagcaaaatttaaaacctaattcctttctctctacttaatttctccgaaatttgaaaactatctgtcggtattcttaatctatgggcaatataggttatttacatagggttcaaccaggaatttgttctatcttataggcgggncacaattgggagacactggggnattttaccagggctttgcctaggaatggacatctncagattggcctgaggtt

SEQ ID NO: 303805 - DNA, 381 bp, Homo Sapiens
atttctaactatcatttaccaggggcactatgccactttcatttcctttgcttcattctctttaatgattattaccatgttcaagttctctaaaaagtaatatatcctggtggtgtatttttaataatagtctgcagatatttccagtggtaacttttccaattttatattttattattctgtaatggaagtaaggccattagtgtttattataattttgtataatgctttaatgtatcttaaataatttcccccaagtaattttaattatttgagtgtatgtgaaattggctggaatggggaattgtatctagggcattcttaggaactcataacagtgctaggaagtaggacattaatttatgtttgccaaaaaaggga

SEQ ID NO: 303806 - DNA, 105 bp, Homo Sapiens
  misc_feature (53)..(53): n is a, c, g, or t
ttgagtgttttcctcccctttggctccaaggttacacattaacccctgtgganctcttaagtcaaccaaagcccagtcggtttctagatggaggctcactctatc

SEQ ID NO: 303807 - DNA, 221 bp, Homo Sapiens
  misc_feature (46)..(46): n is a, c, g, or t
  misc_feature (105)..(105): n is a, c, g, or t
  misc_feature (123)..(123): n is a, c, g, or t
  misc_feature (135)..(135): n is a, c, g, or t
  misc_feature (138)..(139): n is a, c, g, or t
  misc_feature (173)..(173): n is a, c, g, or t
  misc_feature (190)..(190): n is a, c, g, or t
tgtaagacgtgctcaggaatactcagccaatgacactataggattnccggatttagcaaaactgatgttgtaaagccgcttgaaacttctaacgtgtgtagaganttgtatgcactttaacancagatacatttnctnncctctccgaagctgcatttgtgcccatccattcntgaccacatgcctgtanggctgctgcttgctagggagcctgggatgtc

SEQ ID NO: 303808 - DNA, 209 bp, Homo Sapiens
  misc_feature (62)..(88): n is a, c, g, or t
ataataacataagaaaatatttaaagtactatatatatggttagaactatacgacaataggnnnnnnnnnnnnnnnnnnnnnnnnnnnacaaaccttattttaaaacaccgaaaaaggtgaataaaaataccatatatcttctggtccgaagtaactgtaaaacataaggaacaaaatcccaaaaagggtaacaggtaaagtagccaca

SEQ ID NO: 303809 - DNA, 124 bp, Homo Sapiens
  misc_feature (63)..(63): n is a, c, g, or t
  misc_feature (94)..(94): n is a, c, g, or t
gtttgaggccaccgtgcctaggccccttgaacaaaatcctaaaatccacaaagttctaaaggnctaaagttttacataacttatttgacggggnaaaacctggacctggaactggaaatggcat

SEQ ID NO: 303810 - DNA, 452 bp, Homo Sapiens
  misc_feature (255)..(255): n is a, c, g, or t
  misc_feature (345)..(345): n is a, c, g, or t
  misc_feature (356)..(356): n is a, c, g, or t
  misc_feature (369)..(369): n is a, c, g, or t
  misc_feature (389)..(389): n is a, c, g, or t
  misc_feature (398)..(398): n is a, c, g, or t
  misc_feature (419)..(419): n is a, c, g, or t
  misc_feature (425)..(425): n is a, c, g, or t
gaggactaacagcaataataaacaggaatttttatctttaaatctcttcataactttaattagttaatctgcacaaagctaataggagacaggtatggtgggagttatctccatttcaaagctttacagttggtccaaggtgacaggattaagttttcaaactggcattagaatgcggagaccattgtctgctcaactgtgtttactagtttgcatggctatgatgcctggccaagcacacagacactattgganaaagagattatagatacagtccctttaattgactaactttaaaattgagcaaagtgaggatagggctgtctttgaaattaggtcaaaatntctcaaacaanatgttatcagccncttaaaaatggttgttaccntcttggttnctttcaactgtttgaagtttnaccacngctggacttgcacactgttcagcaatt

SEQ ID NO: 303811 - DNA, 417 bp, Homo Sapiens
  misc_feature (374)..(374): n is a, c, g, or t
  misc_feature (387)..(387): n is a, c, g, or t
attaataaaccagtctggagcccaaaccttaccaggctgtcaaactgctggcagaaagctaaatgtaaggccaggttgaagaaggcagtcagattgcagggagttgagcaggtcattcgaccctcactattattgctccaagttgaacatactgacccttttgaaatgggcaaagtgggactttaagaatctagtgattgaaaagtcaaaggaaatctgataccatcttcttttgatattgcagcatttcctgtcacaactcctgatttagttttgtaatgctagaactattcctatttccttcttggaaaattccctccacgtcctaggagttacttcctcaggtcttaaattaggctaatgtttacaaaggnaagggtttaagtnaggacgaagatggacacagcagagttttcc

SEQ ID NO: 303812 - DNA, 177 bp, Homo Sapiens
  misc_feature (125)..(125): n is a, c, g, or t
  misc_feature (136)..(136): n is a, c, g, or t
ttcaaagttatcagaatcctgcatttaaaaacacgtgttagagttctatagctgattataaaaccaccttctaaggaggatcaaaacaagacaattgtccatagatgacaaaaggttttagggangccatagtcanagatacaattgacaaggaaatttgttacctctgtggcacac

SEQ ID NO: 303813 - DNA, 454 bp, Homo Sapiens
  misc_feature (278)..(278): n is a, c, g, or t
  misc_feature (292)..(349): n is a, c, g, or t
  misc_feature (383)..(383): n is a, c, g, or t
  misc_feature (431)..(431): n is a, c, g, or t
  misc_feature (444)..(444): n is a, c, g, or t
aaaatacaaagatattactgcacagttctttagcctcaaaccttgaaattggatttgccttggaatccaaaatattctgaattttaaaaactgtattagtggtaaatactatatattatgtaacatttcctagagagatctattgcagaaccctataatcaaatatatcagcaattctgaattgaaaaatactaatatgcatttcagttcaggtcaggttttaccgtcaaataagttatgtaaaactttagtctttagaactttgtgggattttaggnattttgttcaaggnnnnnnnnnnnnnnnnnnnnnnnnnnnnnnnnnnnnnnnnnnnnnnnnnnnnnnnnnngagggatccagttgagcccagggattccaaggtncagcctggggaagtcaaaatgaggactccgtttactacaaaatattantggaattcagccnggtaggggtg

SEQ ID NO: 303814 - DNA, 380 bp, Homo Sapiens
gaaggatcttcttgggtggcagtacagggatgacaaggaagggaccaaatctcagttgttcacatttttacttagtttggattccaaataatggggcttctcataaaagatttggaccctgccccgaggcttttgtaataaatttggccgctttgtttttttccctaattatttcattcgtaaaagtcttatcttcccaataaagatggtaactcctctggactgggtctgcttttcgcattttccttcttttatataccaccatggtatagaacttatttttgcttaataaacagtttggacatcaggaagagacagagctgtatacaataggtagtttacagtcaaatatttactgctttaaaataaggcagaattgg

SEQ ID NO: 303815 - DNA, 280 bp, Homo Sapiens
  misc_feature (185)..(185): n is a, c, g, or t
  misc_feature (212)..(212): n is a, c, g, or t
  misc_feature (235)..(235): n is a, c, g, or t
atatatgaacaagtcataattgtaatactgattgtcactactgtgatgagataccaaatgcattttttaaaaatctaggatttttcttcagcataacttggactttcttcactaaaatagtacaacgtatttatttaaaataaaccttactagagactagtttaacttcaactacaatgaatttncagttcatattagaaatatcaaaatgncctttaaattcatatttgagggnctgcttaagctattttgtaaaatcaccttctagaacaaaaccttg

SEQ ID NO: 303816 - DNA, 105 bp, Homo Sapiens
tgacacacgcacccggctagtagagatatttaaaagggcaaacaatgggatgcttgagtctgcaaggggggctcataggtaaacatcaatgaggcataggtaccc

SEQ ID NO: 303817 - DNA, 329 bp, Homo Sapiens
  misc_feature (57)..(95): n is a, c, g, or t
tttttaaaattaatgacctaagcggagggaataattataagtcaatagcagagagannnnnnnnnnnnnnnnnnnnnnnnnnnnnnnnnnnnnnnagagattgggttaacacctctagccaaaattgtttggttttagggaggctaacaataacctactgaatttggaaaatgcaaaggtaaaaaatgtatatagactgcctgctgaactggttaagtactactgcttctggggaaatactatttcaaaattctatggtattataataataaatttggtaaggacattcattattctaccctcctaatggaaaactttccgggaggtct

SEQ ID NO: 303818 - DNA, 409 bp, Homo Sapiens
  misc_feature (297)..(297): n is a, c, g, or t
  misc_feature (326)..(326): n is a, c, g, or t
atatggcaaaaactcagtgagttagcaaacacgtacactgaatacagcagaaggacagtaaaacagtcctccaaaatataataaggtaccacacacaccttcgacctacttcctgagactttgtaagttacagtggtgtttctttggctgaagtagctgctactacccttgacctcttttcttacctggttctttaccagaacgctttccaaaaacatgtcacccaacaaacaaatgctgtcaataaacatcactgttctcctaggcctcaactaacagtattgaggttagaggganttatgactggggttggggagtttgcaaantacattcagagggttactcaagcctccccacacaaggaaggcagggccatggggtttacaattaaaatttaggccaacggttt

SEQ ID NO: 303819 - DNA, 440 bp, Homo Sapiens
  misc_feature (51)..(84): n is a, c, g, or t
  misc_feature (153)..(269): n is a, c, g, or t
acattttcagaacttaatgttggttgacttcattttctattgtacatgtcnnnnnnnnnnnnnnnnnnnnnnnnnnnnnnnnnnagagagagagaagcacatatttcccaacagcataacaagtgtaattttatgggaaaaagtatttagacnnnnnnnnnnnnnnnnnnnnnnnnnnnnnnnnnnnnnnnnnnnnnnnnnnnnnnnnnnnnnnnnnnnnnnnnnnnnnnnnnnnnnnnnnnnnnnnnnnnnnnnnnnnnnnnnnnnnncaccacacccagccacagcagcgtcttgtccttacttttaccactactatctactgaaaatctgggagatattcctttggacttatcttgttctttgggaatttgggtagtttgggggtttgggcatttggggatgggagattaggagaggggtttgaggaaaagttagtg

SEQ ID NO: 303820 - DNA, 437 bp, Homo Sapiens
  misc_feature (353)..(353): n is a, c, g, or t
  misc_feature (362)..(362): n is a, c, g, or t
  misc_feature (415)..(415): n is a, c, g, or t
attcggcacagcaattattaaaaaataaaatttcaaaaatgaaagattttgaatattaaacatatacctattattcctatagagatgatagatttagaatacataaagtgaaatatagtttccctttaggtagtaaataagtgtgtcttaaggtgattgcaataaaagtatagttatcatgatgtaaatatatcccaaaataataaattcataaatgatttttatggtgattagaaactgattttattcagtcagttccctttgtattctagggcaaagtgcctatttctacacatggggatcacattcattcctcaatcaactttgagggggaaggataggaatattctccncatggaaanataaagaaactggtgggtaggagtgacttgttccccattgattctccgggggnttaatgtggattaatgtgatac

SEQ ID NO: 303821 - DNA, 449 bp, Homo Sapiens
  misc_feature (284)..(284): n is a, c, g, or t
  misc_feature (385)..(385): n is a, c, g, or t
  misc_feature (390)..(390): n is a, c, g, or t
  misc_feature (404)..(404): n is a, c, g, or t
  misc_feature (424)..(424): n is a, c, g, or t
  misc_feature (437)..(437): n is a, c, g, or t
aggaaggtaaaatcagcccttaggagagaggtctcagcctccctttcccagatctcccagtgagttttaaaggaagcagggagcccagagtgctaagttcttacagccagaaggaagcttatagatttctgaaaaccgcccctttgtttttaaaaagatcaacacaatttgactttctcaaggtcaaaacgaactagaatccagatctgctcatggcaaaaatgggggtgttctgagaattccagctttgggccgcactgtacagcagtctgggatagagtgtngatctgaggaagggaatggggtctggggttgttccaccccttccgagttccaaaaagaggggaactggttttcttgggttcttcagcccagcaggcacctnttccngggtttttggtccnggggcttgcagccaagtggntgtttcccaggcngagtttgagaca

SEQ ID NO: 303822 - DNA, 422 bp, Homo Sapiens
  misc_feature (318)..(318): n is a, c, g, or t
  misc_feature (373)..(373): n is a, c, g, or t
  misc_feature (381)..(381): n is a, c, g, or t
  misc_feature (409)..(409): n is a, c, g, or t
tgaaagtgtaaaccttttatttcactctttcaaattttgttccataatgttcacattagtgtagcagtacatttgttgacacatattttcattgttcaatacatataattatggacacatgctcaacaaatatttttgtaaggaaatagcatcaggtttggagaccatgatctagataactgagtcaacatttcgctcctcatgcattcatagctatcaagccgtctttcctttttcccccttacctaccatatcctgacttctactcctagtttctccaagagggacaaaacatattaagatgcggtggggtcaggntgtggcaggtggggtaatgtggacaccccggctaatggaggtctgaggaggggcngggggttntctccttcagcttttcaaggtttacagnctggaggttacac

SEQ ID NO: 303823 - DNA, 434 bp, Homo Sapiens
  misc_feature (404)..(404): n is a, c, g, or t
  misc_feature (414)..(414): n is a, c, g, or t
tggaagttgatggtgtcttttgaattctcagctttattaaatgcccaaaaaagaattgacccaaacttgatgaaagcaccctctccccaactggattgagttgtggtctgcttcagcacttggaaaaggagcggccaactggtgctccatgggctgcatttcgcccgcagatattttgtttggcccacacggtatttgaaaaaatattttgattagatgccagtgttgaaaaaccggggattgcacataaaaataggggatttctgactttgcttaggaaaatccaaggatctaggccaccttggggccccacctcctggcatgggcagcttactggggagttcaaaacccaagggctgggccctggaggcaggagggttactttccttttagttggggaacantccatttggntctgttcccacagcccccgc

SEQ ID NO: 303824 - DNA, 414 bp, Homo Sapiens
  misc_feature (204)..(204): n is a, c, g, or t
  misc_feature (206)..(206): n is a, c, g, or t
  misc_feature (214)..(214): n is a, c, g, or t
  misc_feature (238)..(238): n is a, c, g, or t
  misc_feature (258)..(258): n is a, c, g, or t
  misc_feature (336)..(336): n is a, c, g, or t
  misc_feature (394)..(394): n is a, c, g, or t
aaattagtgctagatggatgatgcacaggggttctactactgataaaaacactgaccacaaagattcacatatagactttgagtaggatggttttatgaacaatgagagtggttaaagcaatccttctacattattgcaatgcttcataaaatgtaactacattaataaatttaaaattttaccatttaatctatttccttagnangtttatanggggagactgctttatatttgggncttgcaccttatattctggncatacatattaacttttcctgtaaatgacccataaagggataaagttctccctcactcttcccctcccccattaccgntggacccattattgtggcaccaactgtgtggttctggtttttataacagttccacttnttattttctttagggggttt

SEQ ID NO: 303825 - DNA, 445 bp, Homo Sapiens
aatatgtggcagggttaaattgatttataaactccagggagtccagctgatgcccagaccagatggatcacttcacatctgctcagggtggttcctccagagccctgaactggtcacagacattaagctggaagtctgacattggcttgtcctgtgagcttgcctttttgggtctgagccttcccattagtcaatgcaaaaaagtgttgagctgccctggacattgttttggaaattattgatgtgctctgaatgttttcaggttcttaagtgaaaggtacaatccatttaaaaaagaatgtgtttgttttgcaaagctcagtacacaatattttccatttctggcggttccaagttccatttcacttcttcattggccaaatggggtggaactttccaaggcgctttttaaaaggtttaggccagtgaggagttatccggattt

SEQ ID NO: 303826 - DNA, 429 bp, Homo Sapiens
  misc_feature (313)..(338): n is a, c, g, or t
  misc_feature (392)..(392): n is a, c, g, or t
  misc_feature (404)..(404): n is a, c, g, or t
  misc_feature (417)..(417): n is a, c, g, or t
tggaaagagagagactggagtgagagagaaggagttaagaaggcttgagagacagctacaggaacagatgggtagaggcaaaagcttgggcagggtgtggcactggaatatgatatatgggggatgtctggaaggaagactttatcagaagtagtgactcatggactgtgtagatttactcattcaatcaccaaatgttcctacatgacctctcacagcacctctccaggcactgatagagataatgcagtggataagacaatgaacctgctgtcaaggcatttatagtctaccaggagagatagacgacacnnnnnnnnnnnnnnnnnnnnnnnnnncataactagacatctttatcttttgaccaaatagcttttacaaacataattttncaagctgctttnccacaatattaantcattacttggg

SEQ ID NO: 303827 - DNA, 368 bp, Homo Sapiens
gagaattggttggtttgcgtatgaaaggtgtgctccgggggaggttggtggggatagtgcgctctctagccagccctggaaggagtggtctctccaggattagcaaggccccaagatgtcaaagcatcataaaactcagaaaataaaaaacatgacttttttttggagcccaattctcactctgttcctcaggcaagagtgaagtggtgcagtgatagctcactgcagcctcgaacttctgggctcaagcgatcctcccacctcagcctcctatgtagctgggactgcaggcaagcaccactatacccagcttaattacttttttaaaattttttgtagagacggggtctcgttatgttacccaggac

SEQ ID NO: 303828 - DNA, 418 bp, Homo Sapiens
  misc_feature (96)..(249): n is a, c, g, or t
  misc_feature (326)..(326): n is a, c, g, or t
  misc_feature (339)..(339): n is a, c, g, or t
  misc_feature (347)..(347): n is a, c, g, or t
  misc_feature (368)..(368): n is a, c, g, or t
  misc_feature (402)..(402): n is a, c, g, or t
acagtttaaggtaagcatctaatttcattcttttgaatgtggatattcaattttcccaacaccatttgttgaagagactgcccttttctcatttgnnnnnnnnnnnnnnnnnnnnnnnnnnnnnnnnnnnnnnnnnnnnnnnnnnnnnnnnnnnnnnnnnnnnnnnnnnnnnnnnnnnnnnnnnnnnnnnnnnnnnnnnnnnnnnnnnnnnnnnnnnnnnnnnnnnnnnnnnnnnnnnnnnnnnnnnnngtgggcatgtgcctgtaggttccaggctactcagggagggccgaggatgggggagggatcactttgagccggggggncattgagggctgncagcgagnctgttggactgttacccactngcacttcccagttcccgaggaggacaggaggtgnatacttttgttcttca

SEQ ID NO: 303829 - DNA, 238 bp, Homo Sapiens
  misc_feature (45)..(103): n is a, c, g, or t
  misc_feature (111)..(111): n is a, c, g, or t
  misc_feature (154)..(154): n is a, c, g, or t
ttaaaaaaatgagtacccacatcatagaaatgatgtgaaaattannnnnnnnnnnnnnnnnnnnnnnnnnnnnnnnnnnnnnnnnnnnnnnnnnnnnnnnnnnatattagngtaacaaaggatgaggttaaagaataataaagatatataaagntaaatttttaaagaattaaggaattatcgggctggttgaaacttttgagaccacttaggttcaactctttcattttacagagga

SEQ ID NO: 303830 - DNA, 163 bp, Homo Sapiens
  misc_feature (138)..(138): n is a, c, g, or t
ccgcacatgggcccaaaataaaattttcaaataagttaacttcaaattaaggattttttgaaggaaaaaccttccttcattggcaatatttgcattgggttcctaacacctaaatttacctcacaattatccttttanggtcccggcaggagttttaaaaaac

SEQ ID NO: 303831 - DNA, 147 bp, Homo Sapiens
  misc_feature (98)..(98): n is a, c, g, or t
tcaaaacactttcatatgttgtaaagtatccatttgggcttaaaacctaactaaaattcaaaattgttaatactgaatatgtaattcttatgacattngtttcaaaaataatattcctccccaaatttgaataaaggagatagcttt

SEQ ID NO: 303832 - DNA, 410 bp, Homo Sapiens
  misc_feature (341)..(341): n is a, c, g, or t
  misc_feature (370)..(370): n is a, c, g, or t
gtaactgaaatagcacgaaaagtaaccttgtgtgactttataaccttattaaacattttgcccatttgcctctggagtcaagatcttaatctcattcagaagactgagtggacaaggatttggtatgcatagatggaggcactggcaaccggagaggtcccagggctgcataacactaagtagctcatagtgactcaacattggaacttggtataacttgtctatgattaaagccattccagtgataccacagtgatatagtggtaccacaaagtagttttagttttgttttcactgaaaaataatgaatgtcagcatcttttcatatggatttaatggancagagtatcttctttttgtggaaataccngtttcaagtgttttgcctgttttttctactggtgtttgtc

SEQ ID NO: 303833 - DNA, 476 bp, Homo Sapiens
  misc_feature (13)..(13): n is a, c, g, or t
  misc_feature (229)..(229): n is a, c, g, or t
  misc_feature (350)..(350): n is a, c, g, or t
  misc_feature (385)..(385): n is a, c, g, or t
  misc_feature (441)..(441): n is a, c, g, or t
acctttccctggntatctccctgagtagcttaataatcaaccttctgagttatttatttcgcaattcagagacttcttgatttggacccattgctggggagctagtgtggtcttttggggatgttatagaaccttgttttattacccattgctggggagctagtgtggtcttttggggatgttatagaaccttgttttattaccttgtcatattaccagaattactttnctgattccttctcatttgggtagactatttcagtggaaaaatctggaactcaagggctgttgttcagattcttttgtaccacgttggtggtccccttgatgtgatgcactccccgttaggntggggggcttccagcaagccacactgcagtgaatngttattgctccaccggggcccaaccaccccctggggctacccgactccgagccggnacttgcaaatgtccgcataggggcccgtggaacta

SEQ ID NO: 303834 - DNA, 327 bp, Homo Sapiens
  misc_feature (48)..(49): n is a, c, g, or t
  misc_feature (77)..(77): n is a, c, g, or t
  misc_feature (134)..(134): n is a, c, g, or t
  misc_feature (214)..(214): n is a, c, g, or t
  misc_feature (228)..(229): n is a, c, g, or t
ttctaaaccattcttggctagttttagaaaattgtattagtagagagnnaaggagcttagaggtatgaatgtaagtnctcaaacagccattctttcttgcaaggaaactattaagtttagtcaaaaaggaaagnttatctggggaaggaccaaggagagagcaagagttgctggccaggtttcagagttttgctttctgctgccatggggaagnttggccagtgtggnnaggaagcatttaccactcttcctcttaaatgaccgctcatcgctttaaaaccctgtaatgcattagccaccttacccgagtgagggctatagcccagg

SEQ ID NO: 303835 - DNA, 404 bp, Homo Sapiens
  misc_feature (220)..(247): n is a, c, g, or t
  misc_feature (352)..(352): n is a, c, g, or t
tctgagacctgtagcaaagtttgtaactatccagttttctggcctgcttgaacagcaggcttatgggatcctaagcccaggttttattctaaggtattccaccttatgacagaactatacagaaagacacaatgtataccagattagctacaggttaagactagcctcacaaatctttttttccattaatcaaatctttacagattatataaacattgannnnnnnnnnnnnnnnnnnnnnnnnnnnaccattcattcatcctgtttttacagagagagggacgctggaagtgtcactggtaaggaacttttacccttctgccagcatgtcaggatttctggagttcccttncccctgagctatgggagtcccatctgggagttcccgtgaagggggaagcagt

SEQ ID NO: 303836 - DNA, 209 bp, Homo Sapiens
ccctggtcactttttacagttaggtatcactagagagactaaatacccaacaggaaacatttttctcatttctattttcccatgatagataccgatcctggggggagtgggctggggagggtgatggggattatccagtgaaaagccgcagaaccagtttcaagtccctctgaatccacagctacatgcacagcttcagagcaatacaa

SEQ ID NO: 303837 - DNA, 398 bp, Homo Sapiens
  misc_feature (225)..(225): n is a, c, g, or t
  misc_feature (270)..(278): n is a, c, g, or t
  misc_feature (342)..(342): n is a, c, g, or t
  misc_feature (355)..(355): n is a, c, g, or t
  misc_feature (364)..(364): n is a, c, g, or t
  misc_feature (380)..(380): n is a, c, g, or t
gcagcacctctgtgaattagcataagatagaaagaacagaggtttggagtaagacagaccttatccttgagcaggagaaggacacaaggtctgtgacagaagaggttggccatatagcagggtacttttcctgccaccccatcatgcaccccctcccccattaaacagaacccagcaagcccagctcagagaggggcataaggagccaggcagactttttcactngtagcagaagcttgtcacattctactttaaatgtcatataaccannnnnnnnncaaatggatatgaaattcctaatttggctttttcctttacacattcctttgggcatatgtactnaggcacatgtttnatattaaanaacttagctgttgttncactttctggattttctt

SEQ ID NO: 303838 - DNA, 160 bp, Homo Sapiens
  misc_feature (89)..(89): n is a, c, g, or t
  misc_feature (148)..(148): n is a, c, g, or t
aggctcacattgaccactgcctgggttgctgcctgtgtttcatttcatgggcccaaaggcttcttacagttcaacaggtgggcaagttncagccagggttgtgttcctttccctttcagggacagcaagtttccccccagccccaggnaggttttacaga

SEQ ID NO: 303839 - DNA, 469 bp, Homo Sapiens
  misc_feature (364)..(364): n is a, c, g, or t
  misc_feature (378)..(378): n is a, c, g, or t
  misc_feature (430)..(430): n is a, c, g, or t
  misc_feature (439)..(439): n is a, c, g, or t
gtgggcatatagtagaaagtggggcttgttgttgaaaaaattttggttgttggtgttgaaaagaacagcggcctgtatgccaaggacaatttcttttagaatatcccgattggctgcataggaagcatttgccagggaattgtccaggcattcgaatagagaccatggcttgtgccatgaccattgctgtacgcagagttcccctcacgccttcacagactttaatgtatgaggtgagtacatcaccccctggtggaattttgcctttaatggggcaaatagccacctgaacagtctgggatttacttgttcataagccattaagttctataacaagtcattggccctggctattcaggggatngcttttttctgctngcgtctttgaagatggggcaattaaagtgtgggatacggtttcatgtttgtnccccgtctngacggctgttaaaaacatggggcttagttt

SEQ ID NO: 303840 - DNA, 114 bp, Homo Sapiens
  misc_feature (57)..(57): n is a, c, g, or t
  misc_feature (60)..(60): n is a, c, g, or t
agtagagacagactttcaccctgtttagccaggatgggctcgatctcctgaccttgnganccacctgacctgggcctcccaaagcgctgggacttacaggagtgagccaccgaa

SEQ ID NO: 303841 - DNA, 408 bp, Homo Sapiens
  misc_feature (84)..(84): n is a, c, g, or t
  misc_feature (177)..(177): n is a, c, g, or t
  misc_feature (315)..(315): n is a, c, g, or t
tattgggtacgtaatagttgtacctccatgcctttacacttatggttccctgatgaactcttactcaaacttcaaaacccaggncaaatgttgcttcttcaaagcagcatttccttatagccaccccatccactcctaagcagactaaattactcctgtttgcttccacggcggcanttgtgtgtacatctatcaaaacacctgctgggatgcactgtcataacttttgatgtgtgtccccacttccctctccactcaggactgtgaatctttaggggcagagctggcaccagtctcctgcctaggtgcctgggnatataggtggggtactaaataggttgggatactgggaggggaatggggagtctctgggataaaaggagggctttttggatggccccggggagt

SEQ ID NO: 303842 - DNA, 234 bp, Homo Sapiens
ctgagttgattccaatcacatagcaatgaaataaaaatactcacaaagtagaatatgtacagaaacaagatacagcttgttcttttctgacaattgaatcagttaaccctaaaataattatgaggtatgtagggcaagggcttttagtcccagataaaagagaggctctctcctactggcaattagggacatcccccacctcaacacagagtgaagggcagctgatttacatca

SEQ ID NO: 303843 - DNA, 122 bp, Homo Sapiens
  misc_feature (14)..(14): n is a, c, g, or t
  misc_feature (103)..(103): n is a, c, g, or t
gagtattcaaaaanggggatcttaagacaccgagtacaagttactgaactagaactaaggcgtgggaagcttgatacgtcatacttcctcaacttagaaaatnagtttgcaaggggtagcct

SEQ ID NO: 303844 - DNA, 479 bp, Homo Sapiens
  misc_feature (423)..(423): n is a, c, g, or t
  misc_feature (434)..(434): n is a, c, g, or t
ggcacgagctgggaagatgtttgtttgtaaggggtaatctgtgtctatcaaagcagatagtattggttttgcctagtttccaaacatggttttataagtcagtatatcttgtgaaaccattaggacaaaagtttggaacaaaaagaaatctcaggctcattgcaaagcttttttaacgttttcagttccctccatgttctgagcattatcataacgtactgaactgttctgttcagagaccactagggagaggagatgaggaaccagagcagccaggatgtttctccctgggataaaatctcaagcattcagacaccctcactgtgggctccacttctgtagctagaggggactggaaacagcaggagcatcttcacagcttgtagggaagcacacatctttttcccaaatgtttctttttgncagttggtccntgctggctgatcccgctttccccgtcagcatatggtgagcagttt

SEQ ID NO: 303845 - DNA, 407 bp, Homo Sapiens
  misc_feature (121)..(121): n is a, c, g, or t
  misc_feature (211)..(211): n is a, c, g, or t
  misc_feature (377)..(377): n is a, c, g, or t
aagtgcaatgctgagaagtgggaaaatcttgctgattatgctgagaaaggcagaaacacgtgtttgtggagaggcggctgggcactcaccttgcaagaaacaaaatgtgctgtgaagaggnaaagtacatagcatcctgtactttcataccgctcaatgcatctctgcaagcttatcccaagtgctgcctcatctgatctcaccacaggantcacagcaacatttcagataaggaaaaggaggtcaagggcttgggtcaaagtcaccacagcagttagtgggggtcaaagattgcaatgagcatttctcttcttcctgccccagatgattgggacttaacaagggccaagggaaagcttaagtggggtcatcatccngggtttccttaaaccttcagcagggtgggg

SEQ ID NO: 303846 - DNA, 414 bp, Homo Sapiens
  misc_feature (49)..(49): n is a, c, g, or t
  misc_feature (68)..(68): n is a, c, g, or t
  misc_feature (296)..(296): n is a, c, g, or t
  misc_feature (358)..(358): n is a, c, g, or t
  misc_feature (369)..(369): n is a, c, g, or t
  misc_feature (395)..(395): n is a, c, g, or t
aaataactggagtgatttctgtcgcctgatcagaccctggccgatacgnctatataattcaggcctcngctgtttggcttcagcttcgttcatcatatgacactgtcatctggaagagcagtcagtcctctaagcagcctctctgatccatacttcatattgcattgggagtgctggatttctttgaggaacaagagcacgagagcaaactcgaagttagaacctctcgtatattttctagcaagtcatgcattggtcttctcaaagtcatgattacttttgaattattttaaaancttatttgatgtgtttttgaagaatgtgggaggaaaacaacagatttcaactcaactctccngtggcttaagngccagcatattgggcaggggcacggngggctcacggccgtaattt

SEQ ID NO: 303847 - DNA, 215 bp, Homo Sapiens
  misc_feature (160)..(160): n is a, c, g, or t
  misc_feature (187)..(187): n is a, c, g, or t
  misc_feature (193)..(193): n is a, c, g, or t
tttgaaaatgacagaagaaaaatttgaccctttcaaattacaaatgccaaaattggtctttaattctctttgaattaaagggatcttgagagaatttaagtacacaattcctgaatgctatgcctttcaaactttgcccatatgactgtaagtttgtcanggtaaatctcccacacatcagaaagcnttgggnaaatggttctcatttaaataag

SEQ ID NO: 303848 - DNA, 245 bp, Homo Sapiens
  misc_feature (27)..(27): n is a, c, g, or t
  misc_feature (34)..(34): n is a, c, g, or t
  misc_feature (88)..(88): n is a, c, g, or t
  misc_feature (121)..(121): n is a, c, g, or t
  misc_feature (192)..(192): n is a, c, g, or t
  misc_feature (202)..(202): n is a, c, g, or t
  misc_feature (209)..(209): n is a, c, g, or t
  misc_feature (228)..(228): n is a, c, g, or t
atcatttctgtgatactcgccctggtngcaaacngatcatctcagccaagctcttcatgtatctttgacctattaggtgaacaaatgnacctcacagtacacacagtattttttaaaggcngactcgctctcttttttgccagtgagcagttctagctaaccaagttacacactgtgggtattcctgcctgnctcttgaatncaaaggnctagtttcaagtggttgcnttttttttaatttcaaa

SEQ ID NO: 303849 - DNA, 409 bp, Homo Sapiens
  misc_feature (46)..(46): n is a, c, g, or t
  misc_feature (110)..(110): n is a, c, g, or t
  misc_feature (300)..(300): n is a, c, g, or t
  misc_feature (343)..(343): n is a, c, g, or t
attcggcacagttcctgtttccctcatgttagctaatacctgatgntccttcttagcctttggtaaaattgtgaatttgacaaaggtagagttagtctccttttccagcncatctcaaccctcgcctagctctgccccaatagctctcatccagcacccccagctggtcatggccagcttccaccacatcgcctccagaggtgtagcagatattgatttaagtggctccattagggctgttcagagtaggcgaaatgaacagggctaggctccctgagatcttggttcttaaccagtttngttgattgcctgtctttgactgagttaatgcactgctcttggnactccaaatccagtatctgtggggtggtttttgtgtagatcaggatttttaataagttacaggaca

SEQ ID NO: 303850 - DNA, 354 bp, Homo Sapiens
  misc_feature (289)..(289): n is a, c, g, or t
  misc_feature (297)..(297): n is a, c, g, or t
  misc_feature (310)..(310): n is a, c, g, or t
atatgagttatgagaacagctatacaaccaagaggaaaatagtgaattcttgactgttattgagtttgggtcatgaagtaaaactaataataatttataagagcctaattctgctgattctgctagtggcctccttatgatcttatagtgaacttaatttgatctccttgaacatttgcttggtgtttctagaaaaatgaacagaggaattattatagaagtctcttatgcacaacaagcctaaggaaacaaagagtaacctgacaagagattccagagaaaaggggcnaaagaganaagggaataagcnccttggttggaaaaaggaatggtggtaattggtaatgtggagac

SEQ ID NO: 303851 - DNA, 183 bp, Homo Sapiens
  misc_feature (107)..(107): n is a, c, g, or t
  misc_feature (119)..(119): n is a, c, g, or t
  misc_feature (127)..(127): n is a, c, g, or t
  misc_feature (143)..(143): n is a, c, g, or t
  misc_feature (170)..(170): n is a, c, g, or t
ccgtggccctgccaatatgctggctcttaagcacaggagagttgagttgaaatctgttgttttctaccacatttttcaaaaacacatcaaataaagtttttaaaatnatttcaaaagtnattcatgnactttgagaagaccantgcatggatttgctaggaaaattttancgaggaggtttct

SEQ ID NO: 303852 - DNA, 369 bp, Homo Sapiens
  misc_feature (194)..(263): n is a, c, g, or t
  misc_feature (347)..(347): n is a, c, g, or t
  misc_feature (358)..(358): n is a, c, g, or t
tttatttcacttgaatccctagggacttacatttccacattaataagaatacactgattcttacacacaagggtaaatatagtaactgagactcacgctgaaggtcatgtttggaatctcatatttcctttgcatcttagtttcatacattctttctggattctttctagcatttccaaatcctattcatcctnnnnnnnnnnnnnnnnnnnnnnnnnnnnnnnnnnnnnnnnnnnnnnnnnnnnnnnnnnnnnnnnnnnnnngtgtgagccactgtttctcttctttaatgaaagtgtttcccagttctaatttctgtgttcttagtgactggctgtcttgcaatngatacaagtcntttttgaaaag

SEQ ID NO: 303853 - DNA, 297 bp, Homo Sapiens
  misc_feature (39)..(39): n is a, c, g, or t
  misc_feature (125)..(191): n is a, c, g, or t
  misc_feature (208)..(208): n is a, c, g, or t
  misc_feature (235)..(235): n is a, c, g, or t
catcagtcagaaaattccagaaaatggaaagtactctancatacagcaaagtaaatcaatggttgtttgaagagcagagagaaaaactttataaaggctccaagtaaatacaaaggtgatagatnnnnnnnnnnnnnnnnnnnnnnnnnnnnnnnnnnnnnnnnnnnnnnnnnnnnnnnnnnnnnnnnnnnctacagctcaaatatgngtactttattggatgtcatttatatcnttattttatttttaagatggggtctcactctatcacccaggctggactgcagcgttgcaatc

SEQ ID NO: 303854 - DNA, 189 bp, Homo Sapiens
  misc_feature (42)..(42): n is a, c, g, or t
  misc_feature (45)..(45): n is a, c, g, or t
  misc_feature (80)..(80): n is a, c, g, or t
  misc_feature (118)..(118): n is a, c, g, or t
  misc_feature (166)..(166): n is a, c, g, or t
gaaaaaaatcaattacattacttacaaatcacttcaatatcnggnaccttaatttctggcaattatatctaatcaaaatnccctgaactgcagtttaaaccagattcctctcatttcnctataaaacataagtaaaaccagtatgatcaagaaagattaagcatangcttatgtatatttaaactgtca

SEQ ID NO: 303855 - DNA, 186 bp, Homo Sapiens
gcgtgcacaaccacacccagctaatttttgtatttttagtagacaggccttcaccatgctggccaggctgttctcgaactcctggacctcaaatgacccacctggccttggcctctcaaagtactggcattacaggcgtgacaaccggtggcttgggccaactaatttagttttggatggactggt

SEQ ID NO: 303856 - DNA, 211 bp, Homo Sapiens
  misc_feature (142)..(142): n is a, c, g, or t
ggggtttaaatggcacgagtggggaatagtcatataccctttgaacataaaaggaagctgccccaaatcaaaagttttaacaaataatgttgagtgttcagctgggattgggaaccatgagtttgtaggaaaccactcttcntagttaagtgatttattatacagtgtttcatttagcctgctataaccatagagaagtctgattatagaa

SEQ ID NO: 303857 - DNA, 152 bp, Homo Sapiens
agatggagaaggaaaattatcgcgaagtaagctttccttcaagagtagaaaggtaacagatgccagtaaggggaggaaggaatgagtgcaggcagctctggacaacagggaaaggtaggagctgagagtgggtttagtttgggttcatgtct

SEQ ID NO: 303858 - DNA, 197 bp, Homo Sapiens
atgggaccacactttgagtttagcaaggcaagcttttttatatacacgctaggacaagctcctccttggagaaaattggaaattgggaggggagtacatatcagttttttatttgttaaaacatgatgatgggagcaggaaacaagttattttgttggctttcaaaaaaccaggtttgggagagggaattttcccta

SEQ ID NO: 303859 - DNA, 263 bp, Homo Sapiens
  misc_feature (202)..(202): n is a, c, g, or t
attgttctaggtgaaatgtaaggagcctattttctgggaaaacaggtttttttcacgttaaaagtcactgtcaggaatttaataaaggtcgtcggacttgaccacagaagtttttttgaggtcgtgtgaatagtacattgacattgtattccaagtaaattttgccctgtctaatctcctgccttctagtctaagtcatgancatgacacctcttcacgaatgtacattctttatttacctgttggtagtttctactacaaaa

SEQ ID NO: 303860 - DNA, 435 bp, Homo Sapiens
  misc_feature (382)..(382): n is a, c, g, or t
  misc_feature (410)..(410): n is a, c, g, or t
aaaaatttaacatgtattcttcaaaaatcaaaatttatatctgtactttctcaatagaaaatgttttttaagttggattgctcaaccccaacttacatagtattatagtctagtatttcattatatcttacttattttgctttccagattagaaattgttattattgtttatatagtcaacgttagtccagaattatccacgtatttactatcatgttcactcacctccccttctggtatttttcagaccttccctggggataattttccttctactcttaaggcacattctttaaaaatttccattaatgggtaatgtcctaggaggataaacaggttatgaggaacacatttttactttgttctggcttttcaaaatgcngttttgttgagtattgggcttatattcnttcatatttccacctcccgctgggg

SEQ ID NO: 303861 - DNA, 474 bp, Homo Sapiens
  misc_feature (400)..(400): n is a, c, g, or t
  misc_feature (409)..(409): n is a, c, g, or t
  misc_feature (427)..(427): n is a, c, g, or t
  misc_feature (440)..(440): n is a, c, g, or t
tttgttaatttttcttaccccaaatttgcgtgtggtgtcattaatccttaattagttataattcgcaatggttttgtggctagttattttcttactgttttataagttgccaagattaccttttattttctaaggaaataatgttcatacaagtcacatgtcttaggtgcattttgaaaacccctatttaaatctgtattgggcagagtccttagtatgtagatagtagaattcattctcactggtgtgtgggtttattaaatggtacttgagaggctgagggtcaggtgacacccagcaccacaccatgggaactgggggtcccgtgggagccttttttcttttcctgcacattcaggaaattgccgttacaggggtaggctccgggccagtcatcccnacaacgctnctgaggagatgggtgccngtgtgtccctggnaaagtccactgcaccctattgggctagctaaatc

SEQ ID NO: 303862 - DNA, 184 bp, Homo Sapiens
  misc_feature (133)..(133): n is a, c, g, or t
  misc_feature (149)..(149): n is a, c, g, or t
  misc_feature (162)..(162): n is a, c, g, or t
tgacaaacatacaggcaggaaggaacacagatggcaccagacaaccaatctgagccaaagaatccgggcatgaacactgagcctacactctcccccaggggccatataagaagtggaagtttagaaggttgcnggaaggtatgattccngaccagggagctnttttccgggggcatcctgggct

SEQ ID NO: 303863 - DNA, 284 bp, Homo Sapiens
  misc_feature (232)..(232): n is a, c, g, or t
  misc_feature (242)..(242): n is a, c, g, or t
tcaatcaatcaatcataactgctgaaaatgatctaagtgaaccaacggcatggaatacgtgctctttctctgtcctggggacatactggcacagaggactcaatcttagctcagctccttgggccagcatgaccttaaacaagtgggctcaatatcttgggagcaaccccagttattcattcatttaaggtaggggacaaccattaacaacacaatcacttttaacattaantttccagggnaacccgagggccacaaggcaggaccctttaaagggttttttg

SEQ ID NO: 303864 - DNA, 435 bp, Homo Sapiens
ttcggcacagggtctttttcagtgttgcataacagttgatttccccaccattcccataccctaagtgaaaattcaactttgttctgattatcagaaattgattccttctcctatagattctttaaagaaacctctgatggtttaggcttactaactcaaggtgctcttaatatcagtgttaagctgtgtgttaagcctacttggctttaaaaaagtgttacacaggtgcatatggaaactttaacagctttcaagttttcagtccaaatctaacattttgcagactaatgtgataatttcagattaccaaagtaggcccttttatagtgaggggcctttgtgtcttacagggctttttttgtgggtgggattggggtgtcctaaaatttcacctagggtgtcttgttaggcctccccagtggcaggcagcagctt

SEQ ID NO: 303865 - DNA, 424 bp, Homo Sapiens
  misc_feature (12)..(12): n is a, c, g, or t
  misc_feature (406)..(406): n is a, c, g, or t
ttcggcacaganttagaaggaaataaaatgcaatattgataaaaatgactaatgtgctgttttttacgataactctaaaatatttgaatcattcattgctaatcataaaacgtattagacaatccaaaaacctccaagattgagtgctctatgttgactgtgatggtaaccttattttcatgcctacttgcttaaagtttgtctccttttcactgctatcctgcctactatcgatactttgggtaaattttaagtgaaaagtaaaagaaaatttgtgaccacacgggaaaataaggcatgtaaaatagtgatttgtgctcagattgcattattttgtggaaacaaattaaataagtgggaaacaattgggcactttgcaggtgggcttcagcgagcagccccagcncgaggggagggccttgct

SEQ ID NO: 303866 - DNA, 356 bp, Homo Sapiens
  misc_feature (285)..(285): n is a, c, g, or t
  misc_feature (312)..(312): n is a, c, g, or t
tcaggtgtaccttccttgtactatttacatagtttttatgaccatcctttttttcattagttgtatatgtacttaagatatttctaaagttttgtttttatagataatgctgtgataaacattgtactgtataaaatatgttctaagaattctcagtggaaggattattgggataaaggatatgaatattgtgatggtctttgatacatgttgacaagtcacttttgtaaagtagactaattgtacctttaaagaaaattcaatatctaaaaaatcctaagtccngggtttatcatcagggaatatataccntgttttggaatgttccccattttattatttggttatttattaaa

SEQ ID NO: 303867 - DNA, 489 bp, Homo Sapiens
  misc_feature (354)..(354): n is a, c, g, or t
  misc_feature (421)..(421): n is a, c, g, or t
  misc_feature (428)..(428): n is a, c, g, or t
  misc_feature (435)..(435): n is a, c, g, or t
  misc_feature (462)..(462): n is a, c, g, or t
gcccaggcaaagtgaaaatattcttagcactcagactgtacttagagtgttttctcagtccagtctgtacagtctgtaggcagaaggctcagaagaaagtcatggccactcagtgcccactgtggcttttgtaagtcctggctctcccgtcaaggttacccagaggtaaaagcttcctgggagtggggccaggtgtgtttggcactccagatagaaggcaaaatgctcagattcgggcctgtgcacttgtatgcaacctgtcggtcgatacctaggcatttatttttccctgacaatgaacgacctttccctcacccacccttaagctcaaagagttttagcaaaattctcttnttaaaataaaacaggaattgccagttaaggagggttgaccccttaccctgggaactttttgggggtngctaaanttatttnctcatggaaccaaattaagtttcctanttttaagtttccttattattagggcag

SEQ ID NO: 303868 - DNA, 252 bp, Homo Sapiens
  misc_feature (181)..(181): n is a, c, g, or t
  misc_feature (222)..(222): n is a, c, g, or t
atgagccaccacaattttaattccacaggtagatgtactggaaactgatgtaatttcctcctacttagtaatattaagttccccatctgagtatcatatttgaccctacagtttagaggaaaagaaatcttaaaagtttcagaaaaaagtcatgaagttggttgggacttggaaatttctngagggacaggttaaaagagttgggaattatttacacaatgnaatgggaaaagcttaatggcggggtatagg

SEQ ID NO: 303869 - DNA, 497 bp, Homo Sapiens
  misc_feature (371)..(371): n is a, c, g, or t
  misc_feature (403)..(403): n is a, c, g, or t
  misc_feature (410)..(410): n is a, c, g, or t
  misc_feature (422)..(422): n is a, c, g, or t
  misc_feature (454)..(454): n is a, c, g, or t
  misc_feature (464)..(464): n is a, c, g, or t
cagtaggagacaaaaattattttttcatcattgaatatcaaactcgtgacagataaaaagaaataccagtagaggagaaatatcaaatacctgggaaaatgattagcttacaaaccaataaaacatacacattgaaacaagattcagtttacacgatcaacttaattgaaaaagaccctaacacttaagttgctggttaggttgtgtaaaatatttgaaagcaatcaaaattgattagcttctttgataagcaatgttaaatgcttattaaaaaccacaaaaacattcacatcactgataacgttgctcagccagtgaccaccagaaacatacacacaccaagctggggtttaggtgcttacaagggaccntagggttgctcagtaggggcttaggaaagggnttgtggnagggttttgggncctattagggttttaggggggaggcttagggngtggggcttnttccgggttggtgcttccgggagtttgagtagg

SEQ ID NO: 303870 - DNA, 155 bp, Homo Sapiens
taagacaccacggcccagcctaaggttatgtatttgaagcagtgggtagatactgccaagtcacacttccacagagatcctattcaggtttacggttcccacagcaatgtactaaagtggcatatcatcctacattcccgccaagtcagtgtttg

SEQ ID NO: 303871 - DNA, 192 bp, Homo Sapiens
  misc_feature (112)..(112): n is a, c, g, or t
  misc_feature (156)..(156): n is a, c, g, or t
aaaccccatatgctcctatccaatcttacactgggaccattgcctcctgttcttgcctgcttcagccactcaacttctctttattccacaagcatctcaagctccctctcgncatggggcctttgcacttgtttcccctccctggaaggctcttgnccacagccccgtgcccagaaaacactactcaccctt

SEQ ID NO: 303872 - DNA, 278 bp, Homo Sapiens
agcatcttctataagacagacaatgtgttgcctcagaatatacatggtcttaatggtaactacaacccaggcaggaatgtggtctattttacaggtgatgaaataaaaattcagggagctaacttatttgcctaaggccagggttttgaacacaagtcttcctatctccaaagtccattttgttttttcaccacatactactaatttttactgggtgcatttaagaggggatcaatacaatgttatggaatttggaaccctcaaatccgaggtacaca

SEQ ID NO: 303873 - DNA, 165 bp, Homo Sapiens
taaataattaaaatattaataattgtaaatttatttgttggagtcagaatggcttacactgccttatcatctagcctctggactctctagtagtgcttttatctgacactggtggggcatggaatgttctacacatcgctggtttccagctaacaagcatattcc

SEQ ID NO: 303874 - DNA, 327 bp, Homo Sapiens
  misc_feature (280)..(280): n is a, c, g, or t
  misc_feature (289)..(289): n is a, c, g, or t
  misc_feature (300)..(300): n is a, c, g, or t
  misc_feature (308)..(308): n is a, c, g, or t
aaggatcacaaagtggaacctcttcagaaccaaataacttcagaaggaatttaacatttttccacttaaaaaaattgttaacaggcattattattataaattagaatgcagttcatagagtgcatttctattgtagaagttgaatatgggtttcctgaggagcaagttacttgaatatattaggccccttctttggtgatgttatttggctgtaacttctcctagattattttacaaattattctacattggatgtaatgttttaaaagtcttatatggnttttaaacntggtaacaatnatatccantgggcttttagttgccatt

SEQ ID NO: 303875 - DNA, 254 bp, Homo Sapiens
  misc_feature (144)..(144): n is a, c, g, or t
  misc_feature (158)..(158): n is a, c, g, or t
  misc_feature (203)..(203): n is a, c, g, or t
  misc_feature (239)..(239): n is a, c, g, or t
tcggtcacttctatatgaaagttataaaccaatatttagtaacttatttttattgtttttgatggcaaaatcatttacagcaataaagttactttctgagaattgctttaccaacatttcacagattttgaatgtagtattttnttgaagactatatnttaagatttttgtccgtaacatggtattcttagaattaacatatntttgaagaatctttaggtgttaaaatgttattattntgagtaaagatatta

SEQ ID NO: 303876 - DNA, 175 bp, Homo Sapiens
gggaagctgttgtcttaaatggaaaaaccaagaaaccagaaatgataggcccaggttctagctctccatcagtcaaacatgaactttactctcgccttctgcagaagatgagtcagtattcctacttcaggagttgtaaaaattaagcacatctcaagcctggtaataagtttct

SEQ ID NO: 303877 - DNA, 284 bp, Homo Sapiens
  misc_feature (262)..(262): n is a, c, g, or t
agagatgtcatttactacagagtttatacacacaaatgttctgctgcatgctgtgttcccactgaaatccagggggtttatttgcatttatacttaaagaagaatgactgtatttggctgactctaagccaagatgatacaggcccaaagtttttcatggaggaatgggggagtaagggaaataggaacatttggaagaaatagttgttgtttttccctgttttattcagtgggcattttattcacagatcatttgatgcantgcatttactcgtgtttattct

SEQ ID NO: 303878 - DNA, 337 bp, Homo Sapiens
  misc_feature (271)..(271): n is a, c, g, or t
  misc_feature (288)..(288): n is a, c, g, or t
  misc_feature (321)..(321): n is a, c, g, or t
ataagccactgcacccatcagggagcattcaaatgagattgggattgagatactgtcagtgaatttggccattaggttatttgtaaccttggcaaaaactaattcagcaagatgacaaagttagaaaaaaagataatggtagggtacggaggttctagagaatgaagccacaaaagatagagaaagcagattatttggctctgacaaggattatgggttaaagggaaggggaaatgacacaacaatacctagtgggcaaatggcaagatcntaaggggagagggttgnttttaataaagggggaggccaagggaatgaatnatcgggaatgccaaag

SEQ ID NO: 303879 - DNA, 281 bp, Homo Sapiens
  misc_feature (172)..(172): n is a, c, g, or t
ggcatgctctgaggctgattgagtgatgaccagcagcatcaaagaaaaccctcagtttgcatggcgggtattagaagtggctgccttgatgcctcctgtcatcgtttgagtggtaaagagacattctttgtatgtttataactcttgatttggggtcatggttatcatctgnactaactgcacaggtcatcccgctcccatccctttttcattctttagaatcccccacagcggtccacgccccttgccaacttccttccactatcctggttctgttgtta

SEQ ID NO: 303880 - DNA, 187 bp, Homo Sapiens
agatttttaagatatttttaatcacatcatttgacatgtagtcagtattagtggtggcttaatgcattaatcagttatccctagttccaaaatatgcactcgaaaacaagaagtatttgtgtcattaatgaaaagagcaccttgggagtcagagggatttggttgccagtcatgccagttgttaacc

SEQ ID NO: 303881 - DNA, 392 bp, Homo Sapiens
  misc_feature (125)..(185): n is a, c, g, or t
  misc_feature (313)..(313): n is a, c, g, or t
  misc_feature (346)..(346): n is a, c, g, or t
aatattaagtaacaggcagatggtttgggacgaagcagaaattgtgaatgatttaagtttggaaaatactggccactaggaaacccatgtagttgagttaggcactcaggctctggatcaataannnnnnnnnnnnnnnnnnnnnnnnnnnnnnnnnnnnnnnnnnnnnnnnnnnnnnnnnnnnntccttttaggctttctgcaatatgggatttaaatagatcattcaaaaaataggtcttaggtttaggtaacatgggcataggtaaggtgctcaaggaaatattaataattcacaattattcttggattnttcttagggacatcacagcttcacttattaatncaactgggggactcaatctggtactatctggtaattttctggtacc

SEQ ID NO: 303882 - DNA, 377 bp, Homo Sapiens
  misc_feature (145)..(145): n is a, c, g, or t
  misc_feature (153)..(153): n is a, c, g, or t
  misc_feature (175)..(175): n is a, c, g, or t
  misc_feature (212)..(212): n is a, c, g, or t
  misc_feature (247)..(255): n is a, c, g, or t
  misc_feature (307)..(307): n is a, c, g, or t
  misc_feature (314)..(314): n is a, c, g, or t
  misc_feature (336)..(336): n is a, c, g, or t
tattcacattgtcattcctaagacctcatttagttaagctttggacacagaagaaaacacgacttcttaggacttcctgaaacacaccacatccgcgtggctagattgctgtcaacacctccgtttctcaactatattgcttagnaattaagnactacgttggagtttccttagntttaaatgttcttaaactttagagaacgttataattncaaaaggaaaactgggctttgagctgcacgggacnnnnnnnnncaaactaggaaagggcacaggaacaaaacccctccttcccggggggccctcnggagggngtccagattctaaggcggacangggcgggcacacacctggcaccagccctcggttggtacagg

SEQ ID NO: 303883 - DNA, 367 bp, Homo Sapiens
  misc_feature (83)..(187): n is a, c, g, or t
  misc_feature (230)..(230): n is a, c, g, or t
  misc_feature (301)..(301): n is a, c, g, or t
  misc_feature (306)..(306): n is a, c, g, or t
  misc_feature (317)..(317): n is a, c, g, or t
  misc_feature (353)..(353): n is a, c, g, or t
tgggctcaagtcatctacccacctcagcctcctgagtagctgggagaccacaagtaagtaccaccacacctggctactttttnnnnnnnnnnnnnnnnnnnnnnnnnnnnnnnnnnnnnnnnnnnnnnnnnnnnnnnnnnnnnnnnnnnnnnnnnnnnnnnnnnnnnnnnnnnnnnnnnnnnnnnnntgagccactatggcccagctgaaaaccacttttttaaaaaatnaattggaaaaaaggattgaaaaatggacaaagttgggtgattattacatgggtaggttggaaagattcttnacacnggctccttttnatttcatcagtataatttaatgttaatcccttgggnagaaattgagttgg

SEQ ID NO: 303884 - DNA, 102 bp, Homo Sapiens
  misc_feature (48)..(48): n is a, c, g, or t
  misc_feature (78)..(78): n is a, c, g, or t
acacaatggcaaacttcctttcttcctgggcttttaaagcgaattctncctggtttcaggctttcccccaggtaagcntgggaatttattggggcaacccaa

SEQ ID NO: 303885 - DNA, 127 bp, Homo Sapiens
tctaggagtgtcttttacatttctttatattgttagtaaatccttgtgaaaatctctatggataaatggggttattaccacctttattaaaattaccatagtaagcaagtttgtgttgaatttagcc

SEQ ID NO: 303886 - DNA, 204 bp, Homo Sapiens
  misc_feature (179)..(179): n is a, c, g, or t
  misc_feature (191)..(191): n is a, c, g, or t
caaaaatatcctggtttagaccgtaaatgatatgatcgccctagcttgactccactggtcatcctttaagattaatgttagctactgtttattgagactcttctaagagtcagacactcttctcagctttttgttgcgttgcttcatttaatccccaaaataagactgctaggtgtgtntatgcataatcnccttcattttcga

SEQ ID NO: 303887 - DNA, 267 bp, Homo Sapiens
  misc_feature (238)..(238): n is a, c, g, or t
  misc_feature (256)..(256): n is a, c, g, or t
tcatcatacacacaaaaggtgttttgtttggttgggaacgcagaatcaggaaacttcattctcagagtactcataatgtaatcaggaagcaaagcctaaggaaagcaagtcactcgaggcctggactcaaatgctgacactgcgtctgttcttcctctttctcattttctctctagtctctaaaaatcttaagtcctagtccctgaagttgatcacaggtgttggaattatgaaaacnaccttcaaagaacatttntgttgtggatt

SEQ ID NO: 303888 - DNA, 342 bp, Homo Sapiens
  misc_feature (299)..(299): n is a, c, g, or t
tgctctacagtaaatatccctgggatgagtatcttgttcatagctgaaaatgcagaagttctggctcattccataaaatgtctttgaagattatattatatccctgtctgcctccaagtgccacccctaaacactacttcagtttgttagttaggtaacttgtgttttggatgctatttatgtcatatttgtaaatgacaagaattgatcattggtaaaatgttacataagttagtacagaattgtattcttacagtgaaggagatacaaaaattgtgtctgagttatgacacactttncattttcggtaaatccgtgattttgtcaccttatggaataggg

SEQ ID NO: 303889 - DNA, 330 bp, Homo Sapiens
tgggagtgacgtcagcccctgatacacacattcttggtctacagcataagggctgtttcacgagagacactatcactggggttatgaacaagacagaagaaggcaaagaaaacaggagcccatctctagcaaaagagggccaaaacccaacttctcctgttagaacagcagggggtttcctgggacagagaccctaaaaatatccaagtacatatcttaacacacactagactatatccctgacatagaaaggataacttctaggaatcctgctaaaaatttagaagttaagaaaagttttacacccttatcaagcatgctttagctttt

SEQ ID NO: 303890 - DNA, 423 bp, Homo Sapiens
  misc_feature (19)..(19): n is a, c, g, or t
  misc_feature (34)..(34): n is a, c, g, or t
  misc_feature (116)..(116): n is a, c, g, or t
  misc_feature (278)..(310): n is a, c, g, or t
  misc_feature (359)..(359): n is a, c, g, or t
atatctgcatgatacctgnctcatcatacctttngcgagtctcgtggcttcactaaataccctccaggaagacttggatctaagttcctttgcccagtgaattctttatccctgcncactgcccggcttcttgcagctactgagatttatccacactgctgtccatacaccaggaccccatccctctacctgcaagtctcaaagcaccataacacattgctgttatgtgtaacaaactcttactgaaggttaggggatgatgatgaggggctgcatcnnnnnnnnnnnnnnnnnnnnnnnnnnnnnnnnngatgggaaacaactaaatcaaataacagaaggcactggccaaaggcctncaggctgtctctaccacagtggacgggtcttggtggtggacatttcccaacttttctcacaaag

SEQ ID NO: 303891 - DNA, 460 bp, Homo Sapiens
  misc_feature (25)..(25): n is a, c, g, or t
  misc_feature (114)..(114): n is a, c, g, or t
  misc_feature (227)..(227): n is a, c, g, or t
  misc_feature (250)..(250): n is a, c, g, or t
  misc_feature (288)..(288): n is a, c, g, or t
  misc_feature (298)..(298): n is a, c, g, or t
  misc_feature (354)..(354): n is a, c, g, or t
  misc_feature (398)..(398): n is a, c, g, or t
  misc_feature (405)..(405): n is a, c, g, or t
  misc_feature (434)..(434): n is a, c, g, or t
  misc_feature (444)..(444): n is a, c, g, or t
ttttgaggcttctaatgtgaaagancccagcacctaggctagtacctgacccatggaaataaggtttaatttcttatctcctctccagaaagacataatatgggcccccacttntccaacagggtgcttcttagaggggaccactgcatttatgtggatcagtctccccttacatatatgacaagccaaaggggcttgttatgatctctttggcacaattcctgggntcgtaggtaggtccaaaacagtntttgcaggggcaagtgagtctgtgttgccaggggtctnttaaatgggngcacaatacatgtcctatgggagcagccacggggagcttccccctggggtgggggnctgtgactcattcccccagcggagggttccagggttggggattnggagctnagctctggggcagccacaagttctgggtngaacccgggngaatagccagggggaa

SEQ ID NO: 303892 - DNA, 314 bp, Homo Sapiens; identical to SEQ ID NO: 207602
  misc_feature (219)..(219): n is a, c, g, or t
  misc_feature (303)..(303): n is a, c, g, or t

SEQ ID NO: 303893 - DNA, 134 bp, Homo Sapiens
caatggcccgggccagagttgggattttaaaagggaaggggatggggtcttcagggaattgagagggtgggaagggggtaaaatcctcaggaatcatccgcgggtgattgcttctttctcccattccccacttt

SEQ ID NO: 303894 - DNA, 133 bp, Homo Sapiens
  misc_feature (75)..(75): n is a, c, g, or t
cgtgtgcatggcactcggccactgcttcaggttaactctagaaaataactcctcactcttccagggttccttttnggaaaataaatcaacatttgcctatgtgaccaatcactttcagtgtcagagtttctgt

SEQ ID NO: 303895 - DNA, 450 bp, Homo Sapiens
  misc_feature (95)..(95): n is a, c, g, or t
  misc_feature (357)..(357): n is a, c, g, or t
  misc_feature (362)..(362): n is a, c, g, or t
  misc_feature (377)..(377): n is a, c, g, or t
  misc_feature (399)..(399): n is a, c, g, or t
  misc_feature (415)..(415): n is a, c, g, or t
  misc_feature (425)..(425): n is a, c, g, or t
cagccccctctgaataggggctcagctgggaaagtgtatacaagccataccgcctttgtgttgtgttgccaaactggaggcaggagcgagtgcanacgaggctctgcaggggccatcccttgttgttcgtaaacgtgaacccacgtcccaaacagaaagccgaagccagtgcacgggcattcctgagggacctagaactaataaaccttttagaaaatgggtgatcatcaacaaaaaagtgggtagggggcagaagagtgtgtatcttgttccccagagccctgttcatacatcgcaagggatgggactaacaccaggggtaaccagcatcctcgggaggctttgtgtgtaggaccnggttnggggggttgggagtngttagagccggggtccagggancaacctcattcccaanttgatttccntccagggcagggccaatttttgcct

SEQ ID NO: 303896 - DNA, 428 bp, Homo Sapiens
  misc_feature (182)..(182): n is a, c, g, or t
  misc_feature (316)..(316): n is a, c, g, or t
  misc_feature (406)..(406): n is a, c, g, or t
tcaagttccattctatggcagactaatttaacagagattccaaggttctctgcctccaagctgaataagctactagaacaaaaaacaactagaagccaccttattcccaattcattaacgttgacttcatggtccacaccagaaaatgaacgcaactcaattctcgaagacactattctagnaattttatacacttaggaattcagatcacaggctcaaaagttttaggcaggagacccacggaggcttggggccttgatgcaaaagcaggcttttgaaactggcaaggccactctacgcttaatcgcgggcactnattaggggaatttaagtttatttctggaccgcggcatgctaaaaaatcagtaggggtatggggggctaggaggcaacaaaaaacgtaaanaaatttatttccccattaaagg

SEQ ID NO: 303897 - DNA, 357 bp, Homo Sapiens
aagaaactttgaattccttacaaatgggactaatctagaaaatcagtcatttttttcctttttactagaaaatgactagtttttatttcagaatgagcttcaaggcagcgttttaaatttctccagatccagcctgccaacatttttgtgtaagatcaacaagcatttttaatgcacgtgcctattttgttgacccatccgttacccaaccacattaaaggattgattttagaggccaataatgtgaagtaaattaaaaggataacatggccttaattgctactggtttcaccgggcttctagggcaccggaatttcttgtgggagaaacacttttaagtgtgcacaggcagttttt

SEQ ID NO: 303898 - DNA, 474 bp, Homo Sapiens
  misc_feature (23)..(23): n is a, c, g, or t
  misc_feature (316)..(316): n is a, c, g, or t
  misc_feature (332)..(332): n is a, c, g, or t
  misc_feature (374)..(374): n is a, c, g, or t
  misc_feature (437)..(437): n is a, c, g, or t
  misc_feature (447)..(447): n is a, c, g, or t
aaaaagctctgccagctgagcgnacttaaattgaggaagagttcccttctctattaactcattttgggcagtaacaacataccctgcctgatattttccttctgagactttggcataggacccacgaacaaaaagtatcaactcaggattatccaatggagcatctcataaatcaacacaaggggctactagtttggatactacacctacacaattgtgatctttaccacagtcagtcagaggtaatggagtagcagggttaagtaggttttaggatgggagtaggcattttaggatgggaggtcagaagggaggncagggaggaaaatttncattaaggttcataaggtgttagttttctttggctggaaaantgctggagcttgggttgggattttaggtaggacttttccacagcctgtgggaattttggcaanttaagtttcnttcccttaaaacccgttccggtggaaa

SEQ ID NO: 303899 - DNA, 438 bp, Homo Sapiens
  misc_feature (187)..(364): n is a, c, g, or t
gtttcagggaggtagtgacacagacgatgctgaagtctgattctggatgtattgcgaaagggaaagcccccaggatgagctgatcatcaaaagtgaggaatgggagaaagaagcaatcaccgcggatgattctgaggattttaccccttccacctctcaattcctgaagacccatcccttccttttnnnnnnnnnnnnnnnnnnnnnnnnnnnnnnnnnnnnnnnnnnnnnnnnnnnnnnnnnnnnnnnnnnnnnnnnnnnnnnnnnnnnnnnnnnnnnnnnnnnnnnnnnnnnnnnnnnnnnnnnnnnnnnnnnnnnnnnnnnnnnnnnnnnnnnnnnnnnnnnnnnnnnnnnnnnnnnnnnntagttcccagccattcagggagggttggggcagggagattcattaggaagttggggaggcagaatttgcattag

SEQ ID NO: 303900 - DNA, 311 bp, Homo Sapiens
agatgttttgggctattttatgagaatatttactcataccacttggtataggttgttccaggctgtaaaattcaatgctgggtctgtgaatttatctgtttggcataatgcttctcttcacagtagctactcagtgtgtaaccaactaaataaaacagctataaattctttatgcaacatgtggtctgaaaaagtttgaggctttcctcatttgtgtcagattttccctgtcctgtattcagaaattgagtccataatctcagctcataaggtgcttgataattctaatataacaactaaaactgtcaaat

SEQ ID NO: 303901 - DNA, 390 bp, Homo Sapiens
tccaccttatatgtgctgagagctgttctgctgccattttctctccctgcctcaagagcacatttaagtgcaagtgaatggggtgggattgtgattgttacactgagtgattgcttagaatctgccctaccgtatctgccagtgtataaaactctaccgatgttaccaaactctgagaggatgtgaagctctagttttcactgtgctgagctgattacctcatgtcgtcaccaggggggcagcaccttcccatggcctttgggacttagggagcctccgggcggttggggaagcccacaccaaaccccatggccttaggtgggtcacctttttacctttccaaggcctgattcccaggttttggggcaaaaacggatgttaaaatgtggt

SEQ ID NO: 303902 - DNA, 374 bp, Homo Sapiens
  misc_feature (111)..(167): n is a, c, g, or t
  misc_feature (234)..(234): n is a, c, g, or t
  misc_feature (271)..(271): n is a, c, g, or t
  misc_feature (281)..(281): n is a, c, g, or t
  misc_feature (335)..(335): n is a, c, g, or t
tactccatatgttcctgtagaaaagcatgaacaaacctataatttaaatccgaagaatctctggcgtctaaaacttcacaggtggaatgcaaagtaagggcaggagactannnnnnnnnnnnnnnnnnnnnnnnnnnnnnnnnnnnnnnnnnnnnnnnnnnnnnnnnctaattccttttctgtgtggggcctgatctattgacttcggtttctaatggaataggaatatgtttnaaaatggatgtggatgtcactttttgaggttaagttnacaggaaganttccatgttttggggagttgttgccttcaccctctttaggttcattttttcccnggggggaaaaggccagctgttcatggatgttgagggtag

SEQ ID NO: 303903 - DNA, 397 bp, Homo Sapiens
  misc_feature (346)..(346): n is a, c, g, or t
taggatgggcagggagagagaaacaggaggcagagtccctccgtaagctttcccaagtgagtaaagtactcatacccagggctttatttgaatttatcacctcttattagtgtcttttgaaatgcgaattagctgattaaccactgctcacagccttccaactgttctttattctccagcattcagcaactttgttctaaatagggtaggccacagtagcccaccagggggaaattattctcaaggttacaagaacagcgaccaaggcaaaattaggccctggctgggatgggaatcaagttggggagtgaggttgtgcctgggagccagggttcttaaccacttnccaccccccaacccggttttacacacaaagccttccgagggattgttggtt

SEQ ID NO: 303904 - DNA, 387 bp, Homo Sapiens
  misc_feature (365)..(365): n is a, c, g, or t
atgtcttctcaaactgttggctctaaagggatgttccagcctccctctccagagctgcctgcagtttcccttattcagctgtctcctgcctagtctctccagcggcctccttaccaagaccctttttcctaaacagttgtccttccctcagaaactccatggctgcaagtgtgaatagacttgtctttaggatccctctctctggtcatccctgatcatcttagggccgtctcccttttctgatttttgacagctctgtttattttgcccatggctagtcctcttgttttgtgtctgctgtgtgttcttggcccttccattgtcagttctgtacatccggggttcagcttgtctcactgtgggtnagcccccttctggcttgtcttt

SEQ ID NO: 303905 - DNA, 157 bp, Homo Sapiens
  misc_feature (28)..(28): n is a, c, g, or t
  misc_feature (120)..(120): n is a, c, g, or t
  misc_feature (125)..(125): n is a, c, g, or t
aaataaacacatgtttagcattatgganaaatctcacaaaatttaatcctaaaaccattattgtgaaattagggtagatattggctaggcatagaaactaacaattactgcttctgaatnattcngctacaaaactgcttaatttatgaggatgaaa

SEQ ID NO: 303906 - DNA, 126 bp, Homo Sapiens
taacagagagctttccaaacctagagaaagataccaatattgaagaaggctgtaaaacaccaaacagatttaacctaaataagactacctcaatacactaaataatcaaactcccaaagattgaag

SEQ ID NO: 303907 - DNA, 427 bp, Homo Sapiens
  misc_feature (407)..(407): n is a, c, g, or t
agaaaagggcaggctttggagtagctcagttgtattataaccttggcttctttactcacctaggacatacattctctctttagctgtagcttcctcccttctgagatggaaattataagccatctcacagtgttgtgaggattggagctcaagtgtgtaaaatgcctcctctgtgggctctccttggagagttcttgtatcctattgattgtcatcaaaggaaaaaagtggcaggatgatggcataagtgggaagaaccttgagtttaatagtctgaaaaagtggttacaggttcttgctatgcttttcctctctgtggttttctgaacccatcgcctaacctgtaagcctttaaactttcatctgcaataatagttttgtggccaggttgacttctgataggcagnaactcttgtagatggtagga

SEQ ID NO: 303908 - DNA, 263 bp, Homo Sapiens
  misc_feature (116)..(116): n is a, c, g, or t
  misc_feature (155)..(217): n is a, c, g, or t
  misc_feature (222)..(222): n is a, c, g, or t
ataagccaccacgcccagacttgatcatttctttaaaagttaaatatacatacctccatgacccagacatttccactcatgggctatttatctaacaagaaatggaaagcattatngttccacacaacttgtaacatggaatgtttcattagggnnnnnnnnnnnnnnnnnnnnnnnnnnnnnnnnnnnnnnnnnnnnnnnnnnnnnnnnnnnnnnnggttnaacaaatttatgggtctaggccataccctgggcatattctt

SEQ ID NO: 303909 - DNA, 103 bp, Homo Sapiens
gacagggagccataggggaggatggttttccgggctggaaactggattccacctcagattcagggcatttagattcttcattaagggaggcacgcaacttagg

SEQ ID NO: 303910 - DNA, 266 bp, Homo Sapiens
  misc_feature (200)..(200): n is a, c, g, or t
tgacacccggctggctggctctttttactttagattgtatctgcctggatttggacaatgccaaattttttatgtaatcaccatttggtttggggactggagagctctttcattttctaccagttcaaaccaccattagagtctttcagttaattccccaattggtagcaaggtagaatcagcagggatagcttaatttncctatgggattccgtttgggaaaggcagtctatagcaggcagataaataatgtggtggaatcattc

SEQ ID NO: 303911 - DNA, 353 bp, Homo Sapiens
  misc_feature (65)..(173): n is a, c, g, or t
  misc_feature (310)..(310): n is a, c, g, or t
tgaactcccacctcaaattcctgagtaactaggactataagcatgtatcatcatgcccagcaaannnnnnnnnnnnnnnnnnnnnnnnnnnnnnnnnnnnnnnnnnnnnnnnnnnnnnnnnnnnnnnnnnnnnnnnnnnnnnnnnnnnnnnnnnnnnnnnnnnnnnnnnnnnnagcatgagccactgtgcccggccttgttccagttctgagggggaatgctttcagcttttctctcttcagtatgatggtgggctgtgagtttgtcatatatggcttttattattttgaggtatgttccctctgtgccnaatttgttgagggtttttttaccacaaaggggtacagggtttt

SEQ ID NO: 303912 - DNA, 436 bp, Homo Sapiens
  misc_feature (418)..(418): n is a, c, g, or t
tggattaatttgtaacctgaatctaaaagctaattcatataaaattcaaaatagtatgtatgagagagaaactaagaatttctagcacttgaaactttgttttgaagttctagcaatccaagccggtaataagcagaaaagccggcagtgatagtgacaccgaaagctggatctctcatgttcttatgctgaatcatgtggttcgaaaggcagttttataatgtcaactgttttctctgggatcgtgatagcccatcctgtaagtacaaaggagccagagcttgaaggggaccccttcttcctgatgtcacacatgggaacataggatggttgtggtcctcaggaagctcattggggccatggaccccaagggagataggaaccaagggctttgtcctatttaattctttattccccnggaggttattaagtgtat

SEQ ID NO: 303913 - DNA, 324 bp, Homo Sapiens
tattgaaatgtgtttattctcctagattctttttcagcatagatggaatctgaaaagcactcagatatttagtgtgtgcttccttcagccctaaatacagcattagcatcaaatcaagggtacatttgtaataaacctcagcaaaccttacctgaagaaccttttaagaaagtacagatttccagggtcctatcactagagatgatttggtgtatttgtgatgaggcataagaggatattttcacaagattctcaggattccagttcctgttctgaaacctttggaggtacaactatatttaggcaccactgccataaactacc

SEQ ID NO: 303914 - DNA, 474 bp, Homo Sapiens
  misc_feature (232)..(329): n is a, c, g, or t
  misc_feature (367)..(367): n is a, c, g, or t
  misc_feature (391)..(391): n is a, c, g, or t
  misc_feature (435)..(435): n is a, c, g, or t
  misc_feature (449)..(449): n is a, c, g, or t
agagagcaagctgacctcatgataaacactgcatgtgctgcaagctcgtttattttcgtttctcccccctcttcttccccgatgaatttcatacagtttatagggacagtttcaaaataacagattaacaggagggaaaaacagtttatttacatgtgcaatgtgcatacacatggaagaactcagtggtgggtaactcaaaggagtagttagttagaatttggggccaatnnnnnnnnnnnnnnnnnnnnnnnnnnnnnnnnnnnnnnnnnnnnnnnnnnnnnnnnnnnnnnnnnnnnnnnnnnnnnnnnnnnnnnnnnnnnnnnnnngatggaacataggttgcaaaagtccttcaacaaagtantaggccaaaacccaaatttgaacnggcttttccaaaaaggttatttccggcacattcgggtgggggtnttcttccccgttgngggcagggttggcttcggcttacgg

SEQ ID NO: 303915 - DNA, 218 bp, Homo Sapiens
  misc_feature (128)..(128): n is a, c, g, or t
  misc_feature (136)..(136): n is a, c, g, or t
  misc_feature (154)..(154): n is a, c, g, or t
  misc_feature (157)..(157): n is a, c, g, or t
  misc_feature (166)..(166): n is a, c, g, or t
  misc_feature (171)..(171): n is a, c, g, or t
tttaataacagtgacaatgaccaacattgagcagttgcctcgtgctccggtctcagcactggcttattaacatactcttaccactcagagagggacactgaggagaagagaaatggtaaacatcatangattaaantgagaggtaagattaaantgngagtcagangcaantgggaggaactctgagtcaggattttggtaaagttcgggggaaacag

SEQ ID NO: 303916 - DNA, 361 bp, Homo Sapiens
  misc_feature (136)..(136): n is a, c, g, or t
  misc_feature (266)..(266): n is a, c, g, or t
  misc_feature (293)..(293): n is a, c, g, or t
  misc_feature (322)..(322): n is a, c, g, or t
  misc_feature (334)..(334): n is a, c, g, or t
  misc_feature (344)..(344): n is a, c, g, or t
aaagacccttccatattaatatatagagataaaacatgattttaatattggataagcattatcagagttatatgcatgtgaagtagtacaaaaacaactacaaaatctggaaataatttcacacacattcatacanaaaaagtagaagagagaacaatttaaaacttctcattttcttgagatacaagaggatgcacattgtgcctgtctcacttataccttaggagagatccctgagcaaattctagaagtatttgcatttccangggtcagaggcacatgaacttgcattntataattcaaaaggtcaagactttttaantcgggctgggcncagtgggctnactcctggttaatccca

SEQ ID NO: 303917 - DNA, 213 bp, Homo Sapiens
atgagcaccatgcctggcctaagcctatgtttttaaaagccatagaaagagactaagagtgaaaatcattgtgaaaagagcttgaatatctcttgtgactccacctctccttaaatatttataagatgtatttgctagattgatgtgcatgttcagttctaaacctttgaagtaatgcagaaaccaaatactgtgttggttaatggtaatgca

SEQ ID NO: 303918 - DNA, 420 bp, Homo Sapiens
  misc_feature (261)..(261): n is a, c, g, or t
  misc_feature (268)..(268): n is a, c, g, or t
  misc_feature (311)..(311): n is a, c, g, or t
gggcacgagtcacaaggcatctgtgcatatactggtggattttaatgagagtcctgtgtttggagcaccagaaataaaccagcttcagaagcaaagatctgaacgtctatgacactctttcgagctgacacagtgaagaacatagaaggagaactcacccagtctgccagggtcacagaatgatcatactcaagatcttcctggggagtcaatggcaaatttcactgggctattttacagatgaagaaggaacataaaganggttctnggaccccgaagtccacggaacacccaccattacctgatctttnggagcttgtcatttggccagtggaccctaattaaacacgtccacggggatgtggggatagaatgccggagcctgggttcgctaggggcattccaggttttttccttcct

SEQ ID NO: 303919 - DNA, 439 bp, Homo Sapiens
  misc_feature (43)..(43): n is a, c, g, or t
  misc_feature (301)..(301): n is a, c, g, or t
  misc_feature (418)..(418): n is a, c, g, or t
attccttaattgtattattcaggggatgtcgatcagcgcacgntaggtcatcgctggaaaaactgatgcagattgccggaacgactttgcgtttatggcccgaactggtgaaataagtcgcaaaaaaagcccctcagcctgagcgaatgaggggccaaattgcagagtacagccttgttatactttgttattcaaaatcagttgcccgttgctatctagcgggatctgcgtacccggatcgcggtccatgcggattttgccctgctgatcgccaatcttataggtcacatcataaccgagncattttttctgacttgtcatacaccgttttacaacgctgttgcgtagtcgtgtaagtatcgctttcctgggagagagccctgggatctggttaccggcatatccaccacccagcggnccccacaacagtgggcgacat

SEQ ID NO: 303920 - DNA, 396 bp, Homo Sapiens
  misc_feature (339)..(339): n is a, c, g, or t
  misc_feature (347)..(347): n is a, c, g, or t
  misc_feature (372)..(372): n is a, c, g, or t
ttttctttagaaaaggttgaaaaatagagttctgccttataaattcatgttatttgctagttcagtaaattactatttttttctatttctaggcattttatcttttcatcctcacaaatgtattctaaattcatcatttaaatatctttctgattgtaatcttgctgaataccagttttgttttccttatattgctttagtctctcttgggctcctttcaacctacttggctattccccctttttgaatgacctcattctttctgaatcccacacatcttctgttgattactaaggtctgtgcttaggattcacagtttcctcttctctctcacacgantacaatcnatgtgtcccttttcacaattggaantatttggctacagtttcccttaac

SEQ ID NO: 303921 - DNA, 333 bp, Homo Sapiens
aactcggtatcttcccagatgtctctttatatatagataaactgatacagaaatgagtatttaattttacatagttgggctcataaaatatctgtgcagttgtgcaatatgctgtttctgctcaaaatgcacgttggcagtttattcagatctgcacagtggctgtggttgcagaatctttcagggatgtggcatagatttatttatcaggtcccctgttgtgaagatgcacacacttgctctctcaggtccccagagcttctctaaactcagaacacatcacctcccatgcatgggacattgggcacagcttcctaactgggccttctggct

SEQ ID NO: 303922 - DNA, 271 bp, Homo Sapiens
  misc_feature (112)..(112): n is a, c, g, or t
  misc_feature (125)..(125): n is a, c, g, or t
  misc_feature (142)..(142): n is a, c, g, or t
  misc_feature (145)..(145): n is a, c, g, or t
  misc_feature (148)..(148): n is a, c, g, or t
caccgtcttacatttattcacacagagggataagaatcagtacaaataataaacagtgctttaaatacaaataaatagctctggtttctaaaggaaacaactctatatatanttctaagtttttnctaagttcctattaaanatngangactattttgcactatgtaagtcctagtccaccataatcctttgaggacttacggataaaatggtgaattctatactccaggaggtcaccagaaaattgggagataatgctcctacctctctg

SEQ ID NO: 303923 - DNA, 373 bp, Homo Sapiens
  misc_feature (188)..(188): n is a, c, g, or t
  misc_feature (215)..(215): n is a, c, g, or t
  misc_feature (236)..(236): n is a, c, g, or t
  misc_feature (269)..(269): n is a, c, g, or t
  misc_feature (290)..(290): n is a, c, g, or t
  misc_feature (295)..(295): n is a, c, g, or t
  misc_feature (301)..(301): n is a, c, g, or t
  misc_feature (350)..(350): n is a, c, g, or t
ttcctaacctttctaaaacaagtatgtattactttggtaataaaaagtgattattttcttatgcaagcacttgtatctggtttcagtagtgaaatgatctttaaaacctgaagagtctagtaaacaatttatgcagaaagtgctaaaaaatccttaacatcttccaagccttttaaaaacagtaaaanataagccttaataggcttctaaaaganaaaagtagttagaggaaaganttataagctaggtaactgggtatgtaatataanagttctcttttataaggggantatantattanaccttgggtaatttaggttaggttgggttttggaaggtcaaagtcagcnggggtgagggtgggttcccggcc

SEQ ID NO: 303924 - DNA, 356 bp, Homo Sapiens
  misc_feature (269)..(269): n is a, c, g, or t
  misc_feature (297)..(297): n is a, c, g, or t
  misc_feature (311)..(311): n is a, c, g, or t
  misc_feature (334)..(334): n is a, c, g, or t
tctacagtacttgaagtattattaactacattcgccatgctgtatgttagatccccagaacatatttatcctgcatatctaaaattttgatcattttacaaactttctattttttttgtcaattttctccagctagacacttgtgcaatacggctattatctgatctttgccttaaatgttgtgcttcttttccatatgcacgtattttgcaaaatataaagtgtgtaggagctatataggcactcagccaagtgggtggggtacctgncagggtgctttcagaggaagttaaattngatggctggctaantatttgtttggaattgggcacgnattatggatgaggccattaggc

SEQ ID NO: 303925 - DNA, 334 bp, Homo Sapiens
  misc_feature (48)..(48): n is a, c, g, or t
  misc_feature (51)..(51): n is a, c, g, or t
  misc_feature (78)..(78): n is a, c, g, or t
  misc_feature (257)..(266): n is a, c, g, or t
ccagtatttaatctgagcacttaaatcattttattaaagtgccaaagnatnttgatatacctgttatccagcaaaganacacaaggcaattattagtaaattttaacagattaatgcatttatttggtaggttttataatggctctatttcttgagtttgtatatatttgagaattatgttataaatatgttattatttcattgtctttgctatctatttgaaccaattttttagtaattgttaccgctcttttacnnnnnnnnnngttcctttgaggactgagtctcgctccagccgggggcaacagtggcaagcctccgtctgcaggaaaaa

SEQ ID NO: 303926 - DNA, 333 bp, Homo Sapiens
  misc_feature (307)..(307): n is a, c, g, or t
taaaatctctagggaagaagaatccagtcactcttggaaaatcaatccagtatactatataaatctatcttcttatacttcagaaccacatttccaactatctgctatacatttctacttgcatgccttatagataacacacatgcaacatgtacagagccaggtttgttacacagtggacaactgttactctttggctgaacattctactttgtttcggcaatagcaacctgatttcctttctgcagatttaccttttcccctcaatatagttttgaaggagagccattaatataagtccctgttntgccttttaattcaaaagtggttaaa

SEQ ID NO: 303927 - DNA, 325 bp, Homo Sapiens
  misc_feature (119)..(133): n is a, c, g, or t
  misc_feature (199)..(199): n is a, c, g, or t
  misc_feature (244)..(244): n is a, c, g, or t
tcttctagcattgcttctttattaatgtcccattatgattataaaaggccaaaatgtttatttaaatgtagtcttcaaatatttttagggcactcttactcagatttgaatttatttannnnnnnnnnnnnnncaatgatatttgatttatttaaatgtggcttttcacatttgatgatagcaactgtgttcagtaganaaacatattataaactcacaatattttagctcctgttagcaaaantagggaacttgaaattctctagatctgtgggttcctaaccctggactacacattcctgtaacctaaacagggctttaaaaa

SEQ ID NO: 303928 - DNA, 384 bp, Homo Sapiens
  misc_feature (56)..(76): n is a, c, g, or t
  misc_feature (93)..(155): n is a, c, g, or t
  misc_feature (161)..(282): n is a, c, g, or t
  misc_feature (350)..(350): n is a, c, g, or t
  misc_feature (362)..(362): n is a, c, g, or t
tatttcttttccaccagttatacagatatattaaattcatcatcattgactttgannnnnnnnnnnnnnnnnnnnnaccccaagtttacaacnnnnnnnnnnnnnnnnnnnnnnnnnnnnnnnnnnnnnnnnnnnnnnnnnnnnnnnnnnnnnnnatacannnnnnnnnnnnnnnnnnnnnnnnnnnnnnnnnnnnnnnnnnnnnnnnnnnnnnnnnnnnnnnnnnnnnnnnnnnnnnnnnnnnnnnnnnnnnnnnnnnnnnnnnnnnnnnnnnnnnnnnnngattaaagggcgtggaaccacctcacccagctgactttggactttgcaaaaccaactaactgaaattnaccaagggtttnaatgattaatattcccccttat

SEQ ID NO: 303929 - DNA, 179 bp, Homo Sapiens
  misc_feature (139)..(139): n is a, c, g, or t
acgagccaccgcacccaccccataatttcttctataactaatatgacacatttggggattgaggaacactgttaattccatgttcttcaaggggggaaacatactagttttctcccttggaatagttacagtctatttngatggggacttggattccatgaaggggtgggttttaaacc

SEQ ID NO: 303930 - DNA, 341 bp, Homo Sapiens
  misc_feature (88)..(88): n is a, c, g, or t
  misc_feature (122)..(122): n is a, c, g, or t
  misc_feature (277)..(277): n is a, c, g, or t
  misc_feature (292)..(292): n is a, c, g, or t
  misc_feature (329)..(329): n is a, c, g, or t
aatttactaaaggcactattgttaaacatcaaactaataacttgttgccaataaggtacatcgttgtaaacataacaaaattttaagngatacatggctaataagcaaacaatacaattttnagttacagctttcctacttacaagatcatgtcccttccagccattacaagggcatacagtgatgccattgctcccaacagttacctgggaagggagcttggagctcctaattggtttgagatcatgactgccaaggtctttaaggggctccaaangtcttcactcataanggtcaattctaaaattgctgggtttaggaaatcaagntacttggcttta

SEQ ID NO: 303931 - DNA, 261 bp, Homo Sapiens
  misc_feature (34)..(34): n is a, c, g, or t
  misc_feature (98)..(98): n is a, c, g, or t
  misc_feature (123)..(123): n is a, c, g, or t
  misc_feature (200)..(200): n is a, c, g, or t
  misc_feature (207)..(207): n is a, c, g, or t
  misc_feature (225)..(225): n is a, c, g, or t
ttctccacaatgctgtattttatcataaataccngataaagttctatcagtatttcaaaattctcatcatcgtattgcacagactataatctcatggngagctgcaaacaagcctatcttggnactttttgtgttacatgcgaattggtaaagcgctgcacatttctgcagcatgtcccccttctgaataatctataggncaatatngtctagaaaaagtatggnttagttgttctccatcttataggcatcttgggggcc

SEQ ID NO: 303932 - DNA, 172 bp, Homo Sapiens
tctttcaggcattacaaagtattccaggcttgtcttgatcgtttctgcttcagtgttacaatccgccatctctcctgagtcctaatatttagagaccacactcagggatggacattaattgctactggattgtgattgcttctaggcctgtttaaagtgtccagagttagga

SEQ ID NO: 303933 - DNA, 439 bp, Homo Sapiens
  misc_feature (44)..(85): n is a, c, g, or t
  misc_feature (404)..(404): n is a, c, g, or t
  misc_feature (421)..(421): n is a, c, g, or t
ataaatcagttcttcgataataggagctgtatttcaggtgcttnnnnnnnnnnnnnnnnnnnnnnnnnnnnnnnnnnnnnnnnnntgatggatatcttcttgcagaaagttgtgttggacagtactgacttagagggtttagggaaagccctatagcagtggtaaagagcaacaactccttaaaccacaagcttatgaaggggtcaccttgtgagtgcaagcgtgctctagttattcagccacatttgagccaaaagctagggcaggtcagcgtccttccccagcacttggggaagggtggaatgaggcaagcagttcagtttctccccggggtcagtgggcaattttattcccctaggggaggcacttggggccaatatctgggaggatattttttgggttanttgcaactacggagggnaggggggattgggaggcc

SEQ ID NO: 303934 - DNA, 209 bp, Homo Sapiens
  misc_feature (13)..(13): n is a, c, g, or t
  misc_feature (27)..(27): n is a, c, g, or t
  misc_feature (86)..(86): n is a, c, g, or t
  misc_feature (89)..(89): n is a, c, g, or t
  misc_feature (102)..(102): n is a, c, g, or t
cttaagctaattnaaattagggttttncacctgcaatagaaaggcttctgactaaaacatatactcagagctggcaagaaactganggngaaaaagaaaatntgtcagaaaaaagtttagagatacctagcttaataatgaaaaatcttagacacaataaaatgcattcaatatcaactaatgagattttatatgaaatagagtatgta

SEQ ID NO: 303935 - DNA, 436 bp, Homo Sapiens
  misc_feature (11)..(11): n is a, c, g, or t
  misc_feature (41)..(285): n is a, c, g, or t
  misc_feature (317)..(317): n is a, c, g, or t
  misc_feature (363)..(363): n is a, c, g, or t
  misc_feature (402)..(402): n is a, c, g, or t
  misc_feature (407)..(407): n is a, c, g, or t
  misc_feature (420)..(420): n is a, c, g, or t
agaatgatttnataaattttaattagactgagtctcgctcnnnnnnnnnnnnnnnnnnnnnnnnnnnnnnnnnnnnnnnnnnnnnnnnnnnnnnnnnnnnnnnnnnnnnnnnnnnnnnnnnnnnnnnnnnnnnnnnnnnnnnnnnnnnnnnnnnnnnnnnnnnnnnnnnnnnnnnnnnnnnnnnnnnnnnnnnnnnnnnnnnnnnnnnnnnnnnnnnnnnnnnnnnnnnnnnnnnnnnnnnnnnnnnnnnnnnnnnnnnnnnnnnnnnnnnnnnnnnnnnnnnnntgagatagtccactacacccagcccagggatngaatttttaaaaacttttaaaaatgttcacataggaaatgttattnttgctttattcattttcatgacacaaggtattctaaggntctgngctttactgaggntcatatattagtttta

SEQ ID NO: 303936 - DNA, 450 bp, Homo Sapiens
  misc_feature (389)..(389): n is a, c, g, or t
  misc_feature (411)..(411): n is a, c, g, or t
  misc_feature (424)..(424): n is a, c, g, or t
  misc_feature (434)..(434): n is a, c, g, or t
attcaagaccggtgttgtaaaatgaagaggaattttacttacatgttacagctgccaagtttttagatgttcctgtcatagctaaatagtcactgctagcctttcagagaacagatagtaacaattgtttgcagctgcagtgttgcatctaattttggtgtttaggctttttattttgtgggaagctttttgttaatatcctgcagggcaactgcctgttgggagggagaggatggaagaaggagcttactctgggggccttgcctattgagggaggctgttgcccagagcagttgcttcatgggaagtcatccaaagggcgctctcagtcattacaattgacagggatctcaaagttggggaaagggctgtttaagttcatcccgttntagttctcccacatagggggcntgacattttggcncacaaccctnccacccaagggggttt

SEQ ID NO: 303937 - DNA, 284 bp, Homo Sapiens
  misc_feature (250)..(250): n is a, c, g, or t
gtggctgagctctcccggtgacagaaacccctgccttgtcgtttctgtaacacaccaccatctagctctgtcgctggccctgccctaagcctcagctctcgtggactagtcagagatgagaccgcggctcacagtgctgtctgccgtgatttctgttgtccccgagctttgctgctgtgaggagacccagcccaggccacctactcctcgcagtcctgcagccctctgaaactccctccctgtgccctgnccctcctggtcgctaaacccaagccatgtgtttt

SEQ ID NO: 303938 - DNA, 413 bp, Homo Sapiens
  misc_feature (164)..(187): n is a, c, g, or t
  misc_feature (195)..(195): n is a, c, g, or t
acacacactcagaggagagaggaagaattgaaagacttgagaagactttgataacctccctgctggcccttctgttttccggaaagatcctggatgttggctaccttttcaagtcatcttggcatgtctctagtgttttgtaagccgctttccagctagctgcnnnnnnnnnnnnnnnnnnnnnnnnacgccgcncttattctgatgcatttgactgtcttttatccaactgcccagaagcaaatgtgttaactcggcgatgccccttcatgcccgggttcttgcagagcttctgaggacgcccagacccattttcctgggctgggatttgggagcggctgctggggctgtgggacccagggtgtgtgggatcgcttttacccagaaagcttgggaaagcgccaataattaac

SEQ ID NO: 303939 - DNA, 376 bp, Homo Sapiens
  misc_feature (115)..(115): n is a, c, g, or t
  misc_feature (302)..(302): n is a, c, g, or t
  misc_feature (322)..(322): n is a, c, g, or t
cgctccctgtgtgggctccaggtggtccccttgcctacaggaccccccaccttccctgcccaagagcccctgactggtccccagacgaaagccccagagctgggccttctggctnctcgaccctcctgggccttgttccgctcccctccaagcctcaagatcactcctaggcttctcccaaacccaggcccttcctgttctttgccctacgcccctccttgctgctccctcgaatcttccccgatctcagtgtgacctcagaacacctgcctctccccttgcagagacctccaggtgggctncggttcggaggttggagaantggcttcctaggccaagttcaggctgtgaggtgaactttcaacggaatttgggg

SEQ ID NO: 303940 - DNA, 490 bp, Homo Sapiens
  misc_feature (91)..(151): n is a, c, g, or t
  misc_feature (162)..(339): n is a, c, g, or t
  misc_feature (379)..(379): n is a, c, g, or t
  misc_feature (430)..(430): n is a, c, g, or t
  misc_feature (435)..(435): n is a, c, g, or t
  misc_feature (458)..(458): n is a, c, g, or t
aaaatgaatgttgagtgattcctaaactaacacgatattaaaccgagttccagactacaccagcctaattttatttagtggcagactctannnnnnnnnnnnnnnnnnnnnnnnnnnnnnnnnnnnnnnnnnnnnnnnnnnnnnnnnnnnntgagttcaagnnnnnnnnnnnnnnnnnnnnnnnnnnnnnnnnnnnnnnnnnnnnnnnnnnnnnnnnnnnnnnnnnnnnnnnnnnnnnnnnnnnnnnnnnnnnnnnnnnnnnnnnnnnnnnnnnnnnnnnnnnnnnnnnnnnnnnnnnnnnnnnnnnnnnnnnnnnnnnnnnnnnnnnnnnnnnnnnnnatgagccaccgtggcgggcctctactagcctaattggctngcaagtgtggctagtcgtatttattcaaactaggatgtaaaggttgcttgnagggntaggggaggctttttaccacgtngcctgagagggcagtttgttgggtttataaac

SEQ ID NO: 303941 - DNA, 438 bp, Homo Sapiens
  misc_feature (162)..(379): n is a, c, g, or t
  misc_feature (388)..(388): n is a, c, g, or t
  misc_feature (401)..(401): n is a, c, g, or t
  misc_feature (407)..(407): n is a, c, g, or t
  misc_feature (421)..(421): n is a, c, g, or t
cagatttcagtgaggacaaactctgacttctgaatccttttactagaggtaaccttctatgtgaaatcaataagccttaactaaggggatgacttaaacagggatgtaggaggtgtctccaaagagatggtaaatgatttataagatctagaatatccccannnnnnnnnnnnnnnnnnnnnnnnnnnnnnnnnnnnnnnnnnnnnnnnnnnnnnnnnnnnnnnnnnnnnnnnnnnnnnnnnnnnnnnnnnnnnnnnnnnnnnnnnnnnnnnnnnnnnnnnnnnnnnnnnnnnnnnnnnnnnnnnnnnnnnnnnnnnnnnnnnnnnnnnnnnnnnnnnnnnnnnnnnnnnnnnnnnnnnnnnnnnnnnnnnnnnnnnnnacctggggnaggccaaggtttntgggtnaggccaggttcgtngccattgtatttccagc

SEQ ID NO: 303942 - DNA, 475 bp, Homo Sapiens
  misc_feature (18)..(18): n is a, c, g, or t
  misc_feature (336)..(336): n is a, c, g, or t
  misc_feature (377)..(377): n is a, c, g, or t
  misc_feature (444)..(444): n is a, c, g, or t
  misc_feature (451)..(451): n is a, c, g, or t
ggatggtcggggctcagntctacaatgatttaatgtcttaagaaatgaggacaccttttgtgttatttcagaaagtctaacactttagaggctccataatatccactctaaatggaagaaatcttttgatatatcttgagagaatcttggttgccattcatccgctacttttcagagaggagcagtgaaaccatcaggccgcttgttgcctggaataggcctgagtatcctatgtgttctctccatccctcttagacttggatatcaggattcccataatccccattgcccagtgttttatttgccacagcaaaacttagtattgataaaactatncaggtcggttcatttggggattggactttctgtgcacatgnactaggagaaggcaagtttcaatgtattatttaggattttgggccaaaccctgttttcttgttaccntttacgntttgtgttaaccttatggaggaat

SEQ ID NO: 303943 - DNA, 401 bp, Homo Sapiens
  misc_feature (45)..(79): n is a, c, g, or t
  misc_feature (347)..(347): n is a, c, g, or t
  misc_feature (370)..(370): n is a, c, g, or t
gtaggcgcccaggcatcgtgcaaacttgtgagcccaagcaatttnnnnnnnnnnnnnnnnnnnnnnnnnnnnnnnnnnnacgtgagtcactgcgcccagcccattttcagatgaatttagtccctctcttcctttatcagaataatgttctttgtcattatgctcagaagtgtatttcttagaggatttgttgtaggattcctgtcttcttgcctcatcatgaaataggcttattattttcctacctgagtctgcaatgtcttcagttcagcctctttgcccatcagcatgcgctttgtgttttcgtccttcgttttctttcttgttttctttctcttgaccttgantgtgatcttgaataatatttttngagtaaggaaaaacagatggcatctggacag

SEQ ID NO: 303944 - DNA, 257 bp, Homo Sapiens
  misc_feature (70)..(70): n is a, c, g, or t
  misc_feature (84)..(84): n is a, c, g, or t
  misc_feature (241)..(241): n is a, c, g, or t
aaagactgcctctctagttccctattctctactggtatagatagaggaaagactgacactcctcttcctntccattaatggctnctcctttgagtcagggctcctttccttccccatcctaggtcagcacagcagactcaaaggtttctcactggaccctgttctaaaagcaggtacagcctttctgagatttttcataagacttttacctgccaggaacaatggtaacagacatcaagancaagatgtacaatccc

SEQ ID NO: 303945 - DNA, 230 bp, Homo Sapiens
ctttaggaggatttcctgttcttttcctgtactctgctgccaaggagaaacctgtcttgcaccaggcctgcagcttcctcagtcccccacatcatcaggcaatatctgcctggcactcctctttgttccttttctctgaccttcctttttgacatgatggttgacctgaagtcaccgaggcaggactgctcatctccagggtcctatgggaaacagtcaccgggtgcaaa

SEQ ID NO: 303946 - DNA, 437 bp, Homo Sapiens
  misc_feature (372)..(372): n is a, c, g, or t
aattattttaataattaatgatgataatgagtccgaattttaagtatgaaaattattatataaagagtaaaaattacaggcatagattgagaattaatgttgagagagtgtgattgctagtaattctggggaatccattgtattctttgtgggactactttcagtgacattatatcatcatcattaagcaaatattcaggcccagggagatgaagagattaagtcttgacctcagttggttcctatcagggaggaaggatagcttactaatgtgctgggcagcgtcacttccggcagcagtgactctgggcagagcttaggcgcaaggaacatcttgctttttctacagaccttgtttttaggagagagggnttgtttaggttttacaggagtccccttcagggctggcagtttaacagttacccagggatttaccc

SEQ ID NO: 303947 - DNA, 285 bp, Homo Sapiens
  misc_feature (191)..(191): n is a, c, g, or t
  misc_feature (216)..(216): n is a, c, g, or t
  misc_feature (232)..(232): n is a, c, g, or t
ttgggtgtgaaagtgcagctaagttactgttaatcaagatcagaataaaagaatctaccaagaaaaattaacaaaatcccccttttaatgtataatcttccatctgtcaggctgtaagttaaataacacaaaacaaagctgtatgttttatggatatgtacatatataattgcagggaacatgatttgganggatatacacttacattgctaagantagtcacccctaaggngaagactggggtcataagtgggaagtcaagggagtcttcagctttctttttgt

SEQ ID NO: 303948 - DNA, 210 bp, Homo Sapiens
  misc_feature (181)..(181): n is a, c, g, or t
  misc_feature (198)..(198): n is a, c, g, or t
aagctatcctgattctttttgtgatgactcactctagggcaccatttctaggggtggtagacacagaaacatactatccagatcccccttcaaggcaagggcttgctgcctcacagtggggcagcatggggcaggcaggcatcctccaggctatcagtaggggcctggggcttcaggcttnctggaggtactttcctncactttgagggt

SEQ ID NO: 303949 - DNA, 406 bp, Homo Sapiens
  misc_feature (88)..(88): n is a, c, g, or t
  misc_feature (116)..(116): n is a, c, g, or t
  misc_feature (186)..(234): n is a, c, g, or t
ctggctagatcccagctgacatcatgtatagtgaaagagcacaggcttggaaactggagggacctaagtttgaatcctattatttatnctatgaacttgtttaagttacttaattncattcttaaactaggggttataacacctacttcactgggttgctatgagtgttaaatggcatactatatnnnnnnnnnnnnnnnnnnnnnnnnnnnnnnnnnnnnnnnnnnnnnnnnnattgatttatatactccctgacaggcatagccattttcttctttttgtgtctcagtgctttacctaaaggtgtttatcacattacttcctctgaaatttaatttaatcaggcaacttattgaggcatctactctgtacggggcattgtgttaggggagggacttctaggagg

SEQ ID NO: 303950 - DNA, 112 bp, Homo Sapiens
  misc_feature (90)..(90): n is a, c, g, or t
accatgggaattcaggaatctggcattttaggcatgattccccaggatgacttggtgttgcacattaggaattttgaggaatcctagggncttaaaggggcaggcccccctt

SEQ ID NO: 303951 - DNA, 399 bp, Homo Sapiens
  misc_feature (373)..(373): n is a, c, g, or t
aagttcaggggtacaagtgcaggtttgccacataggtaagcttgtatcatgggggtttgttgtacagatgatttcatcaatcaggtattaactttagtacccattagttgtttttcctcatcttccccctccttccacccttcactctctgaaaagccccagtatgtattgttcccctctatgtgagagctaaatgatgaacattttcatccttatcttcgttgacccttccacatctgaaattgtgacctcctccctctctgtgaaacagaaaccttctcttgccttcctcaccaccacccttctgggtttgctttcctaccttccgggggtacttccctcttaaaatcccttggcctattataacctcctncacctcactcataaagtttggggagg

SEQ ID NO: 303952 - DNA, 378 bp, Homo Sapiens
  misc_feature (50)..(50): n is a, c, g, or t
  misc_feature (220)..(220): n is a, c, g, or t
  misc_feature (329)..(338): n is a, c, g, or t
cagaatgaaaacagttttagctgtacctaaagtgttaccactagcatctncattatggaaaactctgctcagggcaggcttttgagaagactagacgttattttggctattagagcacagcaaatggctgcgaatggcaggggtttacagaggtaactgagcagacaaacaggagtgggcaaatgaaaacatataacatttgcattctcccttttatggngcaccataaaaatgctcaaagagatgttttgctcactctacagtcaaagggttactaattaaggcaaagcattactgaggccagaaatacctataaaagcctggctgcnnnnnnnnnngggcaacccacatctgaggcatcaacttattataggggcc

SEQ ID NO: 303953 - DNA, 448 bp, Homo Sapiens
  misc_feature (28)..(28): n is a, c, g, or t
  misc_feature (386)..(386): n is a, c, g, or t
  misc_feature (406)..(406): n is a, c, g, or t
  misc_feature (425)..(425): n is a, c, g, or t
  misc_feature (437)..(437): n is a, c, g, or t
acagattcagactcccagccacaggatnccaagggccaagagctgcacatagctcccttggagagcatgttccttttattactattttttgagagtcatttttatacaggagccacactaaacttatctgtatttttaaaaaatatacatgccactaaagcaagtgcaactcatttttaaggaatgcaaattagagagaacacgctagtgaggagataggaagggaaggctcaggaactcttttctggggctttaggtactcctttctgcagtgggccaatggaattaacaggacaacttttgctccatatttttgggggcttatttaggtgcctatttaccccagaggattcccaaaaacagtggatttaataataacacacaanttacccggcagtggaggggngacggtggcgttccaaggnactccttttctntgggcacggta

SEQ ID NO: 303954 - DNA, 491 bp, Homo Sapiens
  misc_feature (375)..(375): n is a, c, g, or t
  misc_feature (387)..(387): n is a, c, g, or t
  misc_feature (393)..(442): n is a, c, g, or t
  misc_feature (454)..(454): n is a, c, g, or t
  misc_feature (479)..(479): n is a, c, g, or t
aaactaaatttctagcttaagatgaaggtgtagttcctgcactgaatagccttcatctgtagatttgtgaaatgttgcagttttacatctaagcaccttataaggaattctatcttagacaagattagatcctgtggcaatctttatttgaaaagcttcatagtttgctccaagtgcatggaaatgtgtcttatttctcttgaatgccctttaggtcttaacagaattcacagtgccaaggagtcaaaaactatatttcaaattatatacattcctgacatattatttgagcagattaaaactgatggatagagcaatttaggcaccttgtaaagtagctacttgaaaaattgccaactttttctttttctccantcacttaaacanaatggnnnnnnnnnnnnnnnnnnnnnnnnnnnnnnnnnnnnnnnnnnnnnnnnnncagattcttggntgtgcccggggtttgagtccatccngggcatcttgtt

SEQ ID NO: 303955 - DNA, 321 bp, Homo Sapiens
accttctataaaagtaagctgaaaggaacagcatcctcgtcagtgctcggcaggggcgggtaggggatgatggttttttccctaaggtaaaactgctgttgctcttgtttcctttttaactgtcagtgtttggctttcatcagactgaacattttggtgtacacttgaactgacggtttgatttttatcattttggaaggtgatcatagcaattcctttcaacttgctaaaattcatactcccccttttaaaagtatggttctgcttacattgctgtccttttcccttggctgactttttcttctgttgcctaggttgtac

SEQ ID NO: 303956 - DNA, 442 bp, Homo Sapiens
  misc_feature (260)..(272): n is a, c, g, or t
  misc_feature (366)..(366): n is a, c, g, or t
  misc_feature (409)..(409): n is a, c, g, or t
  misc_feature (426)..(426): n is a, c, g, or t
tacacactgaatactctatttcactttttgttaatgcagctgtgttggatgtaataacaaaattaataattcctccacaagttttagctcgactataagcttgacactgactaatcagtacagagagtcagtgtcttcagtataatgctatgtctagcttatttttttatcctattaaatctatgtgcgggatttctacattaatcccttgttttctcatttatttttaaagcttctaatgtccccaaatttcatctgannnnnnnnnnnnnaagaatatggccataatgaagtcccactcacatttagattcaaaaacatattttcactgggaatttcatgaagtgactgccagctataactttntttaggaaccatttcacttcatattggttaaccctttatcttnccggcttgcctaggttnttaggtggtgacattt

SEQ ID NO: 303957 - DNA, 341 bp, Homo Sapiens
  misc_feature (27)..(27): n is a, c, g, or t
  misc_feature (31)..(31): n is a, c, g, or t
  misc_feature (51)..(258): n is a, c, g, or t
  misc_feature (275)..(275): n is a, c, g, or t
gtcaaaggtccaggagaaggaagcggntcanaatgcagtgatgagtgaagnnnnnnnnnnnnnnnnnnnnnnnnnnnnnnnnnnnnnnnnnnnnnnnnnnnnnnnnnnnnnnnnnnnnnnnnnnnnnnnnnnnnnnnnnnnnnnnnnnnnnnnnnnnnnnnnnnnnnnnnnnnnnnnnnnnnnnnnnnnnnnnnnnnnnnnnnnnnnnnnnnnnnnnnnnnnnnnnnnnnnnnnnnnnnnnnnnnnnnnnnnnnnnnncaggacttgtagtcatnacaaagaagagtttgaattaaattcggcagttgactttaccccacaaacccaggggcaccagggac

SEQ ID NO: 303958 - DNA, 388 bp, Homo Sapiens
atgaatttgaagttcccagggctgaggatccatgccttctttgtttctaagttatctttcccatagcttttcattatctttcatatgatccagtatatgttaaatatgtcctacatatacatttagacaaccaccatttgttaagtatttgctctaggacagagtttggatttgtttatgtttgctcaaaaggagacccatgggctctccagggtgcactgagtcaatctagtcctaaaaagcaatcttattattaactctgtatgacagaatcatgtctgggaacttttgttttctgctttctgtcaagtataaacttcactttggatgctgtacttggcaaaatcacattttgctttctgggaaattccggcagtgtaccttggac

SEQ ID NO: 303959 - DNA, 449 bp, Homo Sapiens
  misc_feature (12)..(12): n is a, c, g, or t
  misc_feature (153)..(397): n is a, c, g, or t
  misc_feature (405)..(405): n is a, c, g, or t
ttcggcacagtnctgtttcggagtgcaatttccatgtggcccatgtagcgtgcagtgccctcctctcctgagctagtaatctccatgaggggaagacttgttcatccctgtagcactactgcctaaagcagtacctgacaaaatgacggagcnnnnnnnnnnnnnnnnnnnnnnnnnnnnnnnnnnnnnnnnnnnnnnnnnnnnnnnnnnnnnnnnnnnnnnnnnnnnnnnnnnnnnnnnnnnnnnnnnnnnnnnnnnnnnnnnnnnnnnnnnnnnnnnnnnnnnnnnnnnnnnnnnnnnnnnnnnnnnnnnnnnnnnnnnnnnnnnnnnnnnnnnnnnnnnnnnnnnnnnnnnnnnnnnnnnnnnnnnnnnnnnnnnnnnnnnnnnnnnnnnnnnntacagggngtggaattcaccatggcccggcaattttaattattttgaaaagg

SEQ ID NO: 303960 - DNA, 393 bp, Homo Sapiens
  misc_feature (182)..(182): n is a, c, g, or t
  misc_feature (291)..(291): n is a, c, g, or t
  misc_feature (354)..(354): n is a, c, g, or t
attgctttgttgatttattaatcttttcaaagaacgaaattgtattagattgttcttgcactgctataaagaagtacctgagactgggtaatttataaagaaaaggggtttaattggctcacggttctgcaggcttacaggaagcattgctggggaggtctcaggaaacttacaatcatggncgaaaggggaaggggaagcaggcacatcttacatgggccgaagcaggaagaagagagtgagagagggagaggtgttacacgcttttaaacaatcagatcttgtgagganctcttaacagggactaggggggatgggtgcttaaaccatcaggaaaccacccccatggatccnatcacctccccaccacaccccacctttcaacttgggggg

SEQ ID NO: 303961 - DNA, 443 bp, Homo Sapiens
  misc_feature (314)..(314): n is a, c, g, or t
  misc_feature (335)..(335): n is a, c, g, or t
  misc_feature (349)..(349): n is a, c, g, or t
  misc_feature (379)..(379): n is a, c, g, or t
  misc_feature (390)..(390): n is a, c, g, or t
tggagacaaaccagataaatgcttgattggttgcagagatgcagtcaccttatttggacttgtcaacccgaaataatcgaaagtttcagatttcaactggaagagtttattcaagcaaaaagatagcaatggcccatttgggaaaaacacagactccagagaaatggactcagtactccaaaattggaagttaagttcttgcttatattactgggaaaagaggtcctgatcagatcccaagagagttcttgggatctcatacaggaaggaattcaagacgagtcggaaagtacagtgcaaagagagtttattgnaaagctactctggggccagcntgatggctttaggnctgttattcttaaggcacttttggggaggnccgaggttggnagggtccactttgaaggtccagggagttttgagaccagcccggggcaatttta

SEQ ID NO: 303962 - DNA, 464 bp, Homo Sapiens
  misc_feature (332)..(332): n is a, c, g, or t
  misc_feature (388)..(388): n is a, c, g, or t
  misc_feature (407)..(407): n is a, c, g, or t
  misc_feature (432)..(432): n is a, c, g, or t
  misc_feature (446)..(446): n is a, c, g, or t
cctctgaattgaaatgtattcatttgttcttgtagagtttattatttgttttaatcatctaaatatcttgatttttcagttcatatcatccttactaggattcaacttgattttacgaaaaacactggattaaatatgcataaaagactccaatgtgggatgtgtgctgattccagtgtatcctccagacattactgagaccaaaagtgatgcaattacattttccttttgttgcttttgcatttcttgtagtgaacctaagtccttcagatcccaataaacatacaacctaaattcttcacataccataaacacagaccttgttgtttccnggactttaaatccagtttttcaaacttaggggcagtggggtgaaagggagagtggnggttctatggccattattntggggtaattctcttttttggcccnttatttccggttcntcaggggttctttcatct

SEQ ID NO: 303963 - DNA, 464 bp, Homo Sapiens
  misc_feature (95)..(95): n is a, c, g, or t
  misc_feature (109)..(109): n is a, c, g, or t
  misc_feature (273)..(344): n is a, c, g, or t
  misc_feature (426)..(426): n is a, c, g, or t
  misc_feature (441)..(441): n is a, c, g, or t
gtgggggtaagcaaggcaagtatttctccataccatcgtctgtgatctataaatagcacaagtgattagggtggggttaatctttagcctacagnctggccagtggccncgatcagtctgttatttttcagttcttacttcctccttttctttggagacaggagacagtaagagaaatggcctctctcctcacatttagtgggagaatagcatctctaaaccatcaaattaatatctatctcctaaacagctttcaaaaagcacatgactttnnnnnnnnnnnnnnnnnnnnnnnnnnnnnnnnnnnnnnnnnnnnnnnnnnnnnnnnnnnnnnnnnnnnnnnncgcagggagttgggaaaccagcctggggtaacgtcagaggtctttcaaaccaggagttgaccccctttttggattaaagtcngggggttaaattgancctggacaccctttggatttttt

SEQ ID NO: 303964 - DNA, 301 bp, Homo Sapiens
ttatgctcaatatacatatttcctttcagatgttaacatattgtttgatagccatcattaacacagtacttagcactaaaattgtacataataggagccactgcctcacagccagcccacaaatttcctacagttttcctgtcgatcagttatttcctttgattcattctggtacattcctgaaaaacatctggtatggttttccagtaaaactggcatgagtaatatccatgcttttgcacttaaacgtcaatttagatagacatgcaatttgtggcggtagtaagtgacctaattctcc

SEQ ID NO: 303965 - DNA, 406 bp, Homo Sapiens
  misc_feature (19)..(19): n is a, c, g, or t
  misc_feature (24)..(24): n is a, c, g, or t
  misc_feature (88)..(88): n is a, c, g, or t
  misc_feature (98)..(98): n is a, c, g, or t
  misc_feature (333)..(333): n is a, c, g, or t
acatctcagttgaacttcnccttncaattaataactctgaagtctactgacagaggtcctactgttctaggatcattaagagcatttncattatctgncaaatgaggggtaagaggcagaaaagcaagcaccctcaggagcagcctctcccctacttaagagatgattagggagtgagccgaggcagctctcattagttgcttagcaatgagacagcctcctatgaaatcacaaatggaaacaaagtgtcagaggggctgcagtaaagttcactacttggatatgtcctcatcttctggaggataatctgttcatctgtcctcgggtaaagcncatctctccaggatcacaggcaagggatgggaatccgagggccgaccacaacccgggaaagggccaaaaacac

SEQ ID NO: 303966 - DNA, 108 bp, Homo Sapiens
aggtgagagggtaaatctctggtctctgttgaatcatcttgaccagaagtggaaattgcagcattggttttaacatcaacaaattgatccctaaatgttgaggtggag

SEQ ID NO: 303967 - DNA, 262 bp, Homo Sapiens
  misc_feature (55)..(57): n is a, c, g, or t
  misc_feature (185)..(185): n is a, c, g, or t
  misc_feature (226)..(226): n is a, c, g, or t
  misc_feature (241)..(241): n is a, c, g, or t
ctccctagcctcacacatataaaacatttcattgtattcttattattaataattnnnccctcttaattataaattcattatgctcgatgtagataattcagtaaatatggataagtggcaaagaatgcatgtataaccccaccaaacaaaaataagaacttttggtatataccaaaggcctgtcnttctgaatatctgattataaatttagggttgtatgattttntttctcacatactgnatagtgaataccttttcatgg

SEQ ID NO: 303968 - DNA, 286 bp, Homo Sapiens
  misc_feature (113)..(113): n is a, c, g, or t
  misc_feature (200)..(200): n is a, c, g, or t
  misc_feature (220)..(220): n is a, c, g, or t
  misc_feature (235)..(235): n is a, c, g, or t
  misc_feature (264)..(264): n is a, c, g, or t
  misc_feature (271)..(271): n is a, c, g, or t
tgatttttatatcaagctcatgaactctgtaaatatgaacctgagacaaaaattaggtaactgtagaaatactaggctacagggtctataagtttcagactctttactatggnaaactactaagaaatgcaatctctatcctgagaggtccctttagagacagcaagtctcctttaccccaagagaggagatacctcagnatcatcattaggcaatctcntcctttttgaaatcnctagaggtaggaaagaaggcaacaacggnaatgganaaaattccaattctg

SEQ ID NO: 303969 - DNA, 334 bp, Homo Sapiens
  misc_feature (87)..(204): n is a, c, g, or t
  misc_feature (245)..(245): n is a, c, g, or t
atgggctcaagtgatgcttccacctcaatctcttgagtagctgagattatagatgagtgccaccgctaagcgagtgcctggctaacnnnnnnnnnnnnnnnnnnnnnnnnnnnnnnnnnnnnnnnnnnnnnnnnnnnnnnnnnnnnnnnnnnnnnnnnnnnnnnnnnnnnnnnnnnnnnnnnnnnnnnnnnnnnnnnnnnnnnnatgagccactgtgcccagcctacaatttaaccatttttttngtgaacaatttcagtgctatttagtatattcacaagggttgttacaaattaaccatctcctattttagtttccaaaacattttccatta

SEQ ID NO: 303970 - DNA, 245 bp, Homo Sapiens
  misc_feature (125)..(125): n is a, c, g, or t
  misc_feature (133)..(133): n is a, c, g, or t
  misc_feature (139)..(139): n is a, c, g, or t
  misc_feature (145)..(145): n is a, c, g, or t
  misc_feature (151)..(151): n is a, c, g, or t
  misc_feature (185)..(185): n is a, c, g, or t
  misc_feature (208)..(208): n is a, c, g, or t
  misc_feature (224)..(224): n is a, c, g, or t
gcagggaattggattagacaatttccaaagctgtaatatgctgtgagtccagcacagtatctcccaatctttttatttaagctgtattcccttttgatgaacataaaatctgaatgccctccttnccatttanggtttngaggtncattcnattgtgcctaaaaaaagtcaaagcaattataatnttgaatatggcttttgcaaattncgcacattttccccgnttctcacgttccgaatttctg

SEQ ID NO: 303971 - DNA, 192 bp, Homo Sapiens
ccttaatatcagatattcaggtttaaactcattgtgaaaattcagactagtgtcttcctcatattatgataaagttgtgaaatttgtgatacttgtaattgttactaagaaaaactaaagttgtgactaattttagtggcaaagacagtactttgaattacaaataaatattacagcatttctttgaattgc

SEQ ID NO: 303972 - DNA, 315 bp, Homo Sapiens
  misc_feature (104)..(104): n is a, c, g, or t
  misc_feature (299)..(299): n is a, c, g, or t
tcatgacatacacgttggtatttctacccaggcttttctctttgttttgtcatgtagcccatgaatgagactgcactgtctgtgtgattgggcagttgccaagntttaaggtgttaacatgcattaattcacttaatcactcctcatttcctccttccctcaacccctgacaaccatgaatctgctttctgtctctagatttgcctattctggacattttatataaatgtgtcatccaatgtctggtcttttctgactggcttctttcacttagcagggattctacggtttattgaggnttcattcattgtgtgg

SEQ ID NO: 303973 - DNA, 205 bp, Homo Sapiens
  misc_feature (11)..(11): n is a, c, g, or t
actggatcaanatttcttcatgtgttaaatacaatttattctctcaggacaggataactttgggaatttaatgcaaaagcaagtaaagttcaaatattagtttctcttccagataaggatcaagtgcaaattctatcatttagaaacaacatgatgcaggtaaatgcatgacaccccgacatttgaggcgcctgatttcagactc

SEQ ID NO: 303974 - DNA, 118 bp, Homo Sapiens
  misc_feature (21)..(21): n is a, c, g, or t
tttatttcaaggaagaacccnataactttcctacctgtactgtccctgaaaattcaatgttatagacactggcctgaaatcatttactgagtctactaaaagggcattctctcctgtc

SEQ ID NO: 303975 - DNA, 386 bp, Homo Sapiens
  misc_feature (149)..(256): n is a, c, g, or t
  misc_feature (349)..(349): n is a, c, g, or t
  misc_feature (355)..(355): n is a, c, g, or t
ataagaggaaacactttattacatcactcatctaacattccagaaaatggaaagtactctactgtacagcaaagtaaatcattggttgtctggagaacagaaagaaagcctttataaaaaggttccaggtaaatataaaggtgttaatnnnnnnnnnnnnnnnnnnnnnnnnnnnnnnnnnnnnnnnnnnnnnnnnnnnnnnnnnnnnnnnnnnnnnnnnnnnnnnnnnnnnnnnnnnnnnnnnnnnnnnnnnnnncatcacaggctttaaaatatacttcagacgggcagcagtgggctcacacctggtattcccaccactctgggagggctgagggcagggcatatnacctgngggtcagggaggtccaaggatcaggccgggg

SEQ ID NO: 303976 - DNA, 250 bp, Homo Sapiens
  misc_feature (117)..(117): n is a, c, g, or t
  misc_feature (130)..(130): n is a, c, g, or t
tctcagcttcttaaggagtcttgtacagagaataaatgacctggaacagcaaaatcagcctcttagctctattcccagtctttttgacttcttataaaagtaataaataacgacaanacaaaaacagganctaatttccttcaactctttaggctatgtacaagaaaatattagaacttctgagttggagttggctaaaggttctacacatcctccaagaagaacggcttggtagagggaatgggtttcc

SEQ ID NO: 303977 - DNA, 407 bp, Homo Sapiens
  misc_feature (259)..(259): n is a, c, g, or t
  misc_feature (348)..(348): n is a, c, g, or t
  misc_feature (360)..(360): n is a, c, g, or t
  misc_feature (384)..(384): n is a, c, g, or t
aaattcatatatgtaggagcatcaaacaagggtacctacctaaccaacactccaaagaatcctaaaggaagtgatacctagattgagttttaaatgatacgtaacaattattggcctttagggaacaggaacagttgtgtggtggtataacattgtaaaaataagggtatggtatgatgtcagatgggaaaggcaaggtccaactcttagagtgccttgtatgccatggaaaaggaacttggactttgccatacggcgnttggggaaccattataggtttaactctggaatggctggtatagaggagggatttatggggggataagactcaaggggaaaccaggctgngagggaagtggncagtaatccagggcattggaaccnggggcgttaggaggggttgggag

SEQ ID NO: 303978 - DNA, 193 bp, Homo Sapiens
taaagtgcctttgtgcagatgagatacacaggaatatgttactgtttctgagggaaactatctgagcatttaacttattctcatgatttccataccaataagtctattgttgttaccaaacacatatatcaaagccatgtctaaaagagttagcacccttctgagaaaaaaagcaaatttctttaaatccaaa

SEQ ID NO: 303979 - DNA, 422 bp, Homo Sapiens
  misc_feature (272)..(377): n is a, c, g, or t
  misc_feature (389)..(389): n is a, c, g, or t
gcttcaataccctggatattaaagtctcactgtggaccggtagaagaaaacacagctcttttgaatagtcacagtaatacttccccttaagctccatttaaaacaatagcttgttaaataacagatcaccagattttgaccatttaaaacaatagcttgttaaataacagatcaccagattttgaccatttaaaacaatagcttgttaaataacagatcaccagattttgaccatttaaaacaatagcttgttaaataacagatcaccagannnnnnnnnnnnnnnnnnnnnnnnnnnnnnnnnnnnnnnnnnnnnnnnnnnnnnnnnnnnnnnnnnnnnnnnnnnnnnnnnnnnnnnnnnnnnnnnnnnnnnnnnnagttggagcatnccatggtttttccaaggaggatttctagatgga

SEQ ID NO: 303980 - DNA, 301 bp, Homo Sapiens
  misc_feature (12)..(12): n is a, c, g, or t
  misc_feature (93)..(93): n is a, c, g, or t
  misc_feature (263)..(263): n is a, c, g, or t
  misc_feature (287)..(287): n is a, c, g, or t
gctgtgaaatcntttatttttgttttatgacacagcatcaatttcatgaatactttgaaagggccattagaaaaaataagagccaatttgggncatttgagaaacattttcagcacaattacagtgggggcacgggcgttcgctccagctgggttttcccagatgcaacaatcgcggttctggcttctccactggtggggatggggatcgcgcccttcggagcctctcagggcgcctgtctgtcgggggctgggtgcgtccanagccccgggggatgggcgcgtggntaaccagggaacgg

SEQ ID NO: 303981 - DNA, 370 bp, Homo Sapiens
tctctagttttgcatgtggctgaatggtggaatgtctgttttcttttctcaggcaaaattagctgcttggtgctttccccagttgttagggttgaatgagcctcataaagtacaagaatatgtcctaacagtcgtaaacaggaatgttgtgggatgtgcaaaaatcctcatgttagtgacaatttttaattacatgctctgcatcccagatttagtgagtctatttctgatggatgtcagctggctgcctgccttacaaaagtctcgaaacctggagggctttaaatgtaggtggaggctgaggtacctaggggtttgccgagtgccaaagaccggctttaactccattgccgaggcaggtgccgacatt

SEQ ID NO: 303982 - DNA, 356 bp, Homo Sapiens
  misc_feature (144)..(144): n is a, c, g, or t
  misc_feature (146)..(147): n is a, c, g, or t
  misc_feature (171)..(171): n is a, c, g, or t
  misc_feature (192)..(193): n is a, c, g, or t
  misc_feature (213)..(214): n is a, c, g, or t
  misc_feature (234)..(234): n is a, c, g, or t
  misc_feature (247)..(247): n is a, c, g, or t
  misc_feature (257)..(257): n is a, c, g, or t
  misc_feature (339)..(339): n is a, c, g, or t
tgctcagattgtttgtttgctaagactcttctgtttcaagcatgttccttgtttgttgaggcattttaatgattgctgcattaaaatctttgtaagataattcaaacaccactgtcatttcactgttggcacctattatctttntnncattcaatttaagatcttcctggntctaggtatgatgaatgattnnctattgaaacatgggtattnnagatactatgttatgagacnctgggtcttattnaaaccactgnttagttggcttcctcgcactccactccaacaagggaaatggtggtggtagggtgctacttcattactggcctgggggattgngggaagcagagccacaa

SEQ ID NO: 303983 - DNA, 376 bp, Homo Sapiens
  misc_feature (276)..(297): n is a, c, g, or t
  misc_feature (363)..(363): n is a, c, g, or t
ataacttaatttcatgtagaattttgagaactgaactaaagactaggtaaaatttctttaggtacatttcactaaagtataaaatttctatttttccttttttcttgtatgtagacttgtataaaggtcactttttatgaaggtatgtgacaaagaggagaagctaattaattcagttttcccaaattagagctaacttcaatgcttatttgtattaattgcctaatctggattaggaatgggtagataatggtagaaaaacatgagatgaatagnnnnnnnnnnnnnnnnnnnnnntttggagacagagcctctctctgtcccccagggctggagtgaagtggatggcgatctcggctcacnggcaagctccgcc

SEQ ID NO: 303984 - DNA, 406 bp, Homo Sapiens
  misc_feature (368)..(368): n is a, c, g, or t
  misc_feature (393)..(393): n is a, c, g, or t
aagaaaagtagtagtttatccaaagtaatacttagttcccgatttctagataagaacagcttataagagcaactacagaaagtagttctaaaaaacaaatgagttaagaatcactgccgtaagataacagaggtcagggtcctgggcaacagctagcatgtgccttcaatgtagtaagcagtcagtaaatatttattaagaatgatacttggagctcttctgattaacccttgaacctaaaaattgactacagtaattctacagcattggtattttcaccgaagaattctttcttaggtaaaatattatacagtcatgtgttgcctggacaaaggagataccttctggagaaatatggtcaccaggtngattttcattcgttcacgtggaccnttccttaggagtg

SEQ ID NO: 303985 - DNA, 420 bp, Homo Sapiens
  misc_feature (302)..(302): n is a, c, g, or t
  misc_feature (336)..(336): n is a, c, g, or t
  misc_feature (346)..(346): n is a, c, g, or t
  misc_feature (364)..(364): n is a, c, g, or t
  misc_feature (378)..(378): n is a, c, g, or t
tcatatctactgcctgcaaaagaggcatcaataagaagctctctaaaagacttagaatcctgaggcacctctgaaagctggatgtgggtggggtcgaaacagttgcctggtatgtcaagaagagatggcttgtaatcatcttctattcataagaaccatttgaaatatgtcattaccataaattcaaatggtaccaggtaaggcattagtttactcttccaccttcccatccatgtcagctgttgtgtacatgcacaagtacacttctctgctttgagactgtcatcagaaatagatgactncctatcccctaacagcagaaatagtaaacagccnggatttactnaaaacactacaagattantcactggcttaggnttattaaaatgtttcaaaagtcttaccttatggctaaattac

SEQ ID NO: 303986 - DNA, 250 bp, Homo Sapiens
  misc_feature (52)..(86): n is a, c, g, or t
  misc_feature (149)..(149): n is a, c, g, or t
  misc_feature (166)..(166): n is a, c, g, or t
  misc_feature (209)..(209): n is a, c, g, or t
  misc_feature (238)..(238): n is a, c, g, or t
tgcctggcttatctttatttctttacaacaggaaagagaaaatgtatctatnnnnnnnnnnnnnnnnnnnnnnnnnnnnnnnnnnntgccttgtttgagctggagtctcccttccagtagtctgcttcagggtcctgagttctcttccnggcacgttttctggggnataggcaagagaaccattaccattactaaactcagtaatgggnaacggtttccttgccattcccaagtgccnggggagtcagta

SEQ ID NO: 303987 - DNA, 156 bp, Homo Sapiens
  misc_feature (27)..(27): n is a, c, g, or t
  misc_feature (45)..(45): n is a, c, g, or t
  misc_feature (52)..(52): n is a, c, g, or t
  misc_feature (84)..(84): n is a, c, g, or t
  misc_feature (104)..(104): n is a, c, g, or t
  misc_feature (128)..(128): n is a, c, g, or t
  misc_feature (139)..(139): n is a, c, g, or t
atgaaaagttaatatgtatcaaatatncattacaatgagtaaaanctgtttncagtgaggaaatgggtatcacaaagtacattnaattttaacaactgcatttntaaaagggtggggtactgagaganaaatctaattncatgaagcaaagcatct

SEQ ID NO: 303988 - DNA, 371 bp, Homo Sapiens
  misc_feature (271)..(271): n is a, c, g, or t
  misc_feature (286)..(286): n is a, c, g, or t
  misc_feature (325)..(325): n is a, c, g, or t
ggcctgccgctgaattccctttgtgctggtatgtaatttggctatagtgcaatcagtttctagtcagtacagaaaaaaaggtaagtccatgagattgcgttgcaggcacccctcaaccttcagtacacattcaaccaaaatcttcctgtggtgtttaatgtgagtgttggataccagggttattttgagcaaaacacaaaacacacactgaaatacttggctcgtgacagatcctgttttcagtgttaactaatctgggtaaatgcctttnaactaacccaaggangtagagatgaagcagtaataatgcacctaggcatttctntttttatcattaccttcaactgagggtctcaacttcaggggcacag

SEQ ID NO: 303989 - DNA, 200 bp, Homo Sapiens
caaacagacctttggtttgagctcacctggtgacaggagactcctacctgaaacagggatgccgttctcggtactatgtttaattgtgctgagccagcaaccctcgagttacccggccttttaccccacgccagctctgcttgtctgcatggctagattttgagatatggaagcctcttgtcctctcataaccacactcc

SEQ ID NO: 303990 - DNA, 298 bp, Homo Sapiens
  misc_feature (285)..(285): n is a, c, g, or t
atgatcccatgcctgtatacttataccacacctggccagtataagtattcattaagcttactattttatagactttataaaatcaatattttcacaacttcgtagttaaggagaaaactaggaacttggcttttcaaaatactttgtgttgcagtagtcgctgaatgttcatctatatcatttaattggggtatgcacctcaagagggaacatctgcttgaaggataaagggaccgttctaaggcactttctatacttgcaaaggcttcaggaaatggttcactnttgctgggttcct

SEQ ID NO: 303991 - DNA, 246 bp, Homo Sapiens
  misc_feature (229)..(229): n is a, c, g, or t
gcatattccttagcctttccaaatatgtgttgcttttcatcagtactgcaaagtgaccataacatcctgccacgtcaatgaaaaggcaagatttagtttaacaaattcatctctaaacttaccaggatcctctgaaaatctaccaaagtgttttttacatagtcctagatccaccaccaaaaaaaggaacttgggatccttgtcactcccccgtttccatccatttctnctgaggggaaaacagcc

SEQ ID NO: 303992 - DNA, 351 bp, Homo Sapiens
ggcacgagcaaaaatctgcaagtaatttggttgctcagagctaaggacacattcagtcatcgggaagcttcagtcttagagaaaccctcacaagcaagcccactgtaactcacttcatgagaccaggcagccacttagattttagcaacagaggacagtgtttattcattgtattccagggaggagacttgctttatctaacaagctgagtaggtcaacttttcttattgactgtctcccagctctttgctgcatctccgtctggtggcccctgctgcctgggctactccaccttattccaccttattcttcaaagtgcttcctgaaactccagttacctacctatctggg

SEQ ID NO: 303993 - DNA, 333 bp, Homo Sapiens
  misc_feature (124)..(248): n is a, c, g, or t
aagcaatacaagtgcagaatcttcctagatctgttttctcttaccccctcctaattcaacagcagggatttttttgtttaacagcctgcttttactgattctttctgaaagattcatcatattnnnnnnnnnnnnnnnnnnnnnnnnnnnnnnnnnnnnnnnnnnnnnnnnnnnnnnnnnnnnnnnnnnnnnnnnnnnnnnnnnnnnnnnnnnnnnnnnnnnnnnnnnnnnnnnnnnnnnnnnnnnnntcattatgtagttaggttagttactgtgagaatgggcttgttataggagcaagttcagtcccctcttgctctcttgcccttctgc

SEQ ID NO: 303994 - DNA, 265 bp, Homo Sapiens
  misc_feature (40)..(40): n is a, c, g, or t
  misc_feature (165)..(165): n is a, c, g, or t
atttataatagtccagtctccccatagagactgcctaagntaaagtgttatgctgctttggggtgggagcagtaggccaagttcaagtcccaactcggaatttgtgtgtgtctcttttgaaggggggaagggactctggaatatgaattatcttcacttgttaancctgaacatgcctctgactcatgagtggcagcagtcatgggagcaactccagcctttctcagcagatgtcactattactgtgtatgttgaagtatttaca

SEQ ID NO: 303995 - DNA, 351 bp, Homo Sapiens
  misc_feature (11)..(11): n is a, c, g, or t
  misc_feature (198)..(198): n is a, c, g, or t
  misc_feature (260)..(260): n is a, c, g, or t
  misc_feature (303)..(303): n is a, c, g, or t
  misc_feature (317)..(317): n is a, c, g, or t
tcccagaaggnatacctgagatgtaggatggaatagtaaacagatagaatggcacagtaaagccaaacaaacatgatataacgtaataattgtgtttaatttgtggaattaaaggcaaaaaactgcaatgacatgagttagtccatgttgaagaagtccaccaggcagttgtgagaacatgggagtgggccgataagnaggttatgagggctccattgtcagcaaacaagtcaagtgtaaactaagaacaaagtcacttngattgagaatacatgatgaggattagggctacctttggtggantatatggtatactnggaggctaactgggaggctgcctttatggcaact

SEQ ID NO: 303996 - DNA, 365 bp, Homo Sapiens
  misc_feature (136)..(136): n is a, c, g, or t
tacattatccttcctttccatttgatgtcaggcccgtgttagaattctcatccggtttggtcactgcacttaagatgtggagaaattaggacgcacagttaagaggaaggataacactgattaaggtagtgctttnctaggtttcccctaaacaatttaacagatggatagtggcaccacttacgagatggaaaaaccagcggaaggaagatttgggggagaagttaagtttgtcttgggcctgtgttttgcaacctgagtgtaaaagacatatgttaagtcttcagtgggcgaaacactaaaactaggaaatgggatccagaattttatctttgggatgtgacttcttcaaggatgggtcttgt

SEQ ID NO: 303997 - DNA, 343 bp, Homo Sapiens
  misc_feature (20)..(20): n is a, c, g, or t
  misc_feature (67)..(67): n is a, c, g, or t
  misc_feature (69)..(69): n is a, c, g, or t
  misc_feature (81)..(81): n is a, c, g, or t
  misc_feature (84)..(84): n is a, c, g, or t
  misc_feature (102)..(102): n is a, c, g, or t
  misc_feature (109)..(109): n is a, c, g, or t
  misc_feature (116)..(116): n is a, c, g, or t
  misc_feature (118)..(118): n is a, c, g, or t
  misc_feature (120)..(121): n is a, c, g, or t
  misc_feature (138)..(138): n is a, c, g, or t
  misc_feature (168)..(168): n is a, c, g, or t
  misc_feature (315)..(315): n is a, c, g, or t
caactttatgccaggcttanctatcacctcctagggtaaatgtcctcaactaggagttgcaccagantnacttagaaagcnttnccaaagtacctacatgancaatctnatatcanananncccggcatatataccanctatcccccaatacaaacagacattcactnattactctcttatgggactatcaaaatctctggggcagaaaaaaaggatgttcatctgaggcaggatggaccctaggtatggctacacataactcctttggccttgggaaggggaaaggcttcaatttggtcccaggtggataaaanccactaaaaaacatatggtaaccatagg

SEQ ID NO: 303998 - DNA, 400 bp, Homo Sapiens
  misc_feature (282)..(300): n is a, c, g, or t
  misc_feature (359)..(359): n is a, c, g, or t
gggtacaggtatctgcctaagttctaatgcataaggcagtttcttcaatatttcttcaaaggcattattagccactgtatctgacagtcactgtggtgacttccttgaattaatttgaagaatgccaacgtctaatgggaagtgtcgtcttacggtctagcagtcctgttgttcctgggggttttgttctgtgtgccagttgcttctgatttccacagtagacattacatttatttgtgtgtctagtgaatgctcttctcaactaccatcatcaattaggannnnnnnnnnnnnnnnnnnaaggccgtaggtattcttcatgtggcttgagggcacatgtgggtttcatttttaaaccntacaatttactgggctgggatttgtcttcttttctaggtat

SEQ ID NO: 303999 - DNA, 437 bp, Homo Sapiens
  misc_feature (358)..(358): n is a, c, g, or t
  misc_feature (416)..(416): n is a, c, g, or t
  misc_feature (424)..(424): n is a, c, g, or t
aatctagaacagttcctatcctttgtagtcttttttaatcaacattttaaaaagaaaccaggacagttgtcttgtaaaatatccaacaacctggattcacgtgattgttagttctcatttttgcaagaatatcatataattaagtgttttgtacatctcattttatcatattagggaggcacatgatgttggtttgcctcattattggtggtactaaatttgatcacttaaagtggtgctcactttagtaaaggtatattttactctaattttagcttccactgatgaaggctgcctgcctatattagttattaaactgatgggtttcacatcctcacatttttgactggaattgatncatggcacccttactatggaaccagggggaattttcccccccagcttcctagtggaangggggtangggttgtttcata

SEQ ID NO: 304000 - DNA, 403 bp, Homo Sapiens
  misc_feature (352)..(352): n is a, c, g, or t
  misc_feature (386)..(386): n is a, c, g, or t
caaaatttttagaggctgaatgccagctgttggcttaatccatatgttttcatgaaaccattgtgttcatctgttttctcccgggtgaagggttagttgttggattcagctttatatttggaaataagaaatcaagtgagggactgtaggaaaacgtagagcagctcctggttttgcgaggttgttagaggccagccggcacagaaatgttcgtattcttcccaggagctaagatattcatcatgagctctttgagccaggtttccatcatctgtgaaatacagaaatgatgcttactgtgttctaggctcccctttaaggattaaaccatttaacagatctcactggatgncaggaaattttcttctttcacattttttaattancctctggaaatccggaa

SEQ ID NO: 304001 - DNA, 194 bp, Homo Sapiens
gtgctgcaataaacatacaagtacatgtatcctttttatataatggcttttttacttttgggtagatacctattagtgggattgctggatcaaacggtagttctatttttacttatttgagaaatctccatactgtagaggtttatattaatttacattccccattcaacagtgtattaaggcattcccctttt

SEQ ID NO: 304002 - DNA, 201 bp, Homo Sapiens
acctatcagattgataataataccttgttgatgagagtgtgagcaaagtgtactattatgtacctatctgaggaatataaagttgaatagcctatttggaggtcaacttagtggtacatctcaaacattaaaatgttcatacttcttagaccaaggaattccacttaaggaattcctgccttttagaagtatcagcacaaa

SEQ ID NO: 304003 - DNA, 289 bp, Homo Sapiens
  misc_feature (54)..(54): n is a, c, g, or t
  misc_feature (153)..(153): n is a, c, g, or t
  misc_feature (161)..(161): n is a, c, g, or t
  misc_feature (163)..(163): n is a, c, g, or t
agtgtaagccattgaacccagtcccagtgaaagttttgatggcttacaatggantgcaaccccttgttccgtgcctataacagctggcacatccttgtgaattgagtgaatgaaaatcatattcaggatgatgtagcctctgcgttctcacangacgcacngnagcactggtcacggagcttctatgcctgggtcactgaaccactggctgggtggggaccttcttgccatggctctgctttgggattctccacctgtcatcttcagctggtgggtaccaccaccgggg

SEQ ID NO: 304004 - DNA, 193 bp, Homo Sapiens
tgatcttggggcatagaagactttgttaaacaggccctaaaaccacaagcctaaacaggaaaagagagacaaattttgactagattaaaacagtatgcttttgttcaacaaaagacatcatacacaaaatttaaagacaatctactgaaagataatgacaatgcatgtaactattagaagattaatatccaga

SEQ ID NO: 304005 - DNA, 219 bp, Homo Sapiens
  misc_feature (121)..(121): n is a, c, g, or t
atattaacggtctcaaactagagacacattgaccattagtgaatcaggaagccactttgtttttcagatctgtacattggagctaatgacacaaacctattttaaaaggctatagtaaaantaaattccttatcctcttgagagaaaaatgctaataaaattgggatttactttgggaagccattttgcaatattttatgaagttagacatacacctac

SEQ ID NO: 304006 - DNA, 354 bp, Homo Sapiens
  misc_feature (342)..(342): n is a, c, g, or t
ccatattcttagttgatgatattttggcttgctgtcacatatggaaggggttagactgacattataaacttgatcatactgcatttaagccctataaaaagataaatggctccgctttccaaacatggaaagaacgccacagtgtttacaaataaagccctattagacattgagctgactctctgctaagctaaaatgtccatatatatctttcaagaagtgaatttttatctcacttttatgtcttacggttctttacaatctgtctatccacagctgggtatccatgtttacatggttaattttttaaaaattaaggtattggggggcttttcataggcnggcactatttca

SEQ ID NO: 304007 - DNA, 350 bp, Homo Sapiens
tccccagactggagcaaaacaatattaaaacagcctgggttacactttattgaagaggccagcttaggacgactttaagaactaggtgaccacagtcttaagacaggcaggggcaaggctgtaagattttactctcagccagttcacactcctaactgtgagatcaggcctctacagaccttatgggcctatcaaacccaaagaaaatttcctggaggtgcctactcagaggggctccctcctggtcactccttatagccttgctcggtccagggcagggtgggttcggtctctcggtgagaacaagaggaacacatttagctctgcatttatgtatttaggttgagaga

SEQ ID NO: 304008 - DNA, 122 bp, Homo Sapiens
  misc_feature (78)..(78): n is a, c, g, or t
tgacagcttgtgcctggccaaacgctggtaggttttgagtgagaccacattacatttaaatatatttacaatgttttntgctgtattctttagtagactttttcctcacgtggtcctacgca

SEQ ID NO: 304009 - DNA, 135 bp, Homo Sapiens
atgagcaccatgcctggccaatcatgccatattatcccctctatcagtatagaatatggacactgtttctattttggtgattaccctagaccaggggtccccagtccctggggctgcagaccagtactggtctgt

SEQ ID NO: 304010 - DNA, 286 bp, Homo Sapiens
  misc_feature (71)..(71): n is a, c, g, or t
  misc_feature (123)..(123): n is a, c, g, or t
  misc_feature (157)..(157): n is a, c, g, or t
  misc_feature (222)..(222): n is a, c, g, or t
  misc_feature (237)..(237): n is a, c, g, or t
gctatataccctttaaacatttctaaagtagcacacactttgaagaacctgcttcttgccaagtgaattcngaaaccttggcttccgcttgctggggagactgtcagcatgggcacagatgtnattgagtttcccactctttgggattctgtgtgtnttggtacagccctttgtgcagccgtgggaaccctctgaaccatcccaacctatttgaaaatattnctagagggctgaatntgtgtcatgggggcaacccaatagacccaggtttgaagcctggctctgc

SEQ ID NO: 304011 - DNA, 253 bp, Homo Sapiens
aaaaaatactttacagttgacccttgagtagtgttggggtgctgacactgcatagttaaaaatccacatataacggccgtgagccaccatgcctggccggaatttcttgaaataaggcaacaatgaaatttgctgcatcagtcgactcttccttccaggaaagatttctctgtagcatgcagtgttgtttgatagctttttacccacagtagaacttctttaaaaaatggaatcaatttctcttaaactttgc

SEQ ID NO: 304012 - DNA, 419 bp, Homo Sapiens
  misc_feature (99)..(99): n is a, c, g, or t
  misc_feature (241)..(241): n is a, c, g, or t
  misc_feature (362)..(362): n is a, c, g, or t
gtcttaaacatacttcctgcttcttcatctagagcccttagaagtgacatatttctcccaatgagagatgctatgcccgttctaagacaactgttgggnatagtcatgacacacgcaggcatgctgagagctcaaaagctcggcactaactcttggagatacaccttattagccttcccagggtgctaataaatctccactatgcagggtgctgcctggagaaacctgcctccttaccttngatatggggaatgaagtggtgtcggaaaggggggttggggcgggagtcgctgtgggtggggctgaggctgctggtgcgcaggtacgacaacctctgcacaccaggagacaaaagctctgtngcagcaaggagttcaggggcagggcaaggtgggaaacagaaaagaagaacagaaatt

SEQ ID NO: 304013 - DNA, 457 bp, Homo Sapiens
  misc_feature (392)..(392): n is a, c, g, or t
tggcgaactctggtaaaattacaacattaagaatggccttgtccttttctctgcctaacttgcttccataggatttttgaaacatcaaatattgaagaattgtgtgcttaagaactttctctcagaactgatgaaacttatttagagcttatttagaagattatgtttgtaaaataaaacttacagcgttgtccctaggtggagaattaacttaaaactaagaccacattccaagaagtggcataatcatatacgtggaagtacacacgccattctacttataatggcagcaggcagaagaggaagggaagccaggacgttcctaggcttcgggccacttttctttggctgccaaatggctaggattccatggctaggcggcccctggtcanaggccatggcaggcgtcttcagtaggagttggaagtagttcaggagccagaagggggggagattt

SEQ ID NO: 304014 - DNA, 136 bp, Homo Sapiens
  misc_feature (49)..(49): n is a, c, g, or t
ccgcgcccagccgaagtgacaatatttatatacaataaagtttaactgnaaaagcttacatttatgcgtggtcatttttaattgatgattagatgaagagacaaataaatggtcccagtttagctactgatatact

SEQ ID NO: 304015 - DNA, 419 bp, Homo Sapiens
  misc_feature (369)..(369): n is a, c, g, or t
ggctaagttccctggcattcctgttgaagtgtgtaatggaaaatttgacctcacattctttgcttttttgtaacatcacaaaacactgatataacagggctactaaaaagtagcttggagatgaagggatgcacataaagaaaaagctcagtgtggaaaggaacaaagacgcagtaaatcatgtggaaggtaaatatttagcttcacagacctgaagttacattcatcttcaagtgcttacagcttaggatgtcatagagtttccatcataattttgcttttctaaagagattacaaaccagccataaaaagccattctcaaaattaacttggaacacagggtaggccattttggtagattccatagcntgtttggaaaaatggtggatttagggtggggcaggcagaagaaaggtgtc

SEQ ID NO: 304016 - DNA, 384 bp, Homo Sapiens
  misc_feature (13)..(13): n is a, c, g, or t
  misc_feature (291)..(291): n is a, c, g, or t
  misc_feature (325)..(325): n is a, c, g, or t
  misc_feature (331)..(331): n is a, c, g, or t
  misc_feature (357)..(357): n is a, c, g, or t
taccctgtcttancgtagaaatgtttaccatgtaaatacacagccagaccaagatagaagtaggattactaagttctgttgggacaagccccgggtaaacacagagtatcatgtaatggatgtgtgaggcaaggctggggagtatttggaggcaaggggtgaggagcattcacctgggctatcaatattccctgtaagcattaaaaagcttcagttccgcttccctgcctcagccagttgttttgaatacgtccagattagaacagccaaatgtgagttttagaagtaagnagtgcctcaatctgtccaactgttctcgagctgnactganccaaccttgttgggttccatggcttncaaacacaaagaagtggattgttgaac

SEQ ID NO: 304017 - DNA, 174 bp, Homo Sapiens
  misc_feature (159)..(159): n is a, c, g, or t
catcttggctttctaaacatagcaccttcctggactggtagggactttatctggtcttggctcacctggtggcatcacacggggcctcctggcttcatcagaacacacagtgggccactcaacaattggcctggatggaataaatggcatggagaaatnctaggtttttaaaga

SEQ ID NO: 304018 - DNA, 385 bp, Homo Sapiens
  misc_feature (352)..(352): n is a, c, g, or t
agtgctgagacttcctctgaggaggtatgggtggtggcgctgggaaaggggtgaggccttctgggagaccttcggggacgccaccttgagggtgagtctgtgctagtggcagagcactgtttagagtcagccgagtgagtctcagttccctgggcttgttttatgcatgcggcgcctgtttcaggttctcaagaaacatggtattcagttcattgagagcactggttcttcatggccagctgcctattagaatcatctagaaatctcttggaaaacatgggatggctcaacttccaccccccagaaattctggattcaattgggttggggcggggggcctaggcattgttanttccgaaaagcttccaggtgaatccaatggggc

SEQ ID NO: 304019 - DNA, 375 bp, Homo Sapiens
  misc_feature (344)..(344): n is a, c, g, or t
aataagtctctcttatcctatagtaaacatatatagattacatatgctacgtagaagtagatctaaatgaaattaatctctttttagcacttatacattattcaaaattattttaattcccccttctcactgcctatggtatctgtatctgattataaacaaaccactatgttcctatataggagaaataagcagaaagagatacctgcagaaaaatttgggttgccttattgtgttgtgtctatcaccaagggctcttaaactattatttgtacagtcttccccaagataaaggactgtgtggctcatcctacctctggtcaggaaggctttctgggtggtgncagtcctgaaggcaaggctccgccaggttgg

SEQ ID NO: 304020 - DNA, 249 bp, Homo Sapiens
  misc_feature (206)..(206): n is a, c, g, or t
aaaaagctgtagctggcaagtcaaagtttattttatgtgtgtaaattcccagttgagcattttttcatttggattagcgtgagaggaaaaaatgtgaaatgtctcaaatcaaatgcttccttctaaagattagacattgcccaaccctgcccccgcccccaatcaatcagtgacagaagagaccgccatcagccaactaggctttntttaaatgggctgatatattcatctctaaagggcctcaaagca

SEQ ID NO: 304021 - DNA, 299 bp, Homo Sapiens
  misc_feature (259)..(259): n is a, c, g, or t
ctatgagaatggctgaagctacacaaccacaattttgatcaaaccaactgacctttctgatagtgtccatagcaaagctacaaagtcttggtgtttcttggaatgatgtggtatagcaggccttatggatcaactgaaggaaagctaagttcagtgtgatatttgaaaccgttctctctttgtgcatcttggcactgcctatgttttttcattttattgttgctgctgtttttaaatccgtggtttctatactgtcttntcctgcaattaagattaagggtagccaagcgggggactaa

SEQ ID NO: 304022 - DNA, 131 bp, Homo Sapiens
aagaaacttttgcttacaaaaacaaggtgtaaaaagatttacaaaaatcataaaaacatgatttatatttcacacttgagagacaaaaacaagccccaaaacatggattttaatggaggtggtttgcctcc

SEQ ID NO: 304023 - DNA, 310 bp, Homo Sapiens
  misc_feature (179)..(180): n is a, c, g, or t
  misc_feature (214)..(215): n is a, c, g, or t
  misc_feature (264)..(264): n is a, c, g, or t
  misc_feature (283)..(283): n is a, c, g, or t
  misc_feature (291)..(291): n is a, c, g, or t
tgacatgttcctctcattcttcatctaatatctaataatgactacctgcaaggagaaataatcactcaagttgtttacttttgcagaaggtgcagtctctttcagagaattctaaaaaaatatcacattctatttaaactagaaactttctattaaaataagtgaaatgtagttaacannggatatttatttttatgtattttgttagttactnntttccttattttgaaaaacttcagatcactggaatatctacattacaangtggccagattgttatggngttctgtnaatctcattaccttgtggt

SEQ ID NO: 304024 - DNA, 262 bp, Homo Sapiens
  misc_feature (121)..(121): n is a, c, g, or t
  misc_feature (217)..(217): n is a, c, g, or t
  misc_feature (230)..(230): n is a, c, g, or t
  misc_feature (240)..(240): n is a, c, g, or t
aaattcttaaaggtaggatttgggactgcgagtgttaattcttcaagtgtaatttaagaggcatcccatacttgacaacctcatataataggtactaaaggtaaggtcccatgggagaagnggctgtgtcccatttatctctctgtatcatcacagaacataagcctgggcacagagaagtttaataacagcggacatatatagggcaacacacatntattattaacatnacagctttancattttacaacgtacctggccc

SEQ ID NO: 304025 - DNA, 182 bp, Homo Sapiens
aattactttttaagatatgaaaaaatgtgttggtgaaatgtttagttctgtatttttataagtggattcttactctatttaacttaggagtaaaaacatactgtgaaatgtacatatgataatataaagttcacctgcctagtatcctgttctagaaattcaagtaggaacaagcttggaat

SEQ ID NO: 304026 - DNA, 160 bp, Homo Sapiens
  misc_feature (15)..(15): n is a, c, g, or t
  misc_feature (46)..(46): n is a, c, g, or t
  misc_feature (71)..(71): n is a, c, g, or t
ctccttccccgaagnggcacaggaaagaagggaaatgatactcacngaggtattggctcttctccattggnagggtgggggaaggctgtcgttctcagggaaagaagtattaggtgaacacacccggatcctaagggtgacccagcctaaaagctcaggg

SEQ ID NO: 304027 - DNA, 143 bp, Homo Sapiens
tatgtccactcactctcactatgtattttgcagatgagctgacctctcccattcctgcaacctccctttcccagtcaaagcatttttggtggtttctgctgctggttgataacaaaacacacaagagtcaagaattttgtttt

SEQ ID NO: 304028 - DNA, 321 bp, Homo Sapiens
  misc_feature (172)..(172): n is a, c, g, or t
  misc_feature (180)..(180): n is a, c, g, or t
  misc_feature (210)..(210): n is a, c, g, or t
  misc_feature (238)..(238): n is a, c, g, or t
  misc_feature (267)..(267): n is a, c, g, or t
  misc_feature (277)..(277): n is a, c, g, or t
  misc_feature (297)..(297): n is a, c, g, or t
gagtaggtcaaaacaaaacagtgtgggcatcctttctaatttttcaaacctcacctgctgaatagcatatttaataaagcacataccacttatttgatctggcagtacttaacgcaataacttacacacaaagaaagacccaaacatttagccacaggatgtcatcaaatangggaaganggtttgtaataatggtttggtaattaatgntttaggttttaagagatggccttaaganattcaaaaggtcttattaactcatttgcnctcctaaatnaactctatttttcaattggnctggggcaaacaccccaatttgtg

SEQ ID NO: 304029 - DNA, 273 bp, Homo Sapiens
  misc_feature (18)..(18): n is a, c, g, or t
acaattagtgaacccagncattaagcttggagatgaataaattcaagctgaacttcattttgttaaactcagcctgtgccatttggatgtgttggcagagcttggggcagacagccatcagataggaaatgagagctgttagattagaaacaggcccgcccaagtccacttgctaatgtgggtaggaaattatacttgggcataggaaacaatcctgaaaatcatacacttagcagtttttattgggttcttttatgtttccatgactgtttg

SEQ ID NO: 304030 - DNA, 318 bp, Homo Sapiens
  misc_feature (50)..(50): n is a, c, g, or t
  misc_feature (133)..(133): n is a, c, g, or t
  misc_feature (159)..(159): n is a, c, g, or t
  misc_feature (164)..(164): n is a, c, g, or t
  misc_feature (187)..(187): n is a, c, g, or t
  misc_feature (247)..(247): n is a, c, g, or t
  misc_feature (260)..(260): n is a, c, g, or t
  misc_feature (277)..(277): n is a, c, g, or t
  misc_feature (302)..(302): n is a, c, g, or t
taaaggacaatagtccagagacctaaaacccgaaaaacaatgatggaatnaaacctggtactgaagatggcttttgtagattacagccccccacaagctgttcccaatccctttccagtaataaaacttattntttagttgtacaaccaacacataaanatatnctttggctaaaaatttaaactanccagaagcaaagagaatataaaccaaaagtctaccttcatggttcctcaattcccacatngctttccagaggnaaagatgcttataaacntgatgtattagctttccacaccttntcttctgagacactat

SEQ ID NO: 304031 - DNA, 364 bp, Homo Sapiens
  misc_feature (138)..(139): n is a, c, g, or t
  misc_feature (201)..(201): n is a, c, g, or t
  misc_feature (280)..(280): n is a, c, g, or t
  misc_feature (293)..(293): n is a, c, g, or t
  misc_feature (317)..(317): n is a, c, g, or t
  misc_feature (327)..(327): n is a, c, g, or t
ctccacatggctggggaggcctcacaatcatggtggaaggcaaaaggcatgtcttacatggcagagaacaagagagaatgagagagcttgtgtagggaaactcccctttacaaacccatcagatctcataagacttgnncactatcatgagaacaacacaggaaagacctgtccttatgattcaattacctccccctaggnccctccccacaacacgtgggaattatgggagctacgattcaacatgagatttgggtggggacacagagtcaaaccgtancagaaagtaaagntcagacaagttaacgaattggtcnaaggtgaaangcaggcagcctggattccggaaatgataaacaccacg

SEQ ID NO: 304032 - DNA, 204 bp, Homo Sapiens
  misc_feature (54)..(54): n is a, c, g, or t
  misc_feature (135)..(135): n is a, c, g, or t
gtgtctggatttgcggttgcttcagcacttccgttatgaactcttaattgactnattttacaatctagtcaccaaaaagaggaggatatggttggtagggaattcctaacatggaatcatcgttatattgtgtcncatttgggcctgttctataacaagcaaggtgtgtctgagtgtcttatctgcctgaaaactcaaggggta

SEQ ID NO: 304033 - DNA, 436 bp, Homo Sapiens
  misc_feature (45)..(213): n is a, c, g, or t
  misc_feature (351)..(351): n is a, c, g, or t
  misc_feature (362)..(362): n is a, c, g, or t
  misc_feature (407)..(407): n is a, c, g, or t
  misc_feature (419)..(419): n is a, c, g, or t
aaagggaagagtggagtaattaacagcccagcctcaagacagggnnnnnnnnnnnnnnnnnnnnnnnnnnnnnnnnnnnnnnnnnnnnnnnnnnnnnnnnnnnnnnnnnnnnnnnnnnnnnnnnnnnnnnnnnnnnnnnnnnnnnnnnnnnnnnnnnnnnnnnnnnnnnnnnnnnnnnnnnnnnnnnnnnnnnnnnnnnnnnnnnnnnnnnnnctttgtgagtctgctgttactatatatcctggtatggtctgcagacaaacttaaagaacataaaagcttcacaatttgaaaaggaacagcctacatggataacctcttccattgaaaaaccatggaatttgttccttntgtttttcttntccctactgggctctttttgtgagaagttgttctttaaaaacttnatctaaaattancaagggttccttaagga

SEQ ID NO: 304034 - DNA, 131 bp, Homo Sapiens
  misc_feature (71)..(71): n is a, c, g, or t
ctaatattatttaaataaatctcacagcagtgactccattgtataataattttaagaactacttatttttnctagtactgaatttattaaagaaaagctacaattctgacagcagaatgtattacatcttt

SEQ ID NO: 304035 - DNA, 210 bp, Homo Sapiens
  misc_feature (127)..(127): n is a, c, g, or t
  misc_feature (163)..(163): n is a, c, g, or t
  misc_feature (174)..(174): n is a, c, g, or t
tctcaaataaaggggggaagttgagagtacaatttggaggaaaccagttaagctgtttaagtatgggattgtgcagtaggggtggagaaaacttaggagagtagagagagatttaggtgttctgttnggaagaattttcttcccaaacttgttcttcactttntttttacagangatgtactcttattcatctgtaaaaatatgtattca

SEQ ID NO: 304036 - DNA, 394 bp, Homo Sapiens
  misc_feature (361)..(361): n is a, c, g, or t
  misc_feature (367)..(367): n is a, c, g, or t
ctgcattgaagagaactgtctttgctttacctctccagaatcaactcgctgagtccaagaattggtgtcacgttccaatctgctcaatttctttctcatactaagtaatagacatcctcatccttcctgcttagggtttatttttaaatcactatattgggatttttgtttgttttctggttcctcaaagatagcttaattgagcaaggtttatcctgcctttcttgtcttgggctccaaagataccaagatcaagaggacaggctaggccttaggaaattttctatttatggcattaggctttttcactttcttaggacatgggcaaggctgggtattcaaaggttaggtctttacaatnaaaaantcttggcagctggactatgtgttatta

SEQ ID NO: 304037 - DNA, 351 bp, Homo Sapiens
  misc_feature (87)..(87): n is a, c, g, or t
  misc_feature (166)..(166): n is a, c, g, or t
  misc_feature (291)..(291): n is a, c, g, or t
agagtgagttatcttactgatgtgctagaatcttttagttatacagtaagtttttattgacctctatagtgtgaaagacatcaaganaatgttgaattaccaatagggtgttctaattttaaaacaatgtattctgttcttaaatttttttccagaaaaattgganaaataaagtttcagtgcttccataaggttaagttttaggcctataaggattcacttaagtggggtattttattcctccatgattacagatgaaggaggcatttctaatagtataatctccacctntatttggattctacttttgatgagtcttgccaaaaatgtccctaaaattcatgttgttaa

SEQ ID NO: 304038 - DNA, 565 bp, Homo Sapiens
  misc_feature (381)..(381): n is a, c, g, or t
  misc_feature (398)..(398): n is a, c, g, or t
  misc_feature (481)..(481): n is a, c, g, or t
  misc_feature (492)..(492): n is a, c, g, or t
  misc_feature (498)..(498): n is a, c, g, or t
  misc_feature (510)..(510): n is a, c, g, or t
ttaaatgcaaagtacagaaactaaactccggctttctctagccttcctctgggatggagaaaaatatacatctccagagctctcaaaccctctcattctacataagggcaggagacagaaactgagaaggaagttcgaagttcacaatccacaggtacaggctcggtaaaagattgagaccttatcatagaactgttgaatgctactttttctccagcaccttacaccacattaataaacccttaaatacagccattccttttacccagtacattttgtctggctgtcaagaaaaaattgcaagtctcatactaaaaggcaataaacacagtctgaaaagaataagacttaaagccagatccaggtatataacggacgttnggaattatcaaaatggnaatttaaaacaactattattaatttgctaagggctctaatggataatgtagagagcatgcaaggacaggggagcatggtagcnaggggtaaaantctagngccaaaagatcnctaagattaaaagtctgtacagtttgccaatacctaatttttttattgttaggtg

SEQ ID NO: 304039 - DNA, 491 bp, Homo Sapiens
  misc_feature (67)..(125): n is a, c, g, or t
  misc_feature (214)..(214): n is a, c, g, or t
  misc_feature (358)..(358): n is a, c, g, or t
  misc_feature (402)..(402): n is a, c, g, or t
  misc_feature (407)..(407): n is a, c, g, or t
  misc_feature (414)..(414): n is a, c, g, or t
  misc_feature (434)..(434): n is a, c, g, or t
ttcatgaataactcttgagtatggaattagtggctggtggaaaaatattaactcaggccactgaagnnnnnnnnnnnnnnnnnnnnnnnnnnnnnnnnnnnnnnnnnnnnnnnnnnnnnnnnnnngtgtaattctgcctctaagctcttatcctggtttaatagctggtgatcctgtaaggggtattgaattacttattccaggctgcgtgaanatgacaacaaggcatgatagaccttaaattgcactggtttgttgagcctgaaatcacatttgaggccatagttattgtccaagtaaaactgacctgccaattatttgaataaagagaagtggtattgtcttatattagttatcnttttttctcattaatgaagttcatttgggcccatttgtctaccntttcnttgttcntctgcgactttccttagacnactggatccatagttgccctttatccactccagacagatagaaggagtccgattctt

SEQ ID NO: 304040 - DNA, 552 bp, Homo Sapiens
  misc_feature (20)..(20): n is a, c, g, or t
  misc_feature (34)..(34): n is a, c, g, or t
  misc_feature (54)..(54): n is a, c, g, or t
  misc_feature (86)..(86): n is a, c, g, or t
  misc_feature (110)..(110): n is a, c, g, or t
  misc_feature (151)..(151): n is a, c, g, or t
  misc_feature (189)..(189): n is a, c, g, or t
  misc_feature (303)..(303): n is a, c, g, or t
  misc_feature (408)..(408): n is a, c, g, or t
  misc_feature (509)..(509): n is a, c, g, or t
aggtaacgcaggctctgtangtttttccagctantttggatttttaaaagcttntgtttatttcctgctgttaggtggtattttanacttgtttcactttctcctataantgtatatatatgcctcagtaatgatccccttagagcagtgnttcccaacctttttgacacctgggaccagtttcgtggnagacaatttttccacagacgaaattgaggtggagagatggtttcaggatgaaactatttcacctcaggtcatcaggcattagttagattctcataaggagcacacaggcctagntccctccgcaggcatagttcgccatagggtttgtgcttctgtgagaatctcatgctggccgctgatccgacagagggcagagctcaggtggtaatgcttgctcgncagccactcactgcctgccgtgtatcccagttcctaacagccgcagacccatgacccataacccataccagtctgcagtcgtgggttggagaccctagctnagagaatctccaaatgcacattcaagaaataaatggagcttcc

SEQ ID NO: 304041 - DNA, 532 bp, Homo Sapiens
ttttgagtactctcttctagctattttgcaatatagaatatttttattaactacagtcaccctactctgctattgaacattagaacttcttttgtctgacgtttgtacccattaaccaacctctcttcatcctctcccaacccactcaatcctcccagcctctattatctatcattctactttctgcctccatgagatcaacattttagctcccacatgagtgagaacacgagatatctgtatttctgtgcttggcttatttcacttaacataatgacctccagctccattcacattgctgcaaatgacattccttctgtcttacggccaaatagtatttcattgtgtgtatatatgccacatttttttatccatttggtccactgatgggacacttaggtttaatttcatatctttggctactatggaatagtggctgcaataaacatggggagtgcggggtggtccctttgatatactgatttcctttttgaggggggatactcaatagagagattgcaatagagagatc

SEQ ID NO: 304042 - DNA, 157 bp, Homo Sapiens
caattaaaactgaaggaccaaagaaacccaaggaattagattcatgatgctacttgttctgcttctatcaccatcaaacattaggtaaaataattcttctttgccttcaccttgtccattttctggaggaagggacataggtttgatacaacgaatc

SEQ ID NO: 304043 - DNA, 250 bp, Homo Sapiens
  misc_feature (148)..(148): n is a, c, g, or t
  misc_feature (154)..(154): n is a, c, g, or t
  misc_feature (198)..(198): n is a, c, g, or t
  misc_feature (213)..(213): n is a, c, g, or t
attttgagattaaaactaattcttttaaagtcactactcagctgaaatttggcctgattataaatgttgataataatttcttcctggctcaacaaagttgttgagcttcctttctgtgcacacattgaaagaaaaccagaaattgtanagtcgngatatgaattagagaaggaacaggtggaaaaggatggcaacgcncagagtccggggganacacggccttaagatgaaggaacgagtagaccctgaa

SEQ ID NO: 304044 - DNA, 574 bp, Homo Sapiens
  misc_feature (459)..(459): n is a, c, g, or t
  misc_feature (505)..(505): n is a, c, g, or t
  misc_feature (524)..(524): n is a, c, g, or t
  misc_feature (547)..(547): n is a, c, g, or t
ttcctggatttataaaagacttaaataatgagcaaatccaatggaaaagctgcaatgcctttatcataaactaaatgacaggaaaaggtacattttaaatgtttagaacagtgtttaaaagcaaaactccatcattatggacgaaagccccttggacactgttctatgtctctccactgtcccctatgacctagtatcccaagctacccctgtgctagtcccacaatgtgtaagggggcctcactgggcctcatgacatggtttgtggtgactggtggagataggaaagcattaagtgacccaggctatgttaaccagcactgacttgtgctttagagggaaaagtgccaagactgtaatagtgactgaatatttgtttttgagatgctctgctggttgacacagagtccagtactcccctggcccctcccaaactggctggtgtgggcaggtcagtcntcatgggccatcccaatacagaatacaggggcctgggaccggggantcccagcggatgacagcangtgccttcctgtggttggtgccnaatgagaaggctgctaactggcatgcg

SEQ ID NO: 304045 - DNA, 485 bp, Homo Sapiens
  misc_feature (237)..(249): n is a, c, g, or t
  misc_feature (437)..(437): n is a, c, g, or t
ttaagagacatctaatctaacaactctgccttttatcaaacaacaacagttgatcttgatatagaaatcttggattggactccactaaaagcctcttaatacattaaccaaaattcatctgacaaatatcaaaatatctgctatcttcaaggactctgctttaaaaccagtatcccctaattacagtagtttctactgaggggaggtatggaagtgtctgtgtgtgtgaggcaggcnnnnnnnnnnnnncttgaatttgctacaaaactcttaaaatccatatacaccaaacatattttgccctatgcgttaatatgcaatagccaaactaggtcctagtccacttttccagtatataaaaaataatctatgataatataaattaattttaaagacagttctgaactcacagtagcttctgaaattatacactttcntaatcaacaaatgactgagaatcatggcctactacatagggattagtc

SEQ ID NO: 304046 - DNA, 545 bp, Homo Sapiens
  misc_feature (430)..(470): n is a, c, g, or t
  misc_feature (502)..(502): n is a, c, g, or t
  misc_feature (514)..(514): n is a, c, g, or t
  misc_feature (532)..(532): n is a, c, g, or t
agatgggtcagaacacatctatgtaatgtcacaacccaacaggccagagctttgaaatcagggcgcgctgtggttaactgttctctgacaccctttttcatccgttcacccatcccactgggctactaacttattcttccctctaactttgttctctgcttacacccttctctatacctcatgtgaatcctcacctcttcctgccttggggcttatattttaacagcagcaacagaatcccccttatctctgaagtctgcaaagccctgtcaacattcttacgacaacctatgaaacaagaatcctataacctccactgcacatagagaaggctacctggagtttgaagcagaagagatgtgagtttgaatccagtatttgttactcatcagcaatgtaggtgagtcacaaaagtttatattatccgcannnnnnnnnnnnnnnnnnnnnnnnnnnnnnnnnnnnnnnnntagatagatggttccggtaatattttcccgangggggtgtcacntctaaattaatgtctccnggatttgagagca

SEQ ID NO: 304047 - DNA, 546 bp, Homo Sapiens
  misc_feature (420)..(429): n is a, c, g, or t
  misc_feature (479)..(479): n is a, c, g, or t
  misc_feature (536)..(536): n is a, c, g, or t
tcctctcaagcgtttcagggggagtttttttcggaggttactgagtatttaggaatcatcccttcagacacttgctcttttgccacagaagctgcagttatcttatccctgctttcggcagctggaatgctccgtggaacagggctgagatgaacgttctatctccaaggctgcgttttggggcaagttaaggaaaaggatcaaagtaagttgatttgcatgaccttctctttaatcagatgtttctttttatgttcaacctcaacaaagccagcctatcatagcacactatttatagtctataatctaagatgttctgaaccattcccccacaccaaaaattaaaattaaaacctcaatagtggtgtggctatatcattagaagtaatagtagagtcacaaaaacccatttctgagacnnnnnnnnnnaaatgacagggtttggatgggtatttccaatgggggcatggggtccccangattggtaattcctaaaatatggccaccaaggtcaatattgaagttcccgggggcangtccatcaaa

SEQ ID NO: 304048 - DNA, 618 bp, Homo Sapiens
  misc_feature (510)..(510): n is a, c, g, or t
  misc_feature (537)..(537): n is a, c, g, or t
  misc_feature (542)..(542): n is a, c, g, or t
  misc_feature (552)..(552): n is a, c, g, or t
gccaacagcatttgtcttatggatgggaaatgcctatttctttttcctccggacacgcccagccaaaggaacacgatgcattaaattccacttcatttggggtgtctctctaccagagctggccaggttgaagtggcattgctaggctcttaggtgccactgaatttactggatagtgacgggccttcttggttcagcagatgccattttctcaaggaaatctcagaatttcaggggatccaagctgtttaccctctgtgcttccacaacatgtccataatatcatttactgtatcatataaatccgtcttatttgatctagatctcagaactccctcaagattgtccagtctctggagccagaaattacatttttccatctgtgtatctctattcaccatgcaactgctgacccatggtagacaccatgtagacccaagtgacccacactctgggagaaacactgtttccctcaagtgggctgaacaggctggtacagcatcaacttcnagcacatgggacgagggaatttactcnctaantttcaattgnaattttggtttagagagtagtagttaagtttcccttttaaaaatacatgatatagatgggggaatg

SEQ ID NO: 304049 - DNA, 498 bp, Homo Sapiens
  misc_feature (388)..(388): n is a, c, g, or t
  misc_feature (401)..(401): n is a, c, g, or t
  misc_feature (419)..(419): n is a, c, g, or t
  misc_feature (458)..(458): n is a, c, g, or t
  misc_feature (488)..(488): n is a, c, g, or t
ttactgatattttttataactaggaaagctgtaatgtgtaaacatgacaaaacgccaaaacgctaagtgaattttacaatggaacatggacttttcaaagggacgattctgattagtgaaatctgttctaaacctcggcttttctgattcctagcagggtgacccttggtaatatcttagctccagtggaccttaatttcttcattgtgaaatggcgtgattgaacataattcctaggtctcctcgaattctaaattcaggtgaagaaacagggtgatccgtccgcaatttcatctgtttcagtatatgcgtttatgacatttgtatcaaagaaaagtggagacatttcagaaacagcaagtatttcctgagaaaacatagctgttcnatgtgttgaagcncaaaagataaatgccaanttaagaaagggtgtgactgtcaggggaagccggcacccngaaacctgttagcctcatgccagtgcctcncagctggcac

SEQ ID NO: 304050 - DNA, 362 bp, Homo Sapiens
  misc_feature (151)..(151): n is a, c, g, or t
  misc_feature (158)..(158): n is a, c, g, or t
  misc_feature (170)..(170): n is a, c, g, or t
  misc_feature (172)..(173): n is a, c, g, or t
  misc_feature (176)..(176): n is a, c, g, or t
  misc_feature (251)..(251): n is a, c, g, or t
  misc_feature (279)..(279): n is a, c, g, or t
tggagaaaccacattcttttagatttggtgggcacgtaattacagtgtaggtggtatattcttcttgacgaaaatcttataaagcacttacaggaacttggatatttgtaatgaaatatagtattagattttcatttttatacattttctnttcctcnaaccatagccantnnggncggttttgaaagagtttttagctcctataaaaacaaagtgcccccccgaaaagaaagggtcttttaactcttcanggatcatttgggctgcctgggtccttgnctttagagttggagaaataatattaagcagtcataaaaagggattcttaggcacaatacacaaaagctgttttatatactggt

SEQ ID NO: 304051 - DNA, 361 bp, Homo Sapiens
  misc_feature (232)..(232): n is a, c, g, or t
tggatattaactaagtttgggcctaacaagtataccttagtgcccaactgcctcattcaactcattgggcagttgttgcaccgggtggggaggtctctgctgggatcactgaaccaaaggaaggcagaatcagcaagacctgttgctcatggccttttacccactcacagagtctgactcaggctcctgttctcattcagggtcagtcatcctttcagtctcatcccctggntctcaactcctccaccttcctggacatcttataataatttatctcgtgcctccttcctccttccagaatgacaaaattagcatcatattagttcagtgggcttatgtggccagatagcttcagtttttt

SEQ ID NO: 304052 - DNA, 469 bp, Homo Sapiens
tagtgtctgtaagacctaatgaagctgaggaaggaaacatgatatggcttcctgaattttgtggttttgcagcagtaaggttatgtgagggcttccaccctaaaggacacccttaagcacagcacttaccaatttcctaagaaaaacatcttaagcaattcttaaaagacctgggaagcaggcatatttgctgaacgagtgtcccagtcattttaaagccagtctcatatggcatgcacatcagttgctttgtctgggatgttccacttggcatttatagagggagttgggtagtcccccttctcaggggagccttttatctagtccaccagcctggctgtttgctcaggaataaccacctttgtctggatcatgtatagccatgtgattgttccattgtgagccatgcattctgcatccaccaaaactttttcttcattttgcagcattatacagaagcttatgcatg

SEQ ID NO: 304053 - DNA, 438 bp, Homo Sapiens
ctggcaaatcgaaaaatcttacgactactggatcttcttctgtctgcatgtatttatatgtgttctgtgtgtgatgtttatataaaagagctctacttaattggcttaaagaaaattaagtgcttaaatcaaatattttgtcagaaaaataaaaactttaataccttttagttcgtgtcacttgagtaatctttgggaactaaagatagttttaaaggttattggtaaaataaaaatatcttcaaaatgtagatatttggtctaaattatgcaggtcagatattaggtttgttaaatgctttaagctctaaactgcttaatgacttgataattgctcagcttacctactttggagacattagattctagataaggcctgggacatatggagttagccatgcccctggctatgctgggaaagagttaaaccttatctgc

SEQ ID NO: 304054 - DNA, 351 bp, Homo Sapiens
  misc_feature (195)..(195): n is a, c, g, or t
  misc_feature (275)..(275): n is a, c, g, or t
  misc_feature (315)..(315): n is a, c, g, or t
tcatctaatactattatgggtgagtatattaaaacaattcgaaaaaactaaaataaagcttatacctagtggttattccacagactaatttggaaaatatcagtgcttggcatgaatgattctgttctcccaaagcattcagttgagtagtgacaatcaacctgtagtttggaatgtaccagtacttaaaagganaacatattcttagaaaaagcaatcatgctgtcaggcatatattcaacatataatcatggatctctacatggatttacggnaagaagtgaaataaacctgtagatcttcttcaaaaggganagagtattaatcaaatatttataatatgaaaagcac

SEQ ID NO: 304055 - DNA, 111 bp, Homo Sapiens
tggactcaggtgattttcccatctcagcctcccaagtggctggaaccacagttggacaccaccacaccctgctaatttttttattatggggtcttgtcatctgcctctaat

SEQ ID NO: 304056 - DNA, 354 bp, Homo Sapiens
  misc_feature (26)..(26): n is a, c, g, or t
  misc_feature (64)..(91): n is a, c, g, or t
  misc_feature (178)..(178): n is a, c, g, or t
  misc_feature (202)..(202): n is a, c, g, or t
  misc_feature (251)..(251): n is a, c, g, or t
  misc_feature (261)..(261): n is a, c, g, or t
  misc_feature (267)..(267): n is a, c, g, or t
  misc_feature (338)..(338): n is a, c, g, or t
cttggtgtggtgctcaaattttaganagtatttcatatttcttagagaaacaagccgtgctcannnnnnnnnnnnnnnnnnnnnnnnnnnnaaaagggcagggggactacaatgccaggagccagagagcttgtcagagaacagcctggccaggcatggtgctccatctgagtgccgngtcagagcatgcccaagcctttgnagttttcctatgatcaatggacagcatcaatcttacagcctggaatggnaacaggatgnaaagcnagaaggcactgtacctttcccccacttggcagacagagaaactctaacttctcccgccctattttcatccntttagattcattttcc

SEQ ID NO: 304057 - DNA, 426 bp, Homo Sapiens
ttggaaaacctgtgaatatttcactgcaacctctttaaaaagctcaaaaatgagttgtaaactggttaggtttgtggataatctttagtattttatgctaattatatttatacaaatgttaactttgttgaaaagtgatgctttttaaataactctaaagtaaatgtaacttttactcatgcaacaaaaaggctttagaaaacacagtgtacaagaaaaccattaaacatgtagagacctcacagaatggaaacttgtacgtgctgcatgtcctctaaccaacaatatggctccagatacctcccaacctaggcatgcagtgaggggcatttccctgatgttacaaatggtgcttacctctagttaagtagaaattatcctccgattggaaaaaaggcaatcatttaagatataaatttgaatttc

SEQ ID NO: 304058 - DNA, 450 bp, Homo Sapiens
ggataaattttaaaacggaaaaacctatttagtaattgctgcagaagactcttacagtcctaaagacagttaaagaaatatgaaaaagaaagagatctcaaaggagaatgaattctaattaagtcatagcgtaatttgaaaaattaaatgtacaattaaagttgttgctgataatgcacatatttttctctcagaagatttcagaatgtatcaaggataaatttttatgaggattaggtggcctccatttctttgatgtttattaacattttacaattacttttaacaataatataaacccatgagactactacaaaaaatccgatctttctacatgtagcatactatgttctacttatattctggatgaatccataaatggtaattcctgggggcatccaatttggttccatttcatttggaaatggcctttgggccaataagcatggt

SEQ ID NO: 304059 - DNA, 119 bp, Homo Sapiens
gagtgctattcacctggagatttcctgtaatttgagacattattctgtgagtgaaattccaacataatgggcattgctatgtagaagcatagttttccctattacaataaaaggttttt

SEQ ID NO: 304060 - DNA, 160 bp, Homo Sapiens
aggaagacagatcattaagaaatattgtaggaccagccaggtatcctagggaaccttgggaaatttctccagagagatggttgagactaattcggtttattcagcactgtggctctgtggacataaaagggcacctgggtaccatttagggttgcaatgc

SEQ ID NO: 304061 - DNA, 406 bp, Homo Sapiens
tttttatggctgaatagtactccgttgtgtatgcgtaccatattttatttatccattcatctgctgatggacacttggattgcttccaaatcttggctattgcgagtagtgctacagtaaacatgctgcagatttatcttcaatatactgatttcctttctttggggtatatacctaccagtggaattgctggattgtatggtaactctatttttagtttttgaggtacctacaaactgttctccatagtggttgtactaatatacacttccacagtgcacgagggttcccttttctccacatcctcttcagcatttgttgttacctgtcttttgggacagaagatattttaactggggtggagatggatatctcatggtagttttggatttggcatttctcctaa

SEQ ID NO: 304062 - DNA, 358 bp, Homo Sapiens
  misc_feature (48)..(48): n is a, c, g, or t
  misc_feature (105)..(105): n is a, c, g, or t
  misc_feature (256)..(256): n is a, c, g, or t
  misc_feature (275)..(275): n is a, c, g, or t
  misc_feature (280)..(280): n is a, c, g, or t
  misc_feature (290)..(290): n is a, c, g, or t
  misc_feature (309)..(309): n is a, c, g, or t
  misc_feature (346)..(346): n is a, c, g, or t
tctggattagactttggcttaagagaatgttgtggctggtttcatttnttttatccagaccacttaaattttctccatattagcaataagcctgttttgccttcntatcatttgtgtgttcagtgtagtaacacttttaatttccttcaagaacttttcctttgcattcacaacttggctaactgtatggcacaagaggcctagctttcaacctatctcagcttttgacatgccttcctcataagcttaatcgttntctagctttttgggtttancgtgnagagagatgncgactttcccttttcactngaaccacttagaggccatggccattggtaggggtggnttaattggggcc

SEQ ID NO: 304063 - DNA, 410 bp, Homo Sapiens
ttttagagacagggtcttgctatgttgcccaagccaaagtgtagtggctagtcacaggtgcaagttcctggcctcaggagtcctcccacttcagcctctcaatagctgagactccaggcatatgcaccacaccagcttctagatattcatatgaacaaatcagaaggtgttgtgtttatatgcttttaacaatcagttccaaattctctgcaactacttgtataagttttaaacatatttaaagtttctgattccaggtttttaagtgtgaagatgtaagagttttttatagtgatgcatgttatttcaatgaaaaaaatcacagaggtgtttaaaccgccatatgtttcaaaatgtccatctttgttacatgagtttgtttccaaaagtagttgctttgtcattatcat

SEQ ID NO: 304064 - DNA, 401 bp, Homo Sapiens
  misc_feature (316)..(316): n is a, c, g, or t
  misc_feature (325)..(325): n is a, c, g, or t
  misc_feature (347)..(347): n is a, c, g, or t
  misc_feature (353)..(353): n is a, c, g, or t
  misc_feature (360)..(360): n is a, c, g, or t
  misc_feature (366)..(366): n is a, c, g, or t
  misc_feature (388)..(388): n is a, c, g, or t
cacactaacagagtactgacctctccaccgtttcgcctcatgcctttccctccttcctctcctagactgctggttaccttggctgggagagaggatgtagtgggacattcctgtaacactttatccgcacatctactggaaatcgttaccatgttaataacttggttttgaattcatgttaacatgtgtacccatgaacatttttcattttcttttcatagtgcgatacataggtgcatgacagcattaacctggggacgtagaatatgatcaaggcagcattactgctttaactttagaatgacttactattttnttgaatttnaacagactggctgttttccacnaccttnagcattngaaggntcttttcatttttctccccatncaaggctatggtt

SEQ ID NO: 304065 - DNA, 388 bp, Homo Sapiens
  misc_feature (365)..(365): n is a, c, g, or t
atgtgtcactttagttttatttgttagaatccattgcttcagaactgctgtgatcctttgtgggtgtcaaaacactctgtctttctgtactgctgaagttctcacattatttctcatttatagaagctgtcacttagttattttctatttgctttcatttgaagaacattttcaattttcaattcttttctcttttgggggtgtgattatatgttgtgtgtaatcatttggcttcaattctgggtgccttcagggggctaaggctctagatgagtttcttggttatagatagtttttgtgcagtggctttctcaaatgctgattgttgtaccaatatattgggcatataatttgactcactatcntttgcagggctgggagtgcagaa

SEQ ID NO: 304066 - DNA, 143 bp, Homo Sapiens
gttttatgccgctattataattctttagcatagtgtgtcttctggacctagacaaagcctcttctgtattgatctttggtaaaattcttttctgagattatttaagatgtgactaagggacacatttatctgcttgcagcttc

SEQ ID NO: 304067 - DNA, 232 bp, Homo Sapiens
gaagaataatgtgccaggaagaactgccctgagagcaacactggggcccatgaaggacagcggacagaagacaccttctcagaggccagcacttcgtctaccagattggctttccaaggaactcactgagctgcggggtggcttatccttcctgtccggtagatttgatacttactgcagcaaatctattctggatgtttcttggtgacaacagagacaccaaaacagcctt

SEQ ID NO: 304068 - DNA, 210 bp, Homo Sapiens
  misc_feature (47)..(47): n is a, c, g, or t
  misc_feature (67)..(67): n is a, c, g, or t
  misc_feature (139)..(139): n is a, c, g, or t
  misc_feature (159)..(159): n is a, c, g, or t
  misc_feature (179)..(179): n is a, c, g, or t
  misc_feature (200)..(200): n is a, c, g, or t
tctgaagaatcactgcctgcctgatcttaaaataacatttttatctnagtcagaattgataatttanaataggtccttgttgtctagtggctcaagcacttgtctcagcctggccttttgagcaatctgtagtctaganctggtgttcaccttgccttntccaaatttatacttccagnggctgcaccccacaagctggntttcttcgtg

SEQ ID NO: 304069 - DNA, 394 bp, Homo Sapiens
  misc_feature (97)..(98): n is a, c, g, or t
  misc_feature (111)..(163): n is a, c, g, or t
  misc_feature (186)..(347): n is a, c, g, or t
  misc_feature (353)..(353): n is a, c, g, or t
cccttgctgaaaagtgtaacctgtcagggggctgtgagcctcacatcatgtaagttagccgttattgatgtgcttttcctttattcatttagagatnntttcactctatcnnnnnnnnnnnnnnnnnnnnnnnnnnnnnnnnnnnnnnnnnnnnnnnnnnnnntgggctcaggccatccttttcannnnnnnnnnnnnnnnnnnnnnnnnnnnnnnnnnnnnnnnnnnnnnnnnnnnnnnnnnnnnnnnnnnnnnnnnnnnnnnnnnnnnnnnnnnnnnnnnnnnnnnnnnnnnnnnnnnnnnnnnnnnnnnnnnnnnnnnnnnnnnnnnnnnnnnnnnnnnnnnnncatcancaggttatggagccaagtaccatttacccaagtggacaact

SEQ ID NO: 304070 - DNA, 386 bp, Homo Sapiens
ggtcaggaacctagcattgtttagactaaaaaatatccaattttagagatggggttaactttttcccctaatatatttattattgttaatactgctgtttaacactcattccaaaacttagtggcatgaaacactttttattatgcacatcgattctgcaagttgtgccctctgaaagggcacagttggggatagatttttctcagccatgtggtgactgggatctcagttgggaagactggaaagttgagattgacacacttgactcctgggggccaaaatagtttgatggctttttcaccaacatgtctggtacctaggctagcattgttgaccagactgccttcatgtggccttgcttgtgtataacctggtcggcctcgaat

SEQ ID NO: 304071 - DNA, 421 bp, Homo Sapiens
  misc_feature (366)..(366): n is a, c, g, or t
  misc_feature (388)..(388): n is a, c, g, or t
aacttaggaaataaggcaagaggtggatggccttattgaaaggatggcatatcctttcaatgtcttatgggaacaaaggcccatttaaatgttatctcagtgtaagaattttggattaaaggtaccaggtttagtaaaattacaggacaatttggagatgtctgtccaatagatattcaaataaccattgtctagtgaaaaagataacccccaaattatactttattgctctatgggatactaaccagttttacatctaacatagcaatccttttctaatatttatttcttagttagcaagcttataaatacaccttactgggttccctctttaatgtgtctttgacatatgtttattttattttnatacttgcatgacagctatgcntttctttgggaaaattatactttaacatggagt

SEQ ID NO: 304072 - DNA, 425 bp, Homo Sapiens
  misc_feature (315)..(315): n is a, c, g, or t
  misc_feature (405)..(405): n is a, c, g, or t
agtgttcttacatgcttaccaaaaatagcagtcaagaactcttttccacagtttttataagcatattacaaattactatgaactgacatactggcacagcagaaaaataccataaaataaaccttggtggattacaatgtgtgaatgtgttgtaggagaaatatttgcacttaagaaatgttacattttattttacaacacaaagtatctgttaccatctgtgaacatctttaaaggcctggttttctcaatatttctatttcatgaacattttgctcccttaaacaacctttatattttaatttacaatgtggnatttagtggctcagtcatagccaataattgagtagctgtactggcaaaaaatggacggaggttggttagtccaaaccaatttatattggngttcccggttgtaatggttg

SEQ ID NO: 304073 - DNA, 172 bp, Homo Sapiens
aaagggacataatggattaggctgaattaccaagtatttaatacaaaaggattaattgggtaggctaaatgtagacacatttctgtcatttcaaacaggtgtagtgaccttcactcacatccttagtgaatatattatacatatttgtatggcttcagattcaagtctcttc

SEQ ID NO: 304074 - DNA, 347 bp, Homo Sapiens
  misc_feature (116)..(116): n is a, c, g, or t
  misc_feature (234)..(234): n is a, c, g, or t
  misc_feature (323)..(323): n is a, c, g, or t
ccagactgtccttaactaaccgacactgatactgacttccataaaatttagcttttgccagggaaaaggagagaagaccgctctttggtttggcttccgcttaactgacaacaaanccactaatatgcactaccctcctcctccatccatccctctgcttctctaatagttccagccggtttgttttaaaccaggcttacaaagaattaccaaaccttaattctttttagctgnctggagtttgcaaaaagttcagagtattgatcaagactatttactatgggagatacctagaaagatgcagtataattgaccctgccttnagtggtttttgaaatctagtatgg

SEQ ID NO: 304075 - DNA, 203 bp, Homo Sapiens
  misc_feature (39)..(39): n is a, c, g, or t
  misc_feature (58)..(58): n is a, c, g, or t
  misc_feature (77)..(77): n is a, c, g, or t
  misc_feature (96)..(96): n is a, c, g, or t
  misc_feature (115)..(115): n is a, c, g, or t
  misc_feature (153)..(153): n is a, c, g, or t
  misc_feature (172)..(172): n is a, c, g, or t
ccctaaaatgtttctagatccccagagctttcagaaagncgaagtgagtttcagcgcncttctaaagtagtcataanccataggttataggcaggncctacttctttgagttgtncaggaaaaacctgatattccacaacaccgtaagacatncaacatgaaagttcagtgnctggtcggagattttatccccggatttaact

SEQ ID NO: 304076 - DNA, 144 bp, Homo Sapiens
gagaccatgagcacaataaagtgatgtgcaaagaacagagcaaagtgaaagactgtgtctgtgttgacagtagatgaagggaaggagaagaagttatttttatggtgtcctaagaaccccaaagtagaaagcagccaaaagttt

SEQ ID NO: 304077 - DNA, 370 bp, Homo Sapiens
  misc_feature (114)..(114): n is a, c, g, or t
ggtttaaaggagatgcaaaaacatatacaattataaaacaacttcatttaaccaggaaacacttaattgactacaaactgggtaatgattttgaaaaatatgagactaaaaganacacatactagcagactaaagcaaggagaaaaccatataacttttttctccaatcttattgaaggcttattcagtattttaaatactaagttctgcattttataacttagagtaatgaggtttcttatataaaacttcatatcatatgccaaccccaacctctgtaaactttattctgatagtattcctgcaaatacatacatacacaacatatttacacacgcacatttttgtttaaggctagctattccccccc

SEQ ID NO: 304078 - DNA, 352 bp, Homo Sapiens
  misc_feature (76)..(76): n is a, c, g, or t
  misc_feature (95)..(96): n is a, c, g, or t
  misc_feature (177)..(177): n is a, c, g, or t
  misc_feature (257)..(257): n is a, c, g, or t
  misc_feature (288)..(288): n is a, c, g, or t
  misc_feature (299)..(299): n is a, c, g, or t
ttgataccaaaacctgccaacatgaatcaacctgtactttcattttccactatttggaccttgagagcttgccganaggttctagaaggagcgcnngcatcagtatacccttgacccaagaccagtcctcctctatttggggatggttgtcctcttcaaccaagcacgcagcttcanttcaggagggacgcacgtggagtggagagggaggaaggggacacctgccgagccagccagatgagctgaaatcaaccctngggatcaatggggtaacaatgtcacagccanatagccctcanattcaattttccactatttttgggattgagaatttaaaaattgttaagtgacc

SEQ ID NO: 304079 - DNA, 420 bp, Homo Sapiens
  misc_feature (336)..(336): n is a, c, g, or t
atttcccagttaccagcatccaatataagttggcccccaggggaaaacccatgtgaatgatagaaagaggcttcttgcaacccaagggagaaactggtggaaagccccattttcacatcctgccaggtacatacttgtgcacacacactgagagaagctgctggcatgaagatagctgtgtgttccctatggttgctaatcattaggtataaaggccagaatgggctttacaattacttctgggctggtgaaagtagccatattgttccttattcagacttctctgtaagctaaatggctactcagtatcacctgctggaggacagaactatatgngacactaaaggcccctccctttggattctcaggaacaagggtaaatgagctctgcacctctgggcctgacaccacccatctgaa

SEQ ID NO: 304080 - DNA, 442 bp, Homo Sapiens
  misc_feature (225)..(225): n is a, c, g, or t
  misc_feature (398)..(398): n is a, c, g, or t
  misc_feature (405)..(405): n is a, c, g, or t
  misc_feature (416)..(416): n is a, c, g, or t
  misc_feature (432)..(432): n is a, c, g, or t
cattcaataaacgtgtctggggatatccgcctaagagttatgtgacccaggggacgtggtctgtgggttagatatgagtttaactaggtatgttttagagtcattgatagactctgattatcaagaaaggaaacatcctgccaagcccgtcctttccttacttccctatctccattgtccctaaggaggggggccggagagccagggatgaagtaggcaggtacnggaaaattactatttttgttgccaattatattatatacaaaaataaggttaaccttttctgggagggcatggcctggacacatttccttctgggtattctagaaatgtgtctttccctcttcttctgggcaagcccttccagcaacttaagtttttgaaggattttggggctnctaaganaactcctcctnctgaggattaaaaccntggtgggtgg

SEQ ID NO: 304081 - DNA, 353 bp, Homo Sapiens
ccgttatattatttgtaactaatgataattctgtgtcctcagtttaagtacttacatatagttttcttaatgtattgcactaagttatggaagagatcataatagaaataatgatagtgtactcattgttacttttttcagactcatagaaatacctcatttttgtcccactgtgatgttggttttgtttcgagatatgtattttttatgaggggcatattctcctttttctaagatgatagtgttttatgaggttttgattaaaaattttattagtgaagataatagtatggttttctgattactagacttcattataatgattcagcattgcaatcctgttctctctctct

SEQ ID NO: 304082 - DNA, 450 bp, Homo Sapiens
  misc_feature (45)..(45): n is a, c, g, or t
  misc_feature (52)..(52): n is a, c, g, or t
  misc_feature (57)..(58): n is a, c, g, or t
  misc_feature (76)..(76): n is a, c, g, or t
  misc_feature (83)..(84): n is a, c, g, or t
  misc_feature (86)..(86): n is a, c, g, or t
  misc_feature (123)..(123): n is a, c, g, or t
  misc_feature (128)..(128): n is a, c, g, or t
  misc_feature (135)..(135): n is a, c, g, or t
  misc_feature (141)..(272): n is a, c, g, or t
  misc_feature (335)..(335): n is a, c, g, or t
  misc_feature (359)..(359): n is a, c, g, or t
  misc_feature (366)..(366): n is a, c, g, or t
  misc_feature (372)..(372): n is a, c, g, or t
  misc_feature (382)..(382): n is a, c, g, or t
tcctgtcaaccaggctggagtcccagtggtgcaatcacagcccantgcaacntctgnntccgggttcaagcgattntgcctgnntnagtctcacgagccgctgagattacaggcatgccagtnaccangcccagntacctnnnnnnnnnnnnnnnnnnnnnnnnnnnnnnnnnnnnnnnnnnnnnnnnnnnnnnnnnnnnnnnnnnnnnnnnnnnnnnnnnnnnnnnnnnnnnnnnnnnnnnnnnnnnnnnnnnnnnnnnnnnnnnnnnnnncacatgcagatttaagaacttcagattttcacaggccagatccatggattggattgccagtcnttgggatttctaaactttgacatngggtttnggaacnatattttaanaacaagggattggcaattaaagaattgggaaaaatggtttccctaattggattttggtcatttaggtt

SEQ ID NO: 304083 - DNA, 307 bp, Homo Sapiens
  misc_feature (244)..(244): n is a, c, g, or t
  misc_feature (265)..(265): n is a, c, g, or t
  misc_feature (270)..(270): n is a, c, g, or t
  misc_feature (284)..(284): n is a, c, g, or t
acggtctagaatccagcaaaatctttcgatcttcaccactgtcgactggggagggctcagcacaactcatgaagccatgggtttcagcacagccagggaaggtccccgagtgaaggtcagatggggagaggcctgcatggctggcaccgaggagacacagccagaccagtagctgcatgctcttggggcaagctcttcccgtctggagttttagtttcctttaaatggccaagtggaagaaagnccagccagggttattcacganaaccnttttctaggaactncttatttccaagatttttgggcc

SEQ ID NO: 304084 - DNA, 153 bp, Homo Sapiens
tacagtgaaaagtaagtcagtctgataaggagaaagttaaggaaatttacaagagaagattagcaaaatactacaaagtaaattaagcttggaaacattctgctgtaaaataggattaaaatgctgtggttttgatataaaaagcatcttccc

SEQ ID NO: 304085 - DNA, 140 bp, Homo Sapiens
cctccccacactccaactccactcccttctagttgttttcctgaggtaacggaaaaccttttaaagcaaaaaaggaactatgtccatgtttccaggccagcaagatagggaaagtgagaaagactaataaaagagtagta

SEQ ID NO: 304086 - DNA, 349 bp, Homo Sapiens
  misc_feature (22)..(22): n is a, c, g, or t
  misc_feature (41)..(41): n is a, c, g, or t
  misc_feature (305)..(305): n is a, c, g, or t
  misc_feature (311)..(311): n is a, c, g, or t
  misc_feature (326)..(326): n is a, c, g, or t
  misc_feature (339)..(339): n is a, c, g, or t
ttcagtgctaccaggatagagnttatttgactgctaggaanaatacaaaaatcttcaataggatcatctttatttttatgtgggtttagggaaatgttagacagctttctaaagttagactaagagacagtgaggcctagtatccaggaatccttggcttgcctgcccatttctaccactgatgagcagtggtcttgtttttccttggctatatggggttggttggaagctcctttagttctaccaaagttggtattggggataaagtgaaataatggaaaaacatatgggaaattggtggaaantggttngtggaatggcaaagnctttccagtcgtnagtgggagac

SEQ ID NO: 304087 - DNA, 325 bp, Homo Sapiens
  misc_feature (55)..(57): n is a, c, g, or t
  misc_feature (94)..(94): n is a, c, g, or t
  misc_feature (113)..(113): n is a, c, g, or t
  misc_feature (170)..(170): n is a, c, g, or t
  misc_feature (210)..(210): n is a, c, g, or t
  misc_feature (299)..(299): n is a, c, g, or t
cagcagttgcagtgtaaccggactgttaatggaatcgcgtcatttagaaacagtnnngacttcgctgttgtgcatgtggttaggagccagtgcncacgtcagttcttaggaantgtacagtctgagcaatagcatttgaaatccaagactcttcccattgtgttgctgtngagtgtagaaaataaaatgtgtgaatttcttttatcttgnagtattgaggattctccccttgagaattaaaacaagaatttttgctcttcagtgtaaaaatgttcaagttttatttcttggaaatgtantagtcaaagttaaggctttaaaaacg

SEQ ID NO: 304088 - DNA, 236 bp, Homo Sapiens
  misc_feature (32)..(32): n is a, c, g, or t
  misc_feature (46)..(46): n is a, c, g, or t
  misc_feature (81)..(81): n is a, c, g, or t
  misc_feature (88)..(88): n is a, c, g, or t
  misc_feature (109)..(109): n is a, c, g, or t
  misc_feature (222)..(222): n is a, c, g, or t
tccaaatcagtgaccctcaaattttagagtgnccataagaattacntcagacccttattgaaaatacagacccctgggtcnctcttcntccctagtgagttcaaatctncagaattctgacttaggtccatcttcgaaccacactttccagaaagttgtctgttgcccgcattcccactatcatgtccaattctgttccttcatattccttacataatctantttgtccttaatta

SEQ ID NO: 304089 - DNA, 413 bp, Homo Sapiens
  misc_feature (55)..(55): n is a, c, g, or t
  misc_feature (74)..(74): n is a, c, g, or t
  misc_feature (169)..(169): n is a, c, g, or t
  misc_feature (189)..(189): n is a, c, g, or t
  misc_feature (207)..(208): n is a, c, g, or t
  misc_feature (246)..(246): n is a, c, g, or t
  misc_feature (328)..(328): n is a, c, g, or t
  misc_feature (367)..(367): n is a, c, g, or t
ctgcatgaaccaacccctgttagcttcagacttccattctacagctcccttaccnctatcagttttcatagccntaaagagatttagcgccctgctctgggttaggcttccagcttaagggaatgtgatccactggtttgatcttccttcctagaccactcagactgtncccatatcagtaataaggcngtttcgttttcttatcanncatatgtccactggagtagcacttttctaaaagttccntccagaacttttcctttgcatttacaaatttgctaactgtttggtgcaagaggcctagcttttgggcctgtcttgggctttncaacatggcttttcctgcactttaggcttgaatcgtttnctaggcttttgggattttaaaagtggaaaggggcatatggactctt

SEQ ID NO: 304090 - DNA, 314 bp, Homo Sapiens
  misc_feature (291)..(291): n is a, c, g, or t
ggtttctgtggaactgcacttggtctaacacaggggcatattaatgaggactccatgttcaacaaaacataacctcccaataacaacacagctgaggcaagagaaatttcagtatttacatacacatgttcaggaggtcaccacttcctgttcctcaaaactccctcaaagtctgtctctccccaaagaaacaagcatatacgccactctctacaaatttatcggagtaattaaaataaatataaaatacttttaaaaagctttttatgtgtccctggataaaaccacttnaatttcttaaccatagtctcctg

SEQ ID NO: 304091 - DNA, 318 bp, Homo Sapiens
  misc_feature (220)..(220): n is a, c, g, or t
  misc_feature (264)..(264): n is a, c, g, or t
  misc_feature (272)..(272): n is a, c, g, or t
  misc_feature (282)..(282): n is a, c, g, or t
  misc_feature (299)..(299): n is a, c, g, or t
cagccgagttccacttttatcacagataaatctttttataatacactgcacataaggcagaagcattcccttgacctcagcaggcttacaacaagtccctgaaagtcatctaagaaagaaaaaactggaccatggtaacttactggcaaaaagaaaaagcatcacaactcagtaacagagaagtcacagtcttattggcacttgatggatggatgctatnggactcccgatggcggacttggcagcattttccggttgtgtgcntttccaantcagaatgtngaaagtgatgggaatcncaggaaggcaattccccac

SEQ ID NO: 304092 - DNA, 485 bp, Homo Sapiens
  misc_feature (43)..(43): n is a, c, g, or t
  misc_feature (431)..(431): n is a, c, g, or t
  misc_feature (458)..(458): n is a, c, g, or t
  misc_feature (473)..(473): n is a, c, g, or t
caggaagctgggttcaactaagtagcttagtagagccatccgnttccaggaatgggatagtcactacagagatggagcaggactctgactcagcagtgggagagactggaagagaggcagtggctactgtgaaagaacacaccaaccacagagcagagacaaatcctttaggtagctgtcttttgaaattcactttgtattctacctctatgtaaatgtaaatgttaagtgcctccattataaataacttataaataatactaacgtaacacatccttggatatttacaaataacactgcctagaaatcttaaaaggaaaaccaaacatacatttaatacatctacaagaaatacctttttagaaaataaaatgtatatgtttcaaaatttgatggagcctctacgatgtgggaataaggcccactttttncaagtctgggccaatgggggggttccncatttacagttcccntccatttgtcag

SEQ ID NO: 304093 - DNA, 366 bp, Homo Sapiens
  misc_feature (325)..(325): n is a, c, g, or t
agaatttgatgcagtgaagagtgctaaagcaacatcagcagcttgtctataacgtgccactgggtgcccacctgtccttagctagtcactacagatatggaaccaggatagaggaccatcaggctctcttgcagagcttaaggtgaaaactccagaagtctatctctaccgtactgacacacagatgcaagtcactatagttaaagttctctgcatatgtcatcaacacaaggatatgtcttcaggatgttgtgcttatcagagactcctggaaggtaagtttgtcaacattgttgcttagtcccaaggcttcagaaacagctcnctattctaaatgcagattccccggggagtgagagatgggac

SEQ ID NO: 304094 - DNA, 293 bp, Homo Sapiens
  misc_feature (193)..(193): n is a, c, g, or t
atcaagttgagtcattttttaaaaagtcattatgctttttcattgtaacctcacaacaaccttctaagctgaaatagttgtgccatttgataagaggaggcaagccagagagttgatcttgctcaaggtcacactgtcagttactgacaggctgcaggtctcctgaccacgggaccatagcactgccgcagtncctgaaaagtgtcttaccaagacccctttgggccctcctggtgtttgcacagctgctgctagagagctaggggcattgacagatgcaaaaaaggtggaga

SEQ ID NO: 304095 - DNA, 551 bp, Homo Sapiens
  misc_feature (123)..(123): n is a, c, g, or t
  misc_feature (126)..(126): n is a, c, g, or t
  misc_feature (413)..(413): n is a, c, g, or t
  misc_feature (429)..(429): n is a, c, g, or t
  misc_feature (451)..(451): n is a, c, g, or t
  misc_feature (468)..(468): n is a, c, g, or t
  misc_feature (491)..(491): n is a, c, g, or t
  misc_feature (514)..(514): n is a, c, g, or t
ttacaaacaatgatcattgaagcagctggtgtggttagaatcatggaagaaaataacaaagaactgccaagagggtagtgagaccaagggccaacaagtcatcaccaacgcccgcagcgaaanacnagggagcatggagggtcactgaaagggcaggccttccacagcggggagtttgccttatgagaagggacattctccccccagaaatagtgattcaataagtcagacgatttatgatacctgaaacgtatctttatagtaaaatcattcagtttcataactcatagtttaaaggatggttccactcatttctgttaaaacttttgtaacacaaaaccatagttacagtttaatgcaaacagaacagatgggagaaaccattcacttctaattccaaatttttagtagcncctagtttctccaaanccctactggctctggttaatcncaggccatcctattttnccaacctgcctaagaaggaaagnggggggaattaaaaccggggccnggtggatgccaaggcggatccatccgtttccggcgtt

SEQ ID NO: 304096 - DNA, 100 bp, Homo Sapiens
acccaagtaacttaagacatgaattaatagtgaatttatttcctctaggacagaacagacttaactttattagtaaactgtaactgttttagaagtaaag

SEQ ID NO: 304097 - DNA, 572 bp, Homo Sapiens
  misc_feature (417)..(417): n is a, c, g, or t
  misc_feature (500)..(500): n is a, c, g, or t
  misc_feature (550)..(550): n is a, c, g, or t
gacttttaaattcatctaatttttattaatgattatgataacatataaaattatgctcagcagtacaaaatagatccatttagctcatcagcgttttacacatttataaattttataaaatatgaataccaatttcacagcattttctgataatgcctcactagagaataaaatttctatttttggaaaaaaccaacaacaacttttgaagctgacctggtttgccatgtttatttcgggtctgtggttatgcttatctctgattccagagtgaagggaggtgggcagggcgtgggtgtccattaaggcacctctgtccttcctgcaggccaaatcctgccctggcttgtcctgtgtcaagggacaatgtcctgctttacaaagtcaaggctgtgcccatagaaagccttgtaatcntttgggttccccggtttcccctatgagtgatgcacagggctctgatgattgtcatcctcttcacagcctccatggaatctccnggatgaactccccccagaaaggtggaaaggagcacctgacaccgacccgngattcggcagcagccacgccca

SEQ ID NO: 304098 - DNA, 102 bp, Homo Sapiens
aaaaaatgagagcaagggcattctgtggtttggactggggtctcaaaatgcctctttctccttagctcaagtggcatcctttaccttcagctatctttaggg

SEQ ID NO: 304099 - DNA, 500 bp, Homo Sapiens
  misc_feature (22)..(22): n is a, c, g, or t
  misc_feature (117)..(117): n is a, c, g, or t
  misc_feature (197)..(197): n is a, c, g, or t
  misc_feature (457)..(457): n is a, c, g, or t
  misc_feature (477)..(477): n is a, c, g, or t
tttttcagtatcctcacttgtncttaaggttgtttgacccagtttatatcctttttttcccccttaagtagacatgaattgttggtagaagatttctttatagatgactttattatntttatttttaaattttttacagagatggaaacttgctaggttgcccaggctggccttggaactcctggcttcaagccgtncttttgcctcagcctctcaaagtgttgggattacaggtgtaagtcaccacagccggtttccagctgactttaataacataaccagtctcctaacactcttaatatagttctgtctgacctttggatgtctaattgcttcatctgggaattgtggagacagtggtactgaagggagagtttatggctcttaaactagttagtaacaccaactgggaaatccatttagggacaggggtatggtagagttcagcctagctacntcaggtttcagagagggtcnaactttggggggtttttaaaatt

SEQ ID NO: 304100 - DNA, 165 bp, Homo Sapiens
  misc_feature (106)..(106): n is a, c, g, or t
gagcttttcagtaaccatctaaagagaaacaactgtatgatttataaggtccataaggttaaaaattaaaggcatgtttttaactgggcagcttttaaattttttngaggtcccccccaaaacccggctttttaggaatagggtttgagggtaaacaggcttttg

SEQ ID NO: 304101 - DNA, 533 bp, Homo Sapiens
  misc_feature (191)..(191): n is a, c, g, or t
  misc_feature (324)..(324): n is a, c, g, or t
  misc_feature (410)..(410): n is a, c, g, or t
  misc_feature (432)..(432): n is a, c, g, or t
ccaacagggactttgcggtttgggtgttgtagctagaattgcgtgaaagccgtgagtgagctgtgcctggcagctgtggattctagcgctggtagtttttggcttccacataaacttcagcctagagattgggaaggaaatatgtatgtaagggagttagggggtttggggtccttggcttgatagctttntggctggcttctcatcgatcttcaagtcaaacgtttagcgatttcttgaaagaattctctgactcggccccacccactcagccaccgaggtgattaaattatcacctcccaggggattaggtatcatcttttnggaagagaagttttagcagattccacgaaatccttgggccaacaggaataggtggagctagttttcagccttctggtttacttgtnggccttccaggattttcagtcnttgttttaaaatctaggtccccatttgggtccagtagatggtttgttcagttcgctacagtcgcaagagcgtgttaagacttaatgggtaaatggtggaga

SEQ ID NO: 304102 - DNA, 406 bp, Homo Sapiens
  misc_feature (305)..(305): n is a, c, g, or t
  misc_feature (371)..(371): n is a, c, g, or t
  misc_feature (383)..(383): n is a, c, g, or t
taaaaagagaaagaatataaagtgaatctgaatctccactcaaggggatggccccaaggatattgtagctggtaatttcttcatgccactaggtgtccccagtgttcaacctccatgactgagattggaagaagtagagttaaaagtttttactacctttgagaagcctgcgggcatgttcacagtcgtcccatgccagccaggttctgaggctaactgcttgtgcccctgctgcttcacatggcattgtgggagttgctgatactggggaaatgatggcagatctgaccaagtggtgctgaganaaccaccctcggccttgcagactccatagtttatctcaaggcagtgccagttcggatttggtgctnaaggcataaggncaagttcagcctctggatattgg

SEQ ID NO: 304103 - DNA, 537 bp, Homo Sapiens
  misc_feature (400)..(400): n is a, c, g, or t
  misc_feature (411)..(411): n is a, c, g, or t
  misc_feature (448)..(448): n is a, c, g, or t
  misc_feature (462)..(462): n is a, c, g, or t
  misc_feature (473)..(473): n is a, c, g, or t
  misc_feature (499)..(499): n is a, c, g, or t
  misc_feature (504)..(504): n is a, c, g, or t
  misc_feature (518)..(518): n is a, c, g, or t
catgtttcagtgcagccacaaaataaggccacaggtgaaggcctgatgggaagcacagaagatactgtggcccacacttggctggactacctgttaaaagtggcctccatcactttccacagtgaccatgccttgcctgctgccccgtccctgcaaccaacctggctttgtggccttctgctcatctatgcattgcaggactgaagaagctttatagatgtgtccgttacacttcatcacattaaggaaggaaattgtgtgatacagggattttgcaagaattaccaaagttctctggatggatccctgatgagggcttgacagtggcctgtcctcgaaatggcaggttaaccgctgtgtcctttggttagaggacttgggccccgcacttaagcatggnggagtttttcntccactggatggttcttcacttcatgtgggagagtanttgtgggtggcatnctgggtaacgncaattgcagggttaggctttcttganccgantagcaatcttaaantgagcccacgttaatgaga

SEQ ID NO: 304104 - DNA, 323 bp, Homo Sapiens
  misc_feature (149)..(149): n is a, c, g, or t
  misc_feature (263)..(263): n is a, c, g, or t
  misc_feature (273)..(273): n is a, c, g, or t
  misc_feature (306)..(306): n is a, c, g, or t
aagatatcagaagtgcagatgacctgggagggtctattctgtcaagaatgtgaacagaaaaataagttgccacatgaaaattcaaaaactcttcaaggagaacataagtttacaaactgattatttctatagataagcatagacttgcnctccaaaatcaagaaacagagaaatgagaagctaccacttagtattaggacaaataaaaatatgaaataaagcccacagtaaagattactctttagtggaccagagaataaaanagagcaaacngatttttgaaatgggcacttagaatcataaatnccatgctggggcacggt

SEQ ID NO: 304105 - DNA, 356 bp, Homo Sapiens
  misc_feature (28)..(28): n is a, c, g, or t
  misc_feature (39)..(39): n is a, c, g, or t
  misc_feature (48)..(49): n is a, c, g, or t
  misc_feature (55)..(55): n is a, c, g, or t
  misc_feature (57)..(57): n is a, c, g, or t
  misc_feature (78)..(78): n is a, c, g, or t
  misc_feature (95)..(95): n is a, c, g, or t
  misc_feature (243)..(243): n is a, c, g, or t
  misc_feature (254)..(254): n is a, c, g, or t
  misc_feature (332)..(332): n is a, c, g, or t
  misc_feature (344)..(344): n is a, c, g, or t
gcatttaaatatcactcttaatgatgtnagattgactcntttaagggnnaattanantagtatagtcatctctggatnatttcctagagcatatnattgatatttctgaagatatgggcttagtaggagcttttatcttctactgttcacagactgattgagtcagatccagggttggactggacagcaaagcctggttctggccttcctttgcctctggtttcctagctaggcctgctgatngtgccctgcantggcttctcagtagcaagtgtatttatgtaggagcggcacctgcaggaactgtttggcaactgggaagggtttcccanaagcaaggaggngaagtatagagg

SEQ ID NO: 304106 - DNA, 251 bp, Homo Sapiens
  misc_feature (72)..(123): n is a, c, g, or t
  misc_feature (153)..(153): n is a, c, g, or t
  misc_feature (215)..(215): n is a, c, g, or t
cgttagttaggttttaataggtgaataaatggtcttacaatgtgctatttacacgcctgtaatcttccatcnnnnnnnnnnnnnnnnnnnnnnnnnnnnnnnnnnnnnnnnnnnnnnnnnnnntgttaccattgtctaagtcagcacttaacntgggcacatcgatccatatttccgaagtaactggatggaagaggggaggtcagagggaagcnactggccagacggtcacacagcttcaacctcgtggc

SEQ ID NO: 304107 - DNA, 397 bp, Homo Sapiens
cccactcctcctgtagcacctcactggacttctgacaaacgggtcggtgttttcttatcccccgttgatgcctatattcaagattatggcttcccttgctttgctgcatgagtaaatattgtactttactttccgctttccgtttttccatatttcagaaagtttcagaaatcagtcttctgttgatggtttccctccattattgtagcaggattatcacttcttttgtacatattcattttaaagaccttagaaagaaaggagaagcaaacatttgtgctcccattctccatcctgaactgaaagcctttcacatttcattgacggttttgctgaaattagagaatactatatttttgacactccttttatctatctgctaataaatctatcgacg

SEQ ID NO: 304108 - DNA, 238 bp, Homo Sapiens
  misc_feature (159)..(159): n is a, c, g, or t
  misc_feature (186)..(186): n is a, c, g, or t
aggaacaattggtattgcaatgctcaggaactagtgccacctgacttttagcaacaaggaagtaggccaaaatgcagcctgatgaatgcttaatttataactctatttctgtccagaacccagcatgcagttctttgtcgctcctgtggggatatgttncatttctcatttgtaaattgaatattnctggtgtgtttgcttttgggatatataagtttgtttcaagaaaagggatcaa

SEQ ID NO: 304109 - DNA, 402 bp, Homo Sapiens
  misc_feature (345)..(345): n is a, c, g, or t
ttgactctgtaaataattctttcaaatctctttctggctcaagatcactcaactgtaatctttctggaaacaagtaattgataacataggtgagatcagataagttaaaagagccaccccaagttcattctgttcaggattaagtaaaggtaacactttaggggaaggtgtttagactacaagctgcggtgttgtgagcgcccaagtatcatttaattgtccgaaacgtcaagataaaatatttccgaggggcatcacggaagtttaacagaatgtgttagacttgaacgttcaacagcttgctcatttttgccaaaagccctttcactaaatgtgggaaatttnggaaaatggtacctcaataaataaacaaacaacgatttttaatttaagaacccaggg

SEQ ID NO: 304110 - DNA, 476 bp, Homo Sapiens
  misc_feature (303)..(303): n is a, c, g, or t
  misc_feature (366)..(366): n is a, c, g, or t
  misc_feature (375)..(375): n is a, c, g, or t
  misc_feature (396)..(396): n is a, c, g, or t
  misc_feature (444)..(444): n is a, c, g, or t
  misc_feature (459)..(459): n is a, c, g, or t
cagccttaatatgttgcaatttaagaaaatatgaaatcctaaaatatcggttcttccaaaattaatttataaatgtaatgtaattagaatctcaacagcttttcttgaatttggacaaagcgatcttaaagttcacccagtagactaaatgtctatgaatggctagggaaactaccaaaaagatcaacttccaagatgatacagtgaatatcataggtaggtaggcatgagtggggcaggagagggctctagaaatgtcagatgatggtttgacaattatcacactgcctcactaaaagtganattggcagccggcgccagggagaacccatttcctgatggtccacacctgctgcactaaagtgntaactggantggcaagcgccaggggagacncaacttcccaggcatgggcagtaagtaacaaaatggtggagtatagancttcggggggcactnccctggaaagcagaggg

SEQ ID NO: 304111 - DNA, 408 bp, Homo Sapiens
  misc_feature (347)..(347): n is a, c, g, or t
  misc_feature (364)..(364): n is a, c, g, or t
  misc_feature (379)..(379): n is a, c, g, or t
  misc_feature (393)..(393): n is a, c, g, or t
atgagcaccgcgcccagcctactattacttttttaaaagcacattattttgaaattttaaattcagattaggcatccatttccaggaccactatcctgaattactgaaaacaggttactatttttaagcaggctgagaaaaaggagccaagatctttttaatagttggttagtagatttatttgcacataactgaaatgatagaggagagggaatgtgtgtattttttcttttacctcactttgaattaatttttcaaaatttaatgttatttcattgtttagtaaactataattttatataatgttatgggtaatttttataacatctgcttattaaatattatcncagacatatttgttacnttttacagtgcctcncagggtttaagccngtgcctaaaaattta

SEQ ID NO: 304112 - DNA, 459 bp, Homo Sapiens
  misc_feature (274)..(324): n is a, c, g, or t
  misc_feature (331)..(331): n is a, c, g, or t
  misc_feature (350)..(350): n is a, c, g, or t
  misc_feature (382)..(382): n is a, c, g, or t
cgcgcctggccggatgaagttttaaccagtattgtactgcctgctaaaatcagtactgaaggataagtactgccttccttttacttaggaaaaagaaaagagcagttaccaaatggctactctgtttcaggtactttcatatatttacctaaaaggtaatttacatgaaggcaagattttcttttaaatctgttttattaactggatatatcactaatacctaaaatagtgcttagcacattagttttcaatattgtttgaatgacttgaaaannnnnnnnnnnnnnnnnnnnnnnnnnnnnnnnnnnnnnnnnnnnnnnnnnnatgtcanttgatcattataaccaacntgccaaagagacattagtggtcctatcatacngatgggaaaagaatgactaaagagggtatataacctactccaagtcccacacctgtaggggtcgtgccagagtcaac

SEQ ID NO: 304113 - DNA, 394 bp, Homo Sapiens
  misc_feature (117)..(117): n is a, c, g, or t
  misc_feature (136)..(136): n is a, c, g, or t
  misc_feature (155)..(155): n is a, c, g, or t
  misc_feature (173)..(173): n is a, c, g, or t
  misc_feature (352)..(352): n is a, c, g, or t
ccaactactaccacagttgccacttaaaatttctactacctcaaaaagtttccttagccacttcagtcaacatctcccctccttaagccccatcatccgatgtgatttctgtccccncagttttcccttttccacngtgcattgacaagttttcnagcagagcagtgactcanttttaggaagcatggcctagcatcttacctcaggttggattggaagggcaaggagaccaataaactgcagtaatgggaggcctgggatgaaatccaggctgggctttaactagccctagtggatctgtgtttaccaactataggaggtagaagaggatgattccagtggcctggagatncgtcgagattcacttttggaagaagccatgcggttttggggc

SEQ ID NO: 304114 - DNA, 436 bp, Homo Sapiens
  misc_feature (19)..(19): n is a, c, g, or t
  misc_feature (39)..(39): n is a, c, g, or t
  misc_feature (133)..(133): n is a, c, g, or t
  misc_feature (308)..(308): n is a, c, g, or t
  misc_feature (368)..(368): n is a, c, g, or t
  misc_feature (377)..(377): n is a, c, g, or t
  misc_feature (382)..(382): n is a, c, g, or t
  misc_feature (398)..(398): n is a, c, g, or t
cgggtctgcagtaacctcncttcttgcctcctcagaacnaagaattcaactgaggaccataaagaaaaaaagagaccaaggcaagtttcagagccggagtggaagtttattaacaaggctttagaacagggangaaacacttgaaagagatccaggtgggcaacttggaaaacaagtgcagtgtttaactctgaccctaggacttcataggcttgcccctttcccatgattcttcccttagggtgtgctgcccctatgtgtggtgccctccttacccttggtaggtgaacacgtgcagtgtgtttagnaattcgtacacacgtccatctgaggcttccctctgttttccagtgggagtggccccccgnaggttcatnacttncaccattttggtttantttactggtcccatggccttgggggaagttggcgttct

SEQ ID NO: 304115 - DNA, 365 bp, Homo Sapiens
  misc_feature (37)..(38): n is a, c, g, or t
  misc_feature (74)..(74): n is a, c, g, or t
  misc_feature (118)..(119): n is a, c, g, or t
  misc_feature (342)..(342): n is a, c, g, or t
ccatgtttccaaacgtgcctcaggcccattcagcttnnggttttcgctctctctgcccctccgcaggagtgccngcctcccatgcatcaaggcctacttccaatgcagccctcgtggnnccctcctttagacagaggcagtcttcccccacttagaacaaccacagcactttgattttgtgctttggaattactcagactcaaacaatcattagggaattctatatcttgcctctccgtctagattgagggtacctgttaattcaacttttcattctcccctcctagaatactacaggtacagaaatcatttggctcaattaaatggtgggcagcccagttnccatggaggaaggtctggggtgg

SEQ ID NO: 304116 - DNA, 449 bp, Homo Sapiens
  misc_feature (19)..(19): n is a, c, g, or t
  misc_feature (57)..(57): n is a, c, g, or t
  misc_feature (396)..(396): n is a, c, g, or t
  misc_feature (407)..(407): n is a, c, g, or t
  misc_feature (429)..(429): n is a, c, g, or t
aatggtagcgtaatacctnccatctatgtcttggaagatttcccatttggtaaatanaagaacttcgtctttttgatggacattcgggctatttccagttctttcggcagtgtttctaggcggtcatttagctcaaggctccccaatctttttcacatcttgacattgactcaattcactcacgctgaggagcctgcctccaagggctgctgttaccccaatccctagctcctgtcccctccaccacccctacagccccataccactctaggcctggaaggattgttatctgggcacacatggaacttgttcatgttacacccggcacaccaaaatacaccagtttatggaagctctggagttagccagtaagtacttgttaagggttcattaatngagcccagaanggccctctggaattggtagggnaaatggcaaaagatggaaac

SEQ ID NO: 304117 - DNA, 644 bp, Homo Sapiens
  misc_feature (395)..(395): n is a, c, g, or t
  misc_feature (416)..(416): n is a, c, g, or t
  misc_feature (424)..(424): n is a, c, g, or t
  misc_feature (468)..(468): n is a, c, g, or t
  misc_feature (523)..(523): n is a, c, g, or t
  misc_feature (558)..(558): n is a, c, g, or t
  misc_feature (570)..(570): n is a, c, g, or t
  misc_feature (584)..(584): n is a, c, g, or t
gcacaattcattatgccagatttgcaatacaggtacccccaaaacctgagctaaagtgagaacaaagctactaagaatgaatacatgaatgaggttaatttgtctacagatgtgatccactctagaagatatttcacaaacatgactgacagaatggacaatgtgcatatcttgatcaaggtcactaaaaaattctcaacacctctcctccctacctagttttaatttcacgactttcaagcaatcttctgctctaatctggacattgctactggagagagaataggtcggtcgagtagtcacctctggcatctgggtctacctgggaaagttttatgcttcattataaatggataaattgggcatctgggtcctagttgggttggggttactanaaaacttaatcccttccatcnaatctggncaaaaatccaggttttgggggcccccatggaagctcaggtactnagacctggagaccacgggcaactggtaaacccccacactcccgggggtcttggcntgggggagccagcaagaagatggtttccttaggangaagacatctcnccttggtcctttancttcaggccttcagtcttgaggcatggtaacccagtcggatgcccttataataacaaaat

SEQ ID NO: 304118 - DNA, 354 bp, Homo Sapiens
gctgcatttattatgaggtcttcataaattccttttatttgctgcatttattttgctgcatatattatgaggtcttcataaattctttgcttaggccaaagtcttagaagagtatttcctaggtttgcttttaagatttttatagttggaggtcttatattaagtatttaatccatctcaagttaatttttttatatggtgagagatagggatccagtttcattcttctgcatatgtttagccagttttcccagcaccacttattgaatagggtatcctttcctcattgtttatttttgttcattttccttgaagatcagttggttggaggtgtgggccctttattttaggggg

SEQ ID NO: 304119 - DNA, 361 bp, Homo Sapiens
gtcatataaaggtagatttatgatggaccaaaataagagaagccaaggtttgccttagagtggattggagaaggtgagaagatggatgacgaagcctggaaatcattaagaagaacgaggttttaatttcgaaagagaggtcaaagagggaaaatatctcaaagataactcagtttaaaaaaattcagagctatataaccaccctgtgctatacttatctaaaatactgctcataattgttggtttttagtggggatgagggtagagaaagtgattctcggtctttctaaactaagataactttgttttgtttctcctcactcctaatttggaggcttggaatttcactttcaaaatgttt

SEQ ID NO: 304120 - DNA, 402 bp, Homo Sapiens
  misc_feature (384)..(384): n is a, c, g, or t
gtacagatcctttttattcagatttatataggcaatttaccaacacagaaaaccagtctagcagctccaaagtaactgtaaaaacggtggtgctgacggtggtgtgccccacacagggcaggtgacctcagacatggagcagcatctcccgtgggatactatttcagacgtgcactagtgagtgtatactgagaagggattataaaccttccctggcacaacagatacaaaaagagatagaaccaatgatattttgtctaggtacaatatctagatttacagtatctagtttactggcttcacttcgtatagcaatgcacaatagaaaaccggatttccttcctcaaggggtattccaagaatatagtaaatatggtaccatantgatggctatggaaaccg

SEQ ID NO: 304121 - DNA, 358 bp, Homo Sapiens
acctgggagtgtccaggaagtctgtataagtacatgtttccagtaaatacaatgattggttaagatgtttaagttttttgaaataccagggggaaaaaaagccctttgaaaacaggtgtcatgtgcacaaaaatgcacatgaagaagtaattcactttcatatttaacagtttattataatatcctttgtttctggtactattcatttaattcttcatggtagtttttggaagtttcatatttttatggtttattaatgattgtttttttaacctcagttcttgtattcactttacagtggtttattttcatttgaataaaatactgggcagctggttaataagttttacctcatagg

SEQ ID NO: 304122 - DNA, 199 bp, Homo Sapiens
  misc_feature (40)..(40): n is a, c, g, or t
  misc_feature (71)..(71): n is a, c, g, or t
  misc_feature (74)..(74): n is a, c, g, or t
  misc_feature (107)..(107): n is a, c, g, or t
  misc_feature (126)..(126): n is a, c, g, or t
  misc_feature (131)..(131): n is a, c, g, or t
  misc_feature (163)..(163): n is a, c, g, or t
  misc_feature (182)..(182): n is a, c, g, or t
tttcggcacagtcctttttttaaggaaaagcccggaaagncaggacacaaccctgctgcctgctttgtgcngtntcctgggctcagctccagttggcatcacctgcncagggccctctgggttcancctgnagctagtgtcacccgcacagggccctctgggnccagcctgagctggcgtcncctgtgcagggccctct

SEQ ID NO: 304123 - DNA, 341 bp, Homo Sapiens
  misc_feature (29)..(29): n is a, c, g, or t
  misc_feature (31)..(31): n is a, c, g, or t
  misc_feature (48)..(48): n is a, c, g, or t
  misc_feature (124)..(124): n is a, c, g, or t
  misc_feature (200)..(200): n is a, c, g, or t
  misc_feature (238)..(238): n is a, c, g, or t
  misc_feature (313)..(313): n is a, c, g, or t
tcaacatggccattgctgcctttcctaancnaggatcatacaactgancaggggattgaatttgatccttcatcaacatgtgtctccgaattttattcagtagtccgtcattgctctttggttncgaccaagaaaaaggaaatccccccttttcatgtattccttggtttgaggacatgacccctgtaaggagaggaaanggagatgcttcctgtttgcactgcagtgaattcacggntcctgtttcaccactccaaaccttatggcgactcacacacacattcctctttttctgttacttgccaaaggtttngggtttagtacactttcagtttccaatt

SEQ ID NO: 304124 - DNA, 383 bp, Homo Sapiens
  misc_feature (20)..(20): n is a, c, g, or t
  misc_feature (116)..(116): n is a, c, g, or t
  misc_feature (152)..(152): n is a, c, g, or t
  misc_feature (172)..(172): n is a, c, g, or t
  misc_feature (187)..(241): n is a, c, g, or t
  misc_feature (268)..(268): n is a, c, g, or t
cctccattaagatctaactnctattgccacatatattacccagataactttctttctccaaatagaatgaaaggctacagaacaaactgtagatggctatctctggttgatgggantagttatttttcagtttctttgtgcttttactttanctttgctttttttgggacanggtcttgatcctcannnnnnnnnnnnnnnnnnnnnnnnnnnnnnnnnnnnnnnnnnnnnnnnnnnnnnnactcagttgatacccccgcgtcagctncctggagtagctgggactattaggcgcatgcacacacacctgggctactttgtgtatttttttgttggcccaggctgggtcctggaacttcctggggtttaagtgatttggcccg

SEQ ID NO: 304125 - DNA, 357 bp, Homo Sapiens
  misc_feature (332)..(332): n is a, c, g, or t
  misc_feature (346)..(346): n is a, c, g, or t
caagtttccacattacctgcaggattataatgctttggcctactcctgagaactggtaacaggctacagtgagtgtagaaccaggaaatacaggacagcccactcctgctatacctcctatgcctgacccacaggcagatgtgctgagctagagacctagcgggtcacacaaacagttcggaaagttaagactagcatttaagcgcacacacacaaagaagtacacgcatgaacaggaagtatctaaaggacacttgggaattgtttcaggtgcatacttgtaaatataccttatctgtgtactgggttgccgcataaaataagctgggtgncaaaaaggtttganagttccttgta

SEQ ID NO: 304126 - DNA, 416 bp, Homo Sapiens
tctaagaaaaaataatcaactttatcggtgtattctggtcagaaaacactgaactccaactcctatacttcctacatattatcagactgaaccatctcaaattaactttttaaagtaaaaaatagtcaaatattggaatatcacgttgttcaaactaacatatggcattatgaagaaacataagacctaagtcatcaaagacagcctctaacatgggttcagaaaaatcatctctatttttaaattattttcttcaatgagttctggggtagaaaaagtagggtgatttggggttaacggttgtataagttaccaaaaactccattgactagaactcttcattttcctaagcattcctattaaaagttttactggcagaataatttatggagatgtcctgaggcatgttgtgaaaa

SEQ ID NO: 304127 - DNA, 408 bp, Homo Sapiens
  misc_feature (193)..(271): n is a, c, g, or t
  misc_feature (278)..(278): n is a, c, g, or t
  misc_feature (312)..(312): n is a, c, g, or t
  misc_feature (340)..(340): n is a, c, g, or t
  misc_feature (352)..(352): n is a, c, g, or t
  misc_feature (372)..(372): n is a, c, g, or t
  misc_feature (386)..(386): n is a, c, g, or t
caggtgactagcatacttgattagcatggataaacaactcatcactagagtaagaaaaaaactattaagaataaaattttagtttagaagcaaaggttaaactgtagatgaatgaagctttgatctttcaacaatgactaaaaaaagtcatggaaaaatctgctagctttgctgaaacatcttttaatatcgnnnnnnnnnnnnnnnnnnnnnnnnnnnnnnnnnnnnnnnnnnnnnnnnnnnnnnnnnnnnnnnnnnnnnnnnnnnnnnnagaatanaatcaatgtaaaataggttcaggtaatgcaaganccaactttattacccagaaccaattccngagtggcacatncctcctggccaaaaggcccntttaaaaccgattntttgggccaagccccattgcca

SEQ ID NO: 304128 - DNA, 212 bp, Homo Sapiens
atgtgtgtctgtatacatacttcacagatacatgacaaatgtggaggcaaacagaaaagacattctactattttcaggaaaaatcattcttttggcaattcattggcgatagatgtctcttcctataaaactctttctcatagagagatgtacagctacccagggtttaccagtaaagtcatttccacagtgtgcaattctgcaactaagaa

SEQ ID NO: 304129 - DNA, 411 bp, Homo Sapiens
ctatgtaaacccaaattacctttataattagaaaatataaaaatattttaaaatcactaaatatacaaattctatataatactcatgagtagaggatccactctagggaataaaagatggtataataggcagtaggtgacagcaacactagaatgctggattctggacccaaatagccaagggtaaatgtccagagaagagttgcttaaaagacctctaattgtcagactgggtaaggcagatgattatggatgctgattaaggtggagcaaagaaccaggaagtagaaagaaattattagaaaaggaaaagggtaacaggagaatgtgggaaaccaacagcccatgctagaatgctgaattccagttatctagaaacctcctattcatcaactatggcaggcacttgcta

SEQ ID NO: 304130 - DNA, 389 bp, Homo Sapiens
  misc_feature (58)..(58): n is a, c, g, or t
  misc_feature (94)..(94): n is a, c, g, or t
  misc_feature (132)..(133): n is a, c, g, or t
  misc_feature (152)..(152): n is a, c, g, or t
  misc_feature (190)..(190): n is a, c, g, or t
  misc_feature (228)..(228): n is a, c, g, or t
  misc_feature (345)..(345): n is a, c, g, or t
  misc_feature (359)..(359): n is a, c, g, or t
cctttaagtagtcatgtccttcattataccagctgaccatttctaagtgcaacatccnaggaaaccagtaaagcccatttctgatttatctgcnccaaaagaatttaatattccaacttcagcaaaaggcanntaaaaacaaacttaaatcncattgtgtgcttttaatacgtatgtttttttccatgcngtctgatgtattttagttcttagtcatttacttccatnagtttccaaattggttgagggaattaaattggtagccaagttacctatacaagattttcctactgtgtatgtgaaccactctttctggggaaaatcctcccgttggcacttttcctngaagggcatgcacntttttccacactttagtgatttggggggaa

SEQ ID NO: 304131 - DNA, 321 bp, Homo Sapiens
  misc_feature (283)..(283): n is a, c, g, or t
ctgtattttttttaaatggttactctaagtagatagaaaatttcctgtatcatggaagctgtattgtctgattacaatgcaattgatttcaacatctaaagcaaacctaatatgatcagagcttttaaaacatactttctaaatattgggtcaaaagagaaaccataatggaaactaaaaaatatttaaaacgaatcaaactaatcattactgaatattaacatgtgttaaatacagctcctctacttaaggggaaaatgtatagctttaatacatattaganaagaagaaacacaaactggagctaggacatttatttaa

SEQ ID NO: 304132 - DNA, 373 bp, Homo Sapiens
  misc_feature (50)..(50): n is a, c, g, or t
  misc_feature (172)..(172): n is a, c, g, or t
  misc_feature (361)..(361): n is a, c, g, or t
atttaaggtaatcagcaaacatagggcacaaaccaactgctggggcagangggaggcagctctgagttattccagttaggtaacatttttctatagaatattatacaagttataatccatactgggataaaactaagcattgactactaattttctaaataaatactaaganataaatgtagtcataaaacaatttggacacttgtctgaaattgtttcactactcaatgctaggctattacagtatattaagcattaaaatacatgtttacaattgctatttgaaatggttctttctaataatgtgtacaatagcaaccgccctgtcattttcactggaatttccagagcctctcttccntttcaggaaaat

SEQ ID NO: 304133 - DNA, 339 bp, Homo Sapiens
  misc_feature (49)..(49): n is a, c, g, or t
  misc_feature (86)..(87): n is a, c, g, or t
  misc_feature (285)..(285): n is a, c, g, or t
  misc_feature (317)..(317): n is a, c, g, or t
cgaattttctaagaattgattttgcttcccttgggaagtttcagagtanatgaatgcccagtttctcttaagcccaaagataattnngaagtcatgtttctgtggaggtttctttccccattgtgagtttaaatttggggcggcttttaatgctcaattagaatacttcttatggttaagtactttctattccaaacaacaaaaacacctctcaaatcctctgcacaagacctgcctttgaaaacatctggtaaaaataacaagtcacttggaaaactgtgattntcaaatggacccccgccttcttgggttaagtnggggaagttcactgggggtaaa

SEQ ID NO: 304134 - DNA, 357 bp, Homo Sapiens
  misc_feature (196)..(196): n is a, c, g, or t
tataccttggaagctctggttaagatagaataaattatgatataacattccttctccattcggtggtggtggtggtagaggtagctactccatgtacatacatttctacagtgggtttcaggctgagctctgggaaaggatgtcatattttaccaccttatatatttgatctgtgtatctcatacatagattttgnactcttaaagagaatctgaattagaggcacttcaggaagcattcacatatcctagaatagatgacttggctatcaaccccttgccggctgtagctcccccatttgttgtagtctgtatgtgctatacccaacctagagcagggcgccatgcctgggcttaa

SEQ ID NO: 304135 - DNA, 288 bp, Homo Sapiens
  misc_feature (66)..(98): n is a, c, g, or t
gtagagatggggatctcactaagttgtcagagttggcttcaaactcctgggctcaagcgatccctnnnnnnnnnnnnnnnnnnnnnnnnnnnnnnnnngcgtgacacacgcacctcacctaacatctgtttttctactcatccactgcaaccaaattgtgctaatcgctctatgaataatacatatatctccttcttgtttaccaagcattttcacttacattaacacattcatcctcacaacaattataggaaacagataggactgatatgcccacccttattactg

SEQ ID NO: 304136 - DNA, 457 bp, Homo Sapiens
  misc_feature (148)..(148): n is a, c, g, or t
  misc_feature (413)..(413): n is a, c, g, or t
ccagccagcaaaccccaaacaggaacctatggttcggtgatggatgtgcgttcagaaagcagggagggagggggagtcagaggtgagggggtcatcagccatagctgtccgctgcatcaccccctcgctatctccaggaagcgttctngggcttttcctgttgtgcagtgtggaagtgctctatcttcattcatatcaaggaaagtcaaaggacaaactaaagccggcagcgtctttctggcttcctagtcaggctgttcggtagcagagtgtcaccctgatttccagccccgcagcacacacactgagacccctgcctggcgtgattcagaggcaacgtatttccccaaggtggctgttgaaggaaccaggggggataaacacagccccgtgaaccgcacgccagaggacangtcccggctgcctgccgcggagtcgtcacggcgtttcgcgttct

SEQ ID NO: 304137 - DNA, 443 bp, Homo Sapiens
  misc_feature (160)..(160): n is a, c, g, or t
  misc_feature (200)..(200): n is a, c, g, or t
actgtaaagttacttcctccacaccccattccttggaagaaagtcactaagctcatactcaatgagtgaggaattaagctccacctcctggggagatgtgtacatatattatatggaattcttttgtatgggagatttgtttactctccatttatttatncaatcatttatttctactaagtatggactcatgaatattnattttatccttggggttataatccagtgctatgttattttgttactcaaactgttctggctttggccatttgggagttctttcaggttagctctgtgtttctctgacatacacccaccattttgatttttgagtactttcactttctggacactataggatattccacacacatcttgtatattccctggtcccagccctaaaatcagtgatttctcctaggagccatgaattcttttactgg

SEQ ID NO: 304138 - DNA, 466 bp, Homo Sapiens
  misc_feature (389)..(389): n is a, c, g, or t
cacttaattaggtccattttaataaagggtataggagtttacaactcaaaacaattcataaaacctatcagatacatacgataaatcacaccgagagtgcaataacataaatccaatggtctgcaaataagaggtattgcaaaaattgttaagattgactttcatgtttccccccctcctttctcttgttcacagcccgagattatgtgtacattgttttctgaggcctgatgacctcaatactccttctggctggagagacctcctcattcagtccattccaaatagtcagcagagggagttcacctcttctccacggaatgagcgtggtccttgtcctttattatttggtttctatctcctaacaaatggacattaaatggttcccnccattcaaaacatcttgtggggccctgtgggtggtctgggtcactggctaccctctcaatggcacacatgaggccct

SEQ ID NO: 304139 - DNA, 387 bp, Homo Sapiens
cctttaagactggaggcaaaaaaagttgcgaataaatgaaactggctcaatttccccatagaaattatatgtacaggtctttgaataaacatagaaactgacccttccagttttaaaacctaaaacttatatttgtctccaatgagttctttcctcaggcaacggactgaaactcaccaaatcaccatttgacaatgagaccccagacacctctttcccctcataggtcaggactgcttccttatccttttcctaattgctgttttcctcacacatagttacattccttttttcggtacataaactccccagttttagttggtcgaggaggcagattcgaaactggatctcccattctcttcagtaggcaacacctaaataaaaagg

SEQ ID NO: 304140 - DNA, 456 bp, Homo Sapiens
ttaatctcaggagacctgattctctcttgctgagatgggtagagagaaatcctttggcaactaaacctgttactctagcattgtctctgttttccaaaaatcctgcttaagctttacttatctgtatttaatgtgaacctatccccccttattgttcttctgtcgccacctcatcttaaagtctatacattgataggttctgcattgagttcttgcacttctctaaggaaagagagcaagagaattgtggaagtttggaagaagtgagggtaaagagactggatatctttccaagttaaagcagtttggagccaaggctgatggtaaagagaatattgcagaatttgttaaatatccattaatgagtagaatctggcaattcctggaaccatagttcgagattgagggtggaataaagatatatcagatacacccacaatcagagaatttaacacc

SEQ ID NO: 304141 - DNA, 438 bp, Homo Sapiens
  misc_feature (88)..(103): n is a, c, g, or t
  misc_feature (105)..(182): n is a, c, g, or t
  misc_feature (191)..(352): n is a, c, g, or t
  misc_feature (416)..(416): n is a, c, g, or t
tgagactgcatagggctgggatgctaggccctccctgcttccacctcaccagtgctccctgcagctgtccctgagttgtaccctttcnnnnnnnnnnnnnnnngnnnnnnnnnnnnnnnnnnnnnnnnnnnnnnnnnnnnnnnnnnnnnnnnnnnnnnnnnnnnnnnnnnnnnnnnnnnnnngttaaagcnnnnnnnnnnnnnnnnnnnnnnnnnnnnnnnnnnnnnnnnnnnnnnnnnnnnnnnnnnnnnnnnnnnnnnnnnnnnnnnnnnnnnnnnnnnnnnnnnnnnnnnnnnnnnnnnnnnnnnnnnnnnnnnnnnnnnnnnnnnnnnnnnnnnnnnnnnnnnnnnnntggattacaggcgtgacaaccaacacccagccagttgtaccttttctaacaaaactgtcatggnaagtatggcacttgcctgagtt

SEQ ID NO: 304142 - DNA, 322 bp, Homo Sapiens
aatgttatagagtttatttgaacaaagaaaattcatgaatcaggcagcactcagaaccagaagttgagagagctccattctgcaatatgggcaatgagtatagacaaaacaggaaagtgaagtacagaaatagcttggttggttatagctaggcatctgccttatttggacatggtctgatcagttgatcaggtttcaatttaattacttactaaggaagatcgcatagcaatggaattacagagacatccctgggcaaaatttaagttaacaatggacaagtcatttagctggctgtgcttttatttcctcatttgttgaa

SEQ ID NO: 304143 - DNA, 146 bp, Homo Sapiens
ccaaagttccatatactatatgctcacataaagcataattcccacatattggtgctttgacagcacacacaaatgaatggggtgacagagatttccatagcccccgcacataggtgacacccaaattcataatgggtcccatattc

SEQ ID NO: 304144 - DNA, 554 bp, Homo Sapiens
cagtgacttgaaagtggtttattaaaatataaaagagatgaaaatagtaaatactattattcagaataatataattgtaaatagtgaacaggattccagggcaaatagagaatatgagtctctagggctgggataaggtgagtctatgaatgaaatttttctgaacaagcagctgaaacagataagggaaattagcaaatacaagaaatataagaaacttggattttaactggtgagccattctaagtctcccatttattgtcttttctgaaccctttcaaacaataacttaaagccattaaagttatattattttcagacaaagcagagtcacttttgggaaaggaaagacatttttcaagaaaaagtagacgtcctcgtcagggtgggcagcgcgcccgcggcgggcccttggggcttggggcctggagcggccctcccagcacccggtgcgcccctgccctgccgcccactgccctgaaggtcaagtcgctttgttctgcgctgcgggcggcttcctcgccggcggcccagcggaggaggcgtagagggcg

SEQ ID NO: 304145 - DNA, 437 bp, Homo Sapiens
  misc_feature (136)..(136): n is a, c, g, or t
  misc_feature (194)..(194): n is a, c, g, or t
  misc_feature (260)..(260): n is a, c, g, or t
  misc_feature (376)..(376): n is a, c, g, or t
tcacgccctgtgattgcaagctggataccgggcccctccccactcttgtcccctaccccagtttaggaacttgatacagataagtggttttgttcttctcagtgtggaagagagaacaaagccagcgtgaagcgtngggtgggagaagcagatagggtagagctgagtgctgcccagccagccctgcaccaggnctcagtgccccttattagggtgccagctcagccgccaccacagggctcctgccagcggaggctgtntttgactcttggcttcctttctcatcttccagagcatccccaagtccaccttctttgctgaaaatggaatttcctctacaaagcttctctgggaaagagccattttatatggactnggttcttgtggctctcgacacaggaaacatgggtcaggtggcagctccgtggtgcggccca

SEQ ID NO: 304146 - DNA, 175 bp, Homo Sapiens
gatataggcacttataaatacaaacctccttcttagtactgcttttgctgtatcccatgggtttttgtatattgggtattcattatcatttgtttcaagaagtttttcaatttccttcttaatttcttcattgacctgctggtaatttgggagcatattattcaatttccatgga

SEQ ID NO: 304147 - DNA, 537 bp, Homo Sapiens
  misc_feature (128)..(128): n is a, c, g, or t
  misc_feature (307)..(307): n is a, c, g, or t
  misc_feature (523)..(523): n is a, c, g, or t
acggatgggtccagtggcttagaagaaaactcagaagtaacaaaaggtgttaaatttataaagagcagtagctttacagttaatctatcagataatcaaagcttaatttgctctgccccagcagaganagaaatgtgcaaataaccccaaccaagacattccctttcaattctgtctcagcccactaaaaccacccaacactagatttccaaaaatccactctgggaccgtcagattccaaagatgtcacatgttccccccaacccccacactcaatgtcccaactctgccagatacatgtctgttngggagggctcaaccagcaacagagagaaaaagatatttgctagaaagagggagaccagacccactggcgttaagaaggagacctgggaggataagattggagaggcgtgcagatatgcttgcactgggtgaaattgaggccagatgtgtgaagttccagaagcctcaccaagagggcagtcctgggagagtggagattgtaggaagagaagagatntttgaagatctcct

SEQ ID NO: 304148 - DNA, 411 bp, Homo Sapiens
  misc_feature (259)..(259): n is a, c, g, or t
  misc_feature (294)..(294): n is a, c, g, or t
  misc_feature (373)..(373): n is a, c, g, or t
  misc_feature (380)..(380): n is a, c, g, or t
gcataagcacggcgcccagcaacatactctttattttacttaatattcacaacaaaaaaaccctgtgagatgagggttagcaattcacccatcttgcagacaaaacacctacatctcacagaaattaaaagatttaaggttttttagaaagttatcagagccaagagttgattctacattcactacctcaatctagggctctttcttagctcttcccacttcttactactgagcatacttaagacctagctgtagttcnttttttataaaagcttctatgggattaataaaccnaagactaagatcataagcacacagattgacaaccccagattgagagaatgtttgcccaaggttatatatccaagaaccnatatccnggcatttaattaattgggtcagcagtaatac

SEQ ID NO: 304149 - DNA, 519 bp, Homo Sapiens
  misc_feature (253)..(253): n is a, c, g, or t
caactttcaaatgttttatttttagtgtttttaaacattttaatacaacaaagatataaaataatatatattagttaaatctggatttaatttagaatcaagatatttacttatgtacaaacactgtgcttcaaggtatggctaccacaggaactttcacatcttcaagtaatactagtttctctgtggatagagagacatttaggtagaattcacaaaacaaaacatgtccgttttagtcccagctaatttngcttcccccattaagtaccagtttccactttctttgttccatgtcagaaatacttcatttttctaataatacatagatcctctgaataaaacttagtaaaagtgaacatttttaagatgacattactaattgataatattgcttggctatgttcaattctccagacaacccagttcttcagattgaaagagacctgaagtaaccatgaaattaccatagtggttccttctcctgccatatcaggcacaactttccctatgctgaac

SEQ ID NO: 304150 - DNA, 482 bp, Homo Sapiens
  misc_feature (416)..(416): n is a, c, g, or t
  misc_feature (430)..(430): n is a, c, g, or t
  misc_feature (447)..(447): n is a, c, g, or t
cagagttttagatattatttattttaaactaaagcaaataacaagttaagtgaaatttgcagttttcactttgcattgtctatttaaaaggcctaggtattggagctgaaatgctgaagaggctaagtcaggtatgtattacaattagtattgatattctatacattaaccttttcttaataaatattcacagggcataaattaaatcattaatctcaccatttgaacataaccccaacatatacttcaaatttctacccaaattaaactggattttcaaatcagatgatcatatacagtatatgaattatagtcaattaaaattgatttatatataatccacaaccacactatacaccctttttgctatcaagggaaagtaagaaggaggggagattagaaagcatttttattcnaaaacacagggtcncagtatggaatattacnagactataaaagccagatcttcctggaatttggga

SEQ ID NO: 304151 - DNA, 615 bp, Homo Sapiens
  misc_feature (293)..(293): n is a, c, g, or t
  misc_feature (369)..(369): n is a, c, g, or t
  misc_feature (493)..(493): n is a, c, g, or t
  misc_feature (500)..(500): n is a, c, g, or t
  misc_feature (525)..(525): n is a, c, g, or t
  misc_feature (559)..(559): n is a, c, g, or t
  misc_feature (580)..(580): n is a, c, g, or t
  misc_feature (586)..(586): n is a, c, g, or t
gtggtatcttcaaggttttctacatgtaaagtcatgtcatcagggaacagagataattttactccttcctttcccattgagatgccttttatttctttttcttccctaactgctctggctacaatttccaataccatgttgaatagaagtggtgaaaggcagcatcgttgcgcctatatatatttttacaaaacacagtcatacaccatgagagcaaacaaagctgaagagaagacccatttgagtccttattccataaaaaattgcaagagggtgaaaacagggaaccattnacaaggatctgcaggtctttgcaaagccctggagaaaagtcaccttcagacttctggtcttggaaaagcctttctncttccaagccttatcttggcccatatctaggctccccatccaacgtcctctccaggaaccttctttgctggcggcccacaagaagagggcctctggatggggctccagcacctgatagtacagntcacacnaggactgagccttcaagaccattcntaatggtctgaggactttttcaaatcttaccggnttaatgggccgtttaaggttnttcttngggccccaaccccacctaactggagctgg

SEQ ID NO: 304152 - DNA, 130 bp, Homo Sapiens
gacctggatttaacatggactccaaattccaagcttgctgtctcattggccaaaagtgggagggtgggtaatttcatccaagaaatagttgagggtgactcctaagcacagtggtgagaatttctccaaa

SEQ ID NO: 304153 - DNA, 484 bp, Homo Sapiens
  misc_feature (193)..(193): n is a, c, g, or t
  misc_feature (211)..(211): n is a, c, g, or t
  misc_feature (247)..(247): n is a, c, g, or t
  misc_feature (330)..(330): n is a, c, g, or t
  misc_feature (428)..(428): n is a, c, g, or t
aagattaaaaatcacatctcaggaagggcctgatgaacaaaaaagggaaccttggggattctggcccatcactgctttatccttccttcaacacctgccacttctcagagcatccggtcagctcccttatctataaatgggggctgttatccccctccctgtggataggctgttggggccccttgagacaacnctcataaaggccttagcncgggagtcatgaaagcattcaacaaatgttggctantatttacttgagagatattgccaattttaacaaataagggacagtcagtgtcatgttcaacacagggatctgagatgaggggntcccagaggctttgggcaagtccaagcggggggcatccgggaaggaccctctctggtgctggtcgttctggggacgggagccctgcagggggaacttncttctgcaaactctcacttgggttttgaggggaagaacggcctggaattccttttt

SEQ ID NO: 304154 - DNA, 407 bp, Homo Sapiens
  misc_feature (352)..(352): n is a, c, g, or t
  misc_feature (383)..(383): n is a, c, g, or t
  misc_feature (391)..(391): n is a, c, g, or t
aattgataaagaaaatgtttatttagctcaaggttctgcaggctgggaaagttctgcaagccctggtttctggggagggcttttataaagctgtgccacaacatggccgagaaggtcaaaggggaagtgggtaactgcaaagatagaaaacccgaggagcatcctggctttataacaaccccctttcatgggaactcatttccacaggaactgatccagttttgccagaatgagaactcactcactaccacgtgaagggcatcaagccatttatgagggatctgcccccatgatccagacaactcccactgggccccacctcccaagaccggcacatttggagatcaaattntccatatgagttttgatagggacaaacaaanccaatccnaaccatagcagtaggc

SEQ ID NO: 304155 - DNA, 536 bp, Homo Sapiens
  misc_feature (526)..(526): n is a, c, g, or t
agttaatgttgctggttagcattattagtattgttggttatcactgttagtgtagtcagtatacagttggtattgttagtattatgttcattagttagttagcatagtttgtagcaccagtattactggttagcattcttaggatttgtagttagtgtagctaggaggtcacactgtattaatctgttttcatgctgatgataaagacatacccaagactgggcaatttacaaaagaaagaggtttaactggacttacaattctacatggctggggaagcctcacaatcatggcagagggcaaggaggagcaagtcacatcttatgtatggtggcaggcaaagagaggaatgcttgtgcagggaagctcccctttttgtaaccatcagatctcgtaagacttattccctaactcgagaacagcatggaaaagacctgcacccatgattccattacctcccactgggtccctcccataaccggatgggaattccagatgagatatggatgggggccatagtcaaccntatcattctg

SEQ ID NO: 304156 - DNA, 463 bp, Homo Sapiens
  misc_feature (400)..(400): n is a, c, g, or t
  misc_feature (411)..(411): n is a, c, g, or t
  misc_feature (449)..(449): n is a, c, g, or t
ccctgtatgtaaactgtcacctatttagttctcatagatgacttgacttgctacgtatacaaatcttacaaatttagacttgctctatttttatcagtgaggacattaaaacctagaaaggtcagggactttttcaagatcacagatttttggtggctatctaggggaaaaaataagccttgtttcttcttttccagtctagtcctttttttctacaacattgtgtcgaaataaatgaatcagtgtttattatctacttagtacctatcattgtgctaaatattagacatggatttcgccaggaagtttgcaatcctttttagaaaattagggtaacacacatgaaattatcatcaaatcacggtaacctcatttaatcgtgacaattgggagtgggcangggtataatcncatttaatcatgacaatttagagtggcaattacattanttaggttacatgtt

SEQ ID NO: 304157 - DNA, 606 bp, Homo Sapiens
  misc_feature (95)..(405): n is a, c, g, or t
  misc_feature (592)..(592): n is a, c, g, or t
ttttctgactttcccttctaaaatgttagcactacaatggtagggacatttgtttatttgctgacatattcacaagcacttataacagtacctgnnnnnnnnnnnnnnnnnnnnnnnnnnnnnnnnnnnnnnnnnnnnnnnnnnnnnnnnnnnnnnnnnnnnnnnnnnnnnnnnnnnnnnnnnnnnnnnnnnnnnnnnnnnnnnnnnnnnnnnnnnnnnnnnnnnnnnnnnnnnnnnnnnnnnnnnnnnnnnnnnnnnnnnnnnnnnnnnnnnnnnnnnnnnnnnnnnnnnnnnnnnnnnnnnnnnnnnnnnnnnnnnnnnnnnnnnnnnnnnnnnnnnnnnnnnnnnnnnnnnnnnnnnnnnnnnnnnnnnnnnnnnnnnnnnnnnnnnnnnnnnnnnnnnnnngtacttggtacacacaaggtgcttaatatatattgttaaataaatgggttacctatagatacacacttgcatgcttatgcacagctatacataattactggtttatagttactatggtttaataggggcaattccttccaggttgagaaaagcagacgtttccagttgcagtttgacatatggtccnagaagatttcattt

SEQ ID NO: 304158 - DNA, 457 bp, Homo Sapiens
  misc_feature (125)..(125): n is a, c, g, or t
  misc_feature (127)..(127): n is a, c, g, or t
  misc_feature (323)..(323): n is a, c, g, or t
  misc_feature (345)..(345): n is a, c, g, or t
  misc_feature (400)..(400): n is a, c, g, or t
  misc_feature (417)..(417): n is a, c, g, or t
  misc_feature (429)..(429): n is a, c, g, or t
  misc_feature (439)..(439): n is a, c, g, or t
tctggttacctggttgttctaactcctctatcagccccttcttcccaatatggctcacctttatacactttatttatttacaaaaagtttctgtttcaaagaagcaagaagaaaagtccaccttntnaagagagataggaggccaggtgcggtggcctctattttatcttttaaagtgatactaattgttgttgggtattaggataaagaaataaaaacttgtcttcaggcagagggtacagcagtttgtaacattgctttccagggcagcatgggtttcagttacagtttacagagaaaacaattttttaaagaattattcnatgtgttaaaagaaattaagcntataaataattatttaagtctggcaactctctcatagggcccatatgggataacntccattccaagatgacngaagtattaacngtagggaacnaactcctcctaaaaactt

SEQ ID NO: 304159 - DNA, 292 bp, Homo Sapiens
  misc_feature (282)..(282): n is a, c, g, or t
tttccctaatgacttttatgatcaatcagtcaaatatttattgaattctagttctgagtccagtattgtagtaggtacttaaggcttgcatatactatactttagtatactgtactttatacttcattcagttcattacagaatctgcatatgtttataaaagaattgtttctttccttagctttacaagtaagaaaactttttaggaaggtaagattctcttcctcttttgttttagcctcttgattctgggaaatgttttcttatccttgccttatttcnctattttcct

SEQ ID NO: 304160 - DNA, 227 bp, Homo Sapiens
  misc_feature (35)..(35): n is a, c, g, or t
  misc_feature (37)..(37): n is a, c, g, or t
cacattgaatccagcaatataaaatataatatacntntatttaaagccaaagatgtattaaagccaaggatgtattatagccaaggtgcaattatactagaaattcaaagttggtttaacattagaaaatcaaccaatatatttcacccacaccaacactttaaagaagaaaaactgagtggtcttttccatagaaaaatgtaattgataaaattcaccatccattc

SEQ ID NO: 304161 - DNA, 206 bp, Homo Sapiens
  misc_feature (28)..(28): n is a, c, g, or t
  misc_feature (31)..(31): n is a, c, g, or t
gttctgagctgaaggggctcctttattncgnagtggtgctttcttcccgatcacgtccctgagaccacttctcgcctccctgtgcctctaagttagagttgagggtactgaggcccaaggctgtcctgctccatgtcacccagttggtcagggggctgctggctgagccccaatgctctgaccaggctctgagcagtcagggtgga

SEQ ID NO: 304162 - DNA, 182 bp, Homo Sapiens
  misc_feature (17)..(17): n is a, c, g, or t
  misc_feature (22)..(22): n is a, c, g, or t
  misc_feature (31)..(31): n is a, c, g, or t
  misc_feature (100)..(100): n is a, c, g, or t
agtttgaagtgctgccncggtnaacttgtcngagaagtactgtttgtccttgcacaaaaggggtgtaagtatgtacaggggaaggggacacacattcttngccttgcccaaggtccacactcctggaaaggcattctttccaaatataggcaacagaaggtgcacctggcctcttctttcca

SEQ ID NO: 304163 - DNA, 235 bp, Homo Sapiens
  misc_feature (141)..(143): n is a, c, g, or t
gtgccataccaatacgtgggcttccctaatcccaggccaccatgggagagagcaaagcagggctgccaggagttcagttgcatcaagggcgtagagcacgcgggggctgggctcggaatagcagtacttttccactttgtnnncttagaactctcacttctcatctccacagaccagactcagtaaaatctcaggccactagagaatggaaggcggtgaaacaggatttaaatgc

SEQ ID NO: 304164 - DNA, 326 bp, Homo Sapiens
  misc_feature (126)..(126): n is a, c, g, or t
  misc_feature (203)..(203): n is a, c, g, or t
  misc_feature (229)..(229): n is a, c, g, or t
  misc_feature (261)..(269): n is a, c, g, or t
ctcttgagtatactgcagaggacatgctttatcagtaggtcctgagggctccaggggctcaactgaccaagtaacacagaagttggggtatgtggcctatttgggtcggaaactgcatgtttcagnaagtttgtctctttttcctactcattatttgaagaagagagagcctgtggggatagccttatcttgggtccacaggnctgaagtgaagtcacttgggaagggnagacagaggatgagcggcgtctgtgtagggannnnnnnnngggcctgcagaagggtggtgtgctcccaggactggcatgacaggtgtctcctcctca

SEQ ID NO: 304165 - DNA, 297 bp, Homo Sapiens
  misc_feature (49)..(79): n is a, c, g, or t
  misc_feature (129)..(129): n is a, c, g, or t
  misc_feature (131)..(131): n is a, c, g, or t
  misc_feature (135)..(135): n is a, c, g, or t
  misc_feature (139)..(139): n is a, c, g, or t
  misc_feature (165)..(165): n is a, c, g, or t
  misc_feature (191)..(191): n is a, c, g, or t
  misc_feature (198)..(198): n is a, c, g, or t
  misc_feature (203)..(203): n is a, c, g, or t
  misc_feature (258)..(258): n is a, c, g, or t
  misc_feature (273)..(273): n is a, c, g, or t
  misc_feature (280)..(280): n is a, c, g, or t
taaccctttgcattgcagcacccagtacaattccttggaaacagcgtgnnnnnnnnnnnnnnnnnnnnnnnnnnnnnnntgggaccagaagagtgctagaagagtgcctttctgggctactatgtctcngntttnaaangggtcttttatccttagacgctcttngactttataaaatcagcagtttttgnaagattnaaganaaacagtgaaattaattggtttatcaatggagaggaagaaactcttccagcattnacatatagagctttnattggtnagtaggtgtttttggaa

SEQ ID NO: 304166 - DNA, 159 bp, Homo Sapiens
  misc_feature (21)..(21): n is a, c, g, or t
  misc_feature (82)..(82): n is a, c, g, or t
gctctgagaagagaacatcantttgagagtggtgctaaaaccctgtaagcctgagtgttctgtcctcccaaagctgtgatanggctcagcctcctgatggtgacctacttggttttatttcttcttgctgtctcagaaaatattctaaagatgcttaat

SEQ ID NO: 304167 - DNA, 460 bp, Homo Sapiens
  misc_feature (21)..(21): n is a, c, g, or t
  misc_feature (365)..(365): n is a, c, g, or t
  misc_feature (394)..(394): n is a, c, g, or t
  misc_feature (413)..(413): n is a, c, g, or t
  misc_feature (423)..(423): n is a, c, g, or t
gcctgtgaaataatttacccnaataaataatttattaccataactcctaaagtaattatgggtttccatccaattttttttagcatatgaattgttttgttctgtccattgacttgtatttacaagacttttcctagtagcctttttaaaataattggtattgccttcgctttcttacatatgatgtgatttccaggtctcctcctcgcctgagtgctgaggaaaatggaatgtgtggtgtccattgtccctgcaatacaaatgcactgaatggctgcaattagccaagggtggtgaatggagactgcgctcactccacttgccctggtttcaccaaaaaaggatcaaactaagtacacatgtgnaccctggggtcccccactggcaatggganggaagatgtggaggggagnccttgaatgnagagtcccaagcgtgggccccggtttttcccccaaaa

SEQ ID NO: 304168 - DNA, 478 bp, Homo Sapiens
  misc_feature (376)..(376): n is a, c, g, or t
gcagaggttatctgtggagcctcagcctgagtaactttccacaaatgttttactttcctgttttctgctttcctgaggagtatctaagtcatttatagagaaatgtgtttgtgaaaatagcttggattttaatctatatgttatattacaacctctaaatggaacatcttactctaaggggtgcaaagccaattattacatataattaggtaatatctgcattctcaaaaaaccccagtctccttatgacttggtttctagtagaacagggtttagtttcagatgccttcaattctgccgagtagaagccactgtatttgatatagtttgtgtattctaatcatttccccgtatgtatatgccatctatgcttcancccaaccacactggaatatttgggagagaacagtcggcgacttccagctttggtctccccagtgactagcctgtggaatttggagagttggttgggtggttg

SEQ ID NO: 304169 - DNA, 417 bp, Homo Sapiens
  misc_feature (20)..(20): n is a, c, g, or t
agtttttaaactttgccatnatatatatcacttttatagttttttttaaatggcttaagctatacattcaatataaagatatacaccaggaacttaaagtaggaaaggcaggatttctctaaaataggctagaaattgaggaactctctggggccagattggacacctctatcatcaaagcagtacgcacaccctggctgcagcaatcaaggaagttaccagaacagtcttcagctggatcagtaatgccatgagacttaaaataatcttttaagggtagagtccatagcaacccaatccagctccactgaatcttgtaccccaggggtttgtatcagttaagtaccacctgccagctcgtggtctgcaggaaggttcctgccacccaacagtgacttgcttgacttccccgatgca

SEQ ID NO: 304170 - DNA, 409 bp, Homo Sapiens
  misc_feature (26)..(26): n is a, c, g, or t
  misc_feature (39)..(39): n is a, c, g, or t
  misc_feature (61)..(61): n is a, c, g, or t
  misc_feature (362)..(362): n is a, c, g, or t
tcagcctccgggtggcatgactttgncccttgcatgggnattccctggttgggaaccaggnagctgaccagggtggcaggtgttggctcagggaagaggctgctcactcttggcatcttgacccctttgtccaggatcctgctctgcaacatccacttcctgctcccgatctccctgaaggggctgctgcttgtgggcctgctctgcactgtgctgcaagtgagcagtgctaagggggcctccagggggaaataaagtcacagcctgagccggggaaccgcagctcccacaccatcaacaccctcggagggggcaagcagaacctctggcctcctatcagggagcagataaaagaaaggacntcccccttgcacactgattccttggaggcactggcatcctcaacttc

SEQ ID NO: 304171 - DNA, 426 bp, Homo Sapiens
agtcgatgctcaaactctttaattataattaaaggacattagaaaacaattaatttgtatgaataatttcttttggaagaatttgttgcttctgcgctgtagcatctgactcttggcattggatatagggcctctatcttctgggtatttgcctgtgaggttgcttctgtgtgagtttcagatactggaattgctctcgtcatgaccctaatcatggcattcaggttgctcatggctctgcacctgcaccagggcttttctatattaataacaaggtgtaatccatgttttctagcagtttaccagctaaaggactgcgaaggagggccaacttaagactaatttagtattgcaaataggtctggtaaaccctgaatgtccaaatgctaaatctacttttctagctgttcctgctttttaaagagg

SEQ ID NO: 304172 - DNA, 264 bp, Homo Sapiens
  misc_feature (202)..(202): n is a, c, g, or t
atctctacttatcaaaatcgttatgagtttctgcaagctccggaattttccgcaagctccggaaattaagaaactgtattcattaaaacacatcaacctggaatttatttctacttctccaactgttttgacttagtcatgtttatctgtagtgaacatttgaccaaaagttcaaggtaagtaaacaaagagattagattanaaagggttgccaagccaattccctagagttggatcaaagttctagaagggcaaatgtcacat

SEQ ID NO: 304173 - DNA, 508 bp, Homo Sapiens
  misc_feature (49)..(50): n is a, c, g, or t
  misc_feature (410)..(410): n is a, c, g, or t
taaagtgctttcaaattgattatagatattccttaaatagcattttctnnaattacctgtcttagtaaatatcgctataactttttctctcccggtttctctttcagtaaattagaaatcactttacttaagtttaataagtgcctttcacatcctcattttgaggaaaatgatttctgccatcctaacataataaactgggaaaggtacaccgaggtgacatgctgtgcctgggccagcttagtcaatgaggcagcagcagcaaggactgagtttagcatcctgatgtttgtttcttcaagcaagaattaaacgcaaaattaaacactgactcagattttaagaaataacttttgagaaatagaacaaatgaaatcagtttctccaccacttaagtatatccccttagnggatctacagcctccctttagggggacatacaaagtccagttgtgttgccttcggtgaggcccaccttatattccagtagggatggctccaaattttg

SEQ ID NO: 304174 - DNA, 461 bp, Homo Sapiens
  misc_feature (40)..(40): n is a, c, g, or t
  misc_feature (366)..(366): n is a, c, g, or t
caaataacatgactatgccttctggtcatcctaggactanatttgagttctccaaaaccttgtaagaggcatgtcaggcatgcagtaaaagcatctacaacttcagctgggcactggcagcataggtctcatcttggaccatacagtcccactttatagaagagggtggaagttctccaaaacaatatccacaacaaagtctgacctcactctgagggagatgcgaagtgggaggaagaaggactaaccagctccctggagtaagaggaatttgctttccctgtctgcccaccaggggctatatgtgccacctttcaggttggggccaaggaagtgatgtcagtgtgacagaagggagagttaganctccagacgtcagcctccctccccatggggtacatttttcaatctgagtgttgttgccttagctggtgttggtaattagccttgaattggttgct

SEQ ID NO: 304175 - DNA, 151 bp, Homo Sapiens
  misc_feature (138)..(138): n is a, c, g, or t
accgcagagagaaagttccagtttcagagcatcttgggtacattccgtcaacatactgtatcactgttgatgtcgaccttgatagcctggatgaggtcatgcctgtgacgtttctgcagtatcaagtttacttttatnctccctttggatt

SEQ ID NO: 304176 - DNA, 522 bp, Homo Sapiens
  misc_feature (17)..(17): n is a, c, g, or t
  misc_feature (41)..(41): n is a, c, g, or t
  misc_feature (47)..(47): n is a, c, g, or t
  misc_feature (49)..(49): n is a, c, g, or t
  misc_feature (117)..(117): n is a, c, g, or t
  misc_feature (142)..(142): n is a, c, g, or t
  misc_feature (190)..(190): n is a, c, g, or t
  misc_feature (245)..(245): n is a, c, g, or t
  misc_feature (247)..(247): n is a, c, g, or t
  misc_feature (266)..(266): n is a, c, g, or t
  misc_feature (268)..(268): n is a, c, g, or t
  misc_feature (270)..(270): n is a, c, g, or t
  misc_feature (301)..(301): n is a, c, g, or t
  misc_feature (331)..(331): n is a, c, g, or t
  misc_feature (336)..(336): n is a, c, g, or t
  misc_feature (338)..(338): n is a, c, g, or t
  misc_feature (345)..(345): n is a, c, g, or t
  misc_feature (420)..(420): n is a, c, g, or t
  misc_feature (453)..(453): n is a, c, g, or t
ctggcacaaatctctgnatataaatctctacacgtccttcncttctntnccctccagcgcatccttgcacacatgcttctggctgccccgtgacgccggctttcccccttcactggncgcatggcggctttgcttccctgtnccccaccccgggtgcatgggctctgctgtatcttgtctcttcccatgnaggccggtcctaccaagtacaggggtcgttttcacacatgctgtcattgtctcananctctccgtcccctgctcanananactctgccccttgagctgtccttgagctgangactaccaagcatcgccgacttgcactcanctctnanggacgtnagcatcacagctccttctggtttcctaactcctctttgaaagacatttctaggggaagccatcgtttctaattancttcagaggttatcaccaaaacctcctttctgnaaaaaattaagtacatttatacagtaaagtcctcacttggacatcataggtagaagctttgaaactgtg

SEQ ID NO: 304177 - DNA, 133 bp, Homo Sapiens
  misc_feature (42)..(42): n is a, c, g, or t
tcctacattaacgtcctgactttgtcggtatattcacctgtnccagtgaacatactccagcttacgctttcaacccctgtcactgggactgttttgggactacattaggacctccagtctattgactcctgta

SEQ ID NO: 304178 - DNA, 319 bp, Homo Sapiens
  misc_feature (27)..(27): n is a, c, g, or t
  misc_feature (36)..(36): n is a, c, g, or t
  misc_feature (39)..(39): n is a, c, g, or t
  misc_feature (214)..(215): n is a, c, g, or t
  misc_feature (244)..(244): n is a, c, g, or t
  misc_feature (248)..(248): n is a, c, g, or t
  misc_feature (258)..(258): n is a, c, g, or t
  misc_feature (296)..(296): n is a, c, g, or t
  misc_feature (301)..(301): n is a, c, g, or t
tatctagaacaaaatctctatgactcncttatttangtnccaagaatgtgatctagcttcattacagcacaattaataggatgcctatctgttctacaaacatcaaatatgggtctatttccttttaaacgcagtcgtctaaagcttgctcagcagtagacaagctacactgctattacagatttctgttatcggccccattatttatctcttnnggattaagtattagtacttaacatttgcntttnaaccaatgtngaggatactagagtgtattataaatagggtttctcttnggttnttaaaattttcctactaa

SEQ ID NO: 304179 - DNA, 251 bp, Homo Sapiens
gaagttttcaagcaccctccctatattttgtgcctgagatgatgatccactatctgccatgttgctatagcagatggataatttaactcagtagtaggaggttctataggttatcaccctatgaaactcatatcttttgtattaaaacctcaattctttattttcgaagggtgactaggagaaacttggcatactaccataaatcagagagaagttgaactatagcaatttaattggatacatattcattg

SEQ ID NO: 304180 - DNA, 475 bp, Homo Sapiens
  misc_feature (262)..(262): n is a, c, g, or t
  misc_feature (384)..(384): n is a, c, g, or t
  misc_feature (396)..(396): n is a, c, g, or t
  misc_feature (412)..(412): n is a, c, g, or t
  misc_feature (420)..(420): n is a, c, g, or t
aacattaagtgtcattttaaaaaatggggttaaataagcagcattgctgaggatggccgtgcagggctgattatcccctatttgcacgttctggcggtgggaaggctagaagtctaatgactgaattatcgccctaatgcctctcgctggctgggaataatcccggggcaacagctgccgcggggtttttggctggtttcctctaattgcatccagattaagggagttgtggaggggcggggcttctccatcccccgcgganaagcgtctcctccgccaagccctgaacacccaggtcatggcttccgaggtcctggcttggtccgagaggtgcagacctcactggggtccgggccagcccatggggagcgtgaggtgcgagcnagttgcacggtnggggtggcacttggtnaagagatncagctgattggtccgggtcaggtcttgggggagcagcaggggtgagaaagcttta

SEQ ID NO: 304181 - DNA, 285 bp, Homo Sapiens
gcaagagagtgacacagattttatttctcccagagaacagacagatgcaatgaagacacatcttatcaatggattttgtttctcaagtcaaagtcagcttttcttaaaccatttccttatgcaagaagatggggagctgaatgtggaaaaatgctcttcaaacaaataatttgataattgccaatgaagagtgttctttcttctcactacagatgaaatacaagagatgtatctaagaccagagcttttactttctctaactggagtgaaattaaaattgatgga

SEQ ID NO: 304182 - DNA, 479 bp, Homo Sapiens
  misc_feature (155)..(155): n is a, c, g, or t
agaggaaggaagccttttggtggttgtcatggtgatatctgaatgacactgtggaagtgggtagtgattgccacccagagccctgaaatgagcgtttgtcattttccttgtcccctgagaggcttgcagcaccgaactgcacatttccttaatcngccttttacattcacatttgagccaaatgtgtgtgtgcaggcaaatgctctccgctgcagctagttagagtcataaagtctgaaaccttatttctaattgctttgtgttcctgaagcaaaatggcatatgtgaggtgttcatgaaaactctcagaaagtaattaggaactaccagcctttcacgtggcacagcggggatagcttgcaggcctcctccccctcactggccttaatacaccttctctgcgggtggcccatttaaagccttgtgtacttaatgcatggcatctctaaaaagctgccacttaccaccagtcccccggc

SEQ ID NO: 304183 - DNA, 397 bp, Homo Sapiens
  misc_feature (355)..(355): n is a, c, g, or t
  misc_feature (367)..(367): n is a, c, g, or t
  misc_feature (377)..(377): n is a, c, g, or t
tcagtttcccagctcatcaaggtgacctaaatgattctcttttcctttgctcctggagaactgaaaacttggggatttttgaggatgttattgtttcagcattttgaagggaacagtacctattatgacttgagtctgtaatacctgatagtattaaggcttcagtatgtctactagtggagaataaaagaaatatttcaatagtacactgtagagctaaaataaatagtaaaatggtggttttgtagtaacacaatagttgcttatctggatggcctggaagggataaatttacttaaaataatcattccactgctcatgagacattgatgtaatcagtgtctagggtaacccnggaaggtagctnctgtggaggnactacaacttgagactggtg

SEQ ID NO: 304184 - DNA, 277 bp, Homo Sapiens
  misc_feature (32)..(32): n is a, c, g, or t
atattatcctgagcactcaaagaggatgattntcgtttctcagcttatagtacagtgccttacatctggaaaatgcttggtcaatgtcttattatagaggaaacatcattcttattactacacatggtcttagaatttgtaataggccactaattctatatcgatagagaaaatgaactagaattctacatacagatgccatgaaccttcatcttcacttctcagttataaaacaggtatatatccacatttttacaaaatgggatcgtactacttc

SEQ ID NO: 304185 - DNA, 434 bp, Homo Sapiens
  misc_feature (421)..(421): n is a, c, g, or t
atccagtgatattaaataatagaagcaagaagatacaagcaataggtactagcaagaaggatattccaatattggtaaggaatttagatcatggagagaacaataatcagatgtacacaggaaaaactacattttctgggaagtaatatgaaggggggtccccctgtttttaactatgtgacaacatgggaaaatgggctgaactgtaatcagaggaaattaatgagtttcttgagaattagctctaccgcggatcatagctttatatgttgcgttaatgaatttgcttttgttctagactgctgaaagaagaataaggccggaacagctagcaccctgtgtttaggaataacatttaaaccttctaagaaccaatgtttcatactgaccaattataaagccacagacagtaaccgtgtcnctaaagttaaact

SEQ ID NO: 304186 - DNA, 396 bp, Homo Sapiens
  misc_feature (78)..(94): n is a, c, g, or t
  misc_feature (338)..(338): n is a, c, g, or t
  misc_feature (386)..(386): n is a, c, g, or t
tttgtatttttaccttggagaatattatattaaatacatattgctataaagttatacaaagttatatatgtgtgtgtnnnnnnnnnnnnnnnnntacactttgttaaaaagccttacaccataccctcataggtgcacatttcagagtcccagtcattctagcctgaagtatcatcttgttgtctacgtttctggggctgagaagatattttgctccacacctgccagcatgccctttccagccctgaggtgcaccagtgagtgtgtgtcccttctccagcttacctggggtaaaagtaccacctttggatcaaggcttgctggctgcggctccagangatctgcgcagaaggaagcagtgtgtcctcaggagattcctgaagganggggaagggg

SEQ ID NO: 304187 - DNA, 378 bp, Homo Sapiens
  misc_feature (96)..(96): n is a, c, g, or t
  misc_feature (100)..(100): n is a, c, g, or t
  misc_feature (270)..(270): n is a, c, g, or t
  misc_feature (276)..(276): n is a, c, g, or t
  misc_feature (285)..(285): n is a, c, g, or t
  misc_feature (294)..(294): n is a, c, g, or t
  misc_feature (309)..(309): n is a, c, g, or t
  misc_feature (347)..(347): n is a, c, g, or t
  misc_feature (360)..(360): n is a, c, g, or t
gatagtttctaggaggagagggagagttgtttcaattaaattaagcattatgattttgtaccacagatcaggtagtctgattctgttagctatttngtanattacgtttatattcttcctctctctccttcatccccattcagctcccttcccccaatttatttgagtaagatgtaaaatttttgtatccagtatatatctctttctaaaatttctctttgctgtatgccagtttttccaataagattaagactgaggccaattaactcnttttgnggcattggngctgctgcnggttaaaggcctacnttttccttgatcacccgagccaataaaaacttaactcnggtacctttaagnaaaattataatgggcacc

SEQ ID NO: 304188 - DNA, 200 bp, Homo Sapiens
  misc_feature (49)..(49): n is a, c, g, or t
accatttctaaaaacttttaaaatgccacacaaaacaatatgttctaanatgcagaaacatctattgttatggccatagttgcctcaaaggtaggaggggactccactctacagtttaactgtagtttaacacaatggttaagagcagagacaagatgctggattggagcttatttccaccacctatttgggtgacacta

SEQ ID NO: 304189 - DNA, 456 bp, Homo Sapiens
  misc_feature (375)..(375): n is a, c, g, or t
  misc_feature (396)..(396): n is a, c, g, or t
  misc_feature (415)..(415): n is a, c, g, or t
atggggtacatagtagatgtatatagttataggttccatgagatattttgatacaggcttacaatgcataataatcacatcagggtgaatgggtatctgtcccctcaagtatttaccttttgtgttacaaataattacactcttttagttattttaaaatgtacaattaaattattttttactatagtcactctgttgtgctaatacatactaggtcttattcattctttctattgtttttgtacccattaactatccccacttttcccctactccctgttattaccctttccagcctctggtaaccatcattacactatctgtctccatgaattcagttgttctaaatttttagctcccacaagtaagttaagnacatgtgaagtttgtctttcngtgcctggcttatttcacntaatgacccccattttcatccatggttggtgcaaatggaca

SEQ ID NO: 304190 - DNA, 392 bp, Homo Sapiens
  misc_feature (72)..(84): n is a, c, g, or t
  misc_feature (276)..(276): n is a, c, g, or t
  misc_feature (312)..(312): n is a, c, g, or t
  misc_feature (330)..(330): n is a, c, g, or t
  misc_feature (351)..(351): n is a, c, g, or t
  misc_feature (381)..(381): n is a, c, g, or t
agttattagagatgatggaggttaaaaggatgctgcttaacaaagataaaagctcacttagactagtaatcnnnnnnnnnnnnnaaagaaacataggattacagaaatatttaatgaattaataaggtacttctcaacacatttttttcattgccaactagtttttccaggttatgtacataattgaaaaagtgttgtgttgcgtgttatgctttgatgcagtcttgttttgtaatccattgctttcaaatttctatcatcatcttctaattatcntaaatttgcactgtgctactagaatagaatgatggnattattaccattattacngggcagcagaatttgaaaccnggagtataagtggggtttgcagaccattcntagattcctgg

SEQ ID NO: 304191 - DNA, 315 bp, Homo Sapiens
gagggtgcagtcctgtccaaatagaagttttcatttctactctatttttctataacattgttttgagtgattctgtaacattttaggtattaaaaaaggaggtaaaataattaaaccttactaataacatgttgtttaataattctacctaaaattttcccactaatattagaaaactgaagtgatacaaaataaaagacttctaaaagttaactgtattatgtttttaccataatcactaccaaaatggccttttactttttcattttaagactactattacgtagtactcagttttattaaattatgcatgta

SEQ ID NO: 304192 - DNA, 194 bp, Homo Sapiens
tagcctattaaggttagactacctctattgatatattgctgtggaaatgttcatagcattaaacaactactgtttccttactgtaagtaaacatttattaactaaaaacaacctgcttttacttgtttcacttatattctcatgaattcagatttgtcttaaatttttatagctataatttcatccaattctta

SEQ ID NO: 304193 - DNA, 207 bp, Homo Sapiens
  misc_feature (152)..(152): n is a, c, g, or t
  misc_feature (171)..(171): n is a, c, g, or t
gtgtgactactgtgcctgacccaaagttgactcttttatgttagctaggacttttgctctcaagctccagtgtagaacagtgaggaatgaggcaggatgacaaggaaaactttagttttcctgtgctagatcagcctggggggccttggatncaagtaggaagcaaaatgnctgctcctttcagcccaaaggtcacactccaggtgt

SEQ ID NO: 304194 - DNA, 200 bp, Homo Sapiens
gttccctcttgaaatctagcagaaagtatgccagggaagaaaatttgcacagggagaatattcaaatcagaagtattttccagtttaaaatatcagcaggggcaggcaagggctggggagaagaacaggagtggttatcttggagtcccctgtgaagtccctcacgaagaaaagacttataccaagaattccttgggctg

SEQ ID NO: 304195 - DNA, 251 bp, Homo Sapiens
  misc_feature (176)..(176): n is a, c, g, or t
cctaccttgttacagaaatctggattccattattacagagacatgattgaaataggtcttcactcctatttccaaaaaattagcaccttacctttaaacaatgtatttcttaaaattaatctgagaaatgctgcttgtgatttttatacaaagagaagatgtaagttataaaatanaacttttaaacacaaaaaagttggaaaatggaaaataattcctctgtagttggtattacagtgttgggtggagga

SEQ ID NO: 304196 - DNA, 294 bp, Homo Sapiens
ctccatatttcttaactcctgtcttttccatgaaacggcttggcattaaactccttcccagaagattgcaagaagtaacatgcatttatttactttactaacacatcgggtgtcttttgagttgattgttcaaatactaattgtgaaatgtcggtggataagtcactttattttcttaagttacttcctttattttgtacaggtgtgtgcagtttgcttcggttatatggatttaatgtttgacaataatcagttttaaaagatattcacctaacattgaagtgcattaatcat

SEQ ID NO: 304197 - DNA, 582 bp, Homo Sapiens
  misc_feature (213)..(213): n is a, c, g, or t
  misc_feature (246)..(246): n is a, c, g, or t
  misc_feature (249)..(249): n is a, c, g, or t
  misc_feature (253)..(253): n is a, c, g, or t
  misc_feature (262)..(262): n is a, c, g, or t
  misc_feature (268)..(268): n is a, c, g, or t
  misc_feature (286)..(286): n is a, c, g, or t
  misc_feature (394)..(394): n is a, c, g, or t
  misc_feature (416)..(477): n is a, c, g, or t
  misc_feature (505)..(505): n is a, c, g, or t
gagacagagtgtgccaagcacccaggaaaaaagcagtcagcagcagtggtccctgacttcccgtgcaaatctgggtacctggccccaccccagacctgctagtcagaatcactaggagtctacatttattgagtgtctcatgtgatttctatgcactggtccatccagataccactgccagatggagtctgaaggcacacatagaaccgggangcatgaggtggaaagatcacaggcagagctccngtnatangcttgaacnctgggnttccgaacatttaaaaantctggcatggctgcattcaggagggctcagggagaaaagacagatgggagagggagcccaggctcaaaccacaaggagtcggcaattcctgcagagcttcaaaccctngggtcttcatcaattagtacannnnnnnnnnnnnnnnnnnnnnnnnnnnnnnnnnnnnnnnnnnnnnnnnnnnnnnnnnnnnngtataaatagttagcacttccccttatnaaaagccttgtttagaagacaattataatagtgcttggcaggagtatagtgagcactttaataatgttagctgctgg

SEQ ID NO: 304198 - DNA, 535 bp, Homo Sapiens
  misc_feature (392)..(392): n is a, c, g, or t
  misc_feature (449)..(449): n is a, c, g, or t
  misc_feature (491)..(491): n is a, c, g, or t
  misc_feature (507)..(507): n is a, c, g, or t
aggctcaaacatatctttattaatcaaaataggacccattacaatcaacatattttgccaatgagaaatgtttgtttattcccgtagcataaaaaatccatacttcggtattcaacaaactcttgaaaagcattttctgcatcctgctggttgtgggagcgttttccctgcaaaaagttgtcgagtgcttaaagaagtgaaaatagccagttggtgaaaggtcaggtgaatatggctgaggaggcaagacatcatagcccaattcattcaacttttgaagcgttggttgtgcgatgtgtggtaggcgttgtcgtggagaagaactgggccctttctgttaaccaatgctggctgcagtcattgtgatgttccatgcatctcattgatttgcngagcatacttctcagatataatgggtttttccaggattcagaaagctgtagtggatnggaccggcagtagaccaccatacagcgaccatgactttttcngggtgcaagttgggcntgggaagtgccttggagcctcctgggtc

SEQ ID NO: 304199 - DNA, 204 bp, Homo Sapiens
  misc_feature (140)..(155): n is a, c, g, or t
ttaaattaatgtcaaggtgcataaacgcaaaaagatcaaaactgaaaataaacccaaaaagaaacctaaaaccagcaagagagcagagactcatcatatacaagggattcaccataagattaacagctgaattctcattnnnnnnnnnnnnnnnnctatgaaagccagaagactgtgggaaggcatatttaaagcgctgaaagg

SEQ ID NO: 304200 - DNA, 441 bp, Homo Sapiens
  misc_feature (325)..(325): n is a, c, g, or t
  misc_feature (343)..(343): n is a, c, g, or t
  misc_feature (348)..(348): n is a, c, g, or t
  misc_feature (376)..(376): n is a, c, g, or t
ataaaaaaacctttagtttaccatctttgccgcttttaagtgcacagttcagtggtattaaacattacgcacattgttgcaaaagagatctactgaacattctcatcttgcaaatctgaaactctacacttactaagcaacaacctctttttccccttcctcacagctcctggtaaccaccactatattttctgtttctatgaatttgatgactttcgatacctcatataattggaatcatatagcatttgtctttttgtgactgggcttattgaacttaacaatgccttcaaggtccacctgtgtccgcagcatgtatcagaanttggattcccctttttgntggcngggaaatttgggaggtaagggtctccantctggttggcccaggctgggaagttgccggtgaatgcggggcataacctccaccggtaaatctcg

SEQ ID NO: 304201 - DNA, 619 bp, Homo Sapiens
  misc_feature (168)..(168): n is a, c, g, or t
  misc_feature (400)..(400): n is a, c, g, or t
  misc_feature (508)..(508): n is a, c, g, or t
  misc_feature (548)..(548): n is a, c, g, or t
  misc_feature (556)..(556): n is a, c, g, or t
  misc_feature (561)..(561): n is a, c, g, or t
  misc_feature (573)..(573): n is a, c, g, or t
  misc_feature (584)..(584): n is a, c, g, or t
taaagagaggaaaaaacaattttgcttttccaaatcaatcatgtttatgtctttgaaagaggagaacaacaaatcacagaaaacataaataaatgcattttgttcagggacagatggctgaagcaacgagagtgaatcacagagtcaatcacagttatgtgcaaagcntcaggaaatagcttggtccctaattaatcattccatgttgttaaactctgtggagataaatttagccagcagtaggtagaatgagatgaattctcatgaaaacatgttttcaatgaagttggcaaagaatgctgtgtaaaccccaaatagctgaaactatgtcctaatagcattgagcttggtgtgccacatccttagcaataaccacttgagtgtctgtccctggggcctncagatgaggatgttaacatctggatttagcagaaggggtggggagagtgatgggggacaagggagagagtcctggaaacatacaggtggtgacccctaggagctgacnttggtgccatttaggcatatttgccttcaggactcacacntcccttanggttnagcctatccatnaaaggaaagtnggttcctaagtccctagccctttggacggtatccc

SEQ ID NO: 304202 - DNA, 203 bp, Homo Sapiens
  misc_feature (156)..(156): n is a, c, g, or t
  misc_feature (163)..(163): n is a, c, g, or t
aagattacaattagaaacacaatggtagagctctgtattttacataacagtaatacccatctataagcgatggtaatgaaaatggcaagcagagcagtaagtacatctccgctgattgtggttgactctgattttagtgtttttttggattttccntttattntaccttacttgggggaagatagccttctttataattagcc

SEQ ID NO: 304203 - DNA, 494 bp, Homo Sapiens
  misc_feature (362)..(362): n is a, c, g, or t
ttaattaagtgtattaagagactatcaagactgaaattgatctttaatgtcttaaacgtctgagtggtaatacctgtttcttggtattttgaatgttttgagatgcttgggtggtggggagtaccattttattcaggaattattggagaggtttatgatgtaatctaagcgttggggttttggagagttcttggagggggaggtgagcatggcactgtccgtggtgctgaatcagattgcttgctggttcggatggcagaaaggctctgaaattgtgaaggccacacacacaactacctggctgttaaaaagcacatctcctgtatgcagttgagattcttaatttctgttggtgtccagtncaccagggaaagccgactgtgtaggcaaccgtggggccagcattagttgcagtgagctattctaatatggggaaaaacaaattgatttaaatgggatgtgtgaacctaggtaaaacctaaaagtcctggctg

SEQ ID NO: 304204 - DNA, 272 bp, Homo Sapiens
  misc_feature (71)..(71): n is a, c, g, or t
  misc_feature (150)..(150): n is a, c, g, or t
ttctaaccccaactgtagatggtgtctgtaaatttgagaggcaaaccataaaaacataacaaacaaaaganaaacatatggcaacatctgtagtggagacatgaaagagaatgaaataaaaataatgactttcccatctcttgaattcancgaaaccctccagaacctcataattaaataaaagaaatatgctgctctttctttctgtcacagacaataatttacttccaagaagttcagagcttagattaccatgtttatgtgaacagctc

SEQ ID NO: 304205 - DNA, 180 bp, Homo Sapiens
  misc_feature (149)..(149): n is a, c, g, or t
accacgtccggccaggttgggttttttgtcatggaaagggaacagccagtatggtggagtggttaagatgctaggctctgaccttaagaaagttattaaattttttttgtgtcttggagagaggtatctgcctcaggtattatttgcantgctgccaaataaaagacataatccatgtag

SEQ ID NO: 304206 - DNA, 157 bp, Homo Sapiens
ctttctctacttttcctaacctccagcctaggtctagttttagtattaacttctaatatatattcctaaattacttcttgactagcttattcaccttataattttcatttttagatatgtttttcctttctaatctcagcctgattgctaatatctg

SEQ ID NO: 304207 - DNA, 517 bp, Homo Sapiens
  misc_feature (74)..(140): n is a, c, g, or t
  misc_feature (182)..(263): n is a, c, g, or t
aattatttagagacagggcttcactctgtcacccaggatggacggtgtgtagtggtgcaatcattgctcactannnnnnnnnnnnnnnnnnnnnnnnnnnnnnnnnnnnnnnnnnnnnnnnnnnnnnnnnnnnnnnnnnnatgcaacaccatgcatggctaattttaaaactttgtagagannnnnnnnnnnnnnnnnnnnnnnnnnnnnnnnnnnnnnnnnnnnnnnnnnnnnnnnnnnnnnnnnnnnnnnnnnnnnnnnnncatgtgagccactgcaccaagccaacctctgtaatttctagccaagacttctctcctgaattctccaaagataagtcttcatcctgatttgtattaaaggagggaaacacacaaaaatcacacaaggaatcactaaggaatctttagaaagaaattcacaacacctgagtaatcccaattcaaaatgatggggctaagcatccaagtattcagtttacctgctgacttagggaacattggcacacactcactaa

SEQ ID NO: 304208 - DNA, 231 bp, Homo Sapiens
  misc_feature (187)..(187): n is a, c, g, or t
  misc_feature (203)..(203): n is a, c, g, or t
  misc_feature (212)..(212): n is a, c, g, or t
ttataattttctgaaaaaattaagtccaaaactagctggggtcagtagggctctgacatgttgcatctaaagaaaactgtgaataaaagtagagtaaaatatgtgctttatttgtcatccccagtgctttaaatgtttcgatcattttatcacatttcaactcatgatgtttatgaagatgaatgcnattaaactttggttcnaaaagttgnctttttgggtggtaattaa

SEQ ID NO: 304209 - DNA, 392 bp, Homo Sapiens
  misc_feature (38)..(38): n is a, c, g, or t
  misc_feature (303)..(314): n is a, c, g, or t
  misc_feature (357)..(357): n is a, c, g, or t
  misc_feature (382)..(382): n is a, c, g, or t
cataagagctgtaatgccaaatcttaaaaagaaaatgntagtcaatacataattgaattttaacatttgtatagcctactcagtcttaggatgcaaacacccatcttctgctattttttctatcagcatttatttatctttttaacagtaagatgaactcttaaataaataattgtaattaataggatttttaggcagcatttttaaataaaaaggtgttaaaattgtacattcggaacaataagaaatagctaaagcagctcatgttaaacagaaacattagctctcaagggcaaaagaggnnnnnnnnnnnnaaggattcatagtcctagagatgggagaccccaacaaaaccanggaaaatccggtctcatttttctcngcaagataaa

SEQ ID NO: 304210 - DNA, 511 bp, Homo Sapiens
aataaacacgtggcctctagacacaaacattcttaagtagaacagattttatttattacttattgctatcgtgtacaatggagtgttaaattaaaacaccacccagatgacacacacatcctaatgatataaggactgccacagtacaacttctcctctcaaagacagtaggcagtctgggcctctgggaaagcatctctaccccattcaactgaggctctgaaaataagaacacaggggttaaacctgggaacctggcaactacgaaggccaagaaaaatcctcacctcccaaagactttgcttattcattccatgctaccttttgttcagggcacctccacatttctaggttcaccataagcctaggtaccaagtctatgcaaaagatctcatgtccaggcaagtcctaaggcgcagtctccccttttatatcttaaaatcacaatggctatataattttcaggaaacagtaggaactggttatcaatggtatgactgcgctcttgtct

SEQ ID NO: 304211 - DNA, 478 bp, Homo Sapiens
  misc_feature (373)..(373): n is a, c, g, or t
  misc_feature (445)..(445): n is a, c, g, or t
  misc_feature (465)..(465): n is a, c, g, or t
aagggatggaatctcattatgttgccctcaagctggccttgaattcttggcctcaagcagtcctcctgccttagcctcctgagtagttgggattaggggtgtgaaccattgcacccagctatggtcttgcctcagtattgatggctgctgactcatctggcggctgctcaaggttggagtagctgtggcaatttcttaaacaatgaagtttgctgcatttattgaccctcccttacccaaagatttttctgtagtatgcgatgatgtttgatagtatttaacccacagaggaacttatttcaaaattggagtcagtcctttcaaactgtgctactgttttataaattaagattatgttatattctaagtcccntgttgtcatttcaacaatgttcacagcatctttaccaatagtagattccatctcaagaaaccgctttctgcngggtgtggtggcatgcaccngtgggcctagcta

SEQ ID NO: 304212 - DNA, 340 bp, Homo Sapiens
  misc_feature (322)..(322): n is a, c, g, or t
ctacatactctctactcctacctctgcccttagtcaaaggataactgaaacacagcccttttgaaaaaatgaggtcctgttttatcttttggtttaatcttatttgccagtctcaagtaaaaaagaaacaaacgtggaaacagatgtgtttgaatacaggtacatctactcttaacataccatttctggaaaaataaaagacagaattgggtagtaataaggtctgactaaactataagctccttatctacagaaatattattaaaggggcatcaatgaagccaccaagcaatggcaatactgactctgccatttacttatnatgattactggccctatt

SEQ ID NO: 304213 - DNA, 510 bp, Homo Sapiens
taatgaattttcccgatctaaaaatcaaagagtgatgtaaagttagaaataactaatttaccatgtttaagatcttaccatttctgtaggttttggaaattatttacattccaattttcttttgaaataaatgccctgtattgaaaatctggcaaaatatgtggaaatttaatatggaaaccagatgattcaatttggacacggaatccatagccataaggacagtcccaaacttcaacagttttataaaatgcagctttgacacaaattactttacggaatcagtaaacctcgctggtatttctcatgctgttccctgtgaccagccctggggtgttctgggatgtgccgagatgtggcggccgcacatttggcatgtgcaaggcccaggctacgtcagaggctacatgctgggaataggttgggcagttttccacatacagctaaaacatacattaaagctacgataaactgctcctctataattccccatcccagaaagaatgaatc

SEQ ID NO: 304214 - DNA, 145 bp, Homo Sapiens
atttgtccttgtttggatatattaagaaagatattttacctgtctgtcattatccgaattgtgaattggttatcttatcttgtaggacaaatggtctattcaaaatttagtcagatggatgacagagccttggcagatgaatttt

SEQ ID NO: 304215 - DNA, 185 bp, Homo Sapiens
ttaattaattcttcctccagctaaaagagagttgaggaggtcagaatgacttcgttctactgcagaaagcataattatttttatttagatatgatctaggaaaattgagttgctaaggaaactaaaatgccacctataagccatttttcaagctgcccatcctgatgttaatcttcaggatgcca

SEQ ID NO: 304216 - DNA, 117 bp, Homo Sapiens
  misc_feature (36)..(36): n is a, c, g, or t
gaccaagtcatattaccatactctaattggaatgcncaccacgaaccaaggccttaagcatgcatgttttgttaaattttaaatacaagcaaaatattaataacattaattttggtt

SEQ ID NO: 304217 - DNA, 351 bp, Homo Sapiens
  misc_feature (188)..(188): n is a, c, g, or t
  misc_feature (196)..(196): n is a, c, g, or t
agagatgtgtggattacatgcaggcattcttgcacttcagaacacattcattaaatgcctcatgtttggaggcactgtggcagggactgtgaggcagttgttctcaagctttattggaaatagttattatttagtatgcttgttaaatatccatttctgggatctaccactggaaatgttgattcacncaattccnggctagaactctatactctgtgtttaaacaagcacagagattaatccgatgtcattctgatgcaggttatatactccatgatcaagaatagttctgtggcatatagacagataaaaagatgcttcctgactttcccctagaccaattttaaccac

SEQ ID NO: 304218 - DNA, 282 bp, Homo Sapiens
  misc_feature (269)..(269): n is a, c, g, or t
tacaaaagcaaagctacatatggttcccaaacataagtatacaaaatggaacccaactggtgcaggtgaaacatctagaaagcatgttaaaaatgtggaatataatgaatccctaaatatcctaaattcaaagtctgtgtcaaagtccttggatccacactttcaaagtctcactgatgattctgactactagtcagtctggaaaccagttatatatttttttgttaataatctcagttactcccatacatacaagtttttgattctcnaggatctattctc

SEQ ID NO: 304219 - DNA, 489 bp, Homo Sapiens
  misc_feature (341)..(341): n is a, c, g, or t
  misc_feature (399)..(399): n is a, c, g, or t
  misc_feature (424)..(424): n is a, c, g, or t
aacatttcacactttcagggtgctgagatattccaattcctcccattgtaccctgagctccaggtaaaagagctactctcttcatggggctgccttatgtgcgttcagggcagctgggttaaaatgatcgctaataaaaaatgttttggcagtaacggggcgccccctagaggacagactgcctaacaacactcatacagcgaataatcacatcagagccaaagtgacaacaaaaaatctaagcacagaccagatcagatggggggaaaaaaggtaattcagagtcttctgtcctgggtgctaattttttatattcaaagggggatggaaaattcatgganaaccaagatgggtgtctgggcttccttttgggaatttttggaattccttaatataaanttagtaataatccttcggaaatttncctaacactcttaggaaaggaactactttttaatttgcctttaatagttttaatttggcctttac

SEQ ID NO: 304220 - DNA, 475 bp, Homo Sapiens
  misc_feature (386)..(386): n is a, c, g, or t
  misc_feature (396)..(396): n is a, c, g, or t
gagacagggtcccactctgtcacccaacctgtggtacagtggcacaatcacagctaattgtggcctctacctctcgagttcaagccatcctcccaccccagcctcctgagtagcagggtctacaagcatgtgctgccacactcggctaatttttctatttttttgtagaaacagaaacagtgtctcactagttgcctaggctgggtctcaaattcctgagctcagggttatcctcctggcctaagccttccaaagtgctggggattatagcgtgcgcacccatgggccgggcctatatttcttctagaaactcatccatttcatctggcaatttctaagccattaccacaagttatatcctaactctggaaagccattacaacatnattggttccnctttttccattaaattttcaagaagtcaattttgaaccttcccctaaaaaatggctacataggaccaggcatggtggct

SEQ ID NO: 304221 - DNA, 290 bp, Homo Sapiens
  misc_feature (52)..(52): n is a, c, g, or t
  misc_feature (62)..(62): n is a, c, g, or t
  misc_feature (64)..(64): n is a, c, g, or t
  misc_feature (90)..(90): n is a, c, g, or t
  misc_feature (99)..(99): n is a, c, g, or t
  misc_feature (115)..(115): n is a, c, g, or t
  misc_feature (136)..(136): n is a, c, g, or t
  misc_feature (197)..(197): n is a, c, g, or t
  misc_feature (204)..(204): n is a, c, g, or t
  misc_feature (241)..(241): n is a, c, g, or t
  misc_feature (247)..(247): n is a, c, g, or t
  misc_feature (254)..(254): n is a, c, g, or t
tcatcagctatcaaaagtgttagtgtatttgagttgcggtccaagacaagtnttcttccaangnggcccagggaagccaaaagattgggnacccctgcnctagagtgtccttggnttccttgccaatgcaagcttnacttccactggtcctcagctacagtcctaatgaccacacctggaccttttcattatctaanacctgtncaccacaggcatcatcagaatctccataatccttatntctganctcaatnttccatcttgccacttctcccactcccaaaccatct

SEQ ID NO: 304222 - DNA, 195 bp, Homo Sapiens
  misc_feature (154)..(154): n is a, c, g, or t
ttggttatatggaaacatcttgtaaatgtggtcctaggtatgaagaaaaagtatatatttcccttctaaagggttaagtaatatttacagaagtaaataattattttgtgatgtttctaatgatagattttctagaaatttcctaaagtagaanaaaggagacattacttatttcttctgaatataaaattttcc

SEQ ID NO: 304223 - DNA, 224 bp, Homo Sapiens
gtttttccagtagtgtcactcttcaggggcccctctttactttgtactctttgacagtcagaaatatacctacccatttccaatttcctactattgtacttgaaatatggatttcacatatttggggtaatcacttcatcagtaaagttggccttcgtaagttaaaaacactcaaattttagaaactcaatgttctgtgggttacaaatgactgcccaacatgc

SEQ ID NO: 304224 - DNA, 213 bp, Homo Sapiens
aaaaggtttccatggctcacaaattttcaagtttccttatctgtgtggcaaccctacccaaaatgagggcacatgcagaaaagaagctccaaccacaacaaacacacttactgaatgttgacattgtataccagacacggggtatttatagtgtgttatattacactctacaatcccatcacttaggtctaatgacttccattttatacctgt

SEQ ID NO: 304225 - DNA, 464 bp, Homo Sapiens
  misc_feature (178)..(253): n is a, c, g, or t
  misc_feature (294)..(302): n is a, c, g, or t
cggaatatttgtacatgcacactgagatattttggggatgaaacccaagtctaaacataaagtttatttatgtttcacagacacccctttacacatagcttgaaggtaattttatacaatattttaaataattttgcacctgaagcaaactttgtgttaagtaccgagtgtggcattnnnnnnnnnnnnnnnnnnnnnnnnnnnnnnnnnnnnnnnnnnnnnnnnnnnnnnnnnnnnnnnnnnnnnnnnnnnntactgcttggaagaagtaggccatgaactagggctaagaannnnnnnnnataaaataaatagctacagctattgtagtcatctctttcatcgcagaatgcatcctgttctagatattctgggcagaagctgtgatcaccggtcacaccacacttccttctgagtgtttacacaaccacattatttttcagtgaattgaatactgtataagc

SEQ ID NO: 304226 - DNA, 239 bp, Homo Sapiens
  misc_feature (214)..(214): n is a, c, g, or t
ataatgagaatgtatcacttcttcccaaacaagtcactttttaataataaagaacaatcttttcattactacctaagaaactgactttattggttttgctcttctccatcgctgccagccaggcaaaaatctaaacttaagtctattcacttattattcttcctcttataccccactttgcaggggataaaactgaaatccagggcagttaggncatttgctgtcggtcacagcgccag

SEQ ID NO: 304227 - DNA, 167 bp, Homo Sapiens
ggtattctccagacaaaacatttgcagcatgagatgaggtcccctttggaaacatctccccacattctgtgattctgccaagtcctctaaattttgtttcctccttcatccaccaggtggatttcaggactcctactgtcagaggcttcggaataaacctctggcat

SEQ ID NO: 304228 - DNA, 440 bp, Homo Sapiens
  misc_feature (340)..(340): n is a, c, g, or t
  misc_feature (357)..(357): n is a, c, g, or t
  misc_feature (365)..(365): n is a, c, g, or t
  misc_feature (402)..(402): n is a, c, g, or t
  misc_feature (423)..(423): n is a, c, g, or t
gctttctaaaagaatgtttcccaaggttctggccatgcaaaatttccttcatctctctacaatttacacatgagaaccctatttatttctacatttatcattatcttcatgcatagcttcttatttttattcattgtcttggattgatttctaaattcctgaatcacatttttatctgcctgcaaggtgtcacattcgtagagtcaataaaacacttactgggttgtctattctattctatctttttttaattctcttgaccccagttttcctgacagctacgtttttctggctccccttataagataaattcctgagacagtaatctatactcactggnttctcctttcctctcanctctcttngaacccactcaagtgagggctttaacccccaactaantccatcaaaggtactcggtcnaaagccatgaatggata

SEQ ID NO: 304229 - DNA, 463 bp, Homo Sapiens
cacacaaatccattgcaccccactaagccgcccaaacacacatgaaacacaaaaactatccttgctagggaaacacagccctggaacaaaccccctggaccccttgtcaccaccagcccatcctgtaagaaaatgatggttgaagctgcagtgacagaattcggagagatgctctgttagacaagtctgtcagctgaaaggggcagaaaccattgttgaactgcttatatgagaggaagacctgggtggcacaggcctgggctggacgcagggctcacagagcgtcatcagcacttcatctcttcccctgcgggacctgctgtcctctgcgttggacacaccccccgccaggctcatccctgtatcctccttgggaggaaagttgccaggctggtgctactttggccctggctggggtcacacgcctgcctcgggatgtggaggatggtcagcccagccacag

SEQ ID NO: 304230 - DNA, 426 bp, Homo Sapiens
  misc_feature (245)..(245): n is a, c, g, or t
  misc_feature (300)..(300): n is a, c, g, or t
  misc_feature (309)..(309): n is a, c, g, or t
  misc_feature (321)..(321): n is a, c, g, or t
  misc_feature (327)..(327): n is a, c, g, or t
  misc_feature (335)..(335): n is a, c, g, or t
  misc_feature (358)..(358): n is a, c, g, or t
gactgtaatatggttactagaattataattacactgtatttctgttggaaactgctggtctgtggtgttttctgatgtgtctagaatgtttcttcagcatcttcccacactgccatttgtcctgcttaaaactattaggtttctgggtgtatatataagcagttaagtgatagataattttaaatatctcagtagctgtttagataattaatccagcacagttgttactacacagatacaaaaangatagttgtgtcagtttgattttttatttttactcaacagatgacttaggttggntaattatcnagagtttatcgnttaccntagatccnaaagtaaaaatgaattaagaccnattaagcacttcagttataaaatgtggtgcccaatgaaatgtcaggcaatagagaaacctttcagtcc

SEQ ID NO: 304231 - DNA, 328 bp, Homo Sapiens
tgagatgcatattttcctttattgctgaattaatgaggcaccaataatctcaaaaacacaagtcagactttattctgaaaataccataaagagacaaaaagagttagtcaagtattcttgcctgctggagacacagaatttcaatagcaccttttttaaaaaaagacatgaacatttataaaattgcagaacatatcttacatattcacatataaaatcatgaaccaataataatccggatggaaaaactgatctgtttcatcaacatcaataaacattttgttgagagtttgttccacatattatacttccctcagtatattagaag

SEQ ID NO: 304232 - DNA, 518 bp, Homo Sapiens
  misc_feature (243)..(306): n is a, c, g, or t
  misc_feature (341)..(341): n is a, c, g, or t
  misc_feature (485)..(485): n is a, c, g, or t
  misc_feature (491)..(491): n is a, c, g, or t
ttcatagctagttggtaggatgcccttttaggggatggtggagatatagggtgaggtgagggaggagaaagaaagggacacttctctaggctttacagaacactctaaatctggatctctagatctcagcttctgcttcatgaagattccacctgccaggtcagtccttgtgattgcagggtgtggggtccctaggatttggctagcagactgagattgaacacagagacaaacataggcagnnnnnnnnnnnnnnnnnnnnnnnnnnnnnnnnnnnnnnnnnnnnnnnnnnnnnnnnnnnnnnnnatacaggcatgcacagaagaaatttcttggcaaanacctaaaccccttttgctctggtgtgtgatagttgcccaggatggtcaggtctagctatccactgggcacctttctggccccgctcctggcccagtgcttgagctcccttgctcatggacaaggagttctgtgtttctcaggcntcagtngggcaagggagggaggtccagagggag

SEQ ID NO: 304233 - DNA, 445 bp, Homo Sapiens
  misc_feature (396)..(396): n is a, c, g, or t
tataatgaatagaaatttatttggctcacgattttggaggctgcaaaatacaagatcaaggaaccagcatctggtgaggaccttcttgttgcatcataaacatggtggaaggaatcacatgggcaagagagaaaagaggaccaaacacccccttcataacaaacccactcttgagataactgcattaatccattcactccgccctcatggcctaatcacctctcattgggccccagatctcaacactgttgcaatgggaatcaagtttccaacatatgaactttgggggacacattcaaaccacagcatattcatctcagcatatcccacaaacatggcctttaaccaagaaaccttaggttttgtgggtttggaaatctctagtgaccaagaggnactgcttccaccagggaatatagttatgggtctgttaaattggaagatg

SEQ ID NO: 304234 - DNA, 444 bp, Homo Sapiens
ttttcctaatattaaccgcttgcatttagtagaaatgaccttcaaggttctctgtagcagagatgtggttgaaaaaggaaaggaagacatagggtttgtagatggccatagcttcacggaagagcgaaagaagggcaggatatgtggttctctccctatggaaaaccatagaggccaaaagcttccctgcccaaacttcagccccaaagactcagataatagccttaaccagagccctggcattgaagaaaggacaaggccttgactgtttatacagacttgagatatgtgctcactgtgatccatgcccatggtgcaatcgggtacgaaaggggacttctgaatgccaataacaaataaatcaaatatgaaacataaatattggcactactgcacagtggaaatgactagacagattgtgggggtcatctaatgggggacttt

SEQ ID NO: 304235 - DNA, 189 bp, Homo Sapiens
tacacatacaaaatacaagacccgcttttctaacaggatttcaaatttagctttttaaacttgacaaagttttaggtgtaagtttttttcctattttatccataatatctatacattatatttttcattaaattttcagtttaagtcttgaaatatttactgtagatataaaacttatgcatggaactt

SEQ ID NO: 304236 - DNA, 370 bp, Homo Sapiens
taacagactctataccacaaaaagggcagaagagacccttcttaagggaagcctgcagacgcggaccaggtgagtaaggttactgtattttctcatccttcatgcctactacagcaagttttctcacagtctacaatagtgtagggaacactgatctgcagcctcagactctcagaagggtggccgacttcctcatggcccttaaacacctttgaacacattttcctgcgcacaggggccgttgtcctgcacagcagcccgaccacccactgttgcttgctgaccaaacacgggccgggagcctccgcagacgcaggcaggatgggattccctttaagcgcaccacacacaagaatttcaatgccaaagc

SEQ ID NO: 304237 - DNA, 149 bp, Homo Sapiens
cggtttgttttggttttggtatgacgagttgttttgattgtattcctgagatttggttacttatgttaggggattcttagactacttaaatcttttgttacagcacatagttgccctattttggtttaatgtataggttctttcctgtg

SEQ ID NO: 304238 - DNA, 330 bp, Homo Sapiens
aactgttgttgctttaaaatctgttttctctgacataacaatagctactcctgctcactttgagtttccatttgtgtgaaatatctttttccactcttttacgttgagtctataggaatccttatgtgttagatgaatctcttgaagacagcagatatttggtttgtgaatttttatccattctgccaatcttcttctttcaagtgagcacttagaccatttacattcaacattaatattgagatataaggtactattccagtcatcatgttgattgttacctagtactttgttttctttactgcgctattgctttataggtcctgtgag

SEQ ID NO: 304239 - DNA, 416 bp, Homo Sapiens
  misc_feature (359)..(359): n is a, c, g, or t
gacattggtgacagtgacaataacacagtactctgtactaaagtgatcaaatggggtaagtaaacgtggttttactggcctaatactgcgtatcccatgaaaggtttaccagaggtgacattcaagctcatacctgaaaaacaagcaggggtcagggagtgtggaatagggaatattattccaaacaagtattctctctttgccagaagttagaagcaaccgaaaatgaaatgtattcatgttcagcaactctaagtagttcagtttggttgaagcttagaatagatgagagagagtgggccagaattaaggatggagaagtcatttaaggctggatcaagttagaggagttggatgcnattccgagggccatgaggggcccaaaaagggaagtaagcccggtaagtgattccatc

SEQ ID NO: 304240 - DNA, 254 bp, Homo Sapiens
  misc_feature (230)..(230): n is a, c, g, or t
  misc_feature (238)..(238): n is a, c, g, or t
cattggttactttcagctatcacattttcccatcagccacagactcaaatgttggtggataaagcctgcgtcggttcccagaggctgtgcatactgcctacatttcaatcagctctacattttaggtacatccatccctctcagctagtgttcttaggaagaaaatgcaaacttttaggaaggagaaatctcactcttcagtgtttgtggagagtgcagggaaattcccntaaatggnatagtaggggttccca

SEQ ID NO: 304241 - DNA, 452 bp, Homo Sapiens
tgatgaatttcttatatacaagatcatgtcatctttaatagatatagctttactacttcctttccaatttggatgctttccatttatttttcttccctaattgcactggatagaacctgtagtacactgttaaataaaaatggcaaaagctcgacattcttgtcttcctcctgatcatagagaaaagccatcagtcattgaccattaaatgtaatgttaactgcaggttttatataggtgtcttttgtcagtttgaagacgttcccttctctccctagttcagtaagtgtttttattataaaaggaggttggattttgtttttatatatgtattctgcatctattgagatgaacgtgtgttttgatccattattctgttgatatggcctattacactgattgggtttttggatgccagaagccattaccccgggcacatgggcaggaatggg

SEQ ID NO: 304242 - DNA, 106 bp, Homo Sapiens
  misc_feature (62)..(62): n is a, c, g, or t
  misc_feature (87)..(87): n is a, c, g, or t
tacaactggcgcccggccacgatcagcttctaatcagcttctgcctcagcttctaggtcacntcccaagagggagtcaagggcttgnacccaacaacaaccccaag

SEQ ID NO: 304243 - DNA, 175 bp, Homo Sapiens
  misc_feature (103)..(103): n is a, c, g, or t
agcatgagacaccattcctggcctagaagcctatttttaaagaaactacaatctcccatggggactgtttccctgcctcttttgtgcagtcccatggaacttncctacagcaagaggcctaagattgaatctttttggggaaaagtcattctaggatgaaaatcctatgttaagg

SEQ ID NO: 304244 - DNA, 275 bp, Homo Sapiens
  misc_feature (70)..(72): n is a, c, g, or t
  misc_feature (74)..(74): n is a, c, g, or t
  misc_feature (115)..(115): n is a, c, g, or t
  misc_feature (119)..(119): n is a, c, g, or t
  misc_feature (243)..(243): n is a, c, g, or t
  misc_feature (265)..(265): n is a, c, g, or t
ttgaattaatacaagtataattaaatcagatatggtagatatggatcgtcatcacttagttgcctgaatnnnanaggtgtccctttcttgattcaaattgtatctcagtgctatntacnatatagccagggactgctttaggtagactatacctttaaccctatatttctggaagacattagtctttccttaacccctaataatctgttttgtggacaggtcagaaatgttgaccacaaaaanaattaacatggcatttggattngcagtgggaa

SEQ ID NO: 304245 - DNA, 283 bp, Homo Sapiens
  misc_feature (238)..(238): n is a, c, g, or t
attccctgcttcaatttaactgacctttttcaattacccaaccacctacaggtcccaacagtatcagataacaaggcttctgctaaagtgtgaaaatcgtgaaaaggcacacactcagttgtcatctgccaactgatttcaatcccttggccagtggacatctagacacttctggattttcagattgggatggggcttattataaaagaaaatgtccctccgcagaaatttatcagtnacacagtcaatctcaatttaagttagtcctgaagaatttctagaa

SEQ ID NO: 304246 - DNA, 350 bp, Homo Sapiens
  misc_feature (40)..(40): n is a, c, g, or t
  misc_feature (72)..(72): n is a, c, g, or t
  misc_feature (131)..(131): n is a, c, g, or t
  misc_feature (205)..(205): n is a, c, g, or t
  misc_feature (327)..(327): n is a, c, g, or t
caaagaaattaccgaatggaatacacatatagaatactcnttaaagaaatcatgggaagttgagtaattatnatgagaaacttaaaagagattaagaattactaaccagcaatgaaaaactgcatttttgntagagccaatcagcaaggtttgtgactccccagcactcaatattagctcgaggaaaagaagagctatttgctcnccagtatgaggtctggaaaaacagatcaccaaggatgccagagactgaggatattatatggcgtatcatggtcactcttacggaaacgtaggaactaaaccaacgaatcaaattaagagggncttgctaattaacatcaggtttt

SEQ ID NO: 304247 - DNA, 298 bp, Homo Sapiens
cctaatcaaaattatattcagccaagagtagagctattaaaatttttaactaagaatgtaatcatcgtacatcaacatatttgcacaaacctccaattagtaaaacttaataagcccggaataacaatatacaccaaataaaagttaaatcgagtaattaataaaacaagaaaactagaaatcacaaagtccatatgatcttacagcattaatgataaaagtgatgtggaaaaggctaatgggtgagcaggtcttttcagagcagctccaacatgctcatttttttatgaggcacttc

SEQ ID NO: 304248 - DNA, 147 bp, Homo Sapiens
  misc_feature (89)..(89): n is a, c, g, or t
tgcacctggtgcccggcctataatttttgatagatgattttgaattattttccagagataaaattttaaatggtttccattatatcacnggatttaattccggcaattgaataaaatcctaaatttccggaatgcacataatacaaa

SEQ ID NO: 304249 - DNA, 413 bp, Homo Sapiens
  misc_feature (378)..(378): n is a, c, g, or t
aattgctgtgtttgtctttttattcacttttaagcaatagaaagctggcagaatctactgggcatcttgtaatctgtaaatatgccaggaaattttagttaaatttatgaaataaactgttggcaataatttattacctcattttctgcttcaatcttcctttttcaggaaacttcatctattttagctttctatccatccttggaacaggcccagactttctcctcacttcacattgctcttacaattagctgtgcttagaattcttcctccctatcccctggctccttctcatttttctagtctcagctccaatgtcatatcctcaaacgtaccttccctggaccaccaaaactaaaataaggacttttataccgnttcttatcatggcactctgttccatcacttctcac

SEQ ID NO: 304250 - DNA, 434 bp, Homo Sapiens
tttctgtttttatttatgcctttatttatttttaccaatagttgatatacctatataatattcacgtgccacaaaaatatgagaagattacatgtgaatattgatctcatgggtgataaagtatacaaaatgttgattaactgaagcagaaatccattgagaaatgcttataaccatcaggtattacatttacagatgttgccaagtcaaagttgaacatccacagtgggacactcatcataaactctgtttaatctttaaaaggagacagagaaatagccaagtacgtagaataaaatctgcctaatcattctcctacgattcttctatgcttgagttcgttttataggagtcttattacatgcacgtttacattccttcccgatatacatattctcaaggaaacgtggcatcctgtagcccctgcttagaat

SEQ ID NO: 304251 - DNA, 419 bp, Homo Sapiens
  misc_feature (345)..(374): n is a, c, g, or t
agaaaggatcattgctccaattgtttataataaatgtaacgatgtcactacttgtaggccagggcattcagtgctgaggggcctgcctgaagtttggccaagtttgttttgaaattttaagtaatctaggactggcatacttgcgggacctggtgaatagggactatagggtttaaagttccttttctttccctcttgggcttgaagccaacaccatttttagttcctatatctgactgataggagaaaatgggggaggaggaaggtatctctaggcagcagcttcttcttgggatggccagagactgtgagatcattagtccctttttctccccatactcaccnnnnnnnnnnnnnnnnnnnnnnnnnnnnnnggcaaaatcttttagaatggccaggcagctaaataattatttttc

SEQ ID NO: 304252 - DNA, 473 bp, Homo Sapiens; identical to SEQ ID NO: 60167
  misc_feature (284)..(284): n is a, c, g, or t
  misc_feature (292)..(292): n is a, c, g, or t
  misc_feature (350)..(350): n is a, c, g, or t
  misc_feature (376)..(376): n is a, c, g, or t
  misc_feature (384)..(384): n is a, c, g, or t
  misc_feature (445)..(445): n is a, c, g, or t
  misc_feature (456)..(456): n is a, c, g, or t

SEQ ID NO: 304253 - DNA, 305 bp, Homo Sapiens
aactgggaacactatgtaaccacattaaagaggtctatagcaggaggaataaaagactcataaagcctgctgactcactggctcatgactgatttcctacacattcagctggggttgtctgctttgcttgccctgtttcttgagcccaagcgacccacacacactgcctgctgatcagtaggttatgtcagaaggccgtaaggcaaaatttaagctatttttcatttaaataggcgtccctagaaatagctacgtggacttaccctaatataggtatttaaagtccccagcttttgaagtgattc

SEQ ID NO: 304254 - DNA, 414 bp, Homo Sapiens
  misc_feature (144)..(144): n is a, c, g, or t
  misc_feature (366)..(366): n is a, c, g, or t
  misc_feature (383)..(383): n is a, c, g, or t
tcaattaggccagggtaaatcaaattctgttcaaactattcaacatgaaggacctaagttgtgctgattcagtttctatctctcagtgctgccagggagcctagagcctatgcctctgaacaccacactgtgagatgcaagctngaaataaaccactcatgaaaccatggcgatcccctcccaactccaggagttggctgctccagtgcacagagccagagaagcacattctggaatgtaccagggcatatagaaatataccttatctccctatattcaaactcatgtgtcctcccgcctgaataactactgcctgaggttgtcccgattatcaagccaggtaagcaagtcatttagtaagccctngtcccaggcccatatgnggcaaatcctttggccttccacggattcaac

SEQ ID NO: 304255 - DNA, 315 bp, Homo Sapiens
aattaacttcatctgatgtgagcctctcaataaaaatattaaactaagaatagtgtcactttacgagactcccatctgtacctaagagttttgaacatttgagttggtgaaacatttctttctaatctgaatttcccacattaattattttgaggcattttaatatccttggggatcgattacatccaatgaattaggtcaaagtttcatagtctctattggcaatcactagtttaatttatgattttcagcaaaaatatcagatgtgtgaatttaatgtagattaaatcagccatgcattttgttatccttcaa

SEQ ID NO: 304256 - DNA, 477 bp, Homo Sapiens
  misc_feature (392)..(392): n is a, c, g, or t
aaaaaaatacttattttcaccccaagggaagtcagcaatttcaaaaaataataaatattcttgatgtaaaatatctcattagtgaaggagtaggaaaacacataatttgctctaacatttggaaaatttttatactaaattatgctataaaacctaatttccactcacctttcagattttgttaatgtttacattccttttctcatttaacttcaacaatggcctaaagcacatcctgggacagcttggtgttttgctgtgtggtttttatctgaatgtgctaagagaatagaacttgcctgaatgggctaaccagcaatagcactctaagtcccctggaatggtaattcactggataagaggagctaccaaaaaaccgatatgatacttcnggaataaaggtaactggggcaccaacatccaggggaatcctaggaatggcctgagggtgtgatttttttaacaccccttccataa

SEQ ID NO: 304257 - DNA, 455 bp, Homo Sapiens
  misc_feature (246)..(376): n is a, c, g, or t
  misc_feature (394)..(394): n is a, c, g, or t
tacataggtgggtagccttctataggccctttagcagttataaattgtacaaggtattattgtgaggctaaaaaaagttactgtattatgtatgtagcagtaatatttataaaatgttacctaagttgtagccttaaaagactcatttcaagtgtcttacttggttattaagtatcgcacactggcaaataatatgtaagaataagtgacaagaaagttcatgcagattctttatttaaatccaannnnnnnnnnnnnnnnnnnnnnnnnnnnnnnnnnnnnnnnnnnnnnnnnnnnnnnnnnnnnnnnnnnnnnnnnnnnnnnnnnnnnnnnnnnnnnnnnnnnnnnnnnnnnnnnnnnnnnnnnnnnnnnnnnntacctcatgcagattctnatttaagataaaatatcacctgagaagtcccagaccccatatttggaccccagttttccga

SEQ ID NO: 304258 - DNA, 198 bp, Homo Sapiens
  misc_feature (50)..(50): n is a, c, g, or t
  misc_feature (73)..(73): n is a, c, g, or t
  misc_feature (134)..(134): n is a, c, g, or t
  misc_feature (160)..(160): n is a, c, g, or t
tgctaccagccattaaaatgataactttccccctgctccactatatgaanaaaaggaatacagtccacaggcnaggacttagaaaccactttccttttattgatagcttaaacctaaggaagtgtgagtcctgnaagcaaatatgcctaaatggcaccanagtcagctcctagggtcaccacctgtatgtttctgggc

SEQ ID NO: 304259 - DNA, 218 bp, Homo Sapiens
attatacctggccgtaaacatccaattctgctaaagcttcagtgcatctcttgttccaactccctctccccagaggaaatgcacagttctcatgtgggtttctgaacctgagggcaaagggacagtacaaactctggagcccacctgcccaggttcaattcttgctctgtaccacagtttctgattaaaaagagtacccaggcatctttgaaaaatat

SEQ ID NO: 304260 - DNA, 155 bp, Homo Sapiens
  misc_feature (73)..(73): n is a, c, g, or t
  misc_feature (75)..(75): n is a, c, g, or t
  misc_feature (112)..(112): n is a, c, g, or t
ccaacaaagatttatatacaagggatatataaacagggatatataaaggctctgggaaatataatggtttatnanaacaaaaaaagtcctaccttcaaggaacttacaaganaacattatgtatcatagtggtatctttctatatacagtactta

SEQ ID NO: 304261 - DNA, 453 bp, Homo Sapiens
attttaagaagctttcaggaataacgccaccaaaacacacaataaactgaaactgttaacgcagcaaattacacctatattcaaaacgagtgctgagcttttactatactagtttttcccccaagggagaaaaagggaacagagagaggaaggtcactagtcctcattcccatcctcctggcatcagtcatcctgccagagcgagcgcaggcaggctggtggctcctgcagcctatctaaccccacctctgtgctcccaaaaccggccccaacacaaggttagaagccccaagtcaacaatcagagtctaggaataggccttgctcagccactaagtgacccagaagttgtctcctcggatgcttacaagctcttcaaacttaaaaggaaatctccctcagcaatggttcaaagcctgagacaactgtagcaagaagaaagaaaaagattcaa

SEQ ID NO: 304262 - DNA, 452 bp, Homo Sapiens
  misc_feature (328)..(328): n is a, c, g, or t
  misc_feature (347)..(347): n is a, c, g, or t
gaacaaggtcaatttcctgctctaaaaaactatgcgtctatgaaggaaataggagccctctctaaataagaagccaaaatgcctaaaaaccgttccagcctgtgaaaacaataaactgtaaatatcagaaaacgttccttgaagaaggcaatagctcagaaatcttttttcggtatctggtctcctttgttgcaataagacagcccgtaagcaatctagcaaccagaacagttcagttcggagcaggctcccggggagatttagttgttagagttcggcaagaaaggtttcacaaacggagctgagttctgggggaaaatgagaggtngatgttggccggagagatnggatccggaacggggaaaaattgtctggggaagggggtatacggaattcatggagaagccggggacagtgagaaaactgcagtcgagtcctggaaggggtgagaa

SEQ ID NO: 304263 - DNA, 427 bp, Homo Sapiens
  misc_feature (288)..(312): n is a, c, g, or t
ttttgaggaaactctatactgtgttccatggcagatgcaccgttttgcaatcccaccaaaaatgttcaaggtttccaatttttccacatcctcttcaacacgtgttgtcttttttgttttgataataatccctctgacacgtgtgaggtgatacatcattgtagttttagtatttatgtttccctaatgtttagtgacatcgagcattgggcatttcttcacatacccattgccttggaaaaatacctatttaagtacttagctcatttaaaaatcaacttattaggnnnnnnnnnnnnnnnnnnnnnnnnnactgctgagttatagaaattccttaaatactttggagattattcccttattggatatacggtctgcaaatattttggtcccattccataggttgccctttcactctgctgggttc

SEQ ID NO: 304264 - DNA, 460 bp, Homo Sapiens
ctacccatgtgtcaaagttttatgctaaattctgaatagaatagttgtaactcccactctgggtattttatttattttaaacagttctagtattgtttcctgtgaattttttccagggattgctactttctgcactattcattagaccaagagcatttcaccaaatacttaaaacttaaaaatttttaaacttttccaaatttgattaaaaggataacatattctaaaggtattcaatatttttacttatctttgaaaaacttaatcacataaaagcatacattttacacatacagctctctccatcttccacaatagattaagacataaaacataaccagtatttttgaaaagcccccttaactggcatgcttcttactgaaattatcataaaaggttcgtatgagaaaggattccagaatatcccttaattgtgttgtagcttatgcatttctattta

SEQ ID NO: 304265 - DNA, 384 bp, Homo Sapiens
  misc_feature (76)..(152): n is a, c, g, or t
  misc_feature (160)..(276): n is a, c, g, or t
  misc_feature (280)..(288): n is a, c, g, or t
gtgtctcctgtattgacagtaccactgtgtattaagagtatgagtcccagattgtgtaagttcaaatccaagctcnnnnnnnnnnnnnnnnnnnnnnnnnnnnnnnnnnnnnnnnnnnnnnnnnnnnnnnnnnnnnnnnnnnnnnnnnnnnnaataactnnnnnnnnnnnnnnnnnnnnnnnnnnnnnnnnnnnnnnnnnnnnnnnnnnnnnnnnnnnnnnnnnnnnnnnnnnnnnnnnnnnnnnnnnnnnnnnnnnnnnnnnnnnnnnnnnnnnntgcnnnnnnnnnagaagaaagttcttgtctcaggctagctttggggaccaaatgaagcactcccatgtaggcactcaaatggaactatgtaaaccttaggcaaggcac

SEQ ID NO: 304266 - DNA, 209 bp, Homo Sapiens
tgacaaacacgcccaagcgggtactcattttcttaccccttatactgcagcaatggcctctcaactccctgcttccaagctcactcccttccatcctaaatagagttgccaaagtaacctaaaacatacatttgaccacatcatcctcttgcatgaaatcctcaacatatcaaacctgaatatatgaaaataagaaaggtataaattgg

SEQ ID NO: 304267 - DNA, 159 bp, Homo Sapiens
ctctaaaacaaggctgaaaaggctagctttgctctgcataaggcacgtttagctcttctgtggccaggactacagaaaattaaaatggagtataccctgaacaggctccatttcctgaagccccagttcagtgagctggtgagggcagacccagagaat

SEQ ID NO: 304268 - DNA, 409 bp, Homo Sapiens
ttttttggtaaattaccctttccatttttgcctatgactaggggcatacaaacaaagtttgggtctgcttcttgctgttctgaatagctgtctgctttttaaaaggcagaaatgaaaacagcagtcacgtgatgttctttcaaattaaagttacacaatgacacaaagctgagttgcgcacacacacaaaatacgcagcaatgctacttcctgccattgaaaacaccacttttcagatggcatttaatggttctgtttattatataattctatctcataacatacatttccttcctttagaatgaacaatacttacttttgaaaaatcctcgtacagtctacaccaagcacacaaaccaatcacatggagtgactatttctttacaatggtttggaaattgcataaacc

SEQ ID NO: 304269 - DNA, 399 bp, Homo Sapiens
  misc_feature (332)..(332): n is a, c, g, or t
  misc_feature (353)..(353): n is a, c, g, or t
  misc_feature (364)..(364): n is a, c, g, or t
  misc_feature (383)..(383): n is a, c, g, or t
ataatacacgcacttcctgatctggggtccattcaattgcttctatcagaaacagatttaaaggaattgttcttatacactattatttttgggaaaagaaatgtatagtgttaattatctacttagaaatattcccaaattattcttcaggaaattaacaatgatattttattagggttttcttgattgtatcttccaggaaagactggcattcagcatccactccactagaggtaaagaagtatagtctgataatggtttgtttggaagtcagatttccaagtgctaggacctagttggccaccacacacagttccaagatggtgtgggtncaagatggcatccactaagcnaaggggttggngggtttcccctggggttangaaccccagggggctt

SEQ ID NO: 304270 - DNA, 428 bp, Homo Sapiens
  misc_feature (377)..(377): n is a, c, g, or t
  misc_feature (396)..(396): n is a, c, g, or t
atgcttccacccagaacattaaacagaacctgtgggaagggcaccagtaaagggagttctgcaaactggccatgtgattgtaattagcagcctgggcttacaaccactgaactaagcattgcctctcaagttttattgagcttataaatcacttggtaatgttggtctcaatctatgtaatgtgattctgcaggtatggaaaggtccatgaatgggtgttttaaataagtcccctgtcaatgctgatgatgctccccctaggctcattattagcattagttagagaaagcaggcacagcacagagtcccttaatacttgggcactccttggtcaccaccccaattaccttcctgggaccaaattggaagaccacctnaaccccccaccttaaaagnaaccctaaacccttggttggggctttttaaag

SEQ ID NO: 304271 - DNA, 366 bp, Homo Sapiens
  misc_feature (134)..(303): n is a, c, g, or t
  misc_feature (333)..(333): n is a, c, g, or t
  misc_feature (350)..(350): n is a, c, g, or t
cggtacaactctttaatacatttagagaactgcttatgtattgatgtttgatgtacatcaagctgtaatggcaatgaaattaagtatcatattatttcataatgcctacactactagatccgtgaaagccactnnnnnnnnnnnnnnnnnnnnnnnnnnnnnnnnnnnnnnnnnnnnnnnnnnnnnnnnnnnnnnnnnnnnnnnnnnnnnnnnnnnnnnnnnnnnnnnnnnnnnnnnnnnnnnnnnnnnnnnnnnnnnnnnnnnnnnnnnnnnnnnnnnnnnnnnnnnnnnnnnnnnnnnnnnatgctggtaagtcccaggctacttcaggangaccttgaggccaggangattctccttgaaacc

SEQ ID NO: 304272 - DNA, 307 bp, Homo Sapiens
  misc_feature (164)..(164): n is a, c, g, or t
  misc_feature (167)..(168): n is a, c, g, or t
  misc_feature (173)..(173): n is a, c, g, or t
  misc_feature (176)..(176): n is a, c, g, or t
ataaaactcgaaattgatcattaggattaatttaacctgatagactttgtgtgcctttctagacaaatattatgaaatatagtgataatgaagtagtgagaggtataatttcacatcttataatgattttagtatccagttgttctctctgatatctagatagngcnngaaanatngctctttgttacatcattaccatttagctagggccatgctgtatctcttatttggcctcttcccaaacatttttttcctgtcttgaagtctgaagatgtaccaaactcccttcacaccacccccctgttaa

SEQ ID NO: 304273 - DNA, 349 bp, Homo Sapiens
  misc_feature (65)..(134): n is a, c, g, or t
  misc_feature (152)..(237): n is a, c, g, or t
  misc_feature (272)..(272): n is a, c, g, or t
  misc_feature (338)..(338): n is a, c, g, or t
aatatactgatttaatagatcgtttctgtgagttgtgctaaatagaattggtaacagtgttacannnnnnnnnnnnnnnnnnnnnnnnnnnnnnnnnnnnnnnnnnnnnnnnnnnnnnnnnnnnnnnnnnnnnngtagagataagatttcannnnnnnnnnnnnnnnnnnnnnnnnnnnnnnnnnnnnnnnnnnnnnnnnnnnnnnnnnnnnnnnnnnnnnnnnnnnnnnnnnnnnntgacacccgcacctggcccgatatgcaggatttcntgatgtttcacatcttcccaaaacttttctctttccctgacatgtgctttttagcctctgaatagnccgtcagcaaa

SEQ ID NO: 304274 - DNA, 336 bp, Homo Sapiens
  misc_feature (221)..(221): n is a, c, g, or t
  misc_feature (256)..(256): n is a, c, g, or t
  misc_feature (306)..(306): n is a, c, g, or t
  misc_feature (323)..(323): n is a, c, g, or t
atgcccgcctaaaagtcccgctttaaatgttcttggaatagtttggatacagtgttgtagtactatgtgtatgttcgtatttttatttcccaagcctttgatgttatatccaaaaactgatttgctaagaccagttgcatgaaggcttcactgtctgtttttattaagattccacatatgtgtaaggtcatgtagtatttgtctcagtgtatctggtttcntttctgtaacatgatccagcaatttgaaatttttnttttcctgcatgggtcacaaatggttaatggtctaccatcaaaaggaccntcctaaaatacaaaggnttaatgggttaaa

SEQ ID NO: 304275 - DNA, 165 bp, Homo Sapiens
  misc_feature (98)..(98): n is a, c, g, or t
  misc_feature (143)..(143): n is a, c, g, or t
acccggcccagtaactggaatccttaaacaggcaaaaggccaatttttaattccaatttttaaaaacttgagaagaccttgaataaccattccaatcntctaaggggttacaagaagggttaaattttgaaagaggaaatggntaactggtaagaaataatataa

SEQ ID NO: 304276 - DNA, 502 bp, Homo Sapiens
  misc_feature (412)..(412): n is a, c, g, or t
  misc_feature (460)..(460): n is a, c, g, or t
  misc_feature (475)..(475): n is a, c, g, or t
ggggtggggtggggaagaatagatgggaagtcagtcttgtcagctcagtggctatgactgttgggcattaccctagtgatgaaactagttccaacctgggcttgcaggtgaaggcagtgctatttattgctccctgcaatagggaaatctacagggaaatctagaggaatatgcagttctcatgttagcaagaagatggacaaataacagtagagtcacagatgggacggtatatgtgtgtgggcagggtcagggagctgttaccctaaaaatatgatttaattcacttaagttttactgagtatctattccatgcaagttcttatacttaggtgctgagatgtgaaatgcggaaaattggaaagcctggaaaagatatgggtagaaggatttcctaaattttgatatatcnctcattatacacacgtacacatgtggacacatccatgtataaagtccnattttccctggtccnaagtcagccttcttgcctctgctgtga

SEQ ID NO: 304277 - DNA, 477 bp, Homo Sapiens
  misc_feature (162)..(162): n is a, c, g, or t
  misc_feature (392)..(392): n is a, c, g, or t
  misc_feature (405)..(405): n is a, c, g, or t
  misc_feature (411)..(411): n is a, c, g, or t
  misc_feature (424)..(424): n is a, c, g, or t
  misc_feature (429)..(429): n is a, c, g, or t
  misc_feature (444)..(444): n is a, c, g, or t
aaacattgaaattttttattacaaatttaaatctaaattttactataatttaaacaaaaagcaatggctagactgaggagagccagtttcaatgcttcactaggcccccgaccagctgtgagcagatctggaagatggacggttgtgctgtcttctaaatgnaaaaattgcgcaattttgggcatttgctatcccacttactcctcacaataattatgtgagatacgtacggcagaaaactccatttttaagattaagtattgaaaaacagaaaattatttaaaaactatatcaaaagttatccccttaaaagagattatcttggaaatcaaaagagagccaaattaataatccgtcatcattaaaagggcccaggtaaaacctggggtccncctaaccggtagnccaagnggaagccatttcnggatnacatccccatttcantccccccttatcacctcctccgggccttcctgg

SEQ ID NO: 304278 - DNA, 260 bp, Homo Sapiens
  misc_feature (96)..(96): n is a, c, g, or t
  misc_feature (230)..(230): n is a, c, g, or t
atgagccacagtaaccggcctaatttctttagttttaaattgaatttgtagccataacctagcaaaactgcgaatagtcacctaaaataatgggtngatgacaaggaaaaccgaggatggacagcaatagttacagtcattaatgactgggctatggctctagccactcctataaatggctttacatggattaacccattttccaactttcacatagcccctatgaaccngatcctacatcccattttaaaatggggaac

SEQ ID NO: 304279 - DNA, 411 bp, Homo Sapiens
  misc_feature (225)..(225): n is a, c, g, or t
  misc_feature (322)..(322): n is a, c, g, or t
  misc_feature (369)..(369): n is a, c, g, or t
  misc_feature (375)..(375): n is a, c, g, or t
  misc_feature (386)..(386): n is a, c, g, or t
  misc_feature (392)..(392): n is a, c, g, or t
gtccaagcttaagctctgagagctcaagtttgctctttcgttctgcagagtaattctcagttgtcagggctcgccagcagcgcatcaacaaaggcacacaaacaacctgtttgcaatgctgcaaaaggactcggggctcctatctcataccacatcacataccctcctaaatatccttcaatatcagggaggaatgcaaccctttggctgcttggtttatgaaangccacagcatcttcctttcagatcccagagtcttgggaagggcagcgaatataccaggagcccagatggggaaacacttgtgctctgaaggcaatcntggcagaagctggcccgtgttctggggtctgtgttcattaaaagganttaagntttcaacctgnagtgtngcctgaatgcaattgcgga

SEQ ID NO: 304280 - DNA, 141 bp, Homo Sapiens
ctctcagtactttataaagatgttaccccactttcttctagctaacactgtttccagtgagaaatctgccataattattttgttcctctatacataatgtgtcttatctccagctgcttttaagatctttttattactggc

SEQ ID NO: 304281 - DNA, 148 bp, Homo Sapiens
tctgccaagctgcctccatcttttcttacaccagaaggcaaattctttggccccatgaatctcattcttctggttcacccctctgcctagcagagtgcctgggccacaacagacatttaacatgcatctgtctcattagctgagattt

SEQ ID NO: 304282 - DNA, 131 bp, Homo Sapiens
tgtgctttttgttaattactggcttttaaaagatcagtagtggggcagaaactagactagtgggttgaagggtgaataggaaataagtaatacttattctttcaaggagcttgactgaaaaggagccagtg

SEQ ID NO: 304283 - DNA, 182 bp, Homo Sapiens
ctaaaaaagccacacccttccttccatcagtattggctgtgctacaaatgtttttggaaatgctctttggaaataaacttatgaaacagcttttaaggacaacaagaaaactgacttcatttacccagagtcacaccttatttaaaccacaattggcatttccctctttaattacagacttt

SEQ ID NO: 304284 - DNA, 508 bp, Homo Sapiens
  misc_feature (102)..(102): n is a, c, g, or t
  misc_feature (213)..(213): n is a, c, g, or t
  misc_feature (232)..(232): n is a, c, g, or t
  misc_feature (441)..(441): n is a, c, g, or t
  misc_feature (469)..(469): n is a, c, g, or t
  misc_feature (486)..(486): n is a, c, g, or t
ttgaattaatgcttaacaacaaaatagtactaaaaaaccatgacccaactgaagtgatggagaacgaatctttttccaggagaagccagcaaagccatctgncacattgagctttcattctgacaaatagcaacatacagaacagatagtaaaagcagaacatgcatccgatctaaatttagcacgtcactattcattactgagagaacgagnctcttgtcaggagaaggcngaaagtgtttgacgtcaagttactaaaaaaagacgggcataaaacccaaaatattaaagtctagcacaacaggaatgggatgcttttaaaaatttaggacatgctaaaggaaaattactaagagggcaaaaacgatgtataaatgggctctagggcctcacggatttcaccattaacctctgatgggtgtcacgtgatttttcatctancctccttctttctctggcccacattttnaaaggatgtgtctagancccgagatctcaacagggtggg

SEQ ID NO: 304285 - DNA, 140 bp, Homo Sapiens
  misc_feature (130)..(130): n is a, c, g, or t
ctgtcactcttgaggaccattatccagcccccttgcagactgccccaccttgggtccagtgtcagcctagcttggtgtaggtgtatacatacagtactatgccaggcactaggttgcataaaaagcgtgnaaacaaaaaa

SEQ ID NO: 304286 - DNA, 363 bp, Homo Sapiens
  misc_feature (46)..(46): n is a, c, g, or t
  misc_feature (81)..(81): n is a, c, g, or t
  misc_feature (92)..(92): n is a, c, g, or t
  misc_feature (97)..(97): n is a, c, g, or t
  misc_feature (129)..(129): n is a, c, g, or t
  misc_feature (151)..(151): n is a, c, g, or t
  misc_feature (167)..(167): n is a, c, g, or t
  misc_feature (175)..(175): n is a, c, g, or t
  misc_feature (196)..(196): n is a, c, g, or t
  misc_feature (231)..(231): n is a, c, g, or t
  misc_feature (245)..(245): n is a, c, g, or t
aggtgtgaagcaaccctccccaggcccgtcttaaacctctaactanccttaatttgggcagggagcaagtgggtccccccntttcctccacnataancttaatttttggtttggcacttaaatggagtngtcctataagtaaggtctaatnaaaaggtggtgataanaattgggnagtgccggttcacttttaagnagcagcttttgattaaattggggctccttccccanaatttagacttcangggatccataaggctgagctttgcataccattaaagagttaagtgggttgagtaaagggggtttaaaaatattttaaaataggtaccagtaagaccaataaaattttttggggggtaa

SEQ ID NO: 304287 - DNA, 451 bp, Homo Sapiens
actaccagagaaatgcctatatatctgatttcatctagaatctttagtaggtacacagtgtgctggaaacagttattttttcctgacacaggcaataattaaagttctgaaagctgtgcattggctctttttcatagtatacttggtattaaatgtcttctttctatgcttatggtttggctgaggactttcataaggtatagttttttatttcttgtgccgtgtgtttgtatctatatgacttttcaagtgtgggtcatcattctgtgcaagaaaacttcctctttttccaatctttaaaaatgataattaatacttggcagcatgtacaaatgaaaaagagacagatgtaagtgaagaaactatgatttaaagttaataagcaaaggaggaagaaataacagtcttttcagagtacctggggtatcagcttgggaaatgattaataaaa

SEQ ID NO: 304288 - DNA, 124 bp, Homo Sapiens
tacttcccaattaatttcctatgtagtttttatatcactttatataaaaaaactgaaaattactctgttagtaactaatttgttttatgaatgatacataatttgaagcataattcgtaattta

SEQ ID NO: 304289 - DNA, 101 bp, Homo Sapiens
ccccaaatattttcaatctgtgattggttaaatctatgaatgcagaacccatggattcagagaccagactgtaaatgtagtaccaggaaaagaagaggggt

SEQ ID NO: 304290 - DNA, 555 bp, Homo Sapiens
  misc_feature (428)..(428): n is a, c, g, or t
  misc_feature (448)..(448): n is a, c, g, or t
  misc_feature (457)..(457): n is a, c, g, or t
  misc_feature (494)..(494): n is a, c, g, or t
  misc_feature (534)..(534): n is a, c, g, or t
  misc_feature (545)..(545): n is a, c, g, or t
ctgtttcaaccattattgtttctgcagcatgatactttgggtttcatggtaagatgtgggtttgtcaagaaagaaaattacagcaagaagctatgctgaaaacatatacacttctgtttaagaaatgagaaaaacacagaaaaattccacacagtaattgcttttacgtgagttttaaatgtcattgtttgacttatgtcaaaaagcccccttagccagttctctcatactccgttaccaaatatctcaccttaaaaacagcaaatgttggacttcattttgatgatctttgaggcctttcagagatatccttaagtcctagtggaaacattccaaatttttagattgtgcaggccatttttttaagggttacttagaatatcgatttttattttcttgacccaaaatgggaaaacacggggaattcnccaaaagctttttacaggcngctattacngagaagagaagccaaaccaacatgtattaggtctgcncttgaagtgcctaaaataagcccatgaaggtccccaaccngggtgaaaccnctagttcccg

SEQ ID NO: 304291 - DNA, 588 bp, Homo Sapiens
  misc_feature (405)..(405): n is a, c, g, or t
  misc_feature (455)..(455): n is a, c, g, or t
  misc_feature (485)..(485): n is a, c, g, or t
  misc_feature (560)..(560): n is a, c, g, or t
catggtctcagaacactgaagcctcctcaccacagaagtcaccgcaattcacctctttccatagcccacacttgagcaaggaaaagatgaacacacttaaccagcttcataaagactgacagctggagttttgttaagttatcagagaagaaagcatttctagccatgcagttaattgctctgaatgaatttctttggcaatcaaaggcttttagtctgtgattttgaaaacagcagggaggccactaccctcaccataccaccaccacctcctccacaggacagattctggccctcttccaaagacagtcattagacctgcatcatttgaataaattactacctggaaacttcgaatgagggtgggggaactggttaccccacatggaaagtcaagaaatgatncattttggttttccaggtgggctctcctggtgtaacatgttcttcactantctctggctttttttacaccaggttgcagntgacaggaagctggtggttactgagaactttaaggcactggcctggttcctccaatcctatacatcccccagttngggcctcttgggatctccttaatatcca

SEQ ID NO: 304292 - DNA, 267 bp, Homo Sapiens
  misc_feature (104)..(104): n is a, c, g, or t
  misc_feature (215)..(215): n is a, c, g, or t
  misc_feature (224)..(224): n is a, c, g, or t
cagaattcatttcttaaaagtttactaggagacagaaaatcagatatggctcaaaacaagtcaagagttaaccacaaaatattaactcatatgctgctttctgnttaacaaattcttaaacttctggttctacatagattaatcattccaaatctctgcaatcactttctaagtcttacccgtagctcaagacagtcttggcatagttgttttcnttaaggtcnatataaaacagacagcctttataaccaagctacttgtgtaatc

SEQ ID NO: 304293 - DNA, 327 bp, Homo Sapiens
  misc_feature (56)..(56): n is a, c, g, or t
  misc_feature (99)..(99): n is a, c, g, or t
  misc_feature (206)..(206): n is a, c, g, or t
  misc_feature (220)..(220): n is a, c, g, or t
  misc_feature (248)..(248): n is a, c, g, or t
  misc_feature (277)..(277): n is a, c, g, or t
  misc_feature (285)..(285): n is a, c, g, or t
  misc_feature (308)..(308): n is a, c, g, or t
cctatgatttaggtaaggggtaggaaaaagaaagagggaggcaagttaagaaaacntccttaagttgtactctctaccatgggtaaagcataagtaagncttttaaattaaaaacatagattactttttaaaataatgccatgttttaaatggtaattaaaaatactcctgcatggaattcaagaaaaagcttgatgggcttcagntaaaccttaaaatntggttccgtgtggcaaagatgacatttngtgtccgtggtttggaggctccattcccncagaggcncttaaacatgtccggaactaatnggaccatttttaaggtggt

SEQ ID NO: 304294 - DNA, 647 bp, Homo Sapiens
  misc_feature (130)..(130): n is a, c, g, or t
  misc_feature (293)..(293): n is a, c, g, or t
  misc_feature (355)..(355): n is a, c, g, or t
  misc_feature (368)..(368): n is a, c, g, or t
  misc_feature (386)..(386): n is a, c, g, or t
  misc_feature (436)..(436): n is a, c, g, or t
  misc_feature (456)..(456): n is a, c, g, or t
  misc_feature (468)..(468): n is a, c, g, or t
  misc_feature (473)..(473): n is a, c, g, or t
  misc_feature (489)..(489): n is a, c, g, or t
  misc_feature (505)..(505): n is a, c, g, or t
  misc_feature (527)..(527): n is a, c, g, or t
  misc_feature (562)..(562): n is a, c, g, or t
  misc_feature (626)..(626): n is a, c, g, or t
caggctatcacctaaggtcctagcctagtttagtgggctgtaggtccagtggcaacttcatttcagagccttcatactattatagcctactggagctcccactggtcctttctggtgcccctttctgggntcgagggaatttccatgggctgggcacctggtgcctctagatgggcaaaaggagtctcaggcctacggagaccaagagtgcttcccaaactaggctgcctgttatgatgtggttcctattgttgataccacccagtcaccctacatgtctgtcagtggaagtngaggagaataccaggctcaccaggaagcaggaggaatgagtctatgtttggctcgtcttttnggtgccaagtttnggatcaggtaataccaangcctaaggtcaccttctcctggttgggatgccgtgaatgggtaagacatnctaacctctaatggtttccncccagtctttangggtnccctaaccaaattccncctttccggtttccancctttccagagtttcccccttngggtaaccccttggcaattaattccaagactttanaaatggcatttaactgagaaggagagaaagccgaaatggatccaagccaatttgtctggaccanaaatccttcaaaattaatttt

SEQ ID NO: 304295 - DNA, 350 bp, Homo Sapiens
gggtgacatataacttaagtgtggtaaagtatataaagggcacagatcttaagtgtaccaggtaatgaattttcacaaatttatgcatccatggtaaccgctaatcagagaacatttccagcacccagacgtcttccttgtgctctttccctgtcaattcccctgctccagaagcaaccacccatctaatgcctttcaaaaacaggcacagagattcgttgtgtctgtttttgaacttcatgcgaatgaaatcttacagcatgtcttccgtgtgtctggcatctttagctctttatgtctggcaaagtcttttatgtcattctatgtagcaggagtttagaaccaacttt

SEQ ID NO: 304296 - DNA, 372 bp, Homo Sapiens
  misc_feature (77)..(186): n is a, c, g, or t
  misc_feature (323)..(323): n is a, c, g, or t
  misc_feature (355)..(355): n is a, c, g, or t
tgggttgaaccgattttcctgtctcagactccggagtagttgacattacagacgcgcacaaccatgcccggctaatnnnnnnnnnnnnnnnnnnnnnnnnnnnnnnnnnnnnnnnnnnnnnnnnnnnnnnnnnnnnnnnnnnnnnnnnnnnnnnnnnnnnnnnnnnnnnnnnnnnnnnnnnnnnnntcataagccacacttcctggcccaaagaatattcatttctttactgtttaaattttgagaaaatataatggaaaaccaaaaaaatcttccccccaatgagaaatcatctttcacgatgataatagtgaaagaaattnaaaaaccacattattaaataagtaaagccctnaaccagaatgtgatggg

SEQ ID NO: 304297 - DNA, 328 bp, Homo Sapiens
ttagctgtctgactctagtctaattatacatctaggcatttgataatgaatacagaaagagtattaaaactaggaatatatggatgaaattaaaaatactcattttacctaataaaaaaatcatgttcttagatgacattctcattgttgtgatgacatcaattcttgccaaattcaggtatacatgtaagatgttaaggcaaatattgccattttttttctcatttagagtagtttattatgctaagggcctgggaaacactttagattcagtaaaaaaactacctagaagaataaagcagaatgaatactagaaaaagactgaaag

SEQ ID NO: 304298 - DNA, 525 bp, Homo Sapiens
  misc_feature (471)..(471): n is a, c, g, or t
  misc_feature (476)..(477): n is a, c, g, or t
agttcctcggttgcactgaccacattttaagtgctcagtagctagtgggtcctgtattacccaggagcagactatcctttttaatagttgcatacgtttatttgctgataatgtttattgagtgcttactatattgttggctactgttaatcaggcttcatgtgttacctctattaatccctacaatgattctaaaagatattattctaaatgtacagaagaaatagaaacttagtgcagctattaaaaagcataactaagtcttaaacctaggtctttgacatgaaagatcatgctgtttccctctcctttaatgtggctctgttatgatttatttaatcattgacctaccagtagatattttggttattgtttattagtggaaattgcaaaccatgcttcagtgaccatctttgtgagcataacttacataattgtttcgtaaaaaattcaatgagaatacacatttcnaatanncattgccagtcatggatgggctcatgcctgtaaatcctaggacctttg

SEQ ID NO: 304299 - DNA, 448 bp, Homo Sapiens
  misc_feature (340)..(340): n is a, c, g, or t
  misc_feature (410)..(410): n is a, c, g, or t
tttcacatgtcaaatgctaacatttgggcattctgcctcatcattttggaataagacaagaccttaagggcaaatttcactaaaacagcttccaaagtttccatgtaagtctcttatttatcatgtccaaatttaagacaaacatctctcatttcaagcgcacatttcataaaggctctgttttttcctcactccacagattctaatgccttttacaacagatgtgagtgatacagtactgagtgaatggcttcaaattggcctcttttatataaatcgaagaaacagccaaaaggcagtgatattccaaggcccaactatataactcttccaaagatgngcttgaaagactggcccaaagaaggggggactactggggtcacttttggtttcccggtggtttggaatcngggaattcctaatccaaggtaccctgggtaaccccagc

SEQ ID NO: 304300 - DNA, 315 bp, Homo Sapiens
  misc_feature (47)..(47): n is a, c, g, or t
  misc_feature (96)..(96): n is a, c, g, or t
  misc_feature (122)..(122): n is a, c, g, or t
  misc_feature (134)..(134): n is a, c, g, or t
  misc_feature (141)..(141): n is a, c, g, or t
  misc_feature (154)..(187): n is a, c, g, or t
  misc_feature (200)..(200): n is a, c, g, or t
  misc_feature (205)..(205): n is a, c, g, or t
  misc_feature (214)..(214): n is a, c, g, or t
  misc_feature (225)..(225): n is a, c, g, or t
  misc_feature (245)..(245): n is a, c, g, or t
  misc_feature (275)..(275): n is a, c, g, or t
  misc_feature (283)..(283): n is a, c, g, or t
tcataattttgaagaccactttgaatggctggcagcaatgggaaaanggagaaggggacttcccaaagctgggttcacatcttgggggggctgaantggagagagagtggaaagaccttaangcccatgttgtnaaggggnaagagacattagnnnnnnnnnnnnnnnnnnnnnnnnnnnnnnnnnngagatgaggccantaagntttttaacncccctggggtnttaaaacccaacctttttgnatgttgccgtattgggaatttggaaaaaangatttggngtgttaattgagcccgggagtttagggttaaa

SEQ ID NO: 304301 - DNA, 333 bp, Homo Sapiens
gtctgtgaccatgtattttcaagtagcttgtcttcaagctcactgattctttcttctgcttcatcaattctgctgttaagagactgaaacatccttcggcatgtcaactgcatttttcaaatccagaatttctgcttgattctacttaatcgtttcaatctctttgttaaatttatctgaaaagattctgaattccttctgtgttattttgaatttctttgactttcctcaaaaccgagttccttttgaattcggtctgaaagttcacatatttctgtctctttgggattggtccctaagtgctttaagttaagttttggtgaggtcatggtt

SEQ ID NO: 304302 - DNA, 286 bp, Homo Sapiens
  misc_feature (150)..(152): n is a, c, g, or t
gactttcagatatttgataacctgtttcacaacactaggcagttgtcagctaaatagccataaatttagatattaaatgaaacaacacaggtgaaaatcaaatagcaaaatttacatcataaggtatataaagaaaaagtcccggggacnnnctagagggagattgatgatggatgccaaatcaaacataaaattatagaaatctatcataggattgtataaggagaccaattttatttagatagggactatttattttttaactggatctctaagctctgggcag

SEQ ID NO: 304303 - DNA, 503 bp, Homo Sapiens
  misc_feature (277)..(277): n is a, c, g, or t
  misc_feature (293)..(293): n is a, c, g, or t
  misc_feature (358)..(358): n is a, c, g, or t
  misc_feature (381)..(381): n is a, c, g, or t
  misc_feature (407)..(407): n is a, c, g, or t
  misc_feature (452)..(452): n is a, c, g, or t
  misc_feature (470)..(470): n is a, c, g, or t
atagttaaggcagaatagaaaagtgtgtgcgtaaaatatcatattatcactttccttgacttttctttcagagagttccatggaaagattttgtcattcttccttttttgacatttgttactttttaggtaatgctctgaaagctgtacctcactagaataaaaccaaaactaggttatataaaaccatgagcatgatatttatcgacacctcagctgaatgcatcttacttaaccttgaaagtcagtcccatgtgcttcactctcataacggggtnggggcggtgtcagagnattatttagaacaaaacttgaggagaagttcagtccccgtgtaaaaatccactttaaaaagggcntttaaaaaagggatttccccganggttgggaaatgagccccccaggaancctttaaaaggcagtcctacaggttaaaatacccaggggaaaggntaaaaagattatttaacngtggcaagcctttagtttaaggtggagaattga

SEQ ID NO: 304304 - DNA, 145 bp, Homo Sapiens
ggttgggggtaagaaggagaaaaggaagggtataagttatttttaagacaagcaatacaacagaaagaaaaatgtatttatagtcctgtcagtctattttaaaaacagatggctataatctatagttttaaatgtacacaggttg

SEQ ID NO: 304305 - DNA, 171 bp, Homo Sapiens
aacccctctccccagaggatgccttgcatggtgaggtcaaagtacaagatggtgccagttactgagatttggcagaaatggtcttggggtagtcgcgggagtttggaagtgggggtaaggttgctggaaggtttcaaggtctctcatctgctccctctccgtttcccatga

SEQ ID NO: 304306 - DNA, 175 bp, Homo Sapiens
cttttgaactacatatcattaataaaatatactataatgaaaaataaaatatttatcggtattgataacactctcacaattttagaactacttcatgttgcacaataaagcagtgtaaatacaataaaacatgtttatgataaagtattaaatgttcttagaaattaaggtttta

SEQ ID NO: 304307 - DNA, 470 bp, Homo Sapiens
  misc_feature (21)..(21): n is a, c, g, or t
  misc_feature (129)..(191): n is a, c, g, or t
  misc_feature (349)..(349): n is a, c, g, or t
  misc_feature (449)..(449): n is a, c, g, or t
  misc_feature (459)..(459): n is a, c, g, or t
tatgtgagtggggcaacaaancagctatttctggttgaagcaacttcacttagtgatagtttctttcaaatgcagtaatatatgaaagattataaaacactgtggacttttatgttatttacttaaaannnnnnnnnnnnnnnnnnnnnnnnnnnnnnnnnnnnnnnnnnnnnnnnnnnnnnnnnnnnnnntctagttaaacttacactcttccttggaaaactgaactttaaaacaaagaagtaaggaaataatgtcaggctagctaaaggaagtaccacaaaattcaagtatgtttcttaaaagacactaacagatgtttgttcatgccttatcaatttttatttanacatttaatcctaacatggtagctatttgggtttcaaaaccaaaggcaggatgggtaggaaatgggtgatttagaatggtgggaagatagactgctatanatgtggtggnctaacgggtta

SEQ ID NO: 304308 - DNA, 369 bp, Homo Sapiens
  misc_feature (33)..(33): n is a, c, g, or t
  misc_feature (38)..(38): n is a, c, g, or t
  misc_feature (44)..(44): n is a, c, g, or t
  misc_feature (46)..(47): n is a, c, g, or t
  misc_feature (104)..(104): n is a, c, g, or t
  misc_feature (175)..(175): n is a, c, g, or t
  misc_feature (187)..(187): n is a, c, g, or t
  misc_feature (191)..(191): n is a, c, g, or t
  misc_feature (195)..(195): n is a, c, g, or t
  misc_feature (199)..(200): n is a, c, g, or t
  misc_feature (204)..(204): n is a, c, g, or t
  misc_feature (211)..(211): n is a, c, g, or t
  misc_feature (216)..(216): n is a, c, g, or t
  misc_feature (224)..(224): n is a, c, g, or t
atggaaacaacagctctttctttttcactctgnttcantggttnanntactgtttaagttttaaagtacagtaacattacaatggcatgaacaggcttgggaangaatacagctgactcatagtaagcataagcattctggaaaatatccaactagcaatggggattcagtatgncctggcttcagncagnaagncctnnaggngggaggnagacntggaatcngtgaggtgggttgctggagggcagggtaaaagtgcttctgttggtttatgatcatcgatgaaaaatgtttcctgattagatcttttctccctcggtcctagagaatattttagtgtgaataaaggataagaaaaggctggatgtg

SEQ ID NO: 304309 - DNA, 326 bp, Homo Sapiens
  misc_feature (27)..(27): n is a, c, g, or t
  misc_feature (91)..(91): n is a, c, g, or t
  misc_feature (122)..(122): n is a, c, g, or t
  misc_feature (128)..(128): n is a, c, g, or t
  misc_feature (130)..(130): n is a, c, g, or t
  misc_feature (143)..(143): n is a, c, g, or t
  misc_feature (147)..(147): n is a, c, g, or t
  misc_feature (157)..(157): n is a, c, g, or t
  misc_feature (159)..(160): n is a, c, g, or t
  misc_feature (169)..(169): n is a, c, g, or t
  misc_feature (171)..(172): n is a, c, g, or t
  misc_feature (186)..(186): n is a, c, g, or t
  misc_feature (191)..(191): n is a, c, g, or t
  misc_feature (193)..(193): n is a, c, g, or t
  misc_feature (195)..(196): n is a, c, g, or t
  misc_feature (198)..(198): n is a, c, g, or t
  misc_feature (200)..(200): n is a, c, g, or t
  misc_feature (202)..(281): n is a, c, g, or t
ttttttgagacagggtctcactctgtngcccaggctttagtggcacaatcatggctcactgcagccttgacctcccgggctcaatttatcnccccatcttagcctcctgagtaactgggacnatagananttgtgaccatgantggncaactttcantnnatttgattngnnatagaaacaggganttganangnngntnannnnnnnnnnnnnnnnnnnnnnnnnnnnnnnnnnnnnnnnnnnnnnnnnnnnnnnnnnnnnnnnnnnnnnnnnnnnnnnntgtgcctggcccaatttctaagaaaggaagtaaaatttaagagtc

SEQ ID NO: 304310 - DNA, 125 bp, Homo Sapiens
  misc_feature (50)..(50): n is a, c, g, or t
gatagcattcaaggtgctgtccaaactgactgtgatggcaccctccaganagacagcgatgccacatgttcaagatggcagaatcactatcagcttcaattcctgaatgactgcagagaaaattt

SEQ ID NO: 304311 - DNA, 398 bp, Homo Sapiens
  misc_feature (71)..(71): n is a, c, g, or t
  misc_feature (234)..(234): n is a, c, g, or t
  misc_feature (260)..(260): n is a, c, g, or t
  misc_feature (375)..(375): n is a, c, g, or t
ttgggttatatttttggatgctcagagtttttgtcattggccatattggatcctgtattctttaacatgancctttgtctttggtaaattcttgctttctcacgtagcaacatgtcctaggcttattatgtacttttacttctccagacgtagaaaatagctgttcttcaaattatagagaatcatattttggaaccacatatctgggattctgagttggcacagcctctaggntttttttgtagacataggaagtatcngtgtatgaggaaaaataaccatcttggcagtaccccagagtttagccaaactgtgaagtggatggcataagtcctccagaaggctccagggagtctgcccgatatctaactccanctgcaaggagtgaggattctact

SEQ ID NO: 304312 - DNA, 386 bp, Homo Sapiens
  misc_feature (34)..(34): n is a, c, g, or t
  misc_feature (57)..(58): n is a, c, g, or t
  misc_feature (66)..(66): n is a, c, g, or t
  misc_feature (78)..(78): n is a, c, g, or t
  misc_feature (93)..(93): n is a, c, g, or t
  misc_feature (105)..(107): n is a, c, g, or t
  misc_feature (123)..(124): n is a, c, g, or t
  misc_feature (129)..(129): n is a, c, g, or t
  misc_feature (327)..(327): n is a, c, g, or t
  misc_feature (361)..(361): n is a, c, g, or t
tacggctcacagcttttcggcagacaggctcatntatcttcatgggcttttattatnnaagatatntacatattatanatatttacaattctntcccaccaccannnccaacaaaatttccannattgntcatgaatttcttatgaaccgaagacactgaaatattcactgttctcccctagtctgtctggtctttttctgttttgtaattcgcccttctgcttagttcctccccgggctcatttacacatccataggcctcatttctgctgttctaaagagtctttatcgcttcaaatcaggagcttctgtgcctgtcctcttttnctttgagctaaatctctaaaactgtctagttttntttttctttccctctcagtttattc

SEQ ID NO: 304313 - DNA, 124 bp, Homo Sapiens
  misc_feature (105)..(105): n is a, c, g, or t
gtgtttggactcaggcttaattttaagtcttatgaggtaaaattatcaaggtagctggttatattctcattactactgtgcagctaaaatttgagaaaagatganaaattcacatttgtcttac

SEQ ID NO: 304314 - DNA, 425 bp, Homo Sapiens
acaagtaatgagtccagcagcccccatttatcacccctggagattcttttacactttgatgtgaaaagagtcagggcccattgtgatttcaactactccaacagcagtcctttcatttgcaaacgaggccctggccccagttagaaccaactgtcagaaaaaaattcattgcctttccttccaattatttatcagagacagagaagagaagctggctttaagacatcgctcaagaaaaggttcccagcacacccctaatgcattccttaccttccctggttctttcagcccagaatgcccctttcccaaattccacagctcatgaaagccaacctctggtttcaaaccatcccatctggaatgactttctcctttcagctttacacaaaacccaagtggcctaacgttacttatcgtttaggtgt

SEQ ID NO: 304315 - DNA, 408 bp, Homo Sapiens
  misc_feature (199)..(199): n is a, c, g, or t
  misc_feature (258)..(258): n is a, c, g, or t
  misc_feature (348)..(348): n is a, c, g, or t
  misc_feature (396)..(396): n is a, c, g, or t
ataaagaaaaatggtttatttagcttatggttctataggctgtacaagaagcatagtgccagcatctgcttctggtgaggcctcaggaagcttacaattatggcagaaggcaaagggagagctagcatatcacatggcaagagggaacaaaagggagagggaggaggtgccaggctcttttaaacaactagctataggntgaactcatatccatgtggacggacaccaagccattcatgagatccaccccataatccnacacctcccactaggcgccacctccaacactgggggtcacatgtccgtgtgagattttgagggaacaaatatccaaatcatattaccacnttttgtttatccattcatccactgatgaacatctgggttgtacgtatntcttggttattg

SEQ ID NO: 304316 - DNA, 432 bp, Homo Sapiens
  misc_feature (34)..(34): n is a, c, g, or t
cgtatgcaatgtcagcagcctcggtgttacgaanacacggcaggcacacacggtatgttgtagaagtggtgcttgtatattttttaactaaactttttatttagagataattgtagattatcatgcggttgtaagaaatgttacagaaagagcctacgtatccattactgttttcccagtattaacatcttgcaaaactatagtacagtatcacaaccaagttattgacattgatacagtcaagatacagaatgtttccatcaccacaaagatcttaaatgatgcccttttatagccagcccccactgtttctctcactcctaccttctcattaatccttggcaaccactaatctgttctccacttctataactttgaatttcactatgtcatataaacagaagcattttagtatacaatttttggggactg

SEQ ID NO: 304317 - DNA, 134 bp, Homo Sapiens
tagtcggattgattattctcctgtagataaccatttgtccctgctttttctgttaagtgttcaccacttgtatcattggctggcaatacctggtttgtcatagtttcacattaccttaaacagatgcccagact

SEQ ID NO: 304318 - DNA, 444 bp, Homo Sapiens
  misc_feature (20)..(21): n is a, c, g, or t
  misc_feature (48)..(48): n is a, c, g, or t
  misc_feature (50)..(50): n is a, c, g, or t
  misc_feature (111)..(111): n is a, c, g, or t
  misc_feature (335)..(335): n is a, c, g, or t
cctatagtgagtcgtattcnntaaaagctacgcatgttctcctgtaancnttaagtcatgtctagattacttaccatatctcatgcaatgtaaatgctgtgaaataattgntattttgtattgtttagggaataatgacaaggaaaaacgtctgtacatgttcagtacagacccaaccacccatttttttcccgaaatatttttgttccgaggttggttgaatccacagatgtagaaccacggataggaaggctgactgtacttatttctttgtgatttgcttctttctaaaagtgaattgctaaaaaggttccacttgactgagcctcagcggnatcgtggcactgttgcacgtgtgtctaaatgggtgtttggtacctttgttttccttaacctggatgaacaaggacactgactctcatggctgatggggagctaaagtag

SEQ ID NO: 304319 - DNA, 325 bp, Homo Sapiens
  misc_feature (46)..(46): n is a, c, g, or t
  misc_feature (77)..(77): n is a, c, g, or t
  misc_feature (81)..(81): n is a, c, g, or t
  misc_feature (105)..(157): n is a, c, g, or t
aagatcaaaaaaatgaagtcattaagtgtctatttgatgcttttanctaatcaaataaatatcactagttttgttgntgtnttgagatggggtttcactttttcnnnnnnnnnnnnnnnnnnnnnnnnnnnnnnnnnnnnnnnnnnnnnnnnnnnnntgggctcaagtgatcctcccaccccagcttcacaagtatgcgggactacaggcttatgccaccatgccaggctaataatagttttgactttgatcaactgtattacccatttttaatgttaacttttctaatccattattagattttgtggggtgttttttagaggaa

SEQ ID NO: 304320 - DNA, 145 bp, Homo Sapiens
  misc_feature (80)..(80): n is a, c, g, or t
  misc_feature (95)..(95): n is a, c, g, or t
  misc_feature (113)..(113): n is a, c, g, or t
  misc_feature (127)..(127): n is a, c, g, or t
gtgtgacccaccatgtctggccttatcctttctttactacctcggaagtcaactccatgacaacacctttaccttttcantactaactggattgnttccataatctcaatttnaagtagagataccnaatcaacttacgatgggg

SEQ ID NO: 304321 - DNA, 303 bp, Homo Sapiens
  misc_feature (268)..(268): n is a, c, g, or t
caactgacagataaaactgtgtgtatatgtcatgtacaacataatgttttgaagtatacgtacattgtgaaatggttaactctagctaattaaaaaatgttttacctcacatagttattttagtaatgagaacacttaacatctgctgtgtttttcaaaaacacaatgttttccaagattacaatgtcattaactatagccaccatgctgtccaatagatctcttgaatgtattcctcctattcaactgtaattatgtatcctttggnccaacatctccccaaacctccttcaaccccaacca

SEQ ID NO: 304322 - DNA, 282 bp, Homo Sapiens
  misc_feature (75)..(75): n is a, c, g, or t
  misc_feature (88)..(88): n is a, c, g, or t
tttagagattcagtctgatttatttgaagataccttttacatttgttttaagataagctgtgaaataaatatttngtataaatgtatngcaaggtttggaggtaaacaagcaggtatggtagatacattcagccctggctttcgcagagcgtgagttcagaagaaatacaggactagactgtgagacgctctgataagtgatacatttctctgacatttaccagttctacgcactgactgatgtttatccagagtaaacatactgttgagaattatctattt

SEQ ID NO: 304323 - DNA, 304 bp, Homo Sapiens
  misc_feature (139)..(139): n is a, c, g, or t
cacttgtacaagttctaatggcaggggaggagcgaagggtctcattgaattgaactgtatttgccctgatggaaaccgatgtcaaaacttgtgttaattgggagaaaaactgaggaattacaacctaattccacaaganaaaattacaattcatgaagtacccttaaaagcaaagtgggaaaatgttttaaaattaccgatctcaatagaattttatttttattaatataagcaccccagacttgatacttctagatttcagatttcaagcatacaccgcccaaatttatcatattgctattct

SEQ ID NO: 304324 - DNA, 292 bp, Homo Sapiens
  misc_feature (38)..(38): n is a, c, g, or t
  misc_feature (84)..(84): n is a, c, g, or t
  misc_feature (114)..(114): n is a, c, g, or t
  misc_feature (270)..(270): n is a, c, g, or t
gctgaaaactactaatagttggtactttgttttcaatnaactgtttttaaccaagataatgactttggtattaaaacccctttnttttttaaacccgtgtagtacaggaagaanagtgaattggatatgattttgaggatatgggcatctcaaaataagctccagtggaacaaacaatacccttaaattctgattttgtttcctttatgtactttgatagttacttgttctggtagcagtatagcatagtgggtaataggcaaggggctnctgggagccatactagggttgg

SEQ ID NO: 304325 - DNA, 148 bp, Homo Sapiens
  misc_feature (81)..(81): n is a, c, g, or t
  misc_feature (85)..(85): n is a, c, g, or t
caggaaccaaaccctgaagtggcaaacacagcaaatgggaaagtgaggcagtatttctccaggagaggagctagaaggtantaantaaataactgcgtggctttcaatgtcttattgcttccactcatctcagagtgggaaaagttat

SEQ ID NO: 304326 - DNA, 290 bp, Homo Sapiens
  misc_feature (42)..(42): n is a, c, g, or t
atgaaatttacataggtaattgtggcgcagtgagcccagggntcaacggtgttagcagtcatcaacagtgctatttgaaactgtgggtggatgaagaggtgaactcaacaccacaaatatgacagagcagtaaccaccatggaaaagaaaagagagcttatgtgtctaggacaccccaagaaatctcttctgaatgaatgatggcaatgaaatagccattaacagagggtaggctggtttgtgcagggttggaggcttttccaaaaataaataactttcaaaaaatctca

SEQ ID NO: 304327 - DNA, 431 bp, Homo Sapiens
ttacattttggaactttaagctgttttcactttttcttcaaatgatcttagagttgatataaagatatcttcatccaacaggaatgattgacccaatcatttatagtagctaggcagcatgaataatcaaaacatacagtttacctagcatcttcagctaagcccttattttcagcttctgtctgcatctcaccctttcccgcagctatttgcttgtgacatatattttggagtccatctgtggggttttaatggctttgtgttctgagtgtttgatttcttcctgtccttgcggaagtttcccgaataccgtgttctttcagtggtccacagaccttttgaaactactcaggttgagaacaggagagcctgaaacttcagatggaaaatgtcaaatgtgatattttgccagtgagcatccctgggcattt

SEQ ID NO: 304328 - DNA, 348 bp, Homo Sapiens
  misc_feature (306)..(306): n is a, c, g, or t
cagccttcctccctccaatgactcatacccaacagatggtgcaaatagcttggcatcaattcactgaatcagtgttgggggaaaagccttgccagacgactgatggtttctttgaagttgttcattctggcaacaatgcacagctaatagaacagccttggtgaacaaaaagatatgaaactgatgtttgagagaaaatctggaacataggggtctatatctgtcacagtgcttgcaattattttctaccaataatatcatttttattattattatctaccagagctatgtaattctctcacttgncattcctaatacttggtattaaaataagcctattaatcctgc

SEQ ID NO: 304329 - DNA, 499 bp, Homo Sapiens
  misc_feature (435)..(435): n is a, c, g, or t
  misc_feature (485)..(485): n is a, c, g, or t
ttaacatctgctagagtagttaagaaatgtgtacaaaatcatactatcaaggcaacagtcatcctaaaagtgctccaagtaaaaattagattaaaaactacagaactgagaaaacattttagctcaaagatttaaagggaagatggcctatgaaccaggccttagagcataggtaggatctgttaaataggcagagacgagtatagagggtgggggctttgtgcgactaaatggagggaaagtagaaaaggaaaacatttaacaagtaccactgaggtagcatgagaagcactcaacagaaagcagcatgagctgagaacttcaagcaaaaagtggtcaatgattcaacttgtggcatagatgaaggaacacaaagccagataagtcactgggagtttggaattagtgtatcactgatggatcttccaataagcntaggtccagtgcctggtagcagaagctagacagcagctggtttccggaantgggcctggccgtc

SEQ ID NO: 304330 - DNA, 448 bp, Homo Sapiens
  misc_feature (256)..(256): n is a, c, g, or t
  misc_feature (271)..(271): n is a, c, g, or t
  misc_feature (425)..(425): n is a, c, g, or t
tttttttggcaaaaagccctttatttcgacattaaagatttggaggtacagtttgctgtacagaagttttcacccctccataatttcaccagatatagagtgtgcatccctgacattgaaactgaaggctttatggtttcatcttctaagatagattcccaaagagagttggttcacctgagtcccaggggcttgacagtggacagtttaaaacattgatgaatctttattactataaaagggttcgatttaggcnaaacaacatgtaggnctttttatgtcctagaacccagtgacttcccgtctggtctgtaatggcatgaaggcaggtgactgtagaagatcctctcgcactaggcacacagaatgttttcttgcacccgggccctgcctggacacccctgcctgatggcctggaccactgngcgaaaaaccttctccggcccca

SEQ ID NO: 304331 - DNA, 328 bp, Homo Sapiens
  misc_feature (177)..(200): n is a, c, g, or t
  misc_feature (307)..(307): n is a, c, g, or t
agttcgtatttttaatttttccccgtgagcgctggggaagacagacacgaaacttagtcttagatgtagaatagacttaataaaatatttaaattcatggaaaacggctggtgcttttccccagcaagggttttgcaacttattttaatcacaaagctgacagtttttcagtccttnnnnnnnnnnnnnnnnnnnnnnnncctcattcttgttctctaggaatgacaagattgaatatataagaaaaaagaaatgtccagctatgcacttgagttcctaaaaactattttgactaagatctccctcngaccccccctcctcaattttt

SEQ ID NO: 304332 - DNA, 475 bp, Homo Sapiens
  misc_feature (443)..(443): n is a, c, g, or t
ggctacaatagcttctgcagttacagcatttgaattcacaaagtattagttgccaaaaggaaatttcttttaaggagctagtatatgagccatagaaattgtatactaaaactcaaatagagtacttgcctaagaatattttcaagtcgatttttaaaacctctctactgttagatgaaaatagagaatagctacctcaaagacatatgtattttccactgaaaggtgacaatatcaaaactcacttgtaagttattctctattttcagaatataaaatgacatttcaaggctctcactaaaattgctgtagtcatagccaatcccacagaaataaaaccatctaaggtaatgattttcaatctatgttccaaaaaaggagctggagtattccaattctttacccgtgatggcatttcaaaaaactattcccttcctatttcntggactaacattactgtgaactgctaaaactc

SEQ ID NO: 304333 - DNA, 322 bp, Homo Sapiens
agatttaatgttgtaggaaattgcatctgtaataagaactccacgcaatgtaatatagcacatgaacatttgcaaactattttacaggttgaatatatttcattcatcttgttaaaaataagtatgtggtctcccaagagatttgtcaatgttttttcttctacttgtgtgaaatttttgattatattttactttgttattagacacaggtttcaagaactctcaatgaggactatttcaaagagtaatggcaatgaaattggtagttgatctgtttatcatactgaagaccgctagtgtataatgtgcctacatttataag

SEQ ID NO: 304334 - DNA, 465 bp, Homo Sapiens
  misc_feature (80)..(151): n is a, c, g, or t
  misc_feature (289)..(351): n is a, c, g, or t
  misc_feature (418)..(418): n is a, c, g, or t
  misc_feature (453)..(453): n is a, c, g, or t
ataataaagaaaacttctaaattacatatggggcaaagaagaaattatattgaaagttagaagatattttgaaccaaacnnnnnnnnnnnnnnnnnnnnnnnnnnnnnnnnnnnnnnnnnnnnnnnnnnnnnnnnnnnnnnnnnnnnnnnngtctgtacactatactcatagtatacatacccatatactataattatagtaaactatactataaaactataaactataatttatcctaatatatagtttatactataactgtatagtttatactcactgtatagtttnnnnnnnnnnnnnnnnnnnnnnnnnnnnnnnnnnnnnnnnnnnnnnnnnnnnnnnnnnnnnnngtgtgaaaaagtgtacataattgtagacgagtaggagacagacagaaatgaatgtgtttgtgactcncagaatcactaaaggattcacatccagatacttcnacagacttatta

SEQ ID NO: 304335 - DNA, 280 bp, Homo Sapiens
  misc_feature (162)..(221): n is a, c, g, or t
  misc_feature (238)..(238): n is a, c, g, or t
  misc_feature (264)..(264): n is a, c, g, or t
atgaaaggatacctgctttacatgcagatggtgtgaaggttacccatcaaaatgtttatgaatagttaacacaatagaaatgttcactgttagcataacagtgtacccttataacctattaagtaaactcagtgctttctttatgaagctaaattaacaacnnnnnnnnnnnnnnnnnnnnnnnnnnnnnnnnnnnnnnnnnnnnnnnnnnnnnnnnnnnngttggtggtgccccaanagggaggcttaaaaaaagccccctcntgggatcattgcatgg

SEQ ID NO: 304336 - DNA, 441 bp, Homo Sapiens
  misc_feature (420)..(420): n is a, c, g, or t
attcttaaaggtttgggaaaattagaggtagaacataccgtgagcagcaatctctgggttctggtcattaaaatatgaatttgctaattatacctatcccaacagggggattgagtcaagggaccttgcccttttctggactgacctgcttgattattgccctaagtgattgttagttaggttgcccattggaatctctgccttctggctttaaaaatttttccagattggagtaaattgagctgactggttttgagctttgtaatgttaggggaccagcaatgagttcctctgatccatccaatcattagtagattaaatctttgttttaaacccatcacagtccactattcatccctttttaaaataaccatttaaaaattttctaccctgaattgcatttggaaagggatgggtccnagggaacaccagggagaaaat

SEQ ID NO: 304337 - DNA, 251 bp, Homo Sapiens
agggataagttggttctttgggtttttcaagatttggcctgtttcaaagataaattcacattttacagaggtttgcccatggttatacacaaatggagtacactgatgttctcagaggtgatggaaaacttggtatagctaaattccctgatggaaaatttccagatccacagggaaaggtgagatatttagatacagttaccagagaagactatttataagctctgtttatgaagttcaaaggaataaac

SEQ ID NO: 304338 - DNA, 381 bp, Homo Sapiens
aatctgcaaatcttctagtttataaaagaacaaatgacggttagtgtgacagcagctgactgggaattaagaaaacctgacttgaaatcaagtataattgtcccagggaatggaggagctaagactaaacccgcattcctgaggaggttgttgggccagactaaatttttatcctggcttgcctaacttcctcccctgaccaaagccagtctgaatttggcattgactttggaagtagcaaatttagaagtttcagtagatcagggcaggaaagtgacctaatttatgtacaaataaaaataggaataatgaagcaaaaatataggctgtgtggggaggttgtcatatatctgaaaattaaaacatgtgattcaaaatgtg

SEQ ID NO: 304339 - DNA, 157 bp, Homo Sapiens
tcctgagtaggtacacaccaccatgctcggctaattttctgtagagagacaatctcactatgttgctcaggctgggctcaaactcctggcctcaggaattctcccgtttcagcctctcaaagcactggggattacaggcatgagctactatgcgtgg

SEQ ID NO: 304340 - DNA, 148 bp, Homo Sapiens
  misc_feature (124)..(124): n is a, c, g, or t
accacacgtggccaacataccttcaacttttattttggagatttatatttaacttggtcataccactaatgcaattttcacctttcaaaattcctaacttttaataacatgatttttcaaatcnacagtaataagtccagaaaagtaa

SEQ ID NO: 304341 - DNA, 439 bp, Homo Sapiens
  misc_feature (287)..(356): n is a, c, g, or t
  misc_feature (366)..(392): n is a, c, g, or t
  misc_feature (400)..(400): n is a, c, g, or t
acaaaagtatatcaaaggatttgtataaagagattctgaaaagatgctttctaattaaacaatggttagttacggacaatcaacattaattgaacaacttactttttaacataaagcatggaggcctagctcaaaaccgttttaaaagagagccaaaccttgcctgcaataaactcataggccatcagacataagcatacacatagataaatttctaatattaactctctaatctcaaattctccttactccagtatacataggtaacttcagaaacctcaagaatnnnnnnnnnnnnnnnnnnnnnnnnnnnnnnnnnnnnnnnnnnnnnnnnnnnnnnnnnnnnnnnnnnnnnnttcacttcannnnnnnnnnnnnnnnnnnnnnnnnnncaattggngaaaaagggggaaaggtttgggaagaggaggggaatttg

SEQ ID NO: 304342 - DNA, 155 bp, Homo Sapiens
taaaaacgaattcagctgatttgcgctgccctaacatgactgctctgctctgcatctcaactaggaagcagttttgtgatacttgtaaggtttcctttagcctgtgtctgcagggagaataatatctcttttttcttgtgttggtttccttacat

SEQ ID NO: 304343 - DNA, 456 bp, Homo Sapiens
  misc_feature (113)..(113): n is a, c, g, or t
  misc_feature (178)..(178): n is a, c, g, or t
  misc_feature (245)..(245): n is a, c, g, or t
  misc_feature (250)..(250): n is a, c, g, or t
  misc_feature (358)..(358): n is a, c, g, or t
  misc_feature (368)..(368): n is a, c, g, or t
  misc_feature (389)..(389): n is a, c, g, or t
  misc_feature (405)..(405): n is a, c, g, or t
  misc_feature (420)..(420): n is a, c, g, or t
  misc_feature (426)..(426): n is a, c, g, or t
  misc_feature (431)..(431): n is a, c, g, or t
aaaaccaaacaagcaaataaacatcaaaacaaaaacctgttaaagcaggttgtgctgtgagaagaacttttctgcctggcttctgctttataagcctataagatagactggangccctaatttaagactttttggttaaaaattccatggataccgagttggagttaattaatctggnccattttaaaaccggggcagtggtaatttttaatgggttaattggaatgcaaggaggccaagattanctganggaaatgggtagggattcccttgactgggacagcctttaaggacaagtaagtctagttgaaacaggggcaggataccacccattccccagcaatcctttttggtttgnaatttccaantcattttcccaaatggggganagttttaggaattccnttggggaaaagtggnaattanttccntaatgaagacgggtccgggggaaag

SEQ ID NO: 304344 - DNA, 333 bp, Homo Sapiens
cattcttcctcccaccagcctatcctattcccttctctccccccacaaaatctagctcttctttaaatacatttaaacattttcgctaggacatttcatctatacaggatatgctatattctaactatttcttagtaaacattgaagggagtttcttcctttaattcaagtatgggaaccctgctcaaatatccttttgggtcttcatatgccttctttcaaggcctttgtgaaatttttttccatgcctgaaagccggtggggttttacacaggggactgcgatggctaaatccaaggcagagtgggatctttatctataacccatttggaa

SEQ ID NO: 304345 - DNA, 310 bp, Homo Sapiens
  misc_feature (139)..(139): n is a, c, g, or t
  misc_feature (145)..(145): n is a, c, g, or t
  misc_feature (162)..(162): n is a, c, g, or t
  misc_feature (186)..(186): n is a, c, g, or t
  misc_feature (205)..(205): n is a, c, g, or t
  misc_feature (254)..(254): n is a, c, g, or t
  misc_feature (262)..(262): n is a, c, g, or t
ttagagtacaattggcaatgatattatagtccttttgctccataaaattttgatgatttttctttaacaatagatatgagctaaattcccatctatatcccaacttccattaataaatctatagatccatcttcctaantttttnccaagtctcactttccncttttatttcattacctccctttntttttaggtggtcagttcntttaattcctccaggtatcatttacttcaggggatcctccatgtccagnaatttttnaaaatttatcctaaacccctgggatttcaaccttgatcaaaccctttt

SEQ ID NO: 304346 - DNA, 516 bp, Homo Sapiens
ggtttaatttgtgattaagagacaggggagggaatggagtggtgagaccaggaagacaagttggaacagatcatgtaaatccttagatggaaaactgagaaaggaatgtattttactggtagtgagagtcattgaatattttgcttgagggtataatgtgattgaacctcttataattttctacttccctacataactcatttccttctcttttactcttctgttgctagtaacaaattaccccaaatgttacagctgaaaacaacaaatatttattatatcacaattgctgtgggtcagaaacccagaaacaacttatctgggtaagtctgattcaaagtcttttaagaaggtgcagtcaagtggtttcatcctgaaggtttcacaggggcatgtgggaaattggagatccacttggtaagctcgctcaagtgattgttgacaatcctcagtcctcaccacgtgggtcttccaggggctgtctcagacccaggtagcgacctagtataaggatat

SEQ ID NO: 304347 - DNA, 312 bp, Homo Sapiens
  misc_feature (225)..(225): n is a, c, g, or t
  misc_feature (277)..(277): n is a, c, g, or t
atgagccactgtctggcctattataagtagtttttattaagcaccaaaacctgtaaaaataatggctatggtttaatggttaattcttttaggtaaggatggttagtttgtttaggtaaggaagacatgaaaagatcatgtaataatcgatgctgttctgtgttgttgggtggtgtcttgctagtcttcagttttttgtttcaaagaaaattactgacattaacnaatacctgattaagtagctgactaatggaagaggatcagcatggcaagtgcngagtgaggattaatccatgtaagcactactgaatc

SEQ ID NO: 304348 - DNA, 560 bp, Homo Sapiens
  misc_feature (25)..(25): n is a, c, g, or t
  misc_feature (440)..(440): n is a, c, g, or t
  misc_feature (481)..(481): n is a, c, g, or t
agtgatcatctgagcctttagcgangtaataatctttttgctgttggagggtcttgcaccagtgttgatggctgctgactgctcagagtggtggcttctgaaggttggggtagctgtgacgatttcttaaaataagacaacaattaagtttgccacatcaattgactcttctttcataaaagatttctctgtagcatacaatgttgtttgatagcatttacctacagtagaacttctttgaaattggagtcagccctctctaactctgttgttgctttaacagttatgtttatgcagtattctgaatttttccgttgtcatttcaacagcattcatagcgtgttcaccaggagtagattccatgtcaagaaaccactctctgtgttcatctataagaagcaatttctcatccattcaagttttatcatgtgattgcagcnattcagtcctatcctcaggcttcacttctaatactagttcncctgctattccatcacatgtgcattgacttcttccactgaagtcctgaagcccccaagtcatccatgaggggtggaacc

SEQ ID NO: 304349 - DNA, 359 bp, Homo Sapiens
  misc_feature (97)..(98): n is a, c, g, or t
  misc_feature (304)..(304): n is a, c, g, or t
acaacagatgatgtaatacaaagacgcccccaccccactgctttcccactgcatgctttacatgacatggcacagcttccacgccagcagcttcaannatgtaaagcgaatgagtcccatcaagaccacagcattggctgagcagctactccatgctgggcaccgtcctgggcactggaagtacagcagagaacgaaaccaagaccacaccctccagaagcctgcattccagcaggacagacagacttccatacacagagcaggaaaatgcacagcgtgtcagatgatgatgattactatgagnaaaataaagcaggcaaagagaacaggactatttggatgagggtggtgcaaattca

SEQ ID NO: 304350 - DNA, 203 bp, Homo Sapiens
  misc_feature (34)..(34): n is a, c, g, or t
  misc_feature (36)..(36): n is a, c, g, or t
  misc_feature (40)..(40): n is a, c, g, or t
  misc_feature (53)..(53): n is a, c, g, or t
  misc_feature (55)..(55): n is a, c, g, or t
  misc_feature (80)..(80): n is a, c, g, or t
  misc_feature (86)..(86): n is a, c, g, or t
atgtgtgggtaggtagattcagatctaatctcantncatntatactgattctncnggtaaaatagtagtttcattcaccnataatnttctttaagaaacagagggcaccaactttggaagcgtgtttgcttgatcaaactatgtggaaggtgtgggatgaagaggggaaactatttcctggaagcgaatctggcaccgggagg

SEQ ID NO: 304351 - DNA, 152 bp, Homo Sapiens
  misc_feature (51)..(51): n is a, c, g, or t
  misc_feature (74)..(74): n is a, c, g, or t
  misc_feature (78)..(79): n is a, c, g, or t
ccgagacatataaattaggcagagaaccacagggtacttgctttgcctggngggtggtaggtatgtgagaaaanagannaagaggactgaacaaccaacaggagccaggtatttgctgacggctatcagaggctaaaagcacatgtcaggaa

SEQ ID NO: 304352 - DNA, 158 bp, Homo Sapiens
  misc_feature (47)..(47): n is a, c, g, or t
agtgctaagcagactcaagacacttacccttatgtggggttcccacnattcctgtatttttggcatccttttgggtaagagttttttatagcactttggaagagcttaagagacttggtgtggtactggagctggccatcactggagcatggtcactg

SEQ ID NO: 304353 - DNA, 425 bp, Homo Sapiens
  misc_feature (110)..(135): n is a, c, g, or t
  misc_feature (354)..(354): n is a, c, g, or t
  misc_feature (379)..(379): n is a, c, g, or t
gtctatatgtaaggtacacaacataatgttttgatatgcatatatgtagtgaagtaattactacagtcaagtaaattaacatatcccgcatctcccatagttaaccgttnnnnnnnnnnnnnnnnnnnnnnnnnngtaagagtgcctaaaaaatatggaatgcttcacaaatttgcatgtcatccttgagcaggggtcatattgatcttttctctattatcatcccaatttttagtatatgtgctgcagaagtgagtactgtatatggttcttacaaagaaggggaacgtttgacacctgctttctggtggtaggtgtgatgttgatgtgaattgttccaggagtcagaaaccnatatagatgttgaaagaataaatcngtatgccagggaatggtgtgttaacattatggtagaggccacagtg

SEQ ID NO: 304354 - DNA, 457 bp, Homo Sapiens
  misc_feature (143)..(143): n is a, c, g, or t
  misc_feature (323)..(323): n is a, c, g, or t
  misc_feature (386)..(386): n is a, c, g, or t
  misc_feature (447)..(447): n is a, c, g, or t
tttaatcaatatctgataataatgtggctaaaagaaacctctttgtagttttgaaattctgctgaaaatctccttagccagatcctcccattcattgggcaccttttctattttcccacattatcaaagacgaaaactttctngccattacataacacaggtcatttcttcagccaccccccatagtattttctttactgtccttcagtctctccagcagtctcctcgatgtccttccagtattcactaacatttttctcgaggcctttctaacttctgtggcaaccaggtacaaagtcattgccatttgttttcagtttttngttatagtgaaagtccactttcagataccaaattttagttccagttatctattggttacttangtaaactactccaaaacttaggcacaataaggcaatttaatggaatcccatcattttgggnaatcaataat

SEQ ID NO: 304355 - DNA, 366 bp, Homo Sapiens
  misc_feature (55)..(177): n is a, c, g, or t
  misc_feature (191)..(255): n is a, c, g, or t
gccataaggggcataattgagaaaactggcagaatgtgagtaaggtgaaagcacnnnnnnnnnnnnnnnnnnnnnnnnnnnnnnnnnnnnnnnnnnnnnnnnnnnnnnnnnnnnnnnnnnnnnnnnnnnnnnnnnnnnnnnnnnnnnnnnnnnnnnnnnnnnnnnnnnnnnnnnnnncagaaaaacagacnnnnnnnnnnnnnnnnnnnnnnnnnnnnnnnnnnnnnnnnnnnnnnnnnnnnnnnnnnnnnnnnnaggtcctgataaagcaaaccgtaaaaattttaacaaatacaaagtaaatgaaatgtatttggaaattagtattatttgtattaagtttgaatgattttatatttgtgtaag

SEQ ID NO: 304356 - DNA, 160 bp, Homo Sapiens
atttgaaaacatgcaaagccaacacaaacacattaataaaactataaagcaaagaacggaatgactgaaacaggacagtgtctcccccaccaggaagggggcaacagcaggaacttcgaaggaaatgggtaaccttctcaaatgcagtggggctgtttcc

SEQ ID NO: 304357 - DNA, 427 bp, Homo Sapiens
  misc_feature (316)..(316): n is a, c, g, or t
ctcttatcttctgtgtgtttgtcaaacacaagcacaaacagtttgtgctaactcaaacaaccaacattactgtgtccctggcacattgcccagggaggcaccttcacactaaggaggaaatgcccgacacagcacagaggagcatgtgtgcaaaacaggcaggctgactaagatgatctcagccatgaaggttagacccactcagggagacagagaatgaatcctcatgctctagacatcatgtagtatgtcaccattgcatttagaaatatctcataaataactatggcatcttcattcctttagtataactcanacatagatacagatgggttatgggccctaccagtagttctgtcttaccctgtatccttccaccatatttcttcacccctgtctctcattcaggtaaagatcaagataaata

SEQ ID NO: 304358 - DNA, 455 bp, Homo Sapiens
  misc_feature (221)..(237): n is a, c, g, or t
  misc_feature (370)..(370): n is a, c, g, or t
  misc_feature (380)..(380): n is a, c, g, or t
  misc_feature (397)..(397): n is a, c, g, or t
  misc_feature (407)..(407): n is a, c, g, or t
  misc_feature (414)..(414): n is a, c, g, or t
ctgtagatcagtactggtttatggacttgagttgagaaccactgccttattaaaacaattgtttcttgagctgttttaaggaaagggagtgtggagtttctgttgtctcatgtcagagaaaactatatataaagtatttcttaacatattaaaatctccaagaagtccttttgtgaaaaagccccacagtttacctggttactgggatgtcgtcttctacnnnnnnnnnnnnnnnnnccccaccttttttctgttttcatgtgctggatgtcttagatgagcctttggttgtcttaatctgttttctcttattatatatgtttggtttttcttctcttgaaatttttattttggctataattttatttcntagagctccntattatttcatggatgnaataatttcncatatcnccgaggatattaattgggtattgaaacaggtttttcacata

SEQ ID NO: 304359 - DNA, 188 bp, Homo Sapiens
ttagaattaggcattttatttaactcatcaaataatacaagttattccaggaaacaacaatcaaaatgtattacttgtactaacgatatgtagagccacatttccaagaaatctcatgaaaataaattacttgatggaataaagcaaataaatagattttttacaaacaataaccctgtgaatattag

SEQ ID NO: 304360 - DNA, 119 bp, Homo Sapiens
ttttgtggggagggaggacatacaggaatgtgtatctgaataaacccatagatgttctagcaaaaattagatatagaaaaggttacctgcaggacaattcttaagcatagattataagg

SEQ ID NO: 304361 - DNA, 445 bp, Homo Sapiens
gtcaagttggctccagacatggtacaatgaggacatctggacagatataaaagagaactctgaacccctcatatcctcctaaacctttctaagaggcagtcctctcaaatccccaaccaagctgctctgcattaaacatttcaatgacttaacctggagcaatggcctcacacaggtatgcagcttcttctcagcagccacccccttcactgctctgaaccctccaggcccagagatctcagcatagcccctagatagcagtacaaggtctgatttaagagataaccaagcatcttgctaatttccatagggaggaatctcgggacacatctatgagtgggaattctaaggatgtctgtccaaggagaacgaaatgtttgttaagatcaggctatatctttatgggtgcacttgcccaggattcgggacttaatgttagctggga

SEQ ID NO: 304362 - DNA, 428 bp, Homo Sapiens
  misc_feature (335)..(335): n is a, c, g, or t
caacaaaatgacaagtggtggggcagggggctatttctgtaaaactgctcttatttgcaatacctttaatttctatctcaacagtcccagggatcatagcactactgttcagtgaaggcagctgctctccaatttctagaggataataggagctttgttttttttcatgtaataccgtctctttacccagaagccaacaggacagatggtactgcaaaacaaatgccaaatcagaattgaaaaacatacaagtcagaatcactgacattcctgtctgctgacagtaagtattttaaaatttagcgaaaataggaggtgataagaaggctaggtcncaaaagtaaaatctgaagaccctacataaatgtgtttctggattctttgcagagtttaaaagacctcctggaacatgcactatcttagtcttt

SEQ ID NO: 304363 - DNA, 298 bp, Homo Sapiens
atggagtgataaaatttaataaggttttcattctgtactcaatttttattcttgtttgtattctaacaaatgtactttctatatttatatatttatctgtctacattcagagcctgaatatatttacttattgaccagtagaatgcatacacttaaaactttaataattttgaaacaagtcaaattacataactgtaacatacagcagatcaccaattcacaatcatctctaccttggttcatctttacacaagtacttgaattccctttaatgtctctttagaagttcataaactat

SEQ ID NO: 304364 - DNA, 440 bp, Homo Sapiens
  misc_feature (246)..(246): n is a, c, g, or t
  misc_feature (252)..(252): n is a, c, g, or t
  misc_feature (257)..(257): n is a, c, g, or t
  misc_feature (271)..(271): n is a, c, g, or t
  misc_feature (283)..(283): n is a, c, g, or t
  misc_feature (297)..(297): n is a, c, g, or t
  misc_feature (302)..(302): n is a, c, g, or t
  misc_feature (307)..(307): n is a, c, g, or t
  misc_feature (342)..(342): n is a, c, g, or t
  misc_feature (411)..(411): n is a, c, g, or t
  misc_feature (427)..(427): n is a, c, g, or t
tttttttgagggatctgttgggtggaacaccaacgtaaacagtcaatatatcagtgtatttgcaggtctaaagcttagtagtgaggtaggctcagggtacaaaggttgggagcctttaacatatagatggtgattacaggtgaagccatgactctaggggatatcaccagaatgtattgagtgaccagaggaataagaacagaaatgtaaggaaccctaacatttaaggaatgggcagagggagtngagccnaagtngaaaaattggactngagaagtccgancttagaaaaggccnaaagnccagncaaacctccccaaatttcccgaagagagtttcctnagaattgattgacatggctaactccgtcaaatactgctggggagtccagtaagactggaaaaaaatacnttagggagaaagtccnttgggctttacca

SEQ ID NO: 304365 - DNA, 410 bp, Homo Sapiens
  misc_feature (276)..(276): n is a, c, g, or t
  misc_feature (288)..(288): n is a, c, g, or t
  misc_feature (300)..(300): n is a, c, g, or t
  misc_feature (314)..(314): n is a, c, g, or t
aagaataatcgacaatgacaatgaataatttctaaacttaataattaccacatgtatagagaagatttgattaatataaagttcaatgtgtgacttggtatgaataacactcttggtttattgattacgtggttgagtgtaagacaattcttgacctcattctttaaacaatggatcaatttgaaaactagatggcattgctgagcttccatgaatagttaaatacaattaatacatgtgttaaaaataatttgaggaagatattttgaagatccnaaggccagcacnaattttaatccnaactgttgggcttncttcctggcatacagtctaagtcttccaaaagttgcccagagttatcccatctcactccacagaagtcagtgtccctttggatagcagacaaggcc

SEQ ID NO: 304366 - DNA, 462 bp, Homo Sapiens
  misc_feature (105)..(120): n is a, c, g, or t
  misc_feature (271)..(271): n is a, c, g, or t
  misc_feature (279)..(279): n is a, c, g, or t
  misc_feature (289)..(289): n is a, c, g, or t
  misc_feature (292)..(292): n is a, c, g, or t
  misc_feature (294)..(294): n is a, c, g, or t
aagttcagttccctccatagtgcattctgatatcatgtgaaggcaccaacatgctatgggcacttagcacatgttaaaaaataatggaactaatttgggcttttnnnnnnnnnnnnnnnncggaaaactggcagctaacctcctcagtaaattaattccacaaactgatacagctactcgatagttcacacagtcttatttccaaactctgctttatcatcctgaaactcccaagaaacattgcccaataattgtgtttcttccctcagcnattttacncacccgtgtngtntntaacatattttattgggccctctgaagaataaggaggcagccattcagacaaaacataaactctgccccagcttaagaagcaatagactggggtcccattgtgtctctttcaaaacaacggctgacactgacaaggaacaggaagagcagcaggggtgcaggcatgag

SEQ ID NO: 304367 - DNA, 406 bp, Homo Sapiens
  misc_feature (177)..(177): n is a, c, g, or t
  misc_feature (248)..(329): n is a, c, g, or t
  misc_feature (379)..(379): n is a, c, g, or t
ctctacttatttggttgttcatatatgtctatcttactttctcagagagacttcttaaaattaaaagtccccaaaggcaggaatcaggtttctttcaacacagcattcggctataatgcttttgtgacatttggaagcaatataataaaacagttcagagcacagggcctcggcagntccatcctaggcttaaacctcaactcagccatttaccaattgtgctttaaagatgggtcacaaattctgtnnnnnnnnnnnnnnnnnnnnnnnnnnnnnnnnnnnnnnnnnnnnnnnnnnnnnnnnnnnnnnnnnnnnnnnnnnnnnnnnnnaaagacagaagtggatggggacatggattttggacattaggttataaaancactacagcttctgtggttagatgtgt

SEQ ID NO: 304368 - DNA, 481 bp, Homo Sapiens
  misc_feature (84)..(122): n is a, c, g, or t
ttgaattaaaatagatacttataaaatacatcagcatcaaaaataacagatgtgatagatacatacaatttcacgttacacacnnnnnnnnnnnnnnnnnnnnnnnnnnnnnnnnnnnnnnnaaaaaactaaaaaatatatttagggggtacaagtacagccttcttacatgcatatattcgcatagtggtgatgtctgggcttttagtgcacccatcacccgaacagtgaacactgtactcaaaaggtaatttttcaaccctcccccgacaagcacacataaaaggatttataatttccctcacaagctcacataaaaggatttataatttcaagggtaaaaacaagtttcagaaatgaaccttcccattaataaagaaaacaacagggagtcagaagaaaactatttttatatggagctgaccaatcagtgtgactggcattttttccaaaggattgactaaatcagtattttgatccc

SEQ ID NO: 304369 - DNA, 413 bp, Homo Sapiens
  misc_feature (380)..(380): n is a, c, g, or t
aaaagagtataattaaatccaaaaattgaacaccttgctatagtattaaaggtgtgcaagaaaatatataaagaaaaacccattacagttaatgtgtatgggcatatgcatataatttcgtattaagaaatataagggcttaatgaatatccaaaaacatttaatatgaatttttattgtgatggcataggttttggctactgtgatgtatgcatttaagtttgacaatacccccttgtgaaataaatgctctgatgctcttaagtaaagtgtactccaacccctaaaagcgaaccagattttccctccataatttttttcctaaagtccaccaaaccccagaaatatccctaactctggcaccctggggtgaccatccnttttatggaactccaattcttggcacacaaccc

SEQ ID NO: 304370 - DNA, 350 bp, Homo Sapiens
gtaaaggttttatttaaaatttcattttacttcacaagtgggctaattgtcattaaacactgttgggtacttatataaagcaaggtctagatttgtctaatatctttagggcaaaaggctgtgcacaaaaatgattcaaattaattgtggttatgatgatgattgagataaatttttatacaaataggtaagtttagtagcttcaaatctaatgaagccatttataatgaataccatctaattcagctgctaaatccaattcatggaattgaaaaaagacaacattcctggctttttaccattaacacatgtgcaggcaagataccagttaaaagcatttggagaacaat

SEQ ID NO: 304371 - DNA, 380 bp, Homo Sapiens
ctttagtatgacttgtggggagagtgtgtgtgaggagaagaaagtgtactttttctgcccaattatggaaggtcttaaacatcagccatgtttttaggagtttgactaataaatccagaaggcttattatttattttatccaggcatgttttatttactatgagagatcttcttagttcttgcttttgttttgtaagaaaaatgagctaggttagcagtgtccgttttctgtttttagaaaataagatgtctgagatgttagaatcttcacatataatttgtcctaccccacagtcagcaatttcatatctactgctcacagtatgcccaatcagagcacagacaggtgtgtgatggtggcttctcagtaggaatttaca

SEQ ID NO: 304372 - DNA, 201 bp, Homo Sapiens
ggattcatgcctagaacagttagagcctaaaggtataaggctgttgtccattggccactgagatgagtcctcaagaagaggtagctacattacaaatggcccacattcacagtttatgaaaagaaagaatgcacaagtatttcctgtacttttaatgtgattctcatgaaagagaatgccaacctaaagccatctaaaggg

SEQ ID NO: 304373 - DNA, 444 bp, Homo Sapiens
  misc_feature (72)..(233): n is a, c, g, or t
  misc_feature (242)..(242): n is a, c, g, or t
  misc_feature (316)..(316): n is a, c, g, or t
gataccatgacaggtttacctcccctgatccacataccatgcaactacttagagcagtagtccttaatcaannnnnnnnnnnnnnnnnnnnnnnnnnnnnnnnnnnnnnnnnnnnnnnnnnnnnnnnnnnnnnnnnnnnnnnnnnnnnnnnnnnnnnnnnnnnnnnnnnnnnnnnnnnnnnnnnnnnnnnnnnnnnnnnnnnnnnnnnnnnnnnnnnnnnnnnnnnnnnnnnntgttggaanaataagaagagaagacccaccactcctttcctatctattggtaacattcatggtgttggggtaccagggttggnagttaaaggaattttttcctccttttctttgggagagaaagttaaaagtcccctgggcagtggtttttccctccagatccatctggcatccacctaaggctgggggttgggccagatccttggaacca

SEQ ID NO: 304374 - DNA, 424 bp, Homo Sapiens
  misc_feature (146)..(178): n is a, c, g, or t
tatcacttattttattaaaatgtaaaaggtttcttttttacaaatctgtaagatataaagtaaaaataaaagtacactcaaatcccataagttattcacattttgatgaacatctttccagatgaatctctctctctcttcccagnnnnnnnnnnnnnnnnnnnnnnnnnnnnnnnnngtaggttttgcctgcattttttcattaagtggtgtgtcaggacaccctgccttgttaatgttgaacttttctaacatccgcttcccatcctgccctctcccttgacactgtggaggcattctaagactaggggggtcaagcctgttgacttcagggatgaggcacctcctgggcttctaaatagtggcgcggaggtgagggggcagttaaccttgtgtctcgtcctctttcctagtgggtctgctt

SEQ ID NO: 304375 - DNA, 428 bp, Homo Sapiens
ccagtttctaaacaaccaccaacctctaaaagctagaattatttctctgacacttgacatcaagagaaaaagctagatgagaaatacattcctatctgggatttatttattcaaaagagcaacttctagggtgtgtcaaaaggtttagaaagactcaagtcaatttaactttccatcttctggtctttttctatccatcaagaatcaatatttggaaagctaacctcaaggcgttgtataaatcacaaagtattttcaaaggcagatcaatgcttattcagattttgttgtatttgttgttctgaaacttagcatttgaaatacaatgtatatggcaactcttggtgaatcacaacccattcccctgacaagatgtttatgttataccatttaagaggtaaagctaaatgaagccagctaggtcccca

SEQ ID NO: 304376 - DNA, 427 bp, Homo Sapiens
  misc_feature (159)..(159): n is a, c, g, or t
  misc_feature (162)..(162): n is a, c, g, or t
tcgcagggtccctgaatatcttgaagttacaagctaatttctctctgtatatagggagaaaacctactgtctttctcagatactcaaaggattctgtgatccagccatggctccccctctttttgaaagttaaccacaagattaaatagatagctgcanaanccagggcatttccaactcctgcttatctcagacactattcttgctgaaacattcactctgagtcacttggttaaaagcccataaggatctaattagagctaaatatccctagagaatccccagaaatacaaattcccaggaaaatccaacaagtcaataatagaaaatagaaactgatttaatacagtatatttttggggccaatatctcatttcactcagaccacagttttctcagaaatcagtggctgagcaaacagatcttt

SEQ ID NO: 304377 - DNA, 381 bp, Homo Sapiens
  misc_feature (312)..(312): n is a, c, g, or t
  misc_feature (369)..(369): n is a, c, g, or t
tattttagtgggttgcagtggtatttcattcctgaatgactgataatgagcatcttttcatacacttatcatccatttacatatactctaaggaacctcatataaaaggaattatacaaaatttgtcctatgactaagttagcataatgtcttcaagcttcatccatgttacaacatgcatcaaaattttctcctttttaaggctaaataatgttccattgtatatgctacattttgtttatcctttcaactatcaatgggacactgaggatgtttccacctttttgggttactatggaatgatgccggttngtggaacatggggtggtggcaaatacctggttcaaggtccctggctttcaaattccntttgaggtaagg

SEQ ID NO: 304378 - DNA, 232 bp, Homo Sapiens
ccaaattccagggcctaagaagccaattaaccattccaagcaatatctaggtgtaagtgcagtgaaagttcataaactgaacacagcaacaacaattaggacagatctgctggtcgtcagtcctgccatccttaagtgagggaccgatatttcaatcatcattccctttcttttcaatgacaggacatcttgaatgaccatatacaagaagcggagtccaagacaagctgta

SEQ ID NO: 304379 - DNA, 121 bp, Homo Sapiens
gttagtttaaaaccaattaggtggcttaagattgctattaaactaacagaaagagggaaaaacatttgtcgtgcaatacagtaaccagcagccacaccaccgaaagtatccaagcaagagc

SEQ ID NO: 304380 - DNA, 463 bp, Homo Sapiens
  misc_feature (282)..(282): n is a, c, g, or t
  misc_feature (330)..(377): n is a, c, g, or t
  misc_feature (447)..(447): n is a, c, g, or t
cactcacaggtttacagaggcaactatgtcacatggacgctgttcaccagcaaagagtctaatccatcaaaccatttattctaggtaattgaaaatctgacaaggtcaattctgatgagatgagaattcatgtttgcactcagaggtaaaagactatagcattctgctttcctgaaaccgactgaggcttccacggtcttctcaaacattcccctgtgtgtcccagctctacacatggaaggcagaaagaacacagtaatgaatgctagctctgggccttgnctctgctgcttactgcctgacaatgcaagtgctaaagttctctaatannnnnnnnnnnnnnnnnnnnnnnnnnnnnnnnnnnnnnnnnnnnnnnnttaatagataattatagtcttgattgtgggctctaagatagttccaatggagatcactgattctagtatnaatttcttgaacttta

SEQ ID NO: 304381 - DNA, 446 bp, Homo Sapiens
tcaggccacaagtagtaaactgtagtaaactccattatatggaaatctcagctatccagaagatctgcttccaagtaaattccagagagccacaattttacttttcatcctaagcagaaatcgtagcaataacacctttaacctaattattttttctccctttttacaagacttgtcaaaacttgacagtgattaatattagtttcactaagtacagctttttaagttgttataaagatagtgccactcaatggttgttggtaggcctacatttaaatttatctaaatgccatttctattcaaatgcctacaacagaaacttctgaaacgcatggagtaaaggcaatcaaaaaataagtttcttcaagaattaacgagggtaaaacatctaccactgtatgtgataaagttaaattcttagattttttttaaagtccctttgtcgt

SEQ ID NO: 304382 - DNA, 144 bp, Homo Sapiens
ttaagagagataatgtctcattatgttgccctggctcggtcttgaactccttgactcaagcgatcctccctccttgatctcccgaagtgttaggattacaagcataagcccctgcatccagcggaagttgatcttcagatcatc

SEQ ID NO: 304383 - DNA, 214 bp, Homo Sapiens
gttttgtttttggaatttgcaattgtctattttgttaagtcttcccactaggctacaatcatgagctcctgaagagtcaggtctgagtcttgcccctgaaatccccagcaagcctagtacagggtctcaatgtttgttgaacaaaccatcctttccaggtatgactcctcagcttgtcaagactttgcagaacccccgaaatctatccagaaac

SEQ ID NO: 304384 - DNA, 366 bp, Homo Sapiens
  misc_feature (160)..(160): n is a, c, g, or t
cataattactgacttaatctctgaagatcgcaaacaacgtgaacagttggtgacaggaaacaacaattcctgaaatgtacctatcagtttccccagggacagtaggtgattggggtattggtttaacgagttccaaaggtagtgtattttgtggaaacantgagagtgtgtgtaacatcaaatgagagaaacttttaccaccaacagaattatcacttttgtttttgtctcccagtgcttgtaaaaattttccttaccatttttggtattttcaagcatgcggaaagttggaaagaattgggaagtggatacacatatgtccatcatctacaatttagcatttttacggtattataatcgattatc

SEQ ID NO: 304385 - DNA, 130 bp, Homo Sapiens
  misc_feature (42)..(42): n is a, c, g, or t
  misc_feature (51)..(51): n is a, c, g, or t
  misc_feature (74)..(74): n is a, c, g, or t
  misc_feature (112)..(112): n is a, c, g, or t
cataaatatgtatgttttttaaacaagattgttgaattttantttttaaanccagtcaattactttctaattcntttttaataagcaaagtttagggctgttcacatgtgcnttttgaaatgttattttg

SEQ ID NO: 304386 - DNA, 418 bp, Homo Sapiens
  misc_feature (111)..(111): n is a, c, g, or t
gccccctttgatcttgataaagaagcatccactctatcttccataactactctgtggatgaatagtaatggcaatagcaacagttattgtgtgcttattaagtgctgggcntcgtttctaggggttttccatcgtagcaactaatgttctcactataattctagaagtagttcttactattttccccatttcactggtgaagaatgctgaggcagggcaggttaagtaacctgaccagagtcccacagcaagtacgcggtggagcctggacttgaacctaggctctctggctccagggattgctcttctgtgctgtacttcaaaggaaagaatgcagagaaggtgttagcctgaggtggggagcagtcaacactcagtaaattctttccacctgcatgtttggctgttgggaacaggc

SEQ ID NO: 304387 - DNA, 297 bp, Homo Sapiens
  misc_feature (257)..(257): n is a, c, g, or t
  misc_feature (270)..(270): n is a, c, g, or t
  misc_feature (280)..(280): n is a, c, g, or t
tttcaatactatgctaaagaaaagaagcattctaactttgtgggaaaattcaaactgtgagtgaaggtaactccaacaaagactgaaggttaaaatatcaaggcatgacacaaggaataagaagtggaaacagaatgtagttacaataatctaagtgagagtttataagggactgtgaaactatgaatacaaaagataacaacttagaagcagaattaaaagaatggttagcaaagctaaaatgccactaattaacntgtgaaacctatnggacctttgntaggaccttggaaggac

SEQ ID NO: 304388 - DNA, 454 bp, Homo Sapiens
  misc_feature (318)..(318): n is a, c, g, or t
  misc_feature (329)..(329): n is a, c, g, or t
  misc_feature (352)..(352): n is a, c, g, or t
  misc_feature (432)..(432): n is a, c, g, or t
  misc_feature (441)..(441): n is a, c, g, or t
ctaattaaactgagaacataattttacatcttcatataggctaagaaaaacttttcggaagaatgatggtgatgggtttgcaggaagcagttttcgtcccctccttgggtccctgtgtgagctctggcatctttttgtggaacagcagccaaggttgaagatgaagccaaggtagcagtgaaacagccctttcgtgatgtagtgctaattggccccacaggaccattctacccaaatgagttcatcaactcaggcaacatatggtcaccaatcaaaattctaaaggttgattaaatgattacctaatatattggtttngcttgcaattnataaaatggccttttttaagggnaggaagaagggtggaccatccagcttaattggataagtccgacccctaaatggccaatgggggaaaaaggtggaattaantgccaatgntaaccaatttggg

SEQ ID NO: 304389 - DNA, 445 bp, Homo Sapiens
  misc_feature (359)..(359): n is a, c, g, or t
  misc_feature (382)..(382): n is a, c, g, or t
ccaattaagtcatcaggtagaaactttttctaaagaagaggaatcccatctttcctgcttagagagataaccaagcaagatttctagacaaatgaataaaaaggcaacagagagcaccctcttctcttccatttaccatcagtttcctctcatcacaaaaattctttgtttcagggtaagtgtttcttttctgtggctactcaccatgctatgttgaaatacataacacactacaaggatggattcttggttgttatttatagcttcagtattcccattacaaatgagcatataaaaagtgctggtcctaaatctgacatactctctcctattggcacactatcaagcagtaagccatnaccattccagagattactttccntagtatagagagaaacagcactggtaaatggattaaattattgccttcaattacgccaagtag

SEQ ID NO: 304390 - DNA, 216 bp, Homo Sapiens
  misc_feature (167)..(167): n is a, c, g, or t
  misc_feature (200)..(200): n is a, c, g, or t
aagttcagattaaggattcacacacagaaaagaggaagatgactaaagatctcaaaatctccttttgcaatgttatatagttataattaacatttaagctctaagagctgcctttttgctgacaacaattgagaaatacttagctttagaaaaaaattatcattacnggtgttttgaaatccatattcctatggtgacgntttaatgaaggatgaa

SEQ ID NO: 304391 - DNA, 264 bp, Homo Sapiens
  misc_feature (192)..(192): n is a, c, g, or t
  misc_feature (200)..(200): n is a, c, g, or t
  misc_feature (212)..(212): n is a, c, g, or t
  misc_feature (239)..(239): n is a, c, g, or t
  misc_feature (246)..(246): n is a, c, g, or t
gttcatgccattctcctgcgccagctcccaagtagctgggactacaggcgcccgcaccacggccggccaattttttgcatttctagtaaagatggggcttcaccgtgctaagccaggatgctgtcgatctcctgacctcgtgattccgcctgcctttggcctcaaaagcgctacgattaacaagggcggtancaccttgncggcccgggaantttccggtttttaaaaagtaacccagnttaaggnaattttcctaaaagaagc

SEQ ID NO: 304392 - DNA, 409 bp, Homo Sapiens
  misc_feature (121)..(121): n is a, c, g, or t
  misc_feature (238)..(238): n is a, c, g, or t
  misc_feature (303)..(303): n is a, c, g, or t
ttttattccttaaaacatcgctttattgaccgtgcacagttattaacaattcacatttcactttatctactgagtggaagagcatttattctttcattaaaaagttaagccctccgggagncagcaggaatgcagaaccttcttcctataaatggcattgccagtgactgtgaagtgcttctctattaatacaaaaaggataaataagacaaatggacttctccctccctccatcatntccctccctgctaatatgctcttcttattttataaaatgccattaagcaaacagttcccacactngatacttccatcaaccaaaaggggaatgtcaacatttatttggcaccactgaattcagaacatccttagggctctgtacaagtaacaaaatgagtatcaggccatg

SEQ ID NO: 304393 - DNA, 209 bp, Homo Sapiens
  misc_feature (28)..(28): n is a, c, g, or t
ttcggcagccacaaagactgggatttcnaattctagttatgataagtagacaatttaagccatttatccttttttctgtttccttttcaagaaaagaaaatcgtatttttataaaatatgatcatgtcagtttggtctatttttatatgtgttaaggagagcaataatagtcaaaagaataacaatataacgattaggtatttagtttt

SEQ ID NO: 304394 - DNA, 301 bp, Homo Sapiens
aacttggaaagcagttttatcaaaatggttttgcaaaggtttcccaaaagcacttacagcagtttatatcaagagatcctaagtttaggggtatggagaatctcaattctttaaagcagaaattcacctgtttcataattgtaatatcgtaattttctccccttggacctaagatatttatacattcaaaagtttacaacttgctgttcttgagacattgttcattctttaatacatacattgagtataaataaataactacaagaaagcttcaacaatctgaattaacattatgctgtgc

SEQ ID NO: 304395 - DNA, 447 bp, Homo Sapiens
cattttacacacttttcttgcccatccttgcccatgactttaatagccaaccataagctaacaactccctttgtcatgacccacacagcccaatctcctctgctgggcttcctactgtacagcatggcccaggcatctctaagccaacatctcggtggaactcagcctatccccattctcaattcaaataagtcctcctatttttttcacgcaaatagcagcaatgtctacttcaaggtataagagagtcccccagaataacatgtattagcatgcatctgataaaatctgcacagttatagacctccaccctcttgcaggagaaaaaaagcccactgtttaatcagcttaaaccctcccctatcctctgaattgggacagtgaagacttgaagtcatcagtatcatggttagcttttctcctctggtggcccggatgtatacctct

SEQ ID NO: 304396 - DNA, 112 bp, Homo Sapiens
gtgggggtggctaaaagttgctgtctaacttactgtcatagaaaagtaaagccaaaagcccacttattaaagaagtgaaaagatgagctttggtgtgtggaaaaactagttt

SEQ ID NO: 304397 - DNA, 255 bp, Homo Sapiens
  misc_feature (19)..(19): n is a, c, g, or t
  misc_feature (245)..(245): n is a, c, g, or t
agtttccagggcacatgtnaggatgtgcaggtttgttacataggtaaatgtatgccatagtgatttgctgtacctaacaaaccatcacctagagattagggccagcatccattagcacttttccctaatgctctctcccaccccagccctctcctgacaggccagtaagtgttgttctcctccctgtctccatgtgttctcattgttcagctcctactgataagtgagaacaagcggtatttggntttctggttc

SEQ ID NO: 304398 - DNA, 444 bp, Homo Sapiens
gagactgcatagggctcggtgtggtgatgtggtggcctcaggaacagaacagtgtggtgacatagtggccccaaggacaggaccatgtggtgacatggtggccctaaggacaggatcatgcggtgacgtggtgatccagggacaggaccgtgtggtgacatagtggccctagggacaggaccgtgtggtgacataatggcccagggacaggactatgtggtggtacagtgactctaaggacctgaccacatggtgacacggtggcccagggacaggaaagtggtgacatagtggcccaggggaaaggatcatgtggtaatatagttacccctaaggacatgaccacagggtggcattgatggcctggggacaggaccgcatgatgacatggtagccctgaggataggaccacatggtcacatgatggcttggggacaggaccat

SEQ ID NO: 304399 - DNA, 340 bp, Homo Sapiens
  misc_feature (283)..(283): n is a, c, g, or t
  misc_feature (295)..(295): n is a, c, g, or t
gcaggactgtcctcaagtacttgctcttattctctacttcctcagaatacacagaacctgtcctcagaacgcgtgtagtttggtagcaaaacaagaaatagacaggcaattaaaatactgtgactggagctacaatagaggaaaacccagaaccctatctaggcacaaaggagagtccaattctcacgggacttgtggatggagttgggagtatgtccaaaaaatactttaaatgtttcaaaaatttaacaccgaagtaccgaatactgtttttaaaaaagcnttaaaggggggnggttaacaggttttactaaatggtcatttttatggaagtttcccc

SEQ ID NO: 304400 - DNA, 435 bp, Homo Sapiens
  misc_feature (293)..(326): n is a, c, g, or t
  misc_feature (336)..(336): n is a, c, g, or t
  misc_feature (349)..(349): n is a, c, g, or t
  misc_feature (361)..(369): n is a, c, g, or t
cttaattccctctccagtcctctaatctgtgtttcctacctggatcattttccttctttctgaaataattttggcaacataggtttcctggaaacaaatcccctcaattttgtttgtctctttcactttgaaggatactttttcagggtgcagaattctaggttggtgttatttttccccctctcagtgctataaatatttcattctactctttcctgcttgcatggtttctaagaagttagatgtaattcttgcctttgctaccctgtaggtaaggttccctcccaccttgnnnnnnnnnnnnnnnnnnnnnnnnnnnnnnnnnnctgacatttngactatgatattngctcagtggtgnnnnnnnnnggtggggggtaagtggggaggtcattgcttggctttttattggcattgtttcctgaactttctgga

SEQ ID NO: 304401 - DNA, 435 bp, Homo Sapiens
cttaagaaagccagaaataaacatgttaatatgggagtcacactctcagaaagtaaaacctgggactataccagatcacacaggaaggaagtgtgggggagaagaatgtggaacctggcaaataagggggatcagacacgctgcactttatgagttcacggtacaaatatgactaccatcaaaataaataatggctgaagaaatgtcatggatttggcaactaaggccattagaggctttagaaagagtaaatccaatggattgagaagtttcaagtcataacgcagttaaatatgatagagaaataaaaacaatgtatgatagagaaatagtaaggacaccaattggtcataattgtgaagtctggcagtacaagaaatggaaggcatgagatggtagctgggaatgacagcaagctccttggcagagtttttc

SEQ ID NO: 304402 - DNA, 445 bp, Homo Sapiens
  misc_feature (304)..(304): n is a, c, g, or t
aaccacaggtgccataatgaagtggtaaaaatggaaaaggaatgaggaaaaaagaaatgcagtaaaaataatatgtcagagaaagttttaaaatatgtattactcctgtctgtgggggaaacacctctttgggatatgttcttgacagattgagttatttctgtctattgggtatgtataaagacatatttatggatttataaatcttttgaagagggctgttatttacccagttgactaaaatggactcaaactgtgtaaataactatttaggacatgtactacaggccaaatgctggcacancttacacatccatgcctgccagaaaaggcaaacagggaaaacatgggaaaagccactgtgcacagttaatccgaaggcttgcacaaagaccaagctctgcagttctcagggatgaaaaaaaggtttagaagggtgacggtt

SEQ ID NO: 304403 - DNA, 199 bp, Homo Sapiens
  misc_feature (179)..(179): n is a, c, g, or t
ttttccattcttgggatgatgggtcggtttgagctcattgcatagttacctactaagtaaagaagaaactaatgaggacgagaaagtgctatgcccaaagtaaacgtggtcctttcttttttcctaaaatacttacttctttgagatcttggctttgggcacctggctcactatttaanacagttcattcaagagaagg

SEQ ID NO: 304404 - DNA, 472 bp, Homo Sapiens
agcaatgattagttagccagcttcgtatacatataaatacttcaaatgcatattatgtagcattaccttattaggcttaatttaaaaatcacgtgtgataaccagttaaataccaaaacaaagctgtcactataaaggtatggtctcactgtacactgatcgtgccagttgtctcaggagtctcttgtcactgccttggataagttttctctcttactcatcaatgcatttgtgaaatacgtgtccttccaagctcttctttgatttctgtgtaatattcttttccctccattctgatgggcaaggaaagagtctgccacactgaataactatctgaccccatgaccttgatcgtgggttagcagctttaagatttctttctgacatgatctgggggtgctcgatgggaaaatttgctggaaaaaggtagtgttgtgagagttactgttgttttcaaagtagtgagatggct

SEQ ID NO: 304405 - DNA, 465 bp, Homo Sapiens
  misc_feature (280)..(280): n is a, c, g, or t
  misc_feature (304)..(304): n is a, c, g, or t
gatctggttctcctggcctattgatctctcctttacacaggcagtgctgggagtctggtggtgggtgcgcattcctttctgtgcctattcatcatatattctccatcagacacccctcaattacctcaaagaaacgtaggctcaaaacaaatctaggtacagtaacagaggtatcagaacattcttgaaaatgaaactataactttgagacactccctagtcccccattgtgagcaggtgcacccaatccatttcatcttgtgtgctgtgctttggcaanaccgcctggctggaatcttggaantccctcccgacgccgctcactcctgggtctgcggcactaaccccctctggacactctggggccattgctgtctgcctccctctgtcagaatgccaggtgtgagctgagagcaggtggcaatgcctgggcacagggcagcggctcagcaaattcttgctgag

SEQ ID NO: 304406 - DNA, 413 bp, Homo Sapiens
  misc_feature (336)..(336): n is a, c, g, or t
  misc_feature (342)..(342): n is a, c, g, or t
  misc_feature (354)..(354): n is a, c, g, or t
  misc_feature (375)..(375): n is a, c, g, or t
ggctgttaggatttataactttctgaaggtttgataataaggataactaaatattattagaacagttaagaaaaaaattatttttcatagtcattgaattttgctaaagttacacttatgggtgattaaactacaaagttttctcttcgttaaatatttgcttaagacagaatgttcaagataagctaaactctttacaagaatcatatcaagaaattctaccatttgtgaaataataaagcggagaggaaaaaaatagcgacaaaccagcagaataatttagggcaaagattccaggtattatataaaatgtgtgtaataccacattactcggcntttccngtggagggggantctcacactaaactcgggtcnctttttaaactatcactggacataataatttatccaac

SEQ ID NO: 304407 - DNA, 336 bp, Homo Sapiens
  misc_feature (321)..(321): n is a, c, g, or t
tgaggaattatctacagaacactgtttatttcaagtccaaaacacaaattactcatttttcttaacagaccgcataattttttctgcatgaatatttagggtttctctattcacaagtacagtttattactagactttaggcttcgaatgattcatatatatagatatcagtttactacagaggacatgtacttttaacattttttgtttagaaaatattttacataaaaacacaaagcatttacccaacactccacaaccagtcttcagcaaagattttggctgaagataactttctacaaaacactccaagactgaatngaatggtagtatttt

SEQ ID NO: 304408 - DNA, 415 bp, Homo Sapiens
  misc_feature (39)..(39): n is a, c, g, or t
  misc_feature (301)..(301): n is a, c, g, or t
  misc_feature (400)..(400): n is a, c, g, or t
cactcgaatgtatgaaattccctttaaaccactcattanagttgaaaatgtgtgacatttattaagtttcaacaaaatacttctgtcataaatttttaaaagctagggggcatgttattcgcaggttaaataattcataatacacataagaggctacttcctatattttaaaaacttttaagaaaccccgtcttaatgctttttatgtgtctacctcaagatactacatagtctctaagatgttatgaatccaacacaaatcacttatattatcccatttatgaagaacaagtaaataccnatcaattactcatagttaaatattttatattttatgtaaatgttctattgttggaaacattccaatggcttcaagaaattaatgtattaagtagattcntaagattatttaatc

SEQ ID NO: 304409 - DNA, 292 bp, Homo Sapiens
  misc_feature (18)..(18): n is a, c, g, or t
  misc_feature (22)..(22): n is a, c, g, or t
  misc_feature (40)..(40): n is a, c, g, or t
  misc_feature (193)..(252): n is a, c, g, or t
  misc_feature (268)..(268): n is a, c, g, or t
tatgaaagaagtaatggnacanataaaaatgtgcgcatanttgtgataaaaacaaacagattcagagattactctcaaacagatgctgaagaataaagctaccaaactacttcattctcattttccttccttctgcctacaacttatggtttggaggttgttggatgctgtgttatgaaacactttggcatcnnnnnnnnnnnnnnnnnnnnnnnnnnnnnnnnnnnnnnnnnnnnnnnnnnnnnnnnnnnngaataaaaaatgaggnaaactcccgccataaaggtttggg

SEQ ID NO: 304410 - DNA, 457 bp, Homo Sapiens
  misc_feature (92)..(185): n is a, c, g, or t
  misc_feature (349)..(349): n is a, c, g, or t
  misc_feature (362)..(362): n is a, c, g, or t
  misc_feature (384)..(384): n is a, c, g, or t
  misc_feature (396)..(396): n is a, c, g, or t
aatttaaatagcatatgtaggataccttgcatatgctttgtattcctttaaatggtgctgaaaaagaaatgtctggtcccaatttaaaagtnnnnnnnnnnnnnnnnnnnnnnnnnnnnnnnnnnnnnnnnnnnnnnnnnnnnnnnnnnnnnnnnnnnnnnnnnnnnnnnnnnnnnnnnnnnnnnaatcaaactgcctgttatttaaggcttttccacactttggaaccatggcatatgttacactccctgcattgtcatatttcatcttctctgatgaaatgtttcaccctctagggagtcttccaaaactgccccagagtaatcaaaagccttccctctcttcagtncttggcacttttncccatactggtagtgcttagcnattatattggtnatcatttgagaccctctccaaagtttcccaatgggcagggaacatgggttctatgtttaaa

SEQ ID NO: 304411 - DNA, 433 bp, Homo Sapiens
tcaataaagaatgatttgatggctttataatggaagatgtttagttttgagatcggctaacatgcaaaactctttgaaccagaacaatggataggcaagctaaatgctgatcataacttacatctacaaatatttccagaaacataatttcttcttaattaccacctgctgagcatttactatagaacagtgcaaaattccaccttctcaacagtcccctaagaaagatattattagtctcataggacaccttataaaagagacaggagactgtggaagactatactgtgaatcacacaatcctggctctaaagctgtcattcccaagggtcacaggaaatttccaaccaaagttctaacatttccagatttctgtgttaatctgatactcttgtgtgtaaacttggctggcagcttcacaattaaaatccaa

SEQ ID NO: 304412 - DNA, 409 bp, Homo Sapiens
  misc_feature (76)..(76): n is a, c, g, or t
  misc_feature (101)..(101): n is a, c, g, or t
  misc_feature (104)..(104): n is a, c, g, or t
  misc_feature (109)..(109): n is a, c, g, or t
  misc_feature (263)..(263): n is a, c, g, or t
  misc_feature (321)..(321): n is a, c, g, or t
  misc_feature (380)..(380): n is a, c, g, or t
  misc_feature (390)..(390): n is a, c, g, or t
cacaaagcctgtcccaaaggctcttgaagcacattcttttttgcagatgagcatatccctttagcatatgagcaanaaagcggtggctaaaaagcctggangtnagctngagccagatcagaagaaacctgaacatcactctcctaaaaaggctggactgaaattagtggaggcaactcaccgacgacttctgacaagatggcagaattcaatgttcgggaagattagttacgtggagatgggctggatgtggcctgggtggnagtgggggtttgagtgccacactggccggggattcagtggagcagatactgggaaatnacgacaaagcccacgactgggagaagggagaaatgtttaaacgctgccaagtgaccaangactaattcntattaacagatttaaaagt

SEQ ID NO: 304413 - DNA, 411 bp, Homo Sapiens
tcgggcagtatgaactgctcgacagctaatctgcctgttagctgctagttgactcgatttgcctttttaggtctggccacaaaatttattttttagataacactctattcaagaggtaccttattgaaggcaaaatataaaggaataaggaaggaaagtaatagagaaatgagatggggaaaatagattatgatctgctacaagatatgatctactccaagataatcatctggtatccatttaataatacagccacaaagaattaaaagaatttaaaaatcaccttctttatattaatgactttgggacaccagtctatcccttgattaccttggtgatgtagagaagacagagtctcatcagccttatggaatttttggaaactttattcagctcataatatttcaatat

SEQ ID NO: 304414 - DNA, 226 bp, Homo Sapiens
  misc_feature (171)..(171): n is a, c, g, or t
taggctcaaacacatctttattcatcaaaataggaaacattacaatcaacacatttttgccaatgagaaataagtttatttattcctgtagtgtaaaaatgtgtgatctgggattcgataaactcttggaaagctttttctcgcattctggttgtggaaacatcttccctncaaaaagttgctgagatgcttgaagaagtggtagtcagttggcaagaagtccggc

SEQ ID NO: 304415 - DNA, 182 bp, Homo Sapiens
accgtgcccggctctacagctggaaccttcctgtcactacccttcagatgactgactccttatcctccacctacgcttaaatttcacatcctcagagaggcctttgctgcacactctatctaaaatggctctcctcctctagtttgtctctaataccacagcatggtcatttcctttttgga

SEQ ID NO: 304416 - DNA, 351 bp, Homo Sapiens
  misc_feature (180)..(180): n is a, c, g, or t
  misc_feature (308)..(308): n is a, c, g, or t
  misc_feature (315)..(315): n is a, c, g, or t
gtgttgtcgggcatcaaaaaaagttttaaaaagagtattaacaagatctattcctattctaacatgttttatttataaaaaccatagcagcatcaatgcaggaagcatttttgtgtttccacactgtgacgagcattccctgaatgcaacctcatccaagcactctacggatgctgtgtntcggggctgtggttagtcctgttttaagaataaggggacagacacagaagtatctgtgcatcccaatttaggccggctcaagtctgcccgctgcaaattcaggtggggttaaaggagggagggaaacnttcccgntcctgcgaacggggaagggggccggagggacaccag

SEQ ID NO: 304417 - DNA, 127 bp, Homo Sapiens
aagtaactagtcatattgttgcactatccacataaaaattacttccaaagacttgtgatagaacccagtgatgtcacacctagatatataactctcacaaggagacacatacaaaaacatttatcat

SEQ ID NO: 304418 - DNA, 392 bp, Homo Sapiens
  misc_feature (319)..(319): n is a, c, g, or t
  misc_feature (339)..(339): n is a, c, g, or t
  misc_feature (377)..(377): n is a, c, g, or t
gcctaagtgctctagctagggcttaacagtactatgctgaaaagaagtgttgagagtgagcatcctgatcttgttcctgatcttaaaagaaaagctttcggcttttcaccattaagtacaatgttagttgtgggcctgtcatatatagaccttcttgtgttgagaaacatttcttctatacctaatttgttcatagaatttttatcacgaaaaaatgttgaattttcttaaatgctttttctgctcctatggggatactcttatgggcaaaaatcatatgatcatctttaaagtatttagaagatgaacaagaagctcnagaagtatcatgggcatggntggaaaaaattaaaaaattccatttccctactactccntaagaataaaatgga

SEQ ID NO: 304419 - DNA, 189 bp, Homo Sapiens
attaggatatttggcatggtacagataacaacttgtcccttaccaccaaacacataatagctggtcaaaatgattattttcaaaggaaactatttaaaataaagccactagtacatataaattaggaaagaaaagtcaagctggagccatcttgatattctaatgagcaggcctatctagttctacatc

SEQ ID NO: 304420 - DNA, 193 bp, Homo Sapiens
aaaataatttccaagtacctggaacgtttagatcacaagtatagtataaaagaataacttgcccaatgccaaagcaacggtctttaaattttcataggttcaaagcagaacataaatctacctattgctgtttgtataaataataagtattcgagagttcctggatcttattttggatgttaagcagtgttca

SEQ ID NO: 304421 - DNA, 220 bp, Homo Sapiens
gataaaataactatcagtataaaaatattcttttaggatattaaggaccctgttccccaggtgtaaacagaaaccactaaggcacttagtggccacttgctgtatagaagctcagttcagactgatgctgaaccctggtaaacaactagcacctaacccaggtagactctgcagccctggggtagcagactctgctaagagtaccagactctgctaagag

SEQ ID NO: 304422 - DNA, 457 bp, Homo Sapiens
  misc_feature (406)..(406): n is a, c, g, or t
ttttgcttttaaaaattctgggagtatgtggctccctgaagagatgtttatttcaacctcaaatcaactttatttcttggctctttcatgcactttccttcctgtgctacaagttatttccaagggagattgtgtcgtgtgtttttagattctgccaagagaaagtactccattgctcatagttgcatttatatcatctgtttattgtctatgatagaacatagctaaggaaagaggtcaatactgacttcttcttaatactgtatccataaatgttgactgtgtagttgaattggccttataaacaggtaagttaagcaactaaatttgcagtgaaaatttctacacctgttcactaatttctggaaattcttaagtgggtaatgtctctcataagtgtaaattngttttagtctaagtcgcctcaatatgtcaaatctaacacaacaacttgcat

SEQ ID NO: 304423 - DNA, 466 bp, Homo Sapiens
ttttccatggtaaaattattaatataatgtagaaatatgtgataaaatacattcccatgtttatcacccatgttggtaacacacatatatctgcctgactgatacctctttttctctatcacagcattttactctaaaacttataaaacctatcctggataaaaagacatattctaagggatatgtgtatattaactattctctccaacatctcataagtgacattcccacataaaacctatatctcaaaatcctcaaatatgatctccaagaattttttccactgacccctcccttagtctttctcctaattctgtcatcgacaaccaagatccagaaagagagaagaaacagagccaataatatgttattgtattatttataagtttcatgtgcacatgaaggataggaacagggctaaattcattatatttgtttctacttttcagaattattcacatctgtt

SEQ ID NO: 304424 - DNA, 231 bp, Homo Sapiens
aagagacagacagtgcttggccagacttaaactttttaataagcaggaactttctaagaattttaagattttttccacaaaatatatgcagaattagaagttaattagaagtttgtgactcttgttaatctaactttgccagtttaaaaatggaatactagaaaaatatccttagttcttattcctgcctccacaccatcatcaaattttctactcaaaattcattataga

SEQ ID NO: 304425 - DNA, 419 bp, Homo Sapiens
  misc_feature (175)..(175): n is a, c, g, or t
  misc_feature (271)..(271): n is a, c, g, or t
  misc_feature (319)..(319): n is a, c, g, or t
  misc_feature (342)..(342): n is a, c, g, or t
  misc_feature (360)..(360): n is a, c, g, or t
  misc_feature (394)..(394): n is a, c, g, or t
ttaagaattcttgttcttggcttcatttctgctgactctaaattttttaagtatgctattgttctttcattagacataaaaatttgagcagttagagtaattttttggtattccctcataattattcctaatttcaatgtattatcttctttttcattttaaaatctgatattcnttttcttcttctacttacacagtaccaaattcctatacttttcccttttctcaaatacgagtctcagaaatataaacctcctatatatttatttangatatttaaaaaggtatctcctttttataggttatggggtcacttaangtaggccaacataccaaaactgnacccacggattaagggcnggttaaccccaggaggcatggattttaaattccnaattggtaacaggacctccataggt

SEQ ID NO: 304426 - DNA, 478 bp, Homo Sapiens
  misc_feature (434)..(434): n is a, c, g, or t
ctacagttctgaatgaatgtacatgttcagtaggaaaaattaataccccaaaaatagaacaacatttttcatttctaatttatgatagcattacattgctaatgtattattacatttttgtcttcgaggagtttccatattagttcaaatgagctacccaccaaaattatttgacatatgttgggttatagtctatccatataccctgctagatggaaataagcacagactaatgatatcttgcaaataaaatttaaatagtcagagaaatcactcctaatcattacattttttggcaattatgcattctgtctttttactttggcaccccatgggaagaggtttcttcattaacaaaggaattggtagtatctgaccaaaaatctgttcagaaattaatttagctatttgaaatttacataggtgatatttcngggtttagatgtgatatgggtttcactggtatccccaaccagtt

SEQ ID NO: 304427 - DNA, 290 bp, Homo Sapiens
acataattttcagttaactttaaatacaagatacacatgtgttaaattattactaatctaccagattattgcttaacttgttgaatacctataatctctgctttttctgaaagctggcatttattaaacatgtggagttttcacatgttcctgggcattatttataatttgaggtgtttcaccgacatcagagtaatacattgcttactctccactgatttgtacactggaaaaatgttgtttgctgcagtgtagtagctacatatcattctttagtcctttacatgcag

SEQ ID NO: 304428 - DNA, 418 bp, Homo Sapiens
  misc_feature (188)..(188): n is a, c, g, or t
  misc_feature (243)..(243): n is a, c, g, or t
  misc_feature (272)..(272): n is a, c, g, or t
  misc_feature (293)..(293): n is a, c, g, or t
  misc_feature (298)..(298): n is a, c, g, or t
  misc_feature (353)..(353): n is a, c, g, or t
  misc_feature (387)..(387): n is a, c, g, or t
ttacacagaaaccccaggtgctgagatgttttccaggactaggatgaagtctccatcttgtggctaaattaagttctgcagtcactcaacattatgaacgtcaagatccaagtcaatttagtggagcagcgtagattaggtcaatagcttctgtgagaaacagaaacacatcttcttaatgcaaatgnagcaggacaggttcatttcggaggccatttgggaaagggaatttaaaccttgggncaaccgaactgtgcaaatatattaattcnattcctttacctaaagaggangggcnggtcctaaccttttccagaccttggaattccttgggcttggtgggccccttcctnccttcctttccaaaggccaggcaatgttaggcantccttggctttcaaggccctccacaattggc

SEQ ID NO: 304429 - DNA, 215 bp, Homo Sapiens
  misc_feature (79)..(87): n is a, c, g, or t
  misc_feature (168)..(168): n is a, c, g, or t
  misc_feature (184)..(184): n is a, c, g, or t
gccaatatgtagtgtgggattttctttggctaaaaactgttccaatttccctgttttctaaatatactttactaagcannnnnnnnnacaatcaggagtattgtaacctttgtatattttatcaataataaaataaatccataatttaagaaaatcacacaaaagtgnataaagtaaaaagtcnaagtcccacatccccacctctgaatttcacc

SEQ ID NO: 304430 - DNA, 228 bp, Homo Sapiens
  misc_feature (53)..(53): n is a, c, g, or t
  misc_feature (59)..(59): n is a, c, g, or t
  misc_feature (62)..(62): n is a, c, g, or t
  misc_feature (75)..(75): n is a, c, g, or t
  misc_feature (148)..(148): n is a, c, g, or t
tgacacgtactcccagccaagaagcgcattattttaaaaagctctttctgggnggaaantgncccaaaaagttgnaggaccactgttctaggacagtgtttctccaactttagtacgcagattgacctgagagacttaatacaaattnaaatattactgagtactccccacctaagaaattctgattcagtggttatgggtaggaatccattctgacaaggttgccca

SEQ ID NO: 304431 - DNA, 384 bp, Homo Sapiens
ggtgaggtgggaagatgagcctgtgtctcccatgctgagccaagatcctcaggtaccagtagcggtcaaagcacctgctccctgaaggaagcttacctggcttagcctcattcctgctcgtaagtcaggcattcagcttgcaaagatccccaagcacacaaggagagtcagctgactgagggccaacagaaacagcaggcagccgctgtcagccacaaagaaacgcagatcctgaaactgtcatcatacaggtgagaggatagttatgtgtgaggtgttcaaagaagtcgcgcagtcagtgatgagaaagctgtagggtacatactgtcacgcatgaataggcaggactccttaaagaacttttgggaaatgaaaaacaggcca

SEQ ID NO: 304432 - DNA, 457 bp, Homo Sapiens
  misc_feature (69)..(241): n is a, c, g, or t
  misc_feature (249)..(249): n is a, c, g, or t
  misc_feature (352)..(352): n is a, c, g, or t
  misc_feature (382)..(382): n is a, c, g, or t
aaagcatataacaaatgacatgctccaaaatacctcaagagcaatctcaattcaaaatgacttcctagnnnnnnnnnnnnnnnnnnnnnnnnnnnnnnnnnnnnnnnnnnnnnnnnnnnnnnnnnnnnnnnnnnnnnnnnnnnnnnnnnnnnnnnnnnnnnnnnnnnnnnnnnnnnnnnnnnnnnnnnnnnnnnnnnnnnnnnnnnnnnnnnnnnnnnnnnnnnnnnnnnnnnnnnnnnnntaaataanaacaataaaataacaaaataacctcttagatatctaccagaattgcaatgaacagtcgggcattgggttctcacaaattacaaggtggacacatctcacactncatggagggtatgggcatgaccagctctgnacaccaccatgggttcattcctcctactattaaaaccacaaaatgtggaagatggaaccttggggcaagcctttt

SEQ ID NO: 304433 - DNA, 298 bp, Homo Sapiens
  misc_feature (158)..(158): n is a, c, g, or t
  misc_feature (229)..(229): n is a, c, g, or t
acgcccggccgtgactttctttttcgtttggcaatcccaatagacacagaaacgtaagcaaaacgccacggaaaacctttgatgtactttacttataaattatttttctattctgacactgtaataatttcacagagaaatgcccgtttctgtgaacngctgggggccatcaagcttcattgatccaaactccaagaaggaagggagggagaacagaacacacataaantcccagataagccccaaaacctcacccatggctgtggtgttcccgggtcctttccgctttcctctcctt

SEQ ID NO: 304434 - DNA, 417 bp, Homo Sapiens
  misc_feature (348)..(348): n is a, c, g, or t
  misc_feature (393)..(393): n is a, c, g, or t
ttgagattccttggtatattcagcatggataattacgttatctgtgagtacggacaatttagttttttttcttcgtaatctttatgtgccattgattttcagtttcctgctgcttttcttttttgtcctctggctagaaaggtgggtcttttcgttacttcactttggtgtggacttctccaattgccccttcatcccaaggtaaactctgggaggacagagagaaaggaaaaataactgggtttggatgcaccctcttggccctatagctccagagtggggagaaaggttttcctcccttagagtttgagctcctgtgggctctctttagtggccaagtgccacttnttgcctagaagattgctactggggctatggtgagatagagaaaangaaagaggaaaaaagggcatttct

SEQ ID NO: 304435 - DNA, 483 bp, Homo Sapiens
  misc_feature (398)..(398): n is a, c, g, or t
  misc_feature (448)..(448): n is a, c, g, or t
tttaaggaaaattttattgggaatattttttccccttaggtgtgaaatttggcaggtaactgattctctgatggactgttgaagactcggttaattagaaataagattcaggtccaaggtaaacatcttgagcctgctaagtcttcttaggatgtttgtctgaaatgcttctgaaaatagtatagctttctataaagaaatcttaaccgatgttcatcagtggagttgactatgttctaacccagcccttaccaaattggtattagatgagggattagtctctgattttatgtgaaaatcccaacgaggaaaagcagctccaaccacggctttcatatccatttttcagaaataaggcctaaaggctcagcaactgcacctctttaatcaaagcagtnggagactgttcaaccagctccccggtggctcggtttccgaaaatcagggnagctaattggccactgtttgttggacacaatcgaa

SEQ ID NO: 304436 - DNA, 210 bp, Homo Sapiens
agctttgtaggaatccaattggatggatagcagcagtggtaagagaacattccggaataattacctaaattaaggagcttgccctagaatgtaaatcaacctactatatctttttatttgaaaaagtcttggtagaaaaagcatatcaactgaactgtacagtgtgttcagtgacttagtaaagaacataactttgtgtaaaggccaatg

SEQ ID NO: 304437 - DNA, 113 bp, Homo Sapiens
gacctcctcccatgtatcatgaatgtttctaatggcatctagaatggcaaactctttccagaaagctttttatttactttgcccagatccatcagaggaatcatgatctatgg

SEQ ID NO: 304438 - DNA, 141 bp, Homo Sapiens
ctctactaatatgagtttttgctctaggtttttttaaaatctgaaactcaaaatttttgctcagaaacagtcaacttattttatatttttttactgtaacttttgctaatctaccttcctcacttgtttttttgtctgttg

SEQ ID NO: 304439 - DNA, 159 bp, Homo Sapiens
aattatggttgtttcatgggagaagagaaacactttattaaatttaatcattgattataaaattgcacctaaatttcaaaaatgtgaaaaatgagaaagtacaacttagaaactaggaaatatattaagtatgcatattttatttcgtataattatttg

SEQ ID NO: 304440 - DNA, 194 bp, Homo Sapiens
tgaacaatcaaattgaataactttatttagaaatagacaaattgaaataaattttcatcaaaaatttgaaaggacactcaaaactaatttgtagagaaatgcataaaagtcataataaaaaacaaaatcccctcacactcatttaaatggccactatcaattttttgaaaacaccaaatctgttgatgatgcaa

SEQ ID NO: 304441 - DNA, 139 bp, Homo Sapiens
  misc_feature (59)..(59): n is a, c, g, or t
  misc_feature (104)..(104): n is a, c, g, or t
atgagcaactacacccaggctaagttttcctttttcaaaaattgatttgtgctataagnattcacattaaaattattaagaagaatcatgtttttaaagtttcnttcagcatttttaaagcaccctcaataactcagaa

SEQ ID NO: 304442 - DNA, 145 bp, Homo Sapiens
ctgctgttgtgtggtttcagtgcattaaatgtgttatgagggccttggacctctctggttagctatgattattctatggaaactaccataatattacagtagagaattgatgtttggggtacaggaagtcaggtagacaatttcc

SEQ ID NO: 304443 - DNA, 225 bp, Homo Sapiens
  misc_feature (173)..(173): n is a, c, g, or t
  misc_feature (213)..(213): n is a, c, g, or t
aaggcaagagcaactcccaacctaagttaaataaacaaacttttaactgcctcttttgcctgcaagaaaaataatggcttttccttgtttgtactgagcctcgaagataataaataactaggaatatgactcaggtactgccatgctaactttttatctaagcccgcacttcntgaccctactggaatttggataggaattttgatcctttantataccttaaaa

SEQ ID NO: 304444 - DNA, 128 bp, Homo Sapiens
ttaagggttggggtaggggatgagtagaaataacattccccttcaaggctggacacataagggaaagagggatgacatgtgaaaaggaagcgtctctattcccttgtcttttccagtatgtagtgtct

SEQ ID NO: 304445 - DNA, 175 bp, Homo Sapiens
ataataccatacataaaaactgaattttaggaatactgaagaatgacatatagaagtcaaatcattaaatagctagtagtaaacagaatagagtgtcagctgttacccaatgatgataatattttcacgattaaaattaaaccttttctgattttaaaggaaaagttcagatctg

SEQ ID NO: 304446 - DNA, 446 bp, Homo Sapiens
  misc_feature (161)..(161): n is a, c, g, or t
  misc_feature (172)..(172): n is a, c, g, or t
  misc_feature (361)..(361): n is a, c, g, or t
taaaagcatcaactttttgttaatatatttggaaagtaataaccaaaaggagaagagtgcaaatttttttccgctgcactcctctaataatcatctttcctaggtgccccatgtcatgtcattcacccgctttccagctacaaatgggaatatgggctccntcttaagaaantcttgcaatctggggggtgggggaacagaatccccactgatcaggcacgcagccctgggctaaaggtggtgccagatactctacatatgtgctaagaagctgctcctgggaaatggggcagaacaaacataagtgggggtagatttggtgtgctgatggcggtactgctggcaattttcagtagcaaangaagagagaaaagcaacaacgctggactatggagttcagaaatccctcatcatgggaatatgacattgggggaagtttaataatc

SEQ ID NO: 304447 - DNA, 228 bp, Homo Sapiens
  misc_feature (208)..(208): n is a, c, g, or t
cattgccatatcctcagcatctaacagagtatggacatggtatataccaatattttgttgaatgtatccatcgtatttgaaataagcttctatgagctcttttttaggtggactatgtttcattgggctgaattagtaagttaatgtctattttgaattcagcattttgcattactgaacagacagcatgacgtaacacaaagaagtnagggagcaggtggcaatgtc

SEQ ID NO: 304448 - DNA, 147 bp, Homo Sapiens
  misc_feature (65)..(65): n is a, c, g, or t
cttttaaaaaacagtaagtaaatttaggtctgaatcccacttaaaacttttcaatgggcttgctnttaccctcaagataaaaaaacagactccttaccatgggcccataaagtcctggcatgatccagccccacttggctctcaggg

SEQ ID NO: 304449 - DNA, 375 bp, Homo Sapiens
  misc_feature (103)..(103): n is a, c, g, or t
  misc_feature (149)..(208): n is a, c, g, or t
cacccaacagatgacagtcccagtttagcaggctcaaggtaaagtctgcaggatctggcacaccaagaattagtggagcttgtctatggtagttctcgcagantaccacatcaaggatggcaccatatagtctgtatttttacgggcannnnnnnnnnnnnnnnnnnnnnnnnnnnnnnnnnnnnnnnnnnnnnnnnnnnnnnnnnnngataagcctgttttagataagcaaaagacaacccagctacctctgaacaggcacagataagccagaagaaaaagctagcctctaagtccaacttgtccagattacattttaaacttactccaagtgaggatctagtgtggtcatagtgtggtcccactttccttcaa

SEQ ID NO: 304450 - DNA, 437 bp, Homo Sapiens
gaaaaaaaatctgacctttacatgatttaatctgaagggctagaattttttaatttctagcccctcctccaaaaaaattttaaacacatcacatactctgaaaagtcagatttcaaatgcaagactagactttatatggaacatatatgttgggttttgattttgggtagcaattgacatatatttttctcaaaacaagttgaattttgttaacatatataattctttagtgaatttataaattaggaaccctgagaagaagccctgttgtttttcttaagagtctaaaactgacaatcttttaaaaatcataatacttttctagtaattgcatcagggaattggtgataattggaagaaagatccatttcttaagaataatttggatccaaattattatatgggaattaaacatacttggtggttaaccaaattgg

SEQ ID NO: 304451 - DNA, 466 bp, Homo Sapiens
  misc_feature (24)..(24): n is a, c, g, or t
  misc_feature (192)..(192): n is a, c, g, or t
  misc_feature (200)..(202): n is a, c, g, or t
  misc_feature (209)..(209): n is a, c, g, or t
  misc_feature (211)..(211): n is a, c, g, or t
  misc_feature (215)..(218): n is a, c, g, or t
  misc_feature (221)..(221): n is a, c, g, or t
  misc_feature (225)..(227): n is a, c, g, or t
  misc_feature (232)..(232): n is a, c, g, or t
  misc_feature (236)..(236): n is a, c, g, or t
  misc_feature (240)..(240): n is a, c, g, or t
  misc_feature (247)..(247): n is a, c, g, or t
  misc_feature (249)..(249): n is a, c, g, or t
  misc_feature (253)..(254): n is a, c, g, or t
  misc_feature (256)..(257): n is a, c, g, or t
  misc_feature (259)..(259): n is a, c, g, or t
  misc_feature (268)..(269): n is a, c, g, or t
  misc_feature (276)..(276): n is a, c, g, or t
  misc_feature (280)..(280): n is a, c, g, or t
  misc_feature (283)..(283): n is a, c, g, or t
  misc_feature (293)..(293): n is a, c, g, or t
  misc_feature (295)..(295): n is a, c, g, or t
  misc_feature (297)..(297): n is a, c, g, or t
  misc_feature (299)..(299): n is a, c, g, or t
  misc_feature (311)..(311): n is a, c, g, or t
  misc_feature (331)..(331): n is a, c, g, or t
  misc_feature (350)..(350): n is a, c, g, or t
  misc_feature (364)..(364): n is a, c, g, or t
gcacgagggatggggatgactggngcaccaccttagaagctgcctttcacagggtgtcttcataggcttttgaaatggaccccagaaagggaatttgaggataaaattatttttgttactattagaaactcaatcagaaattgaatccttcctgatctgaatgcttaccggttctaagcttactgctgcctngattgtgnnntgttggngngtgnnnngcncccnnnatttntaanggtnttgctgngntggnnanngntgggggggnnaaaaaangggnggnagaaaaaaananangntttaggggttcnaacgtaggctgagggtaaangttggttggtaaacatcgnctgggaaatccctncgattttttttaattggggagctgttttaaactaagccttttcatttctttgtcatttaaaataatactaaatggactttttaggtttccttttcaagtaaa

SEQ ID NO: 304452 - DNA, 467 bp, Homo Sapiens
  misc_feature (274)..(274): n is a, c, g, or t
  misc_feature (286)..(286): n is a, c, g, or t
  misc_feature (404)..(404): n is a, c, g, or t
  misc_feature (446)..(446): n is a, c, g, or t
gcagcaccttcattcagatctcaggtacagtagaactggctgtgaaatgtgggtgaagcacacctacagtgaaatctctacagtattctctcctttggggttgaacagcagcagtctcagtcttttctgaatgataaacctaatgaaaaggcaggtggcaacactgaagcttggggaaggagtgctcagaggagaaggatgtcctgggaagtgtgctgcactgggtgtcatgccaggcgagcctcaggccacccctgcggccttagcaactttngggacaagtcangtatcctccttgtgcctttaattccttctagtgctgttgggaacaagattggctgttggagccaatcttggaggggcctttttcagtgtagataattgtatgattattcaaagtaaantaggagagaaaccttagacatttttaatttttctgcttaccntttactttattaactgaattt

SEQ ID NO: 304453 - DNA, 447 bp, Homo Sapiens
  misc_feature (24)..(25): n is a, c, g, or t
  misc_feature (165)..(165): n is a, c, g, or t
  misc_feature (168)..(168): n is a, c, g, or t
  misc_feature (176)..(176): n is a, c, g, or t
gactgggacttgggaatagcccanntcttgagggaaaggcaggggaggagccagggaacacctgcctcctttggaatctgcaaatgcaggtccttctggctgagtcgatagaggcaccttagagactgttgctgtgaggacatcttttcttttcccttcgtccantcntgtaatgntgtgggaaacaaagcacagatagtgtaccagctgcccaatagaggaaaataggagaatttactttcatttcccaagactatatagcctgtcctctagtttccagcagtgagagagagaaagcgagcggtctccagtacagtgcccgtagactctccattagaccctctcaggttgacaaagattagttcatctgaatccctagagtagggtagtttagctgtgagtttgcctaaaaccatggttctcaacttcagcaggcatgaagccggg

SEQ ID NO: 304454 - DNA, 456 bp, Homo Sapiens
  misc_feature (185)..(185): n is a, c, g, or t
  misc_feature (191)..(191): n is a, c, g, or t
  misc_feature (194)..(194): n is a, c, g, or t
  misc_feature (198)..(199): n is a, c, g, or t
  misc_feature (208)..(208): n is a, c, g, or t
  misc_feature (225)..(225): n is a, c, g, or t
  misc_feature (238)..(238): n is a, c, g, or t
  misc_feature (431)..(431): n is a, c, g, or t
gctcaaggagacctctgtaaactgcatccatgccgtagaccccgcatccaagcagtgctgcatccaccagccttaggaaagtggatcagaaaggaaatgtctcagtgatcctagacactaactttgacaaggaaagaccacccatagtggaagtggttggaaggtgagccttcaaattcaagtancccagntantttnnttaggggcnaaagagaattctttttncctaattttctantagggtgcatttaatctgtattaagtaatgccacagagaacatttactgtcatattaagcaaagaccttgcaaatgtattttaacagcagttcagaagactaaagaacttaacagagaagtagagaagagagagcctgcaaagtctacttgtaaaagtaaaacgtgctagttttggcatcaatttaaccacantgggagacttggtcaggagcactga

SEQ ID NO: 304455 - DNA, 116 bp, Homo Sapiens
ttggacactttgtagcttttggtggttagtggagggaaaccttttatgatttaaatacttttactccactgattggttaccatcactgcatgtatcagcccttgatgagtttaaga

SEQ ID NO: 304456 - DNA, 161 bp, Homo Sapiens
tcgacttgggagcagccaacctgtaggttcttcccccgtgtcccctgatcaaagaacagaagcacctcagcaaccacgccccgtcctggaaagtgttacccccccaaccccagacttctgtttcttgtacccctgtggcttctgctcgctgtcttctcctt

SEQ ID NO: 304457 - DNA, 302 bp, Homo Sapiens
atagtggtggtgtttgagaagataatgtaactacttcttagatttcaatttcataacccttaaaatgttgggaccacctacaaatgggggacaccctgggttttgaagtcttgcctgtgtggttaatcagaacctcagaattcacccagcccccggagaggttttgaaaagcccctcgctcatcagagcttgcttgtttcataaactcttaaggctttgttttaacctgtagccagcttcaccttataagctttcttgctccaagccttgagccagtcataatggcttaagcatcagatttc

SEQ ID NO: 304458 - DNA, 457 bp, Homo Sapiens
  misc_feature (103)..(180): n is a, c, g, or t
gcaggttccttaacaaacgtaatccagcaccagattagtattggtgttaggctgtctggagcctaattgctcacacgcttccaacagaatctgagccttgaannnnnnnnnnnnnnnnnnnnnnnnnnnnnnnnnnnnnnnnnnnnnnnnnnnnnnnnnnnnnnnnnnnnnnnnnnnnnnacaaatatttaaaagatgatttgttttgtggaaatgtcacttgtttttctccaaattaattttcatcttgtataattctgaatagtccatttccagcatttcccttttgtatatgaggaagtaagtttttgcaagaaattctgtgaagttagcactgctgtcaatgttcacactcttttcatgtagcagtgtacccgcatttgaatctttctgttacattattttggaattttaggtttcaaacagtgtatctttctaaaatccgtttttttgacat

SEQ ID NO: 304459 - DNA, 147 bp, Homo Sapiens
catcatttattgtcaggtaagcaaaaagaaacgtccctgttttagagcagggtaaagggattggaggttggggtttggttgttcttttgaacatttagcagttgaaatgagtcttgtatttgcataattgttaccacattattttta

SEQ ID NO: 304460 - DNA, 422 bp, Homo Sapiens
  misc_feature (212)..(231): n is a, c, g, or t
  misc_feature (254)..(305): n is a, c, g, or t
  misc_feature (371)..(371): n is a, c, g, or t
  misc_feature (378)..(378): n is a, c, g, or t
  misc_feature (394)..(394): n is a, c, g, or t
  misc_feature (411)..(411): n is a, c, g, or t
tgcaaagagcaaaggtcaaatttatttaatacaacatccacgagggtccctgcagctgtgtcactgaggcaaacaggaaaagtgattttggctaggcgtggttctcatctgtgaaattccacagcgcaatgacagcagcctctctcccacccactcaagacactgtcaggaatgtcttaagacctcaggagaccacttctttagcaagcaannnnnnnnnnnnnnnnnnnngagatggattctcactctgtcannnnnnnnnnnnnnnnnnnnnnnnnnnnnnnnnnnnnnnnnnnnnnnnnnnntgggttcaagcgataatctcacctcagccctcttgagtaagctgatactacaggcatgcggcaacnaggcccnggctaaattccttggnattttttagtagagganaggggtttcat

SEQ ID NO: 304461 - DNA, 187 bp, Homo Sapiens
ataagcaccatgcccagccatgttgctgtttttctaagaacatgtgttgacttcatggtttatttgtttattgattttttggagataagatctcactctctcatccaggctagagtgcattggcacaaacatggctcactgcagtctcaaccacctgggatcaactgatcctcccaactcaggctct

SEQ ID NO: 304462 - DNA, 160 bp, Homo Sapiens
ataagcaccgcgcccggccgatcccagtaacatttactgacaatttcatcttattgcttgacttaaaagctacctttacacacactaaatttctggactttgtatatgatggccctagaggaaagcataaactggtctctcagttaagaagatgggcctg

SEQ ID NO: 304463 - DNA, 110 bp, Homo Sapiens
cctaaacaagctaaaacagcgcaagttttctgaaagctgaaattctataaaacgttacaaatatgtacacagagtgctctagcttctcaaaactgggacaatatgagttt

SEQ ID NO: 304464 - DNA, 373 bp, Homo Sapiens
  misc_feature (53)..(53): n is a, c, g, or t
  misc_feature (326)..(326): n is a, c, g, or t
ggatatctcctccactttaatggacaggcctcatttttggcagctatgtgttntgagatgtagactgaatatccaaggttcctccctagctcaagtttttacttgtgattacacacaccacattgaattccgtcttcagaggcaaagatttgggcttcatatctcaacagcaaaagggcctgttcagcaattcccttcattttagactcatatgacctcagcgattgcatgatagtagtaaactagtctcctggaaataatggatgtaggtgcttctagaatatgttacagaatttcagacttaacctattaatagataaatggancttgacttaaggtgacaaaatggaacttttattattgcctaaaatgc

SEQ ID NO: 304465 - DNA, 194 bp, Homo Sapiens
cagtaagaattcaaaggcttttaataccctcagcttctcgcctcttctctcccagctgcccgtcagtccccagctggctcagaggaatgataagggacagagaggcgggaggggaccttgcttccacagtctgagtgctgccccgaatcactgggaacacttctcagcagggtgccgctgacatttcagactag

SEQ ID NO: 304466 - DNA, 170 bp, Homo Sapiens
  misc_feature (24)..(24): n is a, c, g, or t
  misc_feature (42)..(42): n is a, c, g, or t
cagagcccaagttaagagatgcanaaagaatggtaaggtggngaaacaggtaagatcagacaacagacagggcagaggggcatgctctgaggcaaacagggaggtaaggtacattctaaccactctgccttggacaactctgccggacaaaccgctcacctgagacctga

SEQ ID NO: 304467 - DNA, 225 bp, Homo Sapiens
  misc_feature (179)..(179): n is a, c, g, or t
  misc_feature (185)..(185): n is a, c, g, or t
  misc_feature (196)..(196): n is a, c, g, or t
  misc_feature (211)..(211): n is a, c, g, or t
tacagggaaaaataataaacaaggaaatattttttcaagtcccccaaactattctgaaagcagccaggtttgagaacaggcattctcggtaacagccagcagaaatataaactgaaattgcccttcttgttgggagttcagggaggagatggcaatttgagtcaaaactaaaaaggttntacctnccgttgtactngaaaaaattccccgnaataaaatttggca

SEQ ID NO: 304468 - DNA, 193 bp, Homo Sapiens
ggacccctcatagctctagttctgctggatagttggttcattactggtttactctctggaggtgtgtagccttttgggttcttgcttactgtagtggggttttgggttatatgttttggaggacccagtcttttattcctgtctccccctctctgcactgtcttaaaaatgaaagttgagacttttcagaata

SEQ ID NO: 304469 - DNA, 230 bp, Homo Sapiens
  misc_feature (128)..(128): n is a, c, g, or t
ctccatattatttagaattgatttctcattagtaacaaaatgcttttaacaccaaaatcaataactgtttatagtaaatcttggctttgattttgttctatgtctgattctatataggcagctctgcntttttttgagcctcagtccatatataaaatagggatattataataatcataagataatgagaaggttaagtgtgtggagattcctttgggtggtgggaataa

SEQ ID NO: 304470 - DNA, 225 bp, Homo Sapiens
  misc_feature (116)..(117): n is a, c, g, or t
  misc_feature (120)..(122): n is a, c, g, or t
  misc_feature (188)..(188): n is a, c, g, or t
gttatatgtgtgttgcctccagtggcctatgagttttttgatggcagggctgtatctcatcaatctttgtattcccatcacaccatataggcatgcgcttaataggctcctcgctnnagnnnaactttcttcatgaaatgaaaacttttatgattaggcttggctctgtttattgattttacaatttnagttctaatagctgactggttaggcgagatttccttt

SEQ ID NO: 304471 - DNA, 492 bp, Homo Sapiens
  misc_feature (121)..(130): n is a, c, g, or t
  misc_feature (407)..(407): n is a, c, g, or t
  misc_feature (414)..(414): n is a, c, g, or t
  misc_feature (469)..(469): n is a, c, g, or t
actgggagaaaaatcctagcagaacctgctactctgggcgcattaggtagttttatgcaactatagtattaagagttttattggaagaaaaaacactgtcagagcttactgctccagaccnnnnnnnnnnaatagaagagactggtaaaaatgatgcaggggctgaatgaaagccagctctgctccagtggctctctgagttgagcatgcatcagttaccttaagggcttgttaaaacatcgctaggctccaccctgtttattcaataagtttgttatgggatataagaagatgcattttattaagttccccagtgatgctgctgttctactataggaaccacacttgaagaactagttctacaattcagctggtatgttgtaaaggagtccaagtccatggaaggnggttatnaagagtttgctgaaaaatggaggtaacagtggtatggggacttcacatcagttcnccctaattggatggttagtttga

SEQ ID NO: 304472 - DNA, 237 bp, Homo Sapiens
  misc_feature (142)..(142): n is a, c, g, or t
  misc_feature (154)..(154): n is a, c, g, or t
  misc_feature (196)..(196): n is a, c, g, or t
gggattataggcgtgacacctggttgcccagcctaactggaattttatgagaggaaaatagaaaatgctcttctagaagagagagaacaagaggcacaaaataatctggacctcacaaaaatttcagcaagctccaagaaangggggattggangggaacgcttggcaaaaatttaaatgccattaggatattttngcaagttattacctgtttgggtaaaaatgcatcatcaccct

SEQ ID NO: 304473 - DNA, 218 bp, Homo Sapiens
gcagttagctcattcctggacttttcaggaacttaatactcataagaactatagatgacagcaatttttctgtttagatggggagatagaaaaagacatgagggaggtgatgagagtataatggttaaaaggtaacatcaattgagcacaaattaatttgagggaattaagtattaagaatctgaattctgtaagaaagattccggttaaaaaaagtt

SEQ ID NO: 304474 - DNA, 140 bp, Homo Sapiens
  misc_feature (93)..(93): n is a, c, g, or t
gtgacctgttttaccactttctcagtcgccaggtccttagcaccccaaaattgttatttcccagtggaaagtttgtcttgtacaatgcttgcnataatggttggaactaagtaaatgctttttgaatcatgaactaactc

SEQ ID NO: 304475 - DNA, 161 bp, Homo Sapiens
taaacctgtagtgatgctggagcactggatttcagagaaacactgggagttacgtgactgatgagttctgaagcattttagcttgaggcaaagattaagtaaacatttgtatgccaaacatcaactaagtgcatagggaagggcagatgtctctcttggga

SEQ ID NO: 304476 - DNA, 204 bp, Homo Sapiens
acttgtgtagtttgaaaagggccacatacccacaactgagtttaacttatccctttctctgcgtccatctaaaaagtgtaagtgggcagctgtgaaggtatgtgcctctctccaggagccaagaggtctatccaggcaggagccattaacacctggtggagtagctgtggtcattgttggatataaaatgatacaaagcaggcc

SEQ ID NO: 304477 - DNA, 157 bp, Homo Sapiens
  misc_feature (80)..(80): n is a, c, g, or t
  misc_feature (135)..(135): n is a, c, g, or t
taagattaagtaaagtaaaatgacaaacactaagctttagtgctcttcttcctgttctgtcctatcgccccaccaactangtaagtctggggaaaaattgccaaggataataatttgaattctctctacttctgngttttgtaatatagatatgtaa

SEQ ID NO: 304478 - DNA, 443 bp, Homo Sapiens
  misc_feature (407)..(407): n is a, c, g, or t
attcctcattcagcaaacgtgccttaagatgtcagtgacatgccagatgctcataaggtccctgccttcttagaaccgatgtttgttctagttggggaaacaaatggtgcacaagtcaacaaataagagaagcaccaattgcactgagtgttgtgaaggcaataagccagtgagccgagagaggcacttttgttttttatagggtggtcattagtgaagcaggaagtgcctggtacatggcagctctagtcagagtcatttccactgagcttcctactgggctgtctgtgaacttcaagcagaaggcttcattcctggtcaaccacagcccccgcagccccgtgtggctccagggagttagctgccatgctgggatgttgtttgaacgtggctgcacgatctttaancacggggaagaatggggttaaaaaaccaccccctta

SEQ ID NO: 304479 - DNA, 440 bp, Homo Sapiens
  misc_feature (167)..(167): n is a, c, g, or t
  misc_feature (178)..(178): n is a, c, g, or t
  misc_feature (194)..(194): n is a, c, g, or t
  misc_feature (219)..(219): n is a, c, g, or t
  misc_feature (222)..(222): n is a, c, g, or t
  misc_feature (230)..(230): n is a, c, g, or t
  misc_feature (250)..(250): n is a, c, g, or t
  misc_feature (258)..(258): n is a, c, g, or t
  misc_feature (261)..(261): n is a, c, g, or t
  misc_feature (263)..(263): n is a, c, g, or t
  misc_feature (265)..(265): n is a, c, g, or t
  misc_feature (294)..(294): n is a, c, g, or t
  misc_feature (301)..(301): n is a, c, g, or t
tgtttctttatgagtcagttttggtagatttgtccattttatcttggttatccaatttgttgttgtacaattgtatatggtattctcttataaatctttttatttctataaagttggtagtaatgaggcctgtttcatttctgttgctagtaatgtgagtcctcccntttaatcctgncccggcctggccaaangttggccaatttggtggacctgggngangaactttnaggtttcatggacttcctgnattttccnatncncnatttcagtttttccccactataatccttnataattncttttggcaagctttgaggtattggtttttttctagtgggcatatggcataaggcatagttaggcctagttcctaatttgatttgagatctttcttcttttttaattgcatgtgtttggcagctataaataatcattct

SEQ ID NO: 304480 - DNA, 321 bp, Homo Sapiens
  misc_feature (96)..(96): n is a, c, g, or t
  misc_feature (149)..(149): n is a, c, g, or t
  misc_feature (290)..(290): n is a, c, g, or t
agcactgtgttatgacttagtgatggcattactccgttggaaaagtcttgttccttttctgactcatgatggcgtcccttaacttgaacgaatctntgatgccctcgcttcttttcattccctgatgtcggtgccttaatgatgtcacntccgtgtatgcagcatctcccgggatgcaagagtttcatgggttttctaagggcctgtgacgggtgctctttctactgggtcgattgtctcatgagaatgtgacatttgtgtgccccagctttaggagctaaatatacccnggaaatggttccaaaaatccaacaaatttcc

SEQ ID NO: 304481 - DNA, 306 bp, Homo Sapiens
  misc_feature (42)..(42): n is a, c, g, or t
  misc_feature (45)..(46): n is a, c, g, or t
  misc_feature (141)..(141): n is a, c, g, or t
  misc_feature (229)..(229): n is a, c, g, or t
  misc_feature (244)..(244): n is a, c, g, or t
  misc_feature (251)..(251): n is a, c, g, or t
  misc_feature (294)..(294): n is a, c, g, or t
tacatcctattacattttctcagaaaatgtgatggcagctcntanngctttaatccttctaaagtctgtgagaagtttgcttcttttagttcaagttgctgttaatgttgtttgtcatggcttcgctttttgtcctgtctnctaaattgtatccctcaattgatgacttgctctcttgccggtagcctccaatgcactgtaaattttgccttctcaccaaatcctcccnataatgtttaacccnggtctcnggtctcctaacctctggtttctcctaccttttataaacatttnggttaaacttta

SEQ ID NO: 304482 - DNA, 462 bp, Homo Sapiens
  misc_feature (196)..(196): n is a, c, g, or t
  misc_feature (198)..(198): n is a, c, g, or t
  misc_feature (403)..(403): n is a, c, g, or t
  misc_feature (432)..(432): n is a, c, g, or t
  misc_feature (447)..(447): n is a, c, g, or t
tttttcaacggattggtgtgtccatttgatacaagaaaatggaaactgaacagccagaggaaaccttccctaacatcgaaatcaacagtgactctggtaaacatcctgcagaagacatgaaagaggaaaaagcatttaaagatctagaaacactgatgagatggttgaattaggcattctgcttcagagcagaatntnggggcagtgacttgaaaaggaagcaagaatatgaagtttctccgtacagaccacaatgccaatgctttagtcccagacagcaggggccccgagcagcatgtcccaacagtttatgcctcactgcctgattagaaaaagagaaatgtattttattacctacctttttatataattaagtaagtatctcctttagatggtggaaaanatttttagaagattttgaataaggtggcnaggataataacgtangccttattaaatatt

SEQ ID NO: 304483 - DNA, 418 bp, Homo Sapiens
  misc_feature (139)..(139): n is a, c, g, or t
  misc_feature (157)..(157): n is a, c, g, or t
  misc_feature (198)..(198): n is a, c, g, or t
  misc_feature (351)..(351): n is a, c, g, or t
  misc_feature (357)..(357): n is a, c, g, or t
gtgtaaacaccgcacccagccctttaccatatttttgaaagtactttatgtgtctctctcctcatcttccacaaaatttgagaccttcaaaggtagaaactgttttatttaaaatataagagttcctgacacagagaangttcccccagtgagtttnaggtgctacaatgtactaatcatactctggtctatgagttnattcccagatttagctgtggattacatgtgtttcaaatgtatagctaggaatcgaaaagtgggtctgagcttcaaaaagtcttactatattttaatacttccatatgaatttggacttaattatgtaaggaaatagttatggtatatatatcntatttnaacaataggggtccaaggagcctgacttttttgggaattgggaaataaaagtagggtcctt

SEQ ID NO: 304484 - DNA, 442 bp, Homo Sapiens
  misc_feature (27)..(27): n is a, c, g, or t
  misc_feature (37)..(38): n is a, c, g, or t
  misc_feature (99)..(99): n is a, c, g, or t
  misc_feature (221)..(222): n is a, c, g, or t
  misc_feature (344)..(344): n is a, c, g, or t
  misc_feature (396)..(396): n is a, c, g, or t
  misc_feature (415)..(415): n is a, c, g, or t
ggagagagctagcttcacgcattcttntctcttgccnnccagctatcacgcagttgttggataaagcggccactgctcccaaagatttgatggaagtgntgccagatttacccactcacctgaagggagattttctgtacaccccatgcccccggactggtcacaagggtcagctgagttggttcaccccctcccactctcgtcttcgaggcccttcatcnnaggaaaagtcagtcgcaaatttaaggcctggcctgtcgggtttcaaaacgatcccggacgacttgggccgagggacaaaggaaagccgaggtcagaggcggcctttcagcccgggagaggcntggggcgcaacaagccggcacccccttacatcacctcggccgttccccagtnacccccagaagtcccaaantagcaagagcccggggtttaattcggg

SEQ ID NO: 304485 - DNA, 497 bp, Homo Sapiens
  misc_feature (14)..(14): n is a, c, g, or t
  misc_feature (107)..(186): n is a, c, g, or t
  misc_feature (263)..(263): n is a, c, g, or t
  misc_feature (273)..(273): n is a, c, g, or t
  misc_feature (346)..(346): n is a, c, g, or t
  misc_feature (384)..(384): n is a, c, g, or t
  misc_feature (390)..(390): n is a, c, g, or t
  misc_feature (397)..(397): n is a, c, g, or t
  misc_feature (446)..(446): n is a, c, g, or t
  misc_feature (472)..(472): n is a, c, g, or t
tcttccacagcgcntattataatccaacacaatgtatagtgcattcatcccacttattgtcctagaatgttagttccaggaggacagacaattttgtattttaacannnnnnnnnnnnnnnnnnnnnnnnnnnnnnnnnnnnnnnnnnnnnnnnnnnnnnnnnnnnnnnnnnnnnnnnnnnnnnnntttatcaagctacataatagcagaaagaacatccataaactggcaagctggcttgaaaaagtctttcaaaccccttnctctatatanttaaaatttaggggcaaaaactaacactaaaataacagggattggaaaaattaagccattaatttccttggcnccttatcacgggcagggaaggaagtgggggggaagccnctaatngctgggntccggaggaagcccaggagggttaataggatgggcaggtttacatttanccaatggcccaggtaaatcctagccnggtttttggattggtttttggtaat

SEQ ID NO: 304486 - DNA, 270 bp, Homo Sapiens
  misc_feature (22)..(22): n is a, c, g, or t
tgaaactatctgggaaggtggnattcctacgcagacagaactggtttatattgcttacaacatcggtggtgggaacggaagacagcttgccttgtctcgcttcagtgtggggttcctctacccttaagaatttctgaccaggtaaactatctctccattcctgtgagttcagacctgtctcacaaacttgtgacaaaagaagtctgaggacttgggaatgaatctagattccttgctccctccattagcccccttctccctgtaaatata

SEQ ID NO: 304487 - DNA, 156 bp, Homo Sapiens
cttccttgataatattcagtatttttctcacctactctgcccagtaacattgtgctgtcatcaacacaggtcaattacccacaatcacaagttcctttcttgacagtcctacttcaagatccctaattttatcattaaaattcaaatcttttaacc

SEQ ID NO: 304488 - DNA, 187 bp, Homo Sapiens
gctgaagagagataaatgtatatgtttgatctgctatttgagccagagaatctctttcagttctcaaactggactagaccaaaaactaataattatttagatatttatttatccagtgtttaagaatgtgttaggttgtagaaatataatagcagctttaagtggtgtaggaggtgttttgcgtgtt

SEQ ID NO: 304489 - DNA, 217 bp, Homo Sapiens
  misc_feature (202)..(202): n is a, c, g, or t
atattgcaatcttcagatggaaatcactctacccaacccacattttagaaatagagagttatacttcacctcttgagggtaaagtacgtatctacctctatcatttggaattcttctgtaagggagatttgtctcttctccatttactaatttatctgatcatttatttacatcagtatggactcatgcatatttattttanaatttaagggcagac

SEQ ID NO: 304490 - DNA, 425 bp, Homo Sapiens
  misc_feature (94)..(103): n is a, c, g, or t
  misc_feature (134)..(374): n is a, c, g, or t
  misc_feature (377)..(377): n is a, c, g, or t
atgtgattgaatttatcaaccttttcattatactttttgggttttgagtcagaatttaaaatttttcttgagttacaaaataattatcttgtannnnnnnnnngtttgtgttgacatgaatctcggtttatttnnnnnnnnnnnnnnnnnnnnnnnnnnnnnnnnnnnnnnnnnnnnnnnnnnnnnnnnnnnnnnnnnnnnnnnnnnnnnnnnnnnnnnnnnnnnnnnnnnnnnnnnnnnnnnnnnnnnnnnnnnnnnnnnnnnnnnnnnnnnnnnnnnnnnnnnnnnnnnnnnnnnnnnnnnnnnnnnnnnnnnnnnnnnnnnnnnnnnnnnnnnnnnnnnnnnnnnnnnnnnnnnnnnnnnnnnnnnnnnnnatnagcaccacatctgggcctgtttgttttcactagagattattttattgg

SEQ ID NO: 304491 - DNA, 444 bp, Homo Sapiens
  misc_feature (153)..(291): n is a, c, g, or t
  misc_feature (294)..(302): n is a, c, g, or t
aaatttttaattactagcttgggttgctaacaagcagttttaggctggctattggtatgtatgttttatatttttttacactacacttccacttttgcaaaatctcagactgaaaagtgagctttttgtttccccaaatatgaactaacaatnnnnnnnnnnnnnnnnnnnnnnnnnnnnnnnnnnnnnnnnnnnnnnnnnnnnnnnnnnnnnnnnnnnnnnnnnnnnnnnnnnnnnnnnnnnnnnnnnnnnnnnnnnnnnnnnnnnnnnnnnnnnnnnnnnnnnnnnnnnaannnnnnnnnaaaggtttgccccctgccctcaaacataaggtttatgtaaggtaagagagactcttatctcattttgtatattcctgtttcattttgttttccctggcagatagcaaactaatggacaacatttcatgggcagctatttaaa

SEQ ID NO: 304492 - DNA, 231 bp, Homo Sapiens
ggtaaggacaattgtaaaaagaggtcatccttaggcatttattcaaagttaatgaccccacaaatgctactgtaaagtcgtaagggtctgcttctaggtatcagcgtgctcaccaaacacagttcaggaaaacagcccaagagcattggaaaaggttgttcctgagtggagtcttctcctcctgattcaggataaaaatatattttacacaaccccgatctgaattgaata

SEQ ID NO: 304493 - DNA, 384 bp, Homo Sapiens
  misc_feature (71)..(132): n is a, c, g, or t
  misc_feature (247)..(247): n is a, c, g, or t
  misc_feature (291)..(291): n is a, c, g, or t
  misc_feature (327)..(327): n is a, c, g, or t
  misc_feature (351)..(351): n is a, c, g, or t
  misc_feature (359)..(359): n is a, c, g, or t
ctagtaagttttaaaaaggttaaacaacaatatactttgtatttagtccttaaatgataaaatcttccagnnnnnnnnnnnnnnnnnnnnnnnnnnnnnnnnnnnnnnnnnnnnnnnnnnnnnnnnnnnnnnaacatttgagatagcatatactagaacctagtcattatttgaaagaatttttacagtgatgatggtaacaatgacaatatcatttcactgagagatggccttggaaatacattangaaccgctttgagttcttcactggttggttgttgacaataatgntttttttatcccattccaattaagcttcaacgttanggtgccaatttgcatgcctcatgnatatcctnaataaaataggtggatttggaaatg

SEQ ID NO: 304494 - DNA, 260 bp, Homo Sapiens
  misc_feature (246)..(246): n is a, c, g, or t
gaagcctacaattaaaataaaattattaaaagtggaggacggaaaatcaaaagctttaatcttttgtctgtgacaagtcattgtgtgccattcagttaatgcagaaacctgttaggagaactgtcataacaaaacttatcctgctcttggtaatgtttcgagggatatgatttgggcacgagtaaatctcatactaaatgctaatgagccaaggttctccttcctttccccacttacatcaactcntgagctagaattcg

SEQ ID NO: 304495 - DNA, 213 bp, Homo Sapiens
ataatgattgaattgtaaattggtctaagggctctgaaggagagatgcagggacatttcagagtgtctgacccagtctgtggagtgagaggagctgacacgtgagctgggagctgaaggacaaggaggtattaatcagcagagaggattgcaggggatgcagagaggtcggccgggctcccgccccggaagagaaattgaggctgacgtcata

SEQ ID NO: 304496 - DNA, 555 bp, Homo Sapiens
  misc_feature (213)..(213): n is a, c, g, or t
  misc_feature (216)..(216): n is a, c, g, or t
  misc_feature (219)..(219): n is a, c, g, or t
  misc_feature (350)..(350): n is a, c, g, or t
  misc_feature (380)..(380): n is a, c, g, or t
  misc_feature (409)..(409): n is a, c, g, or t
  misc_feature (435)..(435): n is a, c, g, or t
  misc_feature (455)..(455): n is a, c, g, or t
  misc_feature (500)..(500): n is a, c, g, or t
  misc_feature (510)..(510): n is a, c, g, or t
atggtggatttgtttctgcttaaaattggatcaaaataactaaaaagaaaaatagaagataactaaagattatgattgctttataaattctactgaatgttgttgtttcacctatgaagccacagaatgataatggctataagcatctgaatctgtagtttattgtaaaatattaaccctcatcttttgtagcaaattcagagctattactgngcnccntcagtgtagaataacagagcttttcaaatatattagaccagtttcaggagtttttcattaaccttttagccttttacaccattatccatataagcagcagaattaactttgtagactattttaatttcggngataatattatggaatatactttggattcnagggattttaaaatcccatatttttggcnaaccggtatcaattaaaattcctggnaaaggatactggcctttatncacccacataattcctttggtgaagggcaggaggggaagtttccncatattgggntaacaagccttggtccaatccaaggaaaccaggcattggaaatgg

SEQ ID NO: 304497 - DNA, 632 bp, Homo Sapiens
  misc_feature (292)..(292): n is a, c, g, or t
  misc_feature (442)..(442): n is a, c, g, or t
  misc_feature (451)..(451): n is a, c, g, or t
  misc_feature (474)..(474): n is a, c, g, or t
  misc_feature (537)..(537): n is a, c, g, or t
  misc_feature (546)..(546): n is a, c, g, or t
  misc_feature (562)..(562): n is a, c, g, or t
  misc_feature (589)..(589): n is a, c, g, or t
  misc_feature (596)..(596): n is a, c, g, or t
  misc_feature (607)..(607): n is a, c, g, or t
aactgagaggcatgatagtctatcctcaaccaccaacagcatttggcactacaactcgtgtccgacctggctttaacacacctttctaggttatgtcccctctagatctccctttacaccatgctccagccaaagggcacttcttcctttgctgggccatgctctttgctcttgcttaggcgtttattaactttcttgctgacatggcacgaaatctgacattagcaaagataacatacactcctaattcaccataaaaaacatcagcgtcacactggttagtgggcgttanatcttaaaataagtcaatagacaagaaaacttgaaatgccagaaatcttacagcttatatataaaaaagggaactagagttttttttagatttgatggaagattctaaaaatacatatgggcattatcaataatggagtttggaagccgnaaggtttcnaaactatcaggaactaataatantgggccaataatatttaacccccacatggtgggaagacagatttggcatactaatcctggccnaataggggntataaagttggtatangggccagggacagtagctcacaccggnaattccntagggggctgngggtaagaagattgcttggggtcgg

SEQ ID NO: 304498 - DNA, 339 bp, Homo Sapiens
  misc_feature (139)..(139): n is a, c, g, or t
  misc_feature (147)..(147): n is a, c, g, or t
  misc_feature (152)..(152): n is a, c, g, or t
  misc_feature (156)..(156): n is a, c, g, or t
  misc_feature (185)..(185): n is a, c, g, or t
  misc_feature (279)..(279): n is a, c, g, or t
  misc_feature (310)..(310): n is a, c, g, or t
  misc_feature (326)..(326): n is a, c, g, or t
tgagccactggttacattattattaactatagccatcttgctctgcaatacaataccagaactgattcctcctatgtaactgtaactttatacccattgaccaagtcaccattattcactaaacatccactgttgttcnagccaggntaagnaacnagggtacttcacataactgttaatccttnacatagccctgaaatgtgggtcagatttccattttacagggtgacacacattcaatagatacacattcaatatagatgtgtatcagagaggtcnagtcaccagcctggagggtcacacagctccnagtggagaactggcantccagcccaggaa

SEQ ID NO: 304499 - DNA, 145 bp, Homo Sapiens
tgcaccagcacccggcccagcctttctaatatacctcactccccctcgctaacatacgggagtcttctgttccagaaactctggtctcctcactgttgtcccacctacctctctccaacacactgcatgttttcttagttctgca

SEQ ID NO: 304500 - DNA, 151 bp, Homo Sapiens
gtctccgaaagcaaataaaggtttttaaccttgggaatattttactgttaaataaaaatgttaaaattagaaagtgtagctagatcgtagtttgctaaaattatctagatgtaaattcttaaaattagaaagtgtatctagatgtaaaaag

SEQ ID NO: 304501 - DNA, 457 bp, Homo Sapiens
  misc_feature (328)..(328): n is a, c, g, or t
  misc_feature (348)..(348): n is a, c, g, or t
  misc_feature (371)..(371): n is a, c, g, or t
  misc_feature (377)..(377): n is a, c, g, or t
  misc_feature (386)..(386): n is a, c, g, or t
  misc_feature (395)..(395): n is a, c, g, or t
  misc_feature (415)..(415): n is a, c, g, or t
  misc_feature (431)..(431): n is a, c, g, or t
gtttttggtagcaaaaagataatactttgtagttttaaaaccaatggcttatttggaatttgataacttaatttaaacaaatataaggtggactatacattaataggagtcacaaagattgacaaatcaaaggtcagatgattcacgtagttagggaaaaataaatttatgttgccatggtcattactactttcaaagagaaggtggtggaaaaagtgaaatatatagggttttctttaaagttcagtttatcattatctacattattatagttacaaacatggaaagttgatacttaactagtaaactgccgagagtagagaaatcntgatccgggacctagagctngcagccactgattccttgccaangtgccnggggagggnaagttcccnggatcccaggcccctagtcngggtaagggtttaaangggccaatttggggagttggcagatc

SEQ ID NO: 304502 - DNA, 113 bp, Homo Sapiens
  misc_feature (88)..(88): n is a, c, g, or t
gccacatttcttccaactatgtagttgccacatctagtggaaaatgaaaaaagattaataaaccatattatgacaccctattgtctgncattatgcattttaaagtgactacc

SEQ ID NO: 304503 - DNA, 154 bp, Homo Sapiens
aaaaatcgcctggaaatcacttgctagttacagagatacatctcaaagcataacaagtttattggtatcatcagctacctcctctctcggtttctgaaaggggaagatggtggaggagtgagtaggggtatatgcgaacactaaactcatctcc

SEQ ID NO: 304504 - DNA, 611 bp, Homo Sapiens
  misc_feature (157)..(186): n is a, c, g, or t
  misc_feature (409)..(409): n is a, c, g, or t
  misc_feature (445)..(445): n is a, c, g, or t
  misc_feature (463)..(463): n is a, c, g, or t
  misc_feature (528)..(528): n is a, c, g, or t
  misc_feature (547)..(547): n is a, c, g, or t
ttaaagagtgctctaataggcctctaactgcaaagaatatagattcacctaaataacctcaagataaaaggggatagtagttattataaaaacaaacaaggtatagaagtggacctagaaagactttgtaaagcctaagaaatcatattacctcttnnnnnnnnnnnnnnnnnnnnnnnnnnnnnntcttctgccttcctctctctctgtgaatcttttccgtgtgtttatgttcctttatgactttagcttgtcatgacaaacctcatagaatccttctagctttggttctcactaactcatctttttctcgttacttcttagttctagtttcaaactgaggaaatctgattgggtcgattcatgtttttcacatgacgtggattgctagccattgtgacagattggnttcttttggggtcaggtggccaactttccagtttgnttccactgtgggctagangggtggagtcacatgggttcagaacatgggctgcctaagaagctgggctccacagtagagactantgggcaaatatatcctccnagaaggtactggtagatgagcaaggggccataatgggaggtccataagtcttccaaaattacct

SEQ ID NO: 304505 - DNA, 328 bp, Homo Sapiens
cttctaccaccaagtactgtactcttaacaagaacagtttggtagggtttttataagactatatagatataagatgatagagaagagagtcatgaatgatgtcagagcactactgaagcctttggagtgattccatagccttctggatggcagctgaatacctatatgtagtatcactgcccaaagacctagactagaaagtgcaaagtagcttagcagctgcagtcattcattcccagcctccaaaattctctttctttcacctcaaatctatttcttgtacttacctactcacagcgacttctgtttgctttcgatcttcacctga

SEQ ID NO: 304506 - DNA, 446 bp, Homo Sapiens
  misc_feature (436)..(436): n is a, c, g, or t
ttacagaccatatgcaagtttatttaaataagttaacactgcagagtgagtcaatttataagtataaaaatagatggtttagaaaccaaaaataagcaccacacaaaagcagattatacatacaccatcaggcctttggaatattaaggcaacataaatatctcaagcaattttagaagaatgctttacttatataacagatgttattaaaacatctcaaaagaggcagggctcacaatttttttcagtatgaggtcttcccttacatttttgttaatatattaatgattcttcttaaatactgtaattagtctagattaacaaatgggctatcaaagccactatcttgttggctagatagcggaacaattaattttcttgaaggctggctgacacactgaagatggtaatgtactggctcagttttttgaaatcnggactttaat

SEQ ID NO: 304507 - DNA, 337 bp, Homo Sapiens
  misc_feature (148)..(148): n is a, c, g, or t
ttttaaattaacagctacagtttatttaaaatttagtattttccaaaatgttttacacatcatcttcaattatcttcagactaacacttttactaggaagtagacatgaaggacatgatcagataacaagagatcatcagataatgcncagaagtcaagtgacttgtctaagattgcgtagttaacataaatagtgttctcccactttccagtattgttttgctttacaaaactatactcagacaattaaaagaaaatgttataataaaccagtccatgtggaggcaaatctgtctcatccttggcaaaaaatacttatgggccaaaaaagaatctc

SEQ ID NO: 304508 - DNA, 195 bp, Homo Sapiens
gatacagggtctcactttgtcaaccaggatagagtacagtggcatgaacatggctcacagctgcctcaacctctcaagctccagcgatcctccctcagcctcctgagtagctgggaccacaaggatgcgccaccacccctggctagttctgttcattttttgtagggacaaggcctcactatgttgtccatgact

SEQ ID NO: 304509 - DNA, 322 bp, Homo Sapiens
  misc_feature (109)..(223): n is a, c, g, or t
  misc_feature (225)..(273): n is a, c, g, or t
  misc_feature (279)..(279): n is a, c, g, or t
attattaatcttctgttacaggggccctggaccttagaagagtggaaggaaaaaaactttccccttaaatagataatgtccattacggaatcaaaaaaggcaatataannnnnnnnnnnnnnnnnnnnnnnnnnnnnnnnnnnnnnnnnnnnnnnnnnnnnnnnnnnnnnnnnnnnnnnnnnnnnnnnnnnnnnnnnnnnnnnnnnnnnnnnnnnnnnnnnnncnnnnnnnnnnnnnnnnnnnnnnnnnnnnnnnnnnnnnnnnnnnnnnnnnacagtnagggaaagaaaggccaggaaccatgatttttaaattaaaccag

SEQ ID NO: 304510 - DNA, 164 bp, Homo Sapiens
ccccaagaccagatctcactgttgtcacacaggctagggtgaagtgagttaatcatggctcactgcagcttcgaactcctaggctcaaacaattctcccacttaagcctcccaaatagctaggactactggaacatgccaccatgcccgactaataattaactt

SEQ ID NO: 304511 - DNA, 157 bp, Homo Sapiens
ctcttctgaaatagggtctcactctgtcacccacgctggagtgcaatggagtgattcacggctcactacagcctcgacttcccaggctcaaatgatcctcttgactcagcctcctgaatagctgagactacaggcacatgccacgactcccagctaa

SEQ ID NO: 304512 - DNA, 479 bp, Homo Sapiens
  misc_feature (418)..(418): n is a, c, g, or t
  misc_feature (443)..(443): n is a, c, g, or t
  misc_feature (450)..(450): n is a, c, g, or t
aaaacaagatataattcaggaatcatttcctttctcctcttgtgctcaaaatagccactgaaaggcaaggtcagagacatagtttgagatgatcttgccaggcgatccaattacactttgctaaaacacagttctttcaattagatagtgtggttcttgacattttgaagtgggcaaccaggttggtgagtcacttaaactgtggtgccagctcattgtctatgatgaactcgaactgtccttcccagccgggaactcttggcaagcttccttaaagacccagtggctggcaaagcatgaggaactatcacacagaaaaggaggtcctccttgggttttgaaaacagacgatagaagtcttagaatgatgcaagccaggtcacaatctcctaagccacgagccttatctttgaatganacattatttctaagttggatatggncatgccngattcagggggtttggctttggtaagcag

SEQ ID NO: 304513 - DNA, 175 bp, Homo Sapiens
aaatttctttcagcaattatacaaaccttgatacatttcttcgtcaaaggatttgaatcaagtattaggaaattgcatggaatattttgggcatcagctccttctaccaggactgatccttaaaatcaaaggcaaaaactgctctattcccttttcatgcttgtttgcagtctgt

SEQ ID NO: 304514 - DNA, 216 bp, Homo Sapiens
acagttcttaaattgagatttgaattatttaatttgcaagcttttccataactagaaagctataaattatcttatcagttttacacatattttggtacagttttgggtaaaacagtaatcaatacttggttcattaaaagcaattagaaacccaaacaagcttctcccttaaaaagataatccagttgtgtatttgttgcacgctgtcgttgcatg

SEQ ID NO: 304515 - DNA, 179 bp, Homo Sapiens
  misc_feature (134)..(134): n is a, c, g, or t
ataactccaatttttgctacctttatcttagacattaacactatagcccaaagcatagttactttgctaaatcagaaagcaactgagttctttgttttctcctcaaatagaatggggaacgttcacaacattcncctaaggtcctaccaggaataccattgtgggttatagaactcagg

SEQ ID NO: 304516 - DNA, 219 bp, Homo Sapiens
  misc_feature (205)..(205): n is a, c, g, or t
gggaaggtgttgggtaggaagagtcacatttgacagaattcataaataatgtgtcctgaagtcagaggatgactgcaaagaaacacctcatgattccattaaatataaagagataaggagcaaggaggaaaaaagagaaagaattggtctttatttttcttgctaagaactctctggagtattgaaagacattgaaattatcccnaaaattgtccccac

SEQ ID NO: 304517 - DNA, 179 bp, Homo Sapiens
gcgcctaaggatcagcgttctctctctgaacacccttcagtgctgctggccatcctcattatggtcttgttcaaactagtgtttcttgagtccctcctgtaagtctgttaatcctggatttcaacctctgggccaaagagggctgtttgaagtttccttaagttcataataatggcatc

SEQ ID NO: 304518 - DNA, 493 bp, Homo Sapiens
  misc_feature (326)..(326): n is a, c, g, or t
ggtgctgttggaaatcagtagtgagaggaaaacactcaaatctggaagtctagcgctgtcggtaggaactgggtagaaaaaactatgcatgtccccccatcactcggaaactacatcagaacatcataggagcatcctgtttccatgtgcattagtttccacgaacatacatgtgaatgttttcccacctgtagtgttgctgtggagttgtgagatgtcaaagtggaggcaagagtatctgccttttgcagtaggctctgttcttttcctgtcctgagagaggaggtcagtctaaccctcaccttgtgagtttcagccttatactngacctgagcccagggtgggatcagatgctgagatcatgtgactccaagttgcaagacacgtaatagagagaagcgtgactgttggcatccatgcaggctctaatcctgggctccttcgggctgggctgagctttgggctcctgagctattaagagagggatgatagg

SEQ ID NO: 304519 - DNA, 221 bp, Homo Sapiens
ggcagaaagtcaacgggctcggagtggttaaagtaggacgaatattcattggttgagtagttggaatttgaactggaccttgaaagttgggtagaatttaaatgagtgaagaagagctaggaaataatttcattaaggaaataaatatagctaagatgggacaagcatagcatttctaatgccataccattgtttttataattaatgtagcataaaggcac

SEQ ID NO: 304520 - DNA, 176 bp, Homo Sapiens
atattacacacagtgagactgagctctagggagaggcagaaccagaggcagaatccaggtttccacacctctggtctctaacactatcctcaaaactagccctttccaacctgttgcactagggttcacctaaaagaaaatgccaagatatcattatcacaggctttcaagagcca

SEQ ID NO: 304521 - DNA, 126 bp, Homo Sapiens
actcctggcctcaagcgatcctttcacctcagcttcccaaagtgatgggattacaggtgggagccactgcatctggcccttgtctcttatttctgtcatactaaacatttgtacttctttttctgc

SEQ ID NO: 304522 - DNA, 466 bp, Homo Sapiens
  misc_feature (304)..(304): n is a, c, g, or t
  misc_feature (377)..(377): n is a, c, g, or t
  misc_feature (422)..(422): n is a, c, g, or t
aaatatgcactagtaagcagccatgaaaaataatgttttagaagaacatttaatgctggattaaatatacagaatatatttaaatgaaagaaggaggttgaaaattaatcattaacaaatttgtgcatcgtgaaatctggaagaatgataacatacattcttaacagtgggagttggtagtaggtttataagtaatttagattttcatccttttggatgttttctgcatttttcatgtattaccgttttggtttcagagggaaaagttaaaaagaagaaaaagcactgtaaatctgtcagttcnggtgcccaaaaatattcccccacaatagcaagattttaataccagaagtggataaagaaggaaaatagtgtcntcctttggtagaactcccttggtaacattggttttccattttacnccaagagcatggtatgcatgccgggaataaatatagagccctat

SEQ ID NO: 304523 - DNA, 157 bp, Homo Sapiens
taaccatcatcaacttctagcatctgagaagatggcattaatcaaataattggataaagtttatagtgggaggttcggtttcgttcagtgctttttcatttttcttattcacaagcatatacgtaggtgttcgtgacttattttctttagccctgac

SEQ ID NO: 304524 - DNA, 308 bp, Homo Sapiens
  misc_feature (210)..(210): n is a, c, g, or t
  misc_feature (291)..(291): n is a, c, g, or t
tttaaagcacagaatatggggagtggaaagagataacaagagtaataaaaaccagtgagcactttcaatgaaacagacatttgccaagtgtttttgaatatatgacctttttcattcatgtaaaaactctgtgaaataggtcgttttatttccatttgcccatgataaaaatgctccttaaagtgtcttaggacagcaggaggagaaccnggagaggaacagtatcagccaagctaaggactgggagaaaccccaggtgaagggcattgggtataactaaaatatctttcngaggtccaataggggag

SEQ ID NO: 304525 - DNA, 505 bp, Homo Sapiens
  misc_feature (227)..(227): n is a, c, g, or t
  misc_feature (231)..(231): n is a, c, g, or t
  misc_feature (240)..(240): n is a, c, g, or t
  misc_feature (250)..(251): n is a, c, g, or t
  misc_feature (260)..(260): n is a, c, g, or t
  misc_feature (286)..(286): n is a, c, g, or t
  misc_feature (289)..(289): n is a, c, g, or t
  misc_feature (299)..(299): n is a, c, g, or t
  misc_feature (307)..(307): n is a, c, g, or t
  misc_feature (441)..(464): n is a, c, g, or t
  misc_feature (493)..(493): n is a, c, g, or t
ctacacctcagtgttgaaatcattctcatgtggcattcagtccttaactcttttaatccactagggggcctggtttctggtagactgtggcactgatgcagaattacgaagacttcagccgtgagagttagatttttcccccaagttccagtatcttgctctattctttatttcctgcccaaattctaccctggctttcactctgtgcaaagaaaggagagcatcanctcncagaccaanggagtgggcnnattcatatnaagcacagcaaactttcataaatttngtntactttcatntggatttnctcttgtagttggggaaaataatgtttcgctataaaatatccttttcacatttctggttaggctgtaagaaactcggatcctataaatggatggattatcagttggattaactaaacaatggttagaacattcnnnnnnnnnnnnnnnnnnnnnnnncctatttgcctacttgaatatccttttancctaaatcgact

SEQ ID NO: 304526 - DNA, 196 bp, Homo Sapiens
  misc_feature (132)..(132): n is a, c, g, or t
  misc_feature (174)..(174): n is a, c, g, or t
  misc_feature (179)..(179): n is a, c, g, or t
ttggagagatgggggtcttgttatattgcacaggctggtctcgaacttccccgcctcaagtgattctcccatttcagcctcccaaagctgggattacaggtgtgatccaccatgcccagcctgccctttaantttttggggactttctaaagcacagtttttaaggtttttaanatttnaaaaataaatattttac

SEQ ID NO: 304527 - DNA, 193 bp, Homo Sapiens
cctggttgctcatattccaaataactatgagtttaatgttgtatagtataaaatccatacaattacttttcattcaacaacactgcagtgatgaaaagtatgcagcattcatataagcctaccttagatttattgatataaattgtttttcttttccgagtcaacctttaaacctaaaagtttaaagagtcat

SEQ ID NO: 304528 - DNA, 166 bp, Homo Sapiens
gtcgaacatcctgtagcaaaggactgagcaaatgatgcggtggggcctgaacctgggcgttgtcagaggcgtgggaaggagtctgaagtctcattgatagtttcttgatgtcagtagttccgcaagttcccagaaaaaagaggaagccttcagtgaaacttttttt

SEQ ID NO: 304529 - DNA, 271 bp, Homo Sapiens
  misc_feature (124)..(124): n is a, c, g, or t
  misc_feature (164)..(164): n is a, c, g, or t
  misc_feature (218)..(218): n is a, c, g, or t
  misc_feature (229)..(229): n is a, c, g, or t
  misc_feature (260)..(260): n is a, c, g, or t
acataaggggatactgggaagatggtgactggaatattttttggtatacttccacacccagttccagtctaggtgcttttcttaaacccaattcagaaaacaagagtataggtaagctgtgaancctgggctgggagggcagaggagaaccagaaagccacggntccaggggagacttttggcccgtctcagggagaaaagtacaggctcagcacaangtatactcagnctcccttggcctccaaaaagtcaaggaaggngtttaatgggg

SEQ ID NO: 304530 - DNA, 313 bp, Homo Sapiens
  misc_feature (185)..(185): n is a, c, g, or t
  misc_feature (289)..(289): n is a, c, g, or t
cctagtagaaattagaggcagagaagtagatcagtgaaaagattggttataaatccaaattaccaatggcacctaaactttggttccacattcccacttctaggaattatcccacccatatagttacacattggagtaatttagatgcaagggtacttataagcagtgtgatttataatagcaangggaccattgtttataacagcaaaaccatgtaaatatgcatcaatatcaacaaggcactagttataccacatccacccaatttaaatgctaactagttatagcncggaatgggaaagggtttttgtgt

SEQ ID NO: 304531 - DNA, 430 bp, Homo Sapiens
  misc_feature (306)..(306): n is a, c, g, or t
  misc_feature (320)..(320): n is a, c, g, or t
  misc_feature (367)..(367): n is a, c, g, or t
  misc_feature (395)..(395): n is a, c, g, or t
gaacatgtataatcagaaagaacatattcctaactaggaacattttcctttagatatactttgccaaaacattacttacttagacaatctgttacattgtgtgtaatcctcaactctgcagatggttgcacttccttaatattgcctgtctataattctaagaagtactacagtacacttcagggactgtatgtgctataaaaattgaaggtactttataaacaacttactttggagttctcccaaaggaagttattaaagtaattatggtattagaagtagcaggctattcctaaggtgaaatanttaatggggatttnctggctacatattggatggttccccgtcattaggcttctttcactantacaagaccgatagggtcccctaaaggntaggaactgggaaacatacgctgggcaatttaaaa

SEQ ID NO: 304532 - DNA, 158 bp, Homo Sapiens
gaacttcccggtgctggaaacacagaatagaccctaaatgaccactgttttatttattattgtctcagaattgtttagagctaaataatgattcagtatgtgattttctagaaaactcacggaaggagataagacttgcttttcatgaaaattggtac

SEQ ID NO: 304533 - DNA, 125 bp, Homo Sapiens
agcctgggtgttagaaattgtttttgactgattcaagataacatgttatctttcttaattcatacagctttgtcaaaacagcactagattaagatgaagtgccaaccaatactttgaaatttaaa

SEQ ID NO: 304534 - DNA, 425 bp, Homo Sapiens
  misc_feature (129)..(129): n is a, c, g, or t
  misc_feature (136)..(136): n is a, c, g, or t
  misc_feature (232)..(232): n is a, c, g, or t
aagaaattaaagcttttggttgtttcctttctttgcgttcagagagtagtctgtctgtgggaactgtttggagaatcttgttttccacattgtgatctctgattaaatcttattcaccatagatacganttataanatcacaaatttcctttccttcacataagagatgcttgtctaggcagagtatgcagaagtctcatactaacctcccacggatgtcagccctccctcnagggcgctcactctcagtgctctctcttcacctctgactagtttatcacacttatcatgtgtctccctggcatttggttgagtagaattctatctcccttattagctaagtgtctctgctgaggagtcattgctcacttgtgtgtccctactcacaggtaagggtgtattaagggtgtattaccagtaagtgc

SEQ ID NO: 304535 - DNA, 155 bp, Homo Sapiens
  misc_feature (90)..(90): n is a, c, g, or t
ttacatgctgccactctaaataccccagtacattgttatttgggcagtagatactttatttgtgtgatgacctgtagtatgtcagatttnaggagagcaaactccagtgtgaaacagaacagctgttgttctgtacattccaatgatggctgatc

SEQ ID NO: 304536 - DNA, 212 bp, Homo Sapiens
  misc_feature (79)..(79): n is a, c, g, or t
gataatatgcaagcagtccttttacttcaagtttctacccacacaggttcaacagagggaggagaggcagaggcagctnccatcagaagcagccatcgtcccagtcccatagccagtgtgaaatcttagccctcttttccttacacatggccgtggcgcatcttctagtcagcaccgaaatctcctccctgaagagcttctttctcttcctt

SEQ ID NO: 304537 - DNA, 485 bp, Homo Sapiens
  misc_feature (242)..(242): n is a, c, g, or t
  misc_feature (431)..(431): n is a, c, g, or t
  misc_feature (462)..(462): n is a, c, g, or t
tgagaattggaaggcagcagggtgattgaatggatgtactccttggtttcattatgtgagtggggagttgggaagggcaactagagagagaggatggaggggtgtctgcatttagtccagacactgcttggctcgctccccgagtcctcctgtttctgacttcctgcataactgtgagctgaagggtttcctcatctccccatcttaccccatcatactgatttctttcttgggcactggtnctacttggtgccaagaatcatgttgtttgggatggagatgcctgcctcttgtctgtgtgtgttgtacttatatgtctatatggatgagcctggcatgaacagcagtgtgcctgggtcatttggacaaatctcctcccaccccccaatccactgcaactctgctgttcacacattacccttggcatgggnggtggtgggggggcagggacacactgaggcnatgaaaaatgtagaataaaatga

SEQ ID NO: 304538 - DNA, 188 bp, Homo Sapiens
tctggagttaacatgcctagttcagagccgctgtggatgctcaaatcatttctggaattgccttcaggacacaattatgagaaagtcagacttccaatattttgatcatgccttgtgtcttcctaagtgtccttatcccactggattgtgtctcttactcccaagacttattccaaatgattttttga

SEQ ID NO: 304539 - DNA, 335 bp, Homo Sapiens
  misc_feature (52)..(118): n is a, c, g, or t
  misc_feature (189)..(189): n is a, c, g, or t
gcctcatatgctgtcttactctttctaatagaactttccctctaatgttacnnnnnnnnnnnnnnnnnnnnnnnnnnnnnnnnnnnnnnnnnnnnnnnnnnnnnnnnnnnnnnnnnnnttgaggcctagttcttaacagtgtctgacacatattacagtaagttttgtaatgaatgaattcattttgcntgacaaaatgagtttcaagtggttcttatcaggggtctgtagctattaagtgactgattctgattctgtttccacgcctccatttttatatttcactaccatgtgtggcggctgataccttggttaccggagtagcatgttgcatt

SEQ ID NO: 304540 - DNA, 300 bp, Homo Sapiens
  misc_feature (13)..(13): n is a, c, g, or t
  misc_feature (60)..(114): n is a, c, g, or t
  misc_feature (270)..(270): n is a, c, g, or t
tttggtgctatgnaattgtaattaatttcatgtcattttcattgctttatttcctcaacnnnnnnnnnnnnnnnnnnnnnnnnnnnnnnnnnnnnnnnnnnnnnnnnnnnnnnnagtaaagcaatcatttttaaagttcggttttaaaaacccacccacttttgcaaatcagactctgtgtttttaatcagacagttgaaactagggcagttgacccgttggggcacttgatttgctaaacgaaatctctcagtcttgtgaagtgggaancatgtgaaccctctgaatcaaggttttgtg

SEQ ID NO: 304541 - DNA, 373 bp, Homo Sapiens
  misc_feature (243)..(243): n is a, c, g, or t
  misc_feature (335)..(335): n is a, c, g, or t
  misc_feature (358)..(358): n is a, c, g, or t
ccctaccctctgcaatccactctgtctcttgcttagggccactactaagtgctctcttgtatccctggctctgtggctgctttaccagctccaccatgctgcattctcaacacaaagtgctatccactctgcagttctgtcatttgcaactagttcccactaggaatgtcagctctcagaaggaagggacagtctagtccatggctatattcctagaactttgaacacgtgcttgacttttangtaaccacttcataaatatttcatcccatttactcagcaaatgtttgttgagcaccctagtatgtgcaagtacctttctaagcactaggggncacatcaatgaacaaaatggggnttaaaaaaactgggt

SEQ ID NO: 304542 - DNA, 186 bp, Homo Sapiens
  misc_feature (172)..(172): n is a, c, g, or t
tcaagcctgggaagactgtttgaagtaggattcttcaagttagttgccattgtgatttcctgtacaaaattattcatcacttaactgctgatgcttttctcttgaatgactggtcagatttttaatgtaactttgagactagagcaaatctgacttgttctgcttgcctccnttccaatcacttta

SEQ ID NO: 304543 - DNA, 242 bp, Homo Sapiens
gaaaaattagcatatcctttacaaacccagattggcatttagaattgaggaaaggtgtgtaacatcaatttacttattttggttaagcaaattctatcaaataataatatgtgcagttagtatctcctgttccacctcgtagctgctttacctaaaccatgcattgacacgtacctccaaggcctcaaagtgcccacagtgtgtgctcccacagcattaaaatgcacccccttaacatttta

SEQ ID NO: 304544 - DNA, 510 bp, Homo Sapiens
aggttaagggccaaaagtgatttctacaagaatcctaaagagaagctatcatctctcctgtctcgtccttgcaaaggatagtggtcaggaatggggctggatctgccacattctggggaacagagatgacctcaaccttcagcaccagagcagttccagggagcaccaactggccaaagtcacaggtgaatcagtcaagagttttaagacagctttcccttgagataacacactcccgtgctggctgttctgacccagtcagaatgcaaatgtttgtgtagttatatttattaatagagtccacggttagccaggcctggcacatggctagggctctgtattgaaaccaataagtaaaaagcctgggaatttccaattttcggttcccactcctggttggctactggggggccttttaatccagtcctggtttttaatccagcagcctgcaagggggcaggaaagaggcaggtaaagttggtctagcaaggcagagtagaaggcacacct

SEQ ID NO: 304545 - DNA, 158 bp, Homo Sapiens
  misc_feature (30)..(30): n is a, c, g, or t
gtggtaggttgtcaaacttgaattaaattnttccaatgtggcttcatcattaggtctgaaatttaatgaatttcaagaaggcaatttaacctgtatttaaataaaagtgattatattctacatagattcattagccaaatataagtattttgggggga

SEQ ID NO: 304546 - DNA, 365 bp, Homo Sapiens
  misc_feature (159)..(159): n is a, c, g, or t
  misc_feature (164)..(164): n is a, c, g, or t
  misc_feature (177)..(177): n is a, c, g, or t
  misc_feature (183)..(183): n is a, c, g, or t
  misc_feature (242)..(242): n is a, c, g, or t
acatcagagtgatctcacattatccaatccattaacaaagtcaacacaggatggaagtatagaatctaacagttgaagagactaagatcctaatcccttgttttgccacttgctagtgtgacaacagccagttaatctatcatatcattagttccttgnctatnaaaggaggattangaaatnggtcacatggtcaaaagatcggttgtgaggattaaatatcatatatggaccttatgtgnatggaacttatttaccataaataccaggttgacttcactttatttcaaaaaatataaaggcacatatgacaaaacattaacacatgttatttctgggcggatggtacttatattttatacttt

SEQ ID NO: 304547 - DNA, 137 bp, Homo Sapiens
ataaacccatactcttttaaagtggtttctagggtttcggagtcagacctttgacttaactgactatgtctgttagccaaaatggataagaatggctttttaaaagaacatgttttacaggaccagaagttttgttg

SEQ ID NO: 304548 - DNA, 383 bp, Homo Sapiens
  misc_feature (192)..(192): n is a, c, g, or t
ctgaagaaaggcctgctatagttgtggcaccaagcaggtacctgttcccctctcctttaagccgtatgactgagcatggtggactggaagcgtaccatttcctcctcaaacaaggaagaagtgagagaggctggaggagccctgaagagcatggaaaatggaggcaaagttctctgtccaccactggggaangcattcactaaaagcaatcgacaaagaagtcacgtgtggcttctccagagggaagggcttcagtgtctaactcctgctctaagtcctgagcctctccactgagacatccaggcacttgggctcccagactgaaggtaatccagtaataccaatgttgaggctacttcccaagccctatcttttggaatctt

SEQ ID NO: 304549 - DNA, 192 bp, Homo Sapiens
tagcagctttagatgtacagaaatttgagccgatagcacagaaagttcccatattcccttcccttccctcgtttctcctattgcaaacatcttgcattaatttggcacatttattgcatttgatgagcccatatcaatatgttgttatttattggtctatagtttacatagggcttattctttgtgttgcag

SEQ ID NO: 304550 - DNA, 450 bp, Homo Sapiens
  misc_feature (96)..(96): n is a, c, g, or t
  misc_feature (193)..(193): n is a, c, g, or t
  misc_feature (209)..(209): n is a, c, g, or t
  misc_feature (259)..(259): n is a, c, g, or t
  misc_feature (278)..(278): n is a, c, g, or t
  misc_feature (377)..(377): n is a, c, g, or t
  misc_feature (432)..(432): n is a, c, g, or t
ccctctaaatgctgtcacttctcattttcctgtccagctaaagatgctgcctggccgtggctccacgctctgtaaacatgacccacaccccccagngcactccacggaagccttggagataagggacacatcacttctatgctcacctgaagtgaccccattgttaaaggacacagctcaactcaatcagggnaacaggaagcgattcnaagtcagggtgcaaactctggaggctgctgtgtgaggggggcactacgangacggtggtaaacagaaanggggggcttccttcaccagccaggtgaccccaggcaagtcacaaggaacccgctctgattcaggagggcaattgctggacctcaaagatttaaggggcnaaagcaagagaattgctggtttacaaatatatatggtagaagcaatttattaaanccacatcagttaaaatgg

SEQ ID NO: 304551 - DNA, 276 bp, Homo Sapiens
aaactgagagagaaactattgattatctagcccaaccttttatagctaaatgaccttgaataggtagccttttcttttatctgtacaagcttactgcagaatctcaatttgtgtgagtgacagcaggtgtagcagctccatctgtatttgtcagattatagtttactaactgaatgaactaaaaattgggatatttggggcttgaatttttattctgaatgtacagtctgactttatccccaccgggaaattaggaattataaactcaggccctaa

SEQ ID NO: 304552 - DNA, 170 bp, Homo Sapiens
ggtattcagaatgtacaccaataatgagccaaaaggacagcttctctgttagatttgggagattttgtgtaggattatttcagataattaatgtgtagtcccatgaatcaagcagtgttacactgaaggtcctttgggttatagtaaaagctccatccgtggtaacctga

SEQ ID NO: 304553 - DNA, 469 bp, Homo Sapiens
gcgaaaatgtctgttaaaactaaagggagaacattgaggaaacttgggaaaatgtgctggaataaggagaacatccctcaaaatgcttattcctcacttaggacaaactgggcacatgctgttttggactaactttcaagataaaattattaacgttgccactgaggaaattcagatgggaggaaactaaagggaactgcaaaggtggtctggtacagtagcacgtgcaaggtccaatccagagtcagcttgtaccacattctggcagccagaggtgctgtaggatcagggctctgctgccttagactggacacatcctgcctctttcttattctgttgttctctctggacttaaggctgattctctttcctgtttgtagattatgtttcccaaagttttgatgaccagttatacatgatgttttatatcatgcttgcagaccacgcttcccactgaaaaaggtgtaac

SEQ ID NO: 304554 - DNA, 159 bp, Homo Sapiens
  misc_feature (135)..(135): n is a, c, g, or t
cagtggtaggagaagcttgggttgtgagggactggttaagtgctttactcagttttctgtgttcactcagtggcagacgagggctgattggaactggtgcccacccttctacaggccagttttcattttcatggnagcatactctctagtttggagttg

SEQ ID NO: 304555 - DNA, 459 bp, Homo Sapiens
  misc_feature (307)..(307): n is a, c, g, or t
  misc_feature (318)..(318): n is a, c, g, or t
  misc_feature (385)..(385): n is a, c, g, or t
  misc_feature (417)..(417): n is a, c, g, or t
  misc_feature (427)..(427): n is a, c, g, or t
gcttaaagagatttgaaatccctttacgtatgacagtggcttgtgggatgaagggcactacaaactgatcagtgatagccagactctggggaaatgttttccccacaattcaatgaaaaatcttgaacgaacccaattagattagtattttcagtatttgagagcaaaagaaaaccacttaagtgctatcgtatgtgagctgagtaatggtattaacttacatctttatacaaatgctccaatctcaaactgaaattttgaagaaaataccgacaaaaatgtatttgtgtaccctgggacttaaatnggcccattaanttaaaaatttatcccggtaggccattcctttttaggctccacctttaaccagacggatcttgggtcnaggggactgacggaactttttccggtaaaagnaaggggccanatttatttccagactttgcagggccccatggg

SEQ ID NO: 304556 - DNA, 476 bp, Homo Sapiens
ggcgtttctaggcacatttacaaagctgcattcagattgatgaggagcttcatcattcagtttaatgtggccaactcctccctctttttggaaaagagcaggtgcactaaaccagcaaacacagccagcactgggctgtgcctgagagcagccacataggggtctctacagacagaaacccgagaagaccgggaaagaaccaggacccagactcaaatatgaaaaatctctgggctttgtcctacggccttcccatgagtaactcatagccttgttccagtggaatctggccttcactagtctcagtggcaagttggttatgtggaaagtctctcttcacacacttgtgcgaataacgataaagaattttgtattgttttcactctacattagaccatgagtatttatgcctgtggttggcagtttgtattagtttccggccccaggtatctcctgcagcatgcgcttcagtccta

SEQ ID NO: 304557 - DNA, 119 bp, Homo Sapiens
gatataccacttgtaggatttttttatgttgttataatgtcttcatttcttcctacagtctagtaatatcttactcctttttcaaagtccagtttaagacctgtttcccctgtgaagtc

SEQ ID NO: 304558 - DNA, 507 bp, Homo Sapiens
  misc_feature (303)..(303): n is a, c, g, or t
  misc_feature (306)..(306): n is a, c, g, or t
  misc_feature (312)..(312): n is a, c, g, or t
  misc_feature (466)..(466): n is a, c, g, or t
gctggggctattaaatatgtgatatgaattaatcaagcagagaaaaagttactagtgacagggaaaaggagaaaatatgtattcaatattatgttgtaaacaatttataaatatgcttcacctatgagtttcttctcagtaccttagaaactataacaccatggaaaattttggatagtttagggaagtgcatcatttggtaatgtgaaaaataagatggtcgtgataaaggaacttgggaaaaaagaaatggcatgaattttgagaacacgtactttctgagaattttcatgtttacgaaanagncagccnaaaaatcctgggaagccgtgtttgttcacaggcaattttcaattggtctcatgcatttctgtgcatcttgcaaatagaaaggcactagtttcacatttattacaggttttcctttttaaagatctttatatagtggatagccctggaagatcangatattgtttatttatggatgagagaacagatttgtttatt

SEQ ID NO: 304559 - DNA, 443 bp, Homo Sapiens
ggatttaattattagtaatagaactgtaatggaagaaagttaaatttatttgattaggtatctgcattataaatgtttgaacttggaagtcatatttcttcttcaaaagcagacatctttcatgctgttaatgtttatacattttagtgcttggataaagctattctgacacactcaattagttctttcaaaaatgcatctctttgctgtccctcgccctccccgtccccctcaaaagttctacgaagctgtgggaaaagttcagttgtctatctactgaacgtagtccaaggaatacccgtgggtttgttcactgctcggggaagctgggacgtgtgccgctctgacttcctttgcacatccttgcttccctgaatttgcatttattggcctaactagcatcccgcaaaaagggcctttcctgggctggcctgcgaattggg

SEQ ID NO: 304560 - DNA, 179 bp, Homo Sapiens
  misc_feature (144)..(144): n is a, c, g, or t
  misc_feature (162)..(162): n is a, c, g, or t
aaagttaagatcatgtaatatgcctcaaccacataaattgataaattaccttcatctccagtcaaccatttacaccattttccaagagatgagttttaatgtaatgtcgaggcagctttattctctgagtcatctgtagtactncttgttgctacagccgcngacgacctcagcagcat

SEQ ID NO: 304561 - DNA, 413 bp, Homo Sapiens
  misc_feature (172)..(172): n is a, c, g, or t
  misc_feature (174)..(174): n is a, c, g, or t
  misc_feature (177)..(177): n is a, c, g, or t
  misc_feature (179)..(179): n is a, c, g, or t
aatgggaccatacttgttttcccacttgatacattatggatagtttgcccgtgtcaaaaagtagagctccatgttagtattttttatggctgtgtagttgcagtagacatttgctcctgccatcatctggacacatgttgggatcccacgtctccatttgaggtcaagaaangnccntngtaacttgctttagaaatgaaacgtgggcagaagctctttactgcaggtgaagcctctggtaccatgacactttcttccatgcccctcatgaagcatgtgttggtgaagtgtgaccgctaaagccattctacagatcacaaccggctctaaggactggaagcgggactttggcatgattcgagaaataaaatccattggtttaggccccacttgttggtaaggggtggtctcgg

SEQ ID NO: 304562 - DNA, 177 bp, Homo Sapiens
gtcaccgtgcccagccgacttgacatctttactatgttgaatcttcccatccatgaacatgatatttcagtccatttatttagctattttctgatttctttaatcaatattgtatagctttcagtatataaatgtgataaaagttttattaaacttacacctaagtatttttttgta

SEQ ID NO: 304563 - DNA, 258 bp, Homo Sapiens
gctctgattgaagacagacaacagacctgcccagcctcaagttcccctttctttcccttccccaagatgttccctaagagggctcctcagaatccccaagacttcaaagaatgcagtttaacaccaactcatttgatggtaccaaatggataagcagaagattgtttggttacattttgtggagcagacactgagatggaatttggggtacaacatgagaaagaagcggggatcaggaagaactgagcagaagaccaa

SEQ ID NO: 304564 - DNA, 236 bp, Homo Sapiens
  misc_feature (39)..(39): n is a, c, g, or t
  misc_feature (210)..(210): n is a, c, g, or t
  misc_feature (221)..(221): n is a, c, g, or t
gcgaatcaaaggctgggcgaagaggcagggaggcgcggncgacgctgctgggaagcgggctctgagtagatttgtggcgaccgtggcagtggctgtgactggaagcttctggaaatggcggcgatgaggacccccacatagggatggccatagcagccacaaaaggaagcaaacaagaacaagtcctgatggagcaattttttgtagacnacgcagcatanagagagaataatctc

SEQ ID NO: 304565 - DNA, 275 bp, Homo Sapiens
  misc_feature (244)..(244): n is a, c, g, or t
  misc_feature (250)..(250): n is a, c, g, or t
  misc_feature (265)..(265): n is a, c, g, or t
agtgtgttgagttaggacatcgcaccttctcatgagcaacagattttttgcctcaggaaaatggaaaggagaaaaggaaaaatataaaacaattataatgttcacttattaggtaatcatgtcagtctttctattgtgaaacgaatagcatagggtcttagtattatgtaaggaaatttgagttcgtgtaacttgaattattaattacccctaaaggattttcacccacatgtaaagcatttgngttccnagaatataataggcnctttttcctc

SEQ ID NO: 304566 - DNA, 133 bp, Homo Sapiens
tgctttttcttttccgtcgaggaagagagaaagaaataaacatccatttgagagaagtcactggctttggtctaggtttgcccatgaatggccctcaataaaactatgtctgctttaggagaaacgactaagg

SEQ ID NO: 304567 - DNA, 411 bp, Homo Sapiens
gttttaatggaagagtataattttgtttctttggaaatagtcctaaatattgatgaataccttttggaaggtaagaatgtcatggaatactttctatagaacattagtccacatattctgttcccgcctatctccacaccactgagcaacagtgcctgctcccaagtgcaaacacacattcttatatcagcatcaagactacataacagtgaggtgggtttttttgtagagaacatacagaaatttggagaaaggatcatcaagtattgacaaagtcagaaacttagtactgctaaggaaatttattttttggtcacttaatatgatactaataacttggtttaaaatcctagttaactactgcattataatttattatattctattcacaggggccttcattattttcaa

SEQ ID NO: 304568 - DNA, 511 bp, Homo Sapiens
  misc_feature (82)..(83): n is a, c, g, or t
  misc_feature (341)..(341): n is a, c, g, or t
  misc_feature (473)..(473): n is a, c, g, or t
ggctgtttgtaatagtctacaaaggaacacctggtgacagacactcacccagcataagcagccaggagagtcacctagggtnnaatcgggtgactccttggggaagcatgccctgaggtgcggaggagaggatcttccatcccccgctgattgtagtcctgagtccagctgccacctgctcaactgcggctcctgtctgtcagcacccctcttgcccctccttggcttggggctcctagaggcccaggtctcccatgggggccctctttggtgggaaggcctagggtgatgcccccacactcctcggcacaagtgcctagacatacccgactccagcagancagagagcagcataaacacaggaggcatacacacgtgttagcacgttgcccgtgtgtgcaaatgggctaaccaggcttctgaagactcttactctggcggggagccagactggtaccacagcccagagggtntttttagacagctgtggaggccacaaaagagctccctt

SEQ ID NO: 304569 - DNA, 244 bp, Homo Sapiens
  misc_feature (111)..(111): n is a, c, g, or t
  misc_feature (126)..(126): n is a, c, g, or t
gcactccttcaggtgcagaaaaggaaagcatgactgtgtgtcactgacttaaaataggagtgaggtgagaggggcagctgggctcatggacgtcaagtggacagtttctcngctggtatttcctanctttcctgttttggacagcaggttcctgccttctaagctgggggtaggggtgagggagtgtatgttaaaaagctctgtggacttgctttttctcttctccatgtgtggtcctttccac

SEQ ID NO: 304570 - DNA, 273 bp, Homo Sapiens
  misc_feature (255)..(255): n is a, c, g, or t
tcctgtctaacaaagatgataggatggcttccctttcagcctttgcgtgaacttaacttctggttggaaataagatcccattgtctaaattatgtcagcgtagttcctggtagcacaagaatattaaacactttaatgtgacatccaaaattaatgagtcagttataagaactttccttgaaggatggaaaagatcataacccattttcatgtcctgggatgcttcaattcagtctcatggtattaaaaaaatgnacaggcctttggaattgg

SEQ ID NO: 304571 - DNA, 450 bp, Homo Sapiens
  misc_feature (154)..(154): n is a, c, g, or t
  misc_feature (174)..(174): n is a, c, g, or t
  misc_feature (285)..(285): n is a, c, g, or t
  misc_feature (305)..(305): n is a, c, g, or t
  misc_feature (378)..(378): n is a, c, g, or t
  misc_feature (393)..(393): n is a, c, g, or t
  misc_feature (407)..(407): n is a, c, g, or t
  misc_feature (430)..(430): n is a, c, g, or t
tacaactgcctaatggaaattcccacctggatattccattggctccccaaactcagcaatgtccaaatctgcttttcctttcatagcgcccaactcatttattgatgctatgctgctaatcaagtaaactaaaatctggaagtcatcttggcgngccccttccactccttggcnaccagttcccacctacccctctggctgcttaaatgtgcccatggcccaccactactactggttttacattacacattcctttccctcccaacaggtgcttggtccggctgnaacccaatttcttacaatgntaatgagtcatttatcagagcagtaatgagttcaggcgagtgatatatccggggcattaatggggttcagggnggcttactaaaaaanagggggttcccatngcctaggcaggaaggagctggtncagcattcagacttttcatg

SEQ ID NO: 304572 - DNA, 244 bp, Homo Sapiens
  misc_feature (11)..(11): n is a, c, g, or t
  misc_feature (49)..(50): n is a, c, g, or t
ggcatcaccangggacctcaagccccagaatatgcagcaaaaattatannctttttatcttccactttcccttccctcagaactaaaagtctttcagcacgggtaccagccctagaatttccagtacaccagcagcagcctggaaaccacatcctcatcaaaagacagaaagaaaaaaactcgagccagcctgagaaggaccctattttatgctgttaaccactgagactggcatcctcacagg

SEQ ID NO: 304573 - DNA, 322 bp, Homo Sapiens
  misc_feature (240)..(240): n is a, c, g, or t
  misc_feature (258)..(258): n is a, c, g, or t
  misc_feature (266)..(266): n is a, c, g, or t
  misc_feature (273)..(273): n is a, c, g, or t
  misc_feature (295)..(295): n is a, c, g, or t
ctataaagaaatattatattaatgaatgtgaaataagaactaatccgaagagcttctgtggactctgagaagagcattatatcttccccctgacctttgcaaacgaatcaggtaaataccgatttaaaaaaatgttatttcagaccttggatgaaaatcatcattatgtacctatcataaactcagagaaaaatgaacaactttggttgttattaaaagcatgtggaaaaaaggactgtnatattctctctcaaaggncttttggntccccgngttggcccttaaaaggcccatngggaaaccccaaattctccaggggggc

SEQ ID NO: 304574 - DNA, 516 bp, Homo Sapiens
  misc_feature (167)..(167): n is a, c, g, or t
  misc_feature (178)..(256): n is a, c, g, or t
  misc_feature (318)..(318): n is a, c, g, or t
  misc_feature (338)..(338): n is a, c, g, or t
  misc_feature (360)..(360): n is a, c, g, or t
  misc_feature (372)..(372): n is a, c, g, or t
  misc_feature (390)..(390): n is a, c, g, or t
  misc_feature (452)..(452): n is a, c, g, or t
  misc_feature (459)..(459): n is a, c, g, or t
  misc_feature (472)..(472): n is a, c, g, or t
  misc_feature (488)..(488): n is a, c, g, or t
  misc_feature (499)..(499): n is a, c, g, or t
atataaataacagctcgtaatacacactgttccacatctcgctttttcatctagcaatgatctagctttttcatctaaaatgatcttcaagatcattttatttcagttcatacagaacattccaattctttttataattgtatacaattccattcattgcatatagnataatatgacnnnnnnnnnnnnnnnnnnnnnnnnnnnnnnnnnnnnnnnnnnnnnnnnnnnnnnnnnnnnnnnnnnnnnnnnnnnnnnngagattagatcatcagagtgaagtcccccatggaatgggggttaatggacccttaaagaggntccaagaagctggcctggcntctttccacccatggtgggggncaccagccaagnaagaccgcccgtattaangtaccaaggggccctttttaacctgggccagcacccttggattctttgggactttcccaggncctttanggggcccttaatnaaataggatttccggntgggtttattnaacggaccccggtttat

SEQ ID NO: 304575 - DNA, 385 bp, Homo Sapiens
atcattactatttgcctctataggaggtttcattaggcatcttcttcattatgagtgcaatataatcaaacacttatcagtacaaggcagagagaccgggactagctgcctacacatcctcaatgagctttaggaaatgtgaaggaaacatggactgaaaatcttctggtggcaggtactctcatgtgttgtcctatctgatgctctcaacaacctctaggggtagatattgtgaccctcatcttgcagaagccttggctcaagtatatgctcagaatcacagagctggaagataaacttgggtctctctagtgccagagcccatggccctctgatctctcaagggcagagtaattacctttctcctttttaattataatctaaa

SEQ ID NO: 304576 - DNA, 388 bp, Homo Sapiens
  misc_feature (16)..(16): n is a, c, g, or t
gcaaggacaggaaagncactgatgggtaatgtcctccctatagtagatgaaagtctctactgccttcccttaatgcttgttccttggctctgctgacaagttgggagccagggtatgaacttggtgggtggcgacacatctgctgacctcgggtctgctgggaagaatacagggcaggacctatgtttggtgtcagaatcatctggaggtaggttggagccactccccttttttctccattctatccccattctctgaaaaccttcgctggctatagggataatcaggctgacaggaaaacttttaaattcatttatttgaattttagagaaaactagaagacagaaaaccacaactgtgggattgaagtcaacagaaaaggcctgac

SEQ ID NO: 304577 - DNA, 373 bp, Homo Sapiens
  misc_feature (128)..(136): n is a, c, g, or t
  misc_feature (354)..(354): n is a, c, g, or t
ggtaactatagtcttgtagtataattcaaagtccagtcatgtgatacctccagatttgttcaaaaacttttgcttaggatagctttggctattcgggctcttttttgattccatattaattttaggannnnnnnnnctaattctgtgaaaaatgatgttggtattttgatggaaattgcattgaatctgtagatttctttaggcagtatggtcattttcacaatattgatccttctaatccatgagcatgggatgcatttccatttgtgtcatctgtgatttcttttagcaagtgttttgtagttccccttgtggagaatcttttacctcccgcattacatatgttcctaaggnattttaattttttttcccc

SEQ ID NO: 304578 - DNA, 233 bp, Homo Sapiens
gaagttaggtgcctgccatattggtggaggtactaaagaagcaaacagtgctccagagttagctgccaagagaacttgttacaatgaagaagcagtagaagtagaaacttctgtcctaactgcttaattccaagatcacgtcatttgaggcaaaagttggaaaactgagaaactattgccacaactgttgtctcaagaactgtagagccaagcagtagctactaatctgcgcc

SEQ ID NO: 304579 - DNA, 578 bp, Homo Sapiens
  misc_feature (281)..(281): n is a, c, g, or t
  misc_feature (295)..(296): n is a, c, g, or t
  misc_feature (300)..(300): n is a, c, g, or t
  misc_feature (309)..(309): n is a, c, g, or t
  misc_feature (512)..(512): n is a, c, g, or t
  misc_feature (517)..(517): n is a, c, g, or t
tggataattggttagaaatagtagatgagtaggtatattaaatgttgaatggatggtcagtattgattctactcttggattctgactaggatatttactctctctctctcagaaacatctatatctttaatattacttgctattgtatttactaactgtcacaagaatagcctgttccacatataaaatacagagttggttctcatgttttttgttgaagggaattcggataactagtgagttgtttgtcattttcatttaagacagaagttaaattctanaagtatgtcacccnncagngaatttttnaaaaattatatcttttaataactttaagattgattcttcatctattcatgtctctggttttaaggatgtgggtgggtatttatataattcctaattggattctataaaaagtattttaaacaaaaggggttatatagaggttatagttattagataatcctggtcagaaacagtgccatttagaatacctgggttcagcaacnggttnatggtcagccaagtgatttaaaagccttatttaggattaacccatcaccggcctaaatttt

SEQ ID NO: 304580 - DNA, 351 bp, Homo Sapiens
  misc_feature (121)..(121): n is a, c, g, or t
actgcctctttgaaggtggagaagtcatggtagcttttgaaatcatcacagacatgttacataccttttccttgagtatacgctccccaaaattgtttcacaaaaagaatgaaaataattntatgtttttggcctgctatttatatcttggctttctgaacatatattaaatttgacaagaaactgtattttatgttccattagccttagtatgtgttttcaaaatatttattttaaaatgttgactcaaaagttaatataaaacaatagatgtgtaaaattctttggtacgttaagaatatcctgttctgaggtttacattctcccatctttccagttttcaccttgtgt

SEQ ID NO: 304581 - DNA, 262 bp, Homo Sapiens
  misc_feature (197)..(197): n is a, c, g, or t
  misc_feature (221)..(221): n is a, c, g, or t
gattggaaaagaatgagaccctgcaacttggaatggggaggtatgggaggacactggtgaagctggggtcactgactttgtaaactccaatgaactttttttgccagaagaaacaacttcctccccacccagtagtggcagcattccctccctaacccatgctgccatcagcctttccacctttgtctgaggggggntaaactctgtgctgcctgaggaantagtgatggcctcccctgaggaagttgccaagcaagataat

SEQ ID NO: 304582 - DNA, 535 bp, Homo Sapiens
  misc_feature (139)..(139): n is a, c, g, or t
  misc_feature (153)..(153): n is a, c, g, or t
  misc_feature (156)..(156): n is a, c, g, or t
  misc_feature (349)..(349): n is a, c, g, or t
  misc_feature (409)..(409): n is a, c, g, or t
  misc_feature (454)..(463): n is a, c, g, or t
  misc_feature (466)..(466): n is a, c, g, or t
cattatcaccattttagctatattatatttaatagatcacctaagataagcattttcatattaatgtccctgatatttctttatatatataagaaacacatcttttactttttcagttttttgtccatataattaaagnataaattttcaaanttngtttaaacaaaaactgtataaattccttctagcttttttatatgaaaaacttcacaaaaaatgaaaggtcacctccttgatacagtgcttcagtgacacagcaaaactccatggttataaagacgttatcaatactattctaatactgatgttgtaggttatatctatttgatattatatttcatttattccnggaaataatatttaaagtatagccatacagactggactaaaaatatggaacggtttttcncgggtttggggaaccaaggggacttcaggtcacccactgggggcnnnnnnnnnnggngggaaaaaatattcccattaatatatttaggccattccttagcatccaatgggccaaaggtttatggga

SEQ ID NO: 304583 - DNA, 180 bp, Homo Sapiens
  misc_feature (68)..(68): n is a, c, g, or t
gtggagaactctaatacaaagacatttgaagattgagagaatgcacaagatggcccccgcagccattngtactagccatctcattttatatcacatctaagtatgccttgaatttttttagttttatgtacctggccttattgtgctcttatcagtatgacttctgggtttttggaaatg

SEQ ID NO: 304584 - DNA, 483 bp, Homo Sapiens
  misc_feature (290)..(290): n is a, c, g, or t
  misc_feature (295)..(295): n is a, c, g, or t
  misc_feature (357)..(357): n is a, c, g, or t
  misc_feature (382)..(382): n is a, c, g, or t
  misc_feature (462)..(462): n is a, c, g, or t
  misc_feature (469)..(469): n is a, c, g, or t
ggcaaaattgtgtagattaagtgatgtgcaaataaagcttttacaatagctaaaagcctggctcaacgtaaggacacaagaaaattgacagcagttctttgtgcagcgtgataccgttgacgtcctccttgtccaggccattctcttcctcacttaccctggagaggccggcactgactagtatcctacctggctgtcttcgcagcaggactaattggagaattatggacggagatcaaatatgctaggttctttaaatccagaagcgcttacacgagtactgtacaagnttgangaccggtaattttggcgctgtgggtctgtctttgcatttaatcccttctggtctaaccaaanccccttggctaataaaaccatcggncttattttaagacaggggtataaaaactttttgatatgggcaaaagattggccaagggaaagatggccctgaaaaaggtncctttanagaaaaggtctttg

SEQ ID NO: 304585 - DNA, 401 bp, Homo Sapiens
  misc_feature (66)..(66): n is a, c, g, or t
  misc_feature (240)..(240): n is a, c, g, or t
  misc_feature (322)..(322): n is a, c, g, or t
  misc_feature (342)..(342): n is a, c, g, or t
  misc_feature (373)..(373): n is a, c, g, or t
caacagaacttcacagactgttagagctgctgagaagaatttgctttccgaattcagcctggaagngcaccaagggacagctgtactgagtctagatgactctgacccccgccccaggtcaaggccagcagagcagtcagtgcctctggagaaggcccttgctctcccacctggcccagactccgaggagcctgggtctggagctgccggtctggttcttccctttagaagcccggacgntgccaccttgcggcccctcccaagccgtgaaccagctcatgagagatgaacacttgtgggattccacttcaagaaaggttcngggggttggcacaaaaggancaacccaagcatttgccctgtggcaaccaanacttcagttggacatttttggggacctg

SEQ ID NO: 304586 - DNA, 334 bp, Homo Sapiens
  misc_feature (38)..(38): n is a, c, g, or t
gcagataactacagatggcattttggtgcattgcattngtcacttgtagtcagaacagcaaatgtgcttcattttccaggcctgcaatttgttccttttgcacacatttctgacaacctgccctggactgcgttctcatagaatggctgtcctccccactgtgggagcccttgctgagcctaacaaataaagcctccttcacaatagagctaaagaggagcttcatcagagaaacactgccgccttagtagatactggcccaggttggtcttgagtcccaaacttgtacagtgggttctcaaagtgtaacttaaacattatgttgggatcatgt

SEQ ID NO: 304587 - DNA, 295 bp, Homo Sapiens
  misc_feature (186)..(186): n is a, c, g, or t
  misc_feature (197)..(197): n is a, c, g, or t
  misc_feature (211)..(211): n is a, c, g, or t
  misc_feature (218)..(218): n is a, c, g, or t
  misc_feature (236)..(236): n is a, c, g, or t
gctggagcacatggccttgccttgacctcttagattgttactaacctatataaacccttcaataattggtaaaaattaattttttaagctcatttacatatttttaccaaagacaggtccgacaattttgtaacctgcttttctacttacacgtttgtgtcattaaatatttttctctaatattanttaaatgctgnatgggtgtactatnatatagntttaccattatttatttnatactgaggttaatatattagtcatgatctaagctccatccaaattttggaccataatc

SEQ ID NO: 304588 - DNA, 409 bp, Homo Sapiens; identical to SEQ ID NO: 208600

SEQ ID NO: 304589 - DNA, 409 bp, Homo Sapiens
  misc_feature (367)..(367): n is a, c, g, or t
tagttgcttatcatcttcttactttactccattctcaaaaccttaaattttcagaagcatgaaaacgttttaatattacaaggttatggaatctgaagttttgtattatctatgtctttccacatatgttcaaggccagtgtggtagcaataaaacctcaaaagtccagctgatattttctgtgtgcatagtagttattactgtagttaagttggcattaaaaagaatgtttgacacaactaaagaattgaggctcttgattacaagaattggacaggactaaatgtattttaaaatggaatttattagggcatttgatggtatatgcttgggagcctaagtgaacttaggtttgaattttagttcngcttccatgaacttgactttaagccagtatttaacccctttt

SEQ ID NO: 304590 - DNA, 495 bp, Homo Sapiens
gcagccacagaactcatttgggtgaagcagtggtccaaatttgtccaaatatgtaagcatcagttaaagaaaaatctcttccacagactctaccctcatttttccaggaatgtgtatggttggacatagtgggaacaagtttaaaaagtggggacttctgctttcaggaagatggagtagatgtacattgccctattcctcccactaaaacaactgaaaaccttgagcattatatgtaaaataaacataagaagactgaaaggtggagagaaggcatacacactagggacctcagcacccaaggaataacacggtggtgagttccatgggttttctttttgcctaatatatcccaggcttggaactgaagaagctggcagcctggaaacagcaatgggtacagacttgaaaaaccctgttctctttaactcgaaggacgaggaaaaagacagcctagcaagccagaaaacttttagaccataactgctgtgctct

SEQ ID NO: 304591 - DNA, 249 bp, Homo Sapiens
  misc_feature (106)..(176): n is a, c, g, or t
tgggctcaagcgatcctcccacctcagctccccaaaatagctgggactacaggtgggtgccaccaatgccaggctaattttgtttacttttttgtagagataaaannnnnnnnnnnnnnnnnnnnnnnnnnnnnnnnnnnnnnnnnnnnnnnnnnnnnnnnnnnnnnnnnnnnnnncacagccatgagccaacgtgcctggcctatacatctcttgggtacacatatatgagtttctctaggggacaga

SEQ ID NO: 304592 - DNA, 161 bp, Homo Sapiens
tcaacttttacttagaaaccatttggtatggaggattatatgtttatgcaggcaagattccttttaaagaggagatgaagatgataaaagttgtttctccaatttttaatgaaacttgcttaataattcccaaatgttggcaggaaccttggaaccatttt

SEQ ID NO: 304593 - DNA, 419 bp, Homo Sapiens
  misc_feature (190)..(190): n is a, c, g, or t
aaaattctcccttcaactagcataggaagccactgacatcttcagccacttagtagccaacctgttaccataaggaagtgcatttacagtggggattctgttgagatcatgtgaggcggttgtgaaggcacgtttacaaccccaattgatggtagttacttttggtctttctcttcctccccatgggaangaaacagacaatgagtagagaccagaggacggaaaaagaagcaccgcaaaaaaggaatagagaacctaaaaggcacaaatagtgccccccacccaaagccaaattgtgtgcctttgaggctaaaaaggtgactgaccctgggtgttaacgttgtatattttcaataagctatattcagctgtctactccttgaatttcttcttagcaactttaaacaccaacgagggct

SEQ ID NO: 304594 - DNA, 330 bp, Homo Sapiens
  misc_feature (22)..(22): n is a, c, g, or t
  misc_feature (265)..(265): n is a, c, g, or t
  misc_feature (288)..(288): n is a, c, g, or t
ggaaataacacaaaaacgccangcactgtcacaaccatagtggggaagatactttgggaaaaggtgtctttgggggttgcttcaagccacacagtgtatacccacccaggatggtcctggccttggttctgaatgacagacctgctggccccatttcccacctccttaacctttttatccaagaagcagaaacacattcacaaatggtcaaggggagttgtttctaagctctgtgtcaaaaaggcccagaccaattccacttggnagtagtcagaagtcccggtcttnaaagcccagactgatggtttctggcctaacctggggtgcttg

SEQ ID NO: 304595 - DNA, 118 bp, Homo Sapiens
  misc_feature (54)..(54): n is a, c, g, or t
  misc_feature (61)..(61): n is a, c, g, or t
  misc_feature (68)..(68): n is a, c, g, or t
taagtatcttgccctgcacatgtgttaatgggtaaaaagccagggaatgttggnctttttntcaattnccatgaattgggatttagcagctgaattagatggtattcattataaatgg

SEQ ID NO: 304596 - DNA, 357 bp, Homo Sapiens
  misc_feature (20)..(20): n is a, c, g, or t
  misc_feature (32)..(32): n is a, c, g, or t
  misc_feature (94)..(94): n is a, c, g, or t
  misc_feature (144)..(144): n is a, c, g, or t
  misc_feature (205)..(205): n is a, c, g, or t
  misc_feature (310)..(310): n is a, c, g, or t
gcttggctcacagttccgcngctgtacaggangcatgactggggacacctcaggaaacttacaatcatgggggaaggcgaaggggaagcaagcntgttttaccatggtggagcagaaaagaaagcaaagagggaagtgctacanttgtttaaaccaccagatctcatgaacactcatccactatcatgagaacagcatagggganatctgcccccatgatccaatcacctcccactaggtccctcccccaatggcacaacaatttgacatgagatttgggtggggacacagagcctaaccatatcattanggctaagcaatgatgttcaagtaggctaggtacgttaactgcatttt

SEQ ID NO: 304597 - DNA, 397 bp, Homo Sapiens
  misc_feature (258)..(258): n is a, c, g, or t
  misc_feature (316)..(348): n is a, c, g, or t
ctacctcagcggcttcctctccctatctcacatgcccaccttacagccctggcttttacaggcccctctgcttgaaccagtcttccccttgatcatcacttaggttttggctcaaatgtcactcacttcttctggggcacccttccaatatctgctaaagccacctctaccactgtgcatagtgtcagcaaatcatcactaaagaaatcagcagagaactgtggaggcacctgaagagtaaggggattctcaaacttnacccagggattaaacaattccctacaacaggtgctgggtatgcagtgggtgcttggtnnnnnnnnnnnnnnnnnnnnnnnnnnnnnnnnnggcaaaccaaacccattgaagacaaagcggcccctttaaaatgggaaaa

SEQ ID NO: 304598 - DNA, 348 bp, Homo Sapiens
acaaataagatggtatagactcagttttcctgctcttccctgctaagtacaactctaaatcttggaattggtacaaaagacacccaaaggagaattcttgaagtttataagaagaaagtgaactgacttgggatcacagcattggaagaacaacatagtcgtagagcatcttgcatcctcccatccacctagacccggtgtttcctgaccctcccacctagcaacagagtgcaggctaggtaggttggctcattccctccccctgaatcaaatggaagtccccccgaaaacatctgccaagggccgacagcatttgacaaaggggatcagttgggaacttctagccct

SEQ ID NO: 304599 - DNA, 409 bp, Homo Sapiens
ggcacgaggtcatgtgctgacccagctagaaaatatgatgcacttgataagacacagtgggtgaggtctgagaattgttgtcttagtacttacctatccagtccccaaggtcagctgggaggttggaataaaaacaatccaggatcatcatgacaggtttagtccagagctctccacccgccatcagcagcaccaccaccttccccttgattgctccaaaggtcccaaattctgtgggttggagttgaaatgcctcaataagcactagcatttgcagaacagtctcagccaggcacttctctgtgccttctctcaagaggtagtgacctggtaactcttcaaacctccttgcaaagagctgctcagccacagtggatagattttggcccctcctggtaagcttccactc

SEQ ID NO: 304600 - DNA, 187 bp, Homo Sapiens
  misc_feature (167)..(167): n is a, c, g, or t
ggggagctccctattgttttagtattatgaatagccaagtatacttaccaaatattagaattggtaaatatttaggttttttatgtaaggggataacggaatgggaaggtattgctgacttttcagataagctcctggttgtattatgaatgcagggaaatctcccntttattagacatctcaaccc

SEQ ID NO: 304601 - DNA, 463 bp, Homo Sapiens
  misc_feature (267)..(267): n is a, c, g, or t
  misc_feature (269)..(269): n is a, c, g, or t
tggctctcagtgggcacaagaatagcagcaggaacaagattttgttatgtgtcttaggtcattttggagaatcagccttcctttctgtggtgctagctggggttagtcctgacggatcctaaggactgggtgcctaggggcattcctccctggggtctcagtggtgacagggctttccttaccccaagccagacaccaacctacactttaaacatagctcttggaggcccagttcattattgcagtgttatgtcagttgcacattantnacttaccggcttttagctactttagggaataatttattggccaaagaaagtaagtctggttataaaatggcactttccagggaggtaccgggccccaaggtggaggctgtcgaggggacccgtttccaaggtccttcttcctagagtatgtgctgaagggctgacacacacgtgcagtgtgaagtcactgctga

SEQ ID NO: 304602 - DNA, 174 bp, Homo Sapiens
  misc_feature (95)..(95): n is a, c, g, or t
  misc_feature (112)..(112): n is a, c, g, or t
  misc_feature (124)..(124): n is a, c, g, or t
  misc_feature (154)..(154): n is a, c, g, or t
  misc_feature (161)..(161): n is a, c, g, or t
cctcctactacccacacatagttccccttattgttaacatcttgcattagtgtggtacatttattaaaactgatgagccaatattgatacattanagtccacactttacagnagggggttcgtncactcttctgtacattttggtacatatggnacatttncaaatgtacaata

SEQ ID NO: 304603 - DNA, 453 bp, Homo Sapiens
aagaagtacttgagaatctatttcagttgcaaaatagttaacaaaatttgatttgagtagttctgaccttgctgtgctttggactcccatttgacagccctgaaggttcgtcattctaatttactcctgcccaaatggtgattttgacagtttaatccaaagtcttttaaagcaatgtctattcataccactttacaatctttatctaatctttagtgttctgaagatttaatttgctgacatttctaatttatggtctaaattatttgagagttttttgagattgagattaagcagatctcatagcagaatgggtactacaggagaagtcatagtatttcagtttcagtgtcttttggtttctgttgggcttcctttccgaatcaaggctttactaagagagattggctcctaggagctcattgcctttttaaagcccaataattatatggg

SEQ ID NO: 304604 - DNA, 133 bp, Homo Sapiens
gttacagcacacagattcagccaaattagtaaaattacatattaggtaactgggttgctaagcaatattacatcctcattttacttaattgctgtaattagcatctcccagcagatgccacaatgcaagccac

SEQ ID NO: 304605 - DNA, 462 bp, Homo Sapiens
  misc_feature (389)..(389): n is a, c, g, or t
  misc_feature (396)..(396): n is a, c, g, or t
  misc_feature (436)..(436): n is a, c, g, or t
agaatctcaaacaataaggacaatgtctgcacatagtatatactcaatagacatttttgagtaactattctccaaaagacaattatgttaatttgaaacttacgtatttgatgtttaattattgtaaacttaattgaaaatgctttgagttttcaaaaataagcaattgtcaagtttagcccaatgctgcctccttatatattctaaatgtgacctaatggtttctctgtgcacagtaaactgtaacctttccatgtgtaaacagactgcaacccgacttttgtgccaatcactgagttttggccaaaggttggcaactgttcaaaccaggctcaaatgaggcaaacaccaagctgtaaccaatctggctgtttctgtacccaatttcnggtttcngttacataaccttccctttttccggccataaatcttccancacatggggttatgccaatctccccg

SEQ ID NO: 304606 - DNA, 347 bp, Homo Sapiens
taatgccaacagagacggtaggaaaatgaaattagaaaagcaaagaaattaaaggaataaaacaccaagcagctgagctggtcctctgaagagtagtttgctagaacaatcagaagttgctgagggacttgaactctcagctttgccaggtattgtaatctgtccatgagcctctctcagccctcactttattgatgaacacaccaaggttcggtcatagctggctgattacagcgtcttctgggactcagatgtcttaagatgtaggctttctactagcagttccaaaatggattggatgtagccaaatcatctggggatccttaattaaggttccctgaatccct

SEQ ID NO: 304607 - DNA, 203 bp, Homo Sapiens
  misc_feature (76)..(102): n is a, c, g, or t
  misc_feature (132)..(132): n is a, c, g, or t
  misc_feature (137)..(137): n is a, c, g, or t
  misc_feature (156)..(156): n is a, c, g, or t
  misc_feature (172)..(172): n is a, c, g, or t
  misc_feature (189)..(189): n is a, c, g, or t
aatttcttgttatcatgggaaattttggttctagggatagaatacatctcatagaagtcagagatccttactcccnnnnnnnnnnnnnnnnnnnnnnnnnnnggcctttctagcactcatccttatgtaggnagagnaaaaatcaacccaatgttnaaaaccctagagtggnatattaggacttttagnaagtgaggtctggc

SEQ ID NO: 304608 - DNA, 376 bp, Homo Sapiens
  misc_feature (284)..(284): n is a, c, g, or t
  misc_feature (325)..(325): n is a, c, g, or t
  misc_feature (337)..(337): n is a, c, g, or t
  misc_feature (346)..(346): n is a, c, g, or t
  misc_feature (356)..(356): n is a, c, g, or t
cgactatgttaggagatatttagtagttcaacatatgaaaaatttgatagcgctgtagaagataatacaaaagccatgtttcgtaagagatttctccagtgccttgtttttgttttagggatagacaaggaaaatgaatggtttttgttttagggatagacaaggaaactgaatggtttcagattaaaagctcccttgaatttccttgagtagctttttcccaccttacagctgtttttttcatcttttaagatactgacttcagatgtcctgggtatgattcnggtttttgcctgtgaccttttcataatcccctttaagctcnaattgctaggcnaataatggnccaaattttnccctttggtgagggaatggc

SEQ ID NO: 304609 - DNA, 250 bp, Homo Sapiens
  misc_feature (45)..(57): n is a, c, g, or t
  misc_feature (153)..(153): n is a, c, g, or t
  misc_feature (212)..(212): n is a, c, g, or t
  misc_feature (227)..(227): n is a, c, g, or t
atacacagtccacatttagatttccccaactatccaaaaatgtcnnnnnnnnnnnnnaagcacttgcctctccctattgaattaaggttcacatttaattgaatatgtagtcattgtgtcttctttagtctcttaaacctacgaaagtctttntttaatgacattttcttcttgaagacagcagacctttgtgttgtgcagagttctacatnctggatttgttttcncataattgtatttagggtaaatt

SEQ ID NO: 304610 - DNA, 179 bp, Homo Sapiens
gactttgtaaaatcacagattttattggttctcctaacttagtattagtcaatgcttaattgtggcctccaattagtctttcaatttcttcatcaaaaatgctcataaaagcactaaagatgtccatagaatagtcatatgaactatgctttctactttagtgtttggcaaaacttggg

SEQ ID NO: 304611 - DNA, 439 bp, Homo Sapiens
  misc_feature (262)..(262): n is a, c, g, or t
  misc_feature (394)..(394): n is a, c, g, or t
tggttacatgattaatttgatgtacagttaggctcactgatttcaatttgtattcaatattgaaatttacttttttcaacagtaagactactcttctttacagtagtggtactattcatatgaggtaaacactgtggccagttgtccatggactagaatttatatgtaaacagtagaatcggtatggtaacatttatatctacaacttaatatttattacaataaagtatttatgatcaatttttaagataactgcctatgntcccgaaaagactatagctaaggatcttcaaaagttagtctgattaactttagttgacacttacatagtgctatgtgccaagcactggtaagtgttttaatgtacatgaaacagacctctgaggtatgttgnccaaaatcatgccggctagtaagctgaacagatagaatttttttt

SEQ ID NO: 304612 - DNA, 450 bp, Homo Sapiens
  misc_feature (270)..(270): n is a, c, g, or t
  misc_feature (379)..(379): n is a, c, g, or t
tgaagtcaaatatttagaaaagcttgagaaattcatttgtagaaggaatctgaatgacaggttctgtgtaactttaaattcagcctttctgggtcctaggttaaatgctgaatggacttgaaaacagagagaagctgaggacatttaagaactaagtcagttcctttagctattaggggtgggtagagagctgggtggtgggttaaaagggctgatcaaggtccttaaatatccgatgttaagtaaaggtatcacagagagtaattttanggaaactaattcctctgctttgtttccctgtcagtgtgcttctgcagtttagcatttgatcaaacactttcttttcatctccattttaaagttaacttaacaggcctgnctctaaaaattgacttggtctaatagaacaattgtgtgctgacagctgacctggatttaagacagaaaggg

SEQ ID NO: 304613 - DNA, 448 bp, Homo Sapiens
  misc_feature (144)..(144): n is a, c, g, or t
tatcctcaatatggctatcatttctaggatacaaccgaaatttgctctgtgcatgttttacctaaaattttagataaaaatgtaaagaagtatatttgagaatgtaagaatttcatagtgactgaaccagaatctgcctttagnttcttctggctttacatcctccttaattctatgcaattctgggtatggaagaaaactaatgcagaaattgatctgaagtattggcaaacagaagacctccaattttcccaatatttttcctaaggctttcctgtgcttctccccaacactgattggctagcattgatagcttattcactgtcggtatggaccctttaatattatgtgttttatttaaagacattagtccagggtgaccataggaaatacttcaaggaggataaccctgaagatcctatagctgctaatactcaaaatgaaactt

SEQ ID NO: 304614 - DNA, 281 bp, Homo Sapiens
  misc_feature (19)..(19): n is a, c, g, or t
  misc_feature (39)..(39): n is a, c, g, or t
  misc_feature (56)..(56): n is a, c, g, or t
aaacagaaggaagcagtanaactttggaggaaagagtanattataggcgtgacacnaatgcctggccacatttatgtatttttttatattctgtatcagttagcctgtttattcacgtaaaagttttccaccatgtcttattatccatggtccataggttatctataacacatataataaagtacatcattgctgaaaatgtgtcgtcacaccaagagtaggttaactgtgcgttgttgaccaaatgctaactatcccagcaaggcgactgtctgaaagta

SEQ ID NO: 304615 - DNA, 364 bp, Homo Sapiens
  misc_feature (21)..(21): n is a, c, g, or t
  misc_feature (258)..(258): n is a, c, g, or t
  misc_feature (280)..(280): n is a, c, g, or t
attttcagagacttacttgtnttaaataattttcaccactgaaatggttgtttcactgtggaaaaaatccatcgatttccctatcctgccactctagaagccccagcaagcaatactttccacatttatttgagattgatacagttattatttcaaattttagttgaagaaacaaagttgagagagaatacgtaatttgcttgtcactgtgtttcttaatttagtataattctcaagcctatggtattaaattcaatnaggacctaggggggaaaatggntgaatgaacaaatgtttctgaacatttttttagaaacgctttaagtccactaattgcaatcaaatatctttaagtatttttacc

SEQ ID NO: 304616 - DNA, 280 bp, Homo Sapiens
  misc_feature (189)..(189): n is a, c, g, or t
ttcacttatgttattggcaggccttgcttccttgccacatgtgtctctcaacatggctgccttccagcatgacatttggcttatcccaggttgtgagtgatccaggagagagcaagagaggagggtgcatgccaagatggaagccatagtctttttataaccctaatctccagaagtgacatcttattnacttctgtctcattaagtttgtaagaaacaagtcaacccagtctaggggaaggcaagttacacaaagtgtgtgactaccatgagggtagtg

SEQ ID NO: 304617 - DNA, 429 bp, Homo Sapiens
  misc_feature (231)..(231): n is a, c, g, or t
  misc_feature (236)..(236): n is a, c, g, or t
  misc_feature (241)..(241): n is a, c, g, or t
  misc_feature (247)..(247): n is a, c, g, or t
  misc_feature (349)..(349): n is a, c, g, or t
  misc_feature (362)..(362): n is a, c, g, or t
agtaaaggttccatccttctctccatactggagtagagaaatactttgtctatatccctttgctgctgaggcctactggtggctgagatcatttacatggtgaataccttcacagaaagctttctagaaacactattcagggcaccagaatcactccctcccaactgttgatgaatcctgagcacaaaaagacctgccatcacaagtcacaagaattctactagcagagtntatcncatangggaanatatctcatatttcactcttaaacaggtaactaaaactcctgaaaacttttagctttatcaacctaaaaaacaggaataaaatgtgaaaaacagccttttanataaatagggaanttccaaagggggggaaaatttgtgatggaagaaaggaggtgggagctggttatcagggaggtgagtg

SEQ ID NO: 304618 - DNA, 151 bp, Homo Sapiens
tgcactgtaaagggagcacactcttatccatgaagtcatactgccctcactggctgtgaaatactgtgttcttcatttactcttgccggaatttgcaaattgtctgcaacctgctactttgtaagggctcctcccttgatgtgcagtaagt

SEQ ID NO: 304619 - DNA, 477 bp, Homo Sapiens
ttgaaaagtgaggagggcagaatttattaagtgaaaaggaaaactctcaacaaaaagaggggtcctgcatgcagctctttccatctcactaaactgaataccaggccaccacacatgagctgaagagcctagtcttctccccctgcatgaattcctggtggctacaccccgttctcccagtgttgcaaggcaggcccttagtctgagccactccacattatttcccttactgtgtatgtgttaaggaacggaatttttcatcatgggcatgtttaggcaatccccctgtgcacaatgacctgggcagcatttggctgtctcctgattctatcattcccccctcctaaaagaaagtacatctaactttaaggataaggataaggggtaatgatcgattcttaactgggttcctggctggatggggggcactggtttttggggaaaataagcagtgagattcttcccctcaagaaggcc

SEQ ID NO: 304620 - DNA, 193 bp, Homo Sapiens
  misc_feature (18)..(18): n is a, c, g, or t
gaccatgcatagactganctctaaggagttttctaacggccgtatataaaggaaatgcttgataacaagataatattttctgttaagtaaaaggatttaatttgccgcatctttataagccatgcttaacattaagcaacattagctaccatttatgagcacctgctatataccagtaacagtgctttttgta

SEQ ID NO: 304621 - DNA, 300 bp, Homo Sapiens
ttatgaaaaagaaaccaacctagaattctgtacccaaacacaaaattattcttcaaaagtgaaggagaataaatattttttcagacaaacaaaaattaaggacatttgtgctcagtggacctgcctagcaagaaatgttaaaagttcttcagagaaaaggaaaatgatatgttagcaacatggatctatgtaaacaaaggaagagcattgaaaaaggaataaaccaaggtaaaataagaatttttcttattcttaatcacataaataattctaagtaatgatagcaacagtgtattcagt

SEQ ID NO: 304622 - DNA, 295 bp, Homo Sapiens
  misc_feature (282)..(282): n is a, c, g, or t
cattacatctggtaataggggcaaggctacgagactgtaaactataaaacaataaggagttctgtgaggtttctgtcacatttaggtcccttgagttttgcggagtttatgcagttttgtttcagcagcacagagcggaactgcaaagtgatgaaggactatattttgagttagtaaatattaatagctcctgatatatccagggtgttgtaccaagtgttctttaggatacaaagttatacaagatgtgagtcttgttgaatgtaaacccttaaggaactnaattcctagccga

SEQ ID NO: 304623 - DNA, 330 bp, Homo Sapiens
  misc_feature (290)..(290): n is a, c, g, or t
  misc_feature (297)..(297): n is a, c, g, or t
  misc_feature (312)..(312): n is a, c, g, or t
ccagaagatctcaatctgcaaatacttaacaaggtcaggcatcatgggagatatttaaaaaacatgtgtgtgcctttgagccgtttactaagttgagaccaaacatatacaaatgggaagttgactctcagtaccaggcagtacaggccaactgcttatagacagtaactgctgtggacttcagggatggccagcttcctaggatcttaggtagtccggaaatcttttcaggttcttgagctggcctaagcaggatttaggtgggctcaacataatgccagatctgcagnaacattngcctttgcccctttnggaagtttgcagttgttt

SEQ ID NO: 304624 - DNA, 159 bp, Homo Sapiens
gttcattttgtacctaactgagaactgtctttctgatgtagtgatgacaatgacagatactcgtttaccaaaaagcaccttctgcctgcagcagctgtatgacacactttacctccattaccaccctgggcatctgaatgttggagatgggtggtgtca

SEQ ID NO: 304625 - DNA, 179 bp, Homo Sapiens
ctactctattgttaaccacttataagggtctgttaggaatagtatgtgggcagagaaaaagtacaaattttacctgctttacaattcttccagagctactctagaagccacatgactaagtagaaaaaaatctttcagtgcacaataaaaacctcagctttaagtcaattttcccatct

SEQ ID NO: 304626 - DNA, 305 bp, Homo Sapiens
tggctggaggttgaacctacttcagataatcatcattaattattgttctttgaaatggtgattcacatgttcatagctattcatctatgctttgaggtaactacattttctagtccatatggaagatgcttttttggagacacaataatagtaaccagagcagttctaccctgagaaacaaatataccttttcacattctacctcctatccttacatttactcactttagatcattcatccatccatttgtttattcatgcattcagtaattattgacacgtaaattaaaacccttggggccctt

SEQ ID NO: 304627 - DNA, 204 bp, Homo Sapiens
aatcccacattcctagtcctcaccacttttcacagcctcgcttaacttggcttacaggaagcataaagccaaagtgtttggttttttattgcaacatggcctggcccgatataaattagataatgacagccaatggctgaaaatggggttctttgactttcaaattctcagggaccttgagaactttataaccagaaatgtcaa

SEQ ID NO: 304628 - DNA, 175 bp, Homo Sapiens
  misc_feature (30)..(31): n is a, c, g, or t
gacagcaaaaatcttgagttcagtgaaacnnagatacttctcaaatttattagacccatcatatatgctttttaattagttgtctctagttttaacctttcccatatgtttcatacagagagacagctgtaatgtggcaacctgtggctcttgtcttttatctccagaatagtga

SEQ ID NO: 304629 - DNA, 304 bp, Homo Sapiens
  misc_feature (15)..(15): n is a, c, g, or t
  misc_feature (96)..(96): n is a, c, g, or t
  misc_feature (284)..(284): n is a, c, g, or t
ttaatttgtgctacnagagcgtcttggaaacccaggcctataataaaaggcaatagcatcttcttactaagttttgggagttcttgtaggccttgntatcttgcatgaattttacctggttgtgagagctagtgtcaacctgataatattgattatccttgctctagaagtttgtttgtcccttagggtgagggtatacatctaaacattttagtgctggctgataaaagaaataatgtcaaacgtttaaccacaaaaatctctactggggctttctcgcatgnttaccatttaagacggtttt

SEQ ID NO: 304630 - DNA, 189 bp, Homo Sapiens
  misc_feature (50)..(73): n is a, c, g, or t
ttaaatatcttctgtagatacagtcagcacatagtgtgaaatataacctnnnnnnnnnnnnnnnnnnnnnnnnttgagtgtctttcttttcaattaaactgttgaaaaagaaccacaagtccagtcttattccacaactttttataccacatttgtatcactgtaatccatctttttacacttttacag

SEQ ID NO: 304631 - DNA, 325 bp, Homo Sapiens
  misc_feature (259)..(259): n is a, c, g, or t
  misc_feature (273)..(273): n is a, c, g, or t
  misc_feature (291)..(291): n is a, c, g, or t
aaagctgtttggatatactacatagaagtaatagctaccatgaacatagtttgagtttaaagtcttttaaaaagtttgagttttaggttttaaggggtgcggactggggagtaaaagatgaagggaaagagaagagagcaagttaatgtgttgatttaactgcaaaataataacaggatgtaacagagttctgagtatccaaagtgaccaatcagagcctaaacatagctgaattccatcccagccccaggacgtggcncgtccctaacacangaataaaacccttatctnggttcagccatgtgtcgcctgccacaaacttgca

SEQ ID NO: 304632 - DNA, 138 bp, Homo Sapiens
tagcaacacacatgtaaatgtccataagataaattgtttataatttatcagaaagaatgtaacaacaactattacaaatcaatgtctaattttattatggcagtgtccaataacctatcaaataactcttaagatgcc

SEQ ID NO: 304633 - DNA, 477 bp, Homo Sapiens
  misc_feature (25)..(25): n is a, c, g, or t
  misc_feature (184)..(184): n is a, c, g, or t
  misc_feature (456)..(456): n is a, c, g, or t
  misc_feature (467)..(467): n is a, c, g, or t
cgcagccgcattaaagatgtaaatnttttttaagtaaaaagaaaaggtgaaattattttagtaaatgccttagtttgttttatgctgctgtcacagaataccacagactgggtaatttgtaatgaacagaaatttatttagcttacagtttgagaggctgggcagtccaaggccaagcgaccanatctggtgatggccttcttgctgcgtcataacatggtgaatggcatctcatgttcaagaaagagtacaagagagggccaaactgacttttatgacaaacccaccctcattttaatgacattgatccattcatgaaggtagagccctcatgacttaatcacctcttaaaggtctcatgtctcagtagtgttacattggggaattagatttccaacacatgaacttttgttggttggttattggttttggtttgagatagagtcccattccagncacccaggctngaggtcacag

SEQ ID NO: 304634 - DNA, 424 bp, Homo Sapiens
  misc_feature (371)..(371): n is a, c, g, or t
ttcggcacaggtatttggtaaacttctgcctacattttggaaagtgatgctggtggggaaagttctagatcttacttggtttcttctagaatcagtcttcaggaatggattttgtcacaaatggggcatgggggctttctgaggaaataactacaagtcttggtggtgggctccttattatgtttctttttctttcattcttgatacttggaagtcgtctgaatcctttagcttcaaaccagcctgagtttgagtgcttgccgtagcagaaactatccttaccacaggtgggaaggaaggaccagtttctagcagtgtcgggcactccctctttcgaacatccccaagggaggcattcacaaaaagctgtnccaagcaagctggaagaaaacaagctttccgagatgaccaggaagactgggcc

SEQ ID NO: 304635 - DNA, 458 bp, Homo Sapiens
  misc_feature (328)..(328): n is a, c, g, or t
  misc_feature (336)..(336): n is a, c, g, or t
  misc_feature (398)..(398): n is a, c, g, or t
  misc_feature (407)..(407): n is a, c, g, or t
  misc_feature (445)..(445): n is a, c, g, or t
taaatacagagcctctgattggacggtctcctgccaagaactagtaatacccttgttttaaaatcttcacaaggtaaaacttaaaaagccaaccaaacaaattgctctccattctacttttaattgggccaaacagcatatgctacagtagtaacatgtttttcggagagtgtaaaaaactctgtttacatttgcctcctccgtgggttgatcgaaaatgtataaaactgactgcttctcgccagcctcaagacaaagaacgagtgagttgctggtactcgctactctttcacttcttttgtaaagtattgactctttggaaggctanagtattanaaaagtctcaacatgtttttttaaaagaaattaaggtgcaagcgactggccctggctagaanatcacaaancgattttttggtggaatattttttgtggccccaggctntaaatttccccgg

SEQ ID NO: 304636 - DNA, 436 bp, Homo Sapiens
  misc_feature (37)..(37): n is a, c, g, or t
  misc_feature (143)..(143): n is a, c, g, or t
  misc_feature (323)..(323): n is a, c, g, or t
  misc_feature (397)..(397): n is a, c, g, or t
  misc_feature (413)..(413): n is a, c, g, or t
  misc_feature (420)..(420): n is a, c, g, or t
gaaaggtgcacagagcagggtgcacaccttgccctgncctctcctagggtagaggacggtgtgagcccccagaaggctgtcatccagcctgagaggtttcttggctcttcctcccatgcccagggttctcccagactgcaganaagatccaggctccacacaatgccagaggcctgcctctaatcttctctctgggccagcgcctaattcggctaaaccccacacatgaaggatactgctttggcatcatcgtttgtgagggcaaggctggggaaggggtggagagagtgtccttccctggggaaggctgaacccagggagantggagtgacatgccccaaaaacacagcaagtgggactagaacccatgtctccagatggaaccccaggctcccantggctccatgctgtgnaggttanacctcccaccctgccg

SEQ ID NO: 304637 - DNA, 244 bp, Homo Sapiens
taggttgaaaaagcccttactaaaagcccctcatatatcaattactttatttcattatgactacttaggttccgggctggggacaagttcacttaaaaaggcaatgttatttaacaggtcaccagttaagacttctgctttgtagatacatgcagaagccatcaaacaagggggagcttttaactgcaacaataagctaaagtatgtaaaatactacattctattcagtcttggacgtgttttg

SEQ ID NO: 304638 - DNA, 327 bp, Homo Sapiens
  misc_feature (13)..(13): n is a, c, g, or t
  misc_feature (212)..(231): n is a, c, g, or t
  misc_feature (262)..(262): n is a, c, g, or t
  misc_feature (277)..(277): n is a, c, g, or t
  misc_feature (314)..(314): n is a, c, g, or t
tacagctgctatnaatgtctctcctcacctctcatcaacttcctctgaagaatagtctacatttgctttctccttttcgttgcctgtcattcagtcctcacccttttgcaatatgatttctaccctctgttctaatggaagtggtgttattataaattcagcttctaatcattcccagagatgttatttttgtctctagaatactttctgcnnnnnnnnnnnnnnnnnnnncacaattagtttactccctcaatcttgaaanttcccttggctttgngttataccatactcttcaatggattttaattaatttnttggtctaacctt

SEQ ID NO: 304639 - DNA, 101 bp, Homo Sapiens
ccacctctttgtatttgtttcacggttgtatttcctccttagtgaacttcctatacacatgttgtaacagtgggaaaagactcagtaattccataagtgtt

SEQ ID NO: 304640 - DNA, 410 bp, Homo Sapiens
  misc_feature (315)..(315): n is a, c, g, or t
tcttttcctagagttcatctgaatttctagctcaagcgcatttccacacaataggaggggttttagttttagttttggcacttcctgataaatgtggccaaattcagtgatttctcattatttcccttctatattcagcatcagggttctactcctgcctcctctccctccacatcccgtccttgatcttaatgctatggggccctggatctttggaaaggggcttccagacactgatgttgatctccctccggcctgttctggcatctgcttaaccgtagcttggggacgtcagccttcacctttcaggcctgnctctctaccacttctcctctggctcctggcaacatcgcatagctgctggaacgacatggctccacatttctctgggagttcacctgaaagcaagg

SEQ ID NO: 304641 - DNA, 438 bp, Homo Sapiens
  misc_feature (50)..(51): n is a, c, g, or t
  misc_feature (103)..(103): n is a, c, g, or t
  misc_feature (105)..(105): n is a, c, g, or t
  misc_feature (324)..(324): n is a, c, g, or t
ggaagagggttgaagtgtgattatttcctccttcccttcctcattcttanntccttgcctgacttttcctctctacttttttcttcccccttgcagataaacngnagtttagttgtggtcctctctgagcctgcttggtccagatgacggcctttcagggtcagagaggttgctgaactctggtctcaagtgtttcctgaagaagcaagtccctcctgttcccttcacacctggccaccttcactgattcttcatgagactaggaaagtcctggtgcaattgtcagcaagtcaggtcatgaaagaaccaatggggaagcgccanctttgccacatctctcaaagccctttcccactgccccatcttcctagtggggccgaagtatggctggaccctccagacctctaaaagatccattgattaacagagctggaagag

SEQ ID NO: 304642 - DNA, 433 bp, Homo Sapiens
  misc_feature (420)..(420): n is a, c, g, or t
aataaggctgaatgtcttataataattcttagaggtaaaaactgtgtgccctcttcctccagaggctagtggcagtagtggagaattactcaatcctttcttagtaatccatacacacattatagacagcaggatagcagtctccctttccagaaacactgtataagaagcttctttccataaacagtttatacatcaatgtgtatagatacctagttactgtagatctttttatgttaggcattcagatgtgtctcattctgactgcgtaacattgatgtacacctgattttgttaagaccagtttgctccttttgggcaggtgctgcaggaaatacccttggaacagttttttgcttaaatatttgtatgtatctgggaagggtacatttctagattccctggtgtcagtaaacattnttcaggtgataaa

SEQ ID NO: 304643 - DNA, 482 bp, Homo Sapiens
  misc_feature (112)..(112): n is a, c, g, or t
gaaatatgtaatttttatctaatatgattcactcttccttaagtctgaatataactcctctaattgcagaaatgttgtcatatggtcaccacatacaactttcgggcctgtncagtggttcctggctcctatagtcattagttagaagcctagtaatgctgaagtcctatttttctgaactccctttagggaaggagttgggtcatgtaggacaaggtaatgtttgacattatttttgtcaatcagttgtggaactgaagtgactcccctcaggcagggtttgtggctgaatatttagtgtctgaggcagttaactagatgcaagagtggaggccattgtagacataaacccttgtgtgactttgggtaagtctgtggctacctctcaagaatgttgtggagaattatggaaaactggatacgtttctgtgaagatattaagcactgcaaaatgttaagtgtgaatctggctgggatccaga

SEQ ID NO: 304644 - DNA, 491 bp, Homo Sapiens
  misc_feature (32)..(32): n is a, c, g, or t
attttggtgctagctctatgactaggtttagnaagtcaaataagctcggtaggtaacacttcagactcaagccttttggaagtagaagaaaactaagtttgtaagtgaaggataaaaagacctgaatgatctcaattctaaaattctgattttaatggattttaagagatggaataccaggtgaattgattcaaaatattaaatatatgtgtttatatagtacttcagtgaaattaagaaaaatttttggtggagtaagtaccttaataatgttaataaatatttctaccagtgttttttaagacctttgtgaaccccaagtagatttttacaagacaatgaactttaactgttaaagattaattattataaatgaatcagcagttcatgtcaataatatgtgctggaaagtattttccccaattattggccattatatataaaaaatggattttatttgatcccaattcctttaactggcccaattcctg

SEQ ID NO: 304645 - DNA, 504 bp, Homo Sapiens
gcactcacctaatagagacacagttgggaaaggggtagccaccagtggtctctcactagtgtccgtggagttgagatggagccgtgtgtggagggagagcattgtctggcagcaacttttgtttcttgagagtttccagaatatgctagaatgtgcgacagagaaccacgactaatcagcaaacagagctcagaatggaagatggagaaggttctcagggaaactggggcttcagtgaaccatgacctgtccatttcttgggctgaagaggagatttgttcaaacatagggtgacttctcatcctggttttagtcccttgtcctgggaaatgcctcagtcccgggaaaacgatgatggctggccaccgtacttaaactctagagagacgattcccagggacgcgttccctctctccaaacctctcttcagtgttgatggtgccttggttccccatccactctgcgaatgccttggaacacaccaggctagctcttccacgggtt

SEQ ID NO: 304646 - DNA, 512 bp, Homo Sapiens
  misc_feature (377)..(377): n is a, c, g, or t
  misc_feature (472)..(472): n is a, c, g, or t
ttttgtgtatgtgtgcatgtgtgttaagttctgtgcaatcttaccacttacataggtttgtgtttccaccacagtcaagatactgaacattcccatcatcacaaggctccctcttgttgctctttaatagctacacccacttccctcctgcccgcaccccctccattatcctggcaaccacaaaacagttctccatttctgtgactttttcatttcaacattgttatataaatagaattatacaacatgtcacctttgggaattgtcttttttcactcagcataattccctggagattcatccaggtcgtgtgtatcagtagttcactccttttcattgccaagtagtaagtccacagtatggatgtaccacagtgnggtttaaccattcacctggttaaaggacatctgggatgggtttccagtttaaggctattaataaagctggcaataaacgtgtgtgcaaggttttnggtgtgaacacagtcttcatttctctgagataattggccc

SEQ ID NO: 304647 - DNA, 507 bp, Homo Sapiens
  misc_feature (28)..(29): n is a, c, g, or t
  misc_feature (50)..(50): n is a, c, g, or t
agagagctagcaccagggagactattannatgactaagagtttggtttgnagtatgctccttacccaggatccacataaaccaaacctcctaaaatcaaatagatacaagaatgagctcgataagagtctattcccttaactaggcagtttcttcattaatcagctacacctgaatctctataatacccgatgtttcctccataggccataagtgccagcagctgcacagatacttctctattcagccaattctatcataactttcacaagagaatttaaagtcttttgtgtaactgtagcctttatggtggaatttgctatagaacctatcatgagggatacatttctccttttacattgcttcttttactccaaacaatgggaaaaaggacctaacaaatgatgcctttctagaagagtgaaggccttctgacaatggttctctttaacctggtgatgtgggtgaagaagagtgaaccaatggtctgtttccaactgattacgag

SEQ ID NO: 304648 - DNA, 396 bp, Homo Sapiens
  misc_feature (230)..(230): n is a, c, g, or t
  misc_feature (266)..(266): n is a, c, g, or t
  misc_feature (281)..(281): n is a, c, g, or t
  misc_feature (310)..(310): n is a, c, g, or t
  misc_feature (341)..(341): n is a, c, g, or t
  misc_feature (355)..(355): n is a, c, g, or t
  misc_feature (371)..(371): n is a, c, g, or t
  misc_feature (381)..(381): n is a, c, g, or t
tcctgtcaataaataatttggtaagtaacttttgtaagacatcttattgtttacaaagtaaacatctaacattattttatttgagacatataacaatccagtgtggaaaatattattatactgattttatatatgagtaaaatgagactgagggaattaggtatcttgttcagggtcgctcagaaagttgtgaaagtagggtttgaatcttggtctctgaatactctgcntaatacacatacaaaaggtggtaatccctttaaggnctttgaatcctgcantgggacgcaggaaaaggttggattatggnctgttcctcccttccggcaacccacaaccanctaaattaaccccnacttttaccctttccnatgtaaattnggcagtttggcaaac

SEQ ID NO: 304649 - DNA, 458 bp, Homo Sapiens
  misc_feature (273)..(285): n is a, c, g, or t
  misc_feature (393)..(393): n is a, c, g, or t
  misc_feature (435)..(435): n is a, c, g, or t
ggaggaacctggaaaattattagtaccaatattgaattagaaactatttaagtaatatgaaatataatgtaaaaatttggctttttaagtaatacataaatcacaaacttgattcagacaaattagagaatgcttcatttgtttgtacatcattcattaaatgaagttaagggatgaaagcatttgtccagttcaggaagattatatgattaaggctagaaaaagtggtatgccttttttttatattatacattgggggactttaaagggaannnnnnnnnnnnncattccagagtacatgtatggtctttacgtagtcctgttaggtttatataaaagttactagacaatttgtagttttaaatagtgcaacttttttttaaaagtagttcntgttagcccattgtaaggtcaacagaatgtaaagggattacnagtaagaaccaatcactgagtta

SEQ ID NO: 304650 - DNA, 453 bp, Homo Sapiens
  misc_feature (56)..(56): n is a, c, g, or t
  misc_feature (60)..(60): n is a, c, g, or t
  misc_feature (99)..(107): n is a, c, g, or t
acgtaatatactccagtttgcaaatgaaggaatcttcctgcggaacgtatgtgaangcantattggtgctctgggcttttgcataatttcaaatgtccnnnnnnnnnaaacttaaggctaatgtgtagaagcttttgctaatgagaggaccatttgctaaatcggtataagtgctacacatttgggtatctccatcccaacatacctcttattgccattccccaaagcagacaccttctcctccctccctcaaggacctctgagcttgcactccaattcctctcccacactcacctttctcctttctgttcctcttgggatccaggtttatttgaggagataggaaaagctcctggatccagcaggttttattcttaaatttggtaacaaagtaaatcacagaacctccacccagcatccaggcctctgggttctctccctccttcccaggta

SEQ ID NO: 304651 - DNA, 449 bp, Homo Sapiens
taatttatctctgcaccctcagtagtaggtgtcattcccagcctccagtttggaataatatcacatgtgaactttagcttcaattgaggatacttacagcaatttttattctcttcatgcatgccttattggccatctgttttctgggaaaaaatataggtaataagagtgaaaatgaccccatagaaatatgtattggctgccctttctcatatgagaagtcagcaatagacataagtaaaagatgagataagccaggtacgttgattctgttaaacgtatctatctagacttagatcaccaaagagaataagtgttccaaaacagccataaattcaaattcatggtgcttccttagagatctgtttatgggttctcatatcctcctcttatatggtattttgaatgacagaaccattatttaaggcaaggatcgggtgataccatgg

SEQ ID NO: 304652 - DNA, 463 bp, Homo Sapiens
gcacctggaattttccaagacagatgtgaatcttaaggggagtattttgtcctcttgtgaggaaaagtactttaaaatgtgcaaaactgaggaatcagagcttaaggaagactcagaccccattctggccaaacttgaaaggctgatcttgttgctaactttgattgccacttgctatcccacatgagcatcaacccagagttctcataggtgttggtgatcttgtttgggaacttggttttcacagcaggaactgattacttagcaagtgccctaattgaagaaaacacattgctcccaatctccattggcttttgtgaaaaatctggtcctgagcagttagacatcctcctttccaagctttttattagaacacagattaatcttttaagctctgcttctgatgttggccttctttactggaaacaattctgaatcattagtgtaattaagaaaataccgc

SEQ ID NO: 304653 - DNA, 128 bp, Homo Sapiens
  misc_feature (74)..(74): n is a, c, g, or t
  misc_feature (88)..(88): n is a, c, g, or t
  misc_feature (108)..(108): n is a, c, g, or t
atcttgtaaacaaatgatataaacttagggtatcaataaatacagtacagcattataatgtattttcctttatnatttttggaaaaancctttcccttaagctccttntattggtaagaatacagtat

SEQ ID NO: 304654 - DNA, 178 bp, Homo Sapiens
  misc_feature (167)..(167): n is a, c, g, or t
aaggtgattggtaaaaattcactgatgcaatgccatttgcaaccttcagtgcaagtctgattttgacagagttcttaccaattattgcagatgtaaagagattacctttttagcttatgccttgatattatgtgttttgctttagatggtttggtggttggttgggntgtgggataag

SEQ ID NO: 304655 - DNA, 475 bp, Homo Sapiens
  misc_feature (297)..(297): n is a, c, g, or t
  misc_feature (374)..(374): n is a, c, g, or t
  misc_feature (410)..(410): n is a, c, g, or t
  misc_feature (417)..(417): n is a, c, g, or t
  misc_feature (424)..(424): n is a, c, g, or t
  misc_feature (431)..(431): n is a, c, g, or t
  misc_feature (445)..(445): n is a, c, g, or t
  misc_feature (454)..(454): n is a, c, g, or t
ttcttaactatatttctagataacactattttactgtgtggcagccattgtcagtgagttttttttaggaagaaaagctaaaataatactttatgtatttatacaaataaacataaagtgataatattgttcagatttaccttttgattcaggtgatctcaaaaagtcttccccaaagtattctttgatattgaatgcttaccttttatttacttatgtttgttagttgctttaaagtatttttcaagcaaataactttttaatttctattaataagttactttttatcatcttaangtttaagattccggcatggttgcatataattaggaaattaggattatatatgatccagaaatttggtgggacaatgntagccccttcccataataccatagggccggattttnaaaaatnatccggnaaccccnggggggccctgccnttcaaatcncccttttcaggggttcaatgg

SEQ ID NO: 304656 - DNA, 282 bp, Homo Sapiens
tatacattgatttagtcatgtatcattcagacattattgaacacctattgtgcagatattaggcttaggcttataactggcaaatctctacttcctgtctcctttcctcctggatacatcatagatagagatgctgcagcctgaaactccagattatatcattttccaccactgattttgcagaggtaatgcatgctccttattctgccgaagcaactagttgagagagatataaatactgctcagctgatcagctgtatcagtgctattaccaaacagaaa

SEQ ID NO: 304657 - DNA, 425 bp, Homo Sapiens
cacataagcaaacaactatacaagcagtataaagcatgtctaatactgccatatcacaatggcatatttcaatagggaaatggtattttaaataccattttttaaaaaccttttattctggaaaacatgcgaaactccgaatagtatggagaaccccatgtgttagtcactcacttagctttgacaattattaactcatagccaaggtcggttttgtttcatgttgtatccccccacacaaactagattattttgaaacaaatcttaaacattgtgtcacaacattagcgattttgacttttaccagattgccccagattaaggtcacaaaatttacttttagtagaataatagttctcatttttgtttgttggggcttcccttctctggtttatacatggatttctgtacagcagaaaagaaga

SEQ ID NO: 304658 - DNA, 378 bp, Homo Sapiens
gacggaatctggcttgggttgctggatgcctttacttttaatgaagacatggaaggcaggaagaagaacaatggagaccaaggctggttaactctgatcaattgtttgatgatttcaatataaaagtattataataataacatattaaaatacttgagatatgagttcattacccttccacgtcaaaatacatccttgagtcaaaaaacatagccttgaatcaaaagaaattgattttctttctgttaaaagacagaaaatccttctctgagaagtggtattgcattatatttgaaataaccttgtacaatttataccaatcttgaatattattttaaaaattagaggtaggaaaagacattaaagatcctcttgctc

SEQ ID NO: 304659 - DNA, 461 bp, Homo Sapiens
gaatataaaaacaaagtatcttgggtttcaaaaatcaactaaaaaggtgatttttatgttttccttagttaattcctattttctttttctgtggcagtctctttccatagaatttaattgtttcatatacagacttaagactcgacacaaactttgcaatctcatcagaaacatcatgggctgattttaatagcattgttctggtaccacaaatatgtatcatgtagcttttccgtatgtaatactgtccaaaatcatccaatctcttcattaaattatgaaatattcaatgagatgcttcaaaaacataccaggatttcttcataaaattaatgactgacttcaaaaagtttgcactctctgggaggagacaacatgggacaaatacagaaacaagataaataattggacaactgaaagcagccaagcacagatgcacagaaagcactgagtgttggctg

SEQ ID NO: 304660 - DNA, 196 bp, Homo Sapiens
  misc_feature (25)..(25): n is a, c, g, or t
  misc_feature (184)..(184): n is a, c, g, or t
ccaatctcctccttccagcccttgnagaccacgttctactcctcgtttctacgagtttggctattttaatacctcatctaagtggaattgtgctgcatttgtccttctgtgaccggctcacctcaccgtagcgtgctgttctccaggttcatccatgttatcctgttcagcaggatttccttcntctcctgaaggc

SEQ ID NO: 304661 - DNA, 422 bp, Homo Sapiens
  misc_feature (380)..(380): n is a, c, g, or t
  misc_feature (388)..(388): n is a, c, g, or t
  misc_feature (400)..(400): n is a, c, g, or t
aaattcagttctgagcctactccagctgctggctcaagtcaaattcttcccctgattgaaagttgatctaacccacctgattaagcaagatggtatatacccttttaattatattctattaagcattctttagctatgtaggaaataagaaagtggaaaaaaattaggaaaaatatctaaccgtatctgcatgtgtgctttcttaccacatcagcaaagctggtataggtaattgaagcacaaaatcctgaatttatatatattgctttccctcctccccacaaagtttacttgacctgaattgcccagatacctccttttttccccagatacttaaaaaatgtacgttttgctttgtatacaggtctagatttgtaaantggattgntcttgagattangaagctgttagtattaataaaa

SEQ ID NO: 304662 - DNA, 575 bp, Homo Sapiens
  misc_feature (330)..(330): n is a, c, g, or t
  misc_feature (362)..(362): n is a, c, g, or t
  misc_feature (386)..(386): n is a, c, g, or t
  misc_feature (392)..(392): n is a, c, g, or t
  misc_feature (417)..(417): n is a, c, g, or t
  misc_feature (435)..(435): n is a, c, g, or t
  misc_feature (465)..(465): n is a, c, g, or t
  misc_feature (476)..(476): n is a, c, g, or t
  misc_feature (507)..(507): n is a, c, g, or t
  misc_feature (538)..(538): n is a, c, g, or t
  misc_feature (551)..(551): n is a, c, g, or t
cagacagttactgatcttaaatttaattttaaaagacaatgtatcttaattataatttagctttttaaaacaatgagatagctttacatttcccctttgtttgaatgagaaaatggatcttgggttgctatgctagaacacttgtagattgctgggtcctttgtaagggggccatggacacaccacactttctttcaatccttacatttgaagcattgatattcttcaaaaccttcttgttacatgtgcgcaatagaaatttctaatgttcatgacttttatctttcctgtccatcaattcactggttgtaaatgcttcctgagagctgntaggctgtatcccagattgtgcttaatgacantgacagatgcattgtttctgaaancagctnagacacaattgtggcactggaaacncattactgctgattgganactatggagtggacaggggtgggcggaggnacctaccaatnaatggaagcacttaactggtccaagcctcantttgagaacaacacgttatagaaaatattgntattattcagagngaaatgtgtgcccttaaccctggt

SEQ ID NO: 304663 - DNA, 175 bp, Homo Sapiens
  misc_feature (150)..(150): n is a, c, g, or t
acagtacttacttggccagattcaatgagagcatgcagtgactctcagctcggtgcctgacatgttgtaggtacttttttctaaatattcttcatgtcttggtctagactctaaacattttgaggacagtaaccatgccaaatgcatctnctatctctaagagtgtacagagtga

SEQ ID NO: 304664 - DNA, 462 bp, Homo Sapiens
cgttttttacagaattcagccagacaagactcagttgagagcttttctttttcccctaagctttcaaggctctcccttttggtttctaattacaagaataacaaaaaatactatcattaattttttgttttgattttaaagcttatgtttttcttccagctggatgttagtgagacacaggcctttttccttttttcatgtgtgatgctattcctcacgcctgagctctcacctctgaccataggcggcctgcagccaagcgcccactcctctctgtcctttctatttctgtgcgaattgggcttccctaggaagctccctgaccacagcactcaacacagagatgggggggcgggaaggtaccttctactttttggttttaacctcaagtgaagtgtaatatataatacatacctccagataagacatctggccctataagtgaccagctccatgaatgtt

SEQ ID NO: 304665 - DNA, 440 bp, Homo Sapiens
ctcagaacatgcctatattctttcacattgtcagtacagaaaagaggtatatgcagaaaaggagtgatgtattttcaagttagccactccatgagtgactagtactgaatcccactgaaatcccactgaaacttcccaggaggcttatgaaatgaatcttagaaccagcttccatattggtagccctacagctattaacttcccatacttccaggtagtgaatgagtaaatacacgagcagtgctttttggttggacctgcctgaagtcagtcacagcttacaagaaattgatcctccatagctggcataagatgtttgggtcaggaagtttttgaaatggtacatagcatgtgtctataatggtgtgaaagtttaaaaattccagaagatacagaagaatgtagaatgagaagttacgtctcttttccttttttgtatg

SEQ ID NO: 304666 - DNA, 456 bp, Homo Sapiens
tcggcatgaaaattttcgattaatggaatctgattcagtcttttaaaacattacttggaggggtattttaaagatctcaagtatccatgctattgctgcccctccactgcatgaacaattgagagcacgtaggaggcagaatgaaaatggcaatattccagttctcttgctcaagttctcatgggtacagatgttcctaattcagtgtgtgggaccaacgtttccccgccccttctataatttcaaacaaaggctttatcccagatgattagagattcatgagttatctacttttctctctcattctataagtcttctattcaacatgtacggctagataaaaaggaagggaaaaatgattccgaatatggattaaaaatacgacaaccatattcttggtcacagctcctatttcgggacagatgcacattccaaaactattaagtaaccgtcatt

SEQ ID NO: 304667 - DNA, 487 bp, Homo Sapiens
  misc_feature (20)..(20): n is a, c, g, or t
  misc_feature (360)..(360): n is a, c, g, or t
  misc_feature (414)..(414): n is a, c, g, or t
  misc_feature (438)..(438): n is a, c, g, or t
  misc_feature (443)..(443): n is a, c, g, or t
ttagactcttgcgagacctngcaccccatatcaggtggggtcaatagataaatacccctgcctccttgccccttagttctggtgtggtgggcaagtcagaggaactgttcttctcacactttcacgtgctctcggtggagatctggttcaaaggcagaggtctgggctggggtctgtgattgtgcatctccaaccagctcctgggggattggctcttgccgatggtccacgggccacactgaggagcgaggcgtcataagctgcccagaaggttcccggtggaactgaagccctggttgccggccatagaaaccttctccctaaccctgaaccaagctccttctcaagttcccgggtctncaaacttccctttcctggggaacttgcatttccgaaataaaaccaatttccaanttggaatcctggttttggggaatncaaanctcaaggtgaacgcttcccggaacttcaacctatcaagccgatg

SEQ ID NO: 304668 - DNA, 216 bp, Homo Sapiens
  misc_feature (90)..(136): n is a, c, g, or t
  misc_feature (189)..(189): n is a, c, g, or t
  misc_feature (199)..(199): n is a, c, g, or t
agaatacactttttaaacttacgagatacaaaattagaattgccagtcataggttttcttgggaatacacatgctacaataatgtaggannnnnnnnnnnnnnnnnnnnnnnnnnnnnnnnnnnnnnnnnnnnnnngattgaatagcagagattcctaggtctgtgggtattgggcacttaaatacttntcataatttntatccagaaacaaatcc

SEQ ID NO: 304669 - DNA, 422 bp, Homo Sapiens
tcatctgttctccttctacagtgtctagacttttcccaaaataacccctataacatcctcttccaaacatcttatgtagctgaatctgcatggattccattgccacaatttcatctgtatacagtacgttggaagagcttctcagaacataatgtcctgggtgaggtgactttaccactaagtcatgtttctgtggactctgcttaggaattgactgtctccacagtttcatctgagtgacgtcctgacaggacacacgttccccctcctctgttttactaaatatctcttggcctcccctaatagaacagagtcaataaaacaagttgctactgggtttaatgtacaattgcaggacataaaagtccaagtgattaaactacatgtgggcttatttttctggcttttcagcactttcagac

SEQ ID NO: 304670 - DNA, 484 bp, Homo Sapiens
  misc_feature (207)..(225): n is a, c, g, or t
aaccaacgaaataatagggagaataattgaagctttctaatcattagactctaataaagaaactcgatacactgtaaacccaccactacattctaccgtgacgagcagaacaacctgagaagaatacagttttttactctaagcagccttggttttccttgtcacaccactagtaaacaactctgttttaaaaatctgtaattttcnnnnnnnnnnnnnnnnnnncttgaacttttattttaagttccggggtacccgtcgcaggatgtgtaggtttgttttataggcaaacatgtgccatggtgatttgctgcacatatcaacccttcagctagttattcagcccagcagccattagctattcttcctgatgctctcccttctcctacactgcccccgacagcccccagtgtgcgttgtcacgcccccatgtgtccatgcattctcattgttcagctctcacttgtaagtgagaatatgtgat

SEQ ID NO: 304671 - DNA, 214 bp, Homo Sapiens
aaaatttcattcagttcactaatttgtttttactgaccaaagctttctatacctatgtagagtgtctgagaactagaagggcccatcagttgccactcggatgatccttttgtctcttttcagataaggccccagttcaacagcgtcctctgtgtcaatcagatactcccaggaatgagtgaagccctgccgttttcccaagttgcccctcagc

SEQ ID NO: 304672 - DNA, 370 bp, Homo Sapiens
aatttatcagcctaaattatgttgaacaacgcctaccttctgccccacaagcaaacttatgaaagcttcctggtgctgcctgaagacctatatctgtgagctcacaggtgtctaacctcagcttccttcctatcctgatgggctgaataaatttcttgaccttaccttttaaaataaatcatctttaaataattgtggggcttaggctgacctttctcaagaggttgacttatagctattacccttgtaactgaattctgcaagtttgcctgtcttacccaagattagcctatgaggatttccacaggtccagtgctagctttgagcagtgccttctttcaagctttaattttgctttctggcagctggg

SEQ ID NO: 304673 - DNA, 253 bp, Homo Sapiens
  misc_feature (72)..(72): n is a, c, g, or t
tgtgttaattcattggcctatcaaacagagaagaaattggagtcaagagtgactcatggccagctgggtggnaccagtcattgagatagagaactaagagaactgatttcccaaagaaaatgagctgttagatttgatattcccaatggacatcagcaagagatgtctactaggcagtagggcacatggatgtgaagcctatgaagcagatttgggctgtagctgtagatctgggtgggggttctcagccctg

SEQ ID NO: 304674 - DNA, 414 bp, Homo Sapiens
  misc_feature (184)..(184): n is a, c, g, or t
ttcggcacagacttgtacgggttggttaaacctcacctactgggtataatttatggtctcaatagcagtgcatgattcaggtaagcctcttttagagtagtcaggcagtaagtattaagcacctcctccatacacagcgtttgggtaagtcaatgaaagggtcctaaggacttagctggcacanccctgctcccaaaggcactgtcaattaaaaaatactttcatgcataaagagtggtacatgaccacaacctgggaaagccgtggaaagggcataggctttgaaatccacgtcccagttctggctccatctcttttttaattggaaggggtaaatgtaaggtaagaccgagggaaggtggctgttgggtaagggaccaccttttacaggcaaggttggcgttttgcactggg

SEQ ID NO: 304675 - DNA, 278 bp, Homo Sapiens
  misc_feature (199)..(199): n is a, c, g, or t
  misc_feature (260)..(260): n is a, c, g, or t
ggaaaacgggttaataaaacagctttatagcagtttataaatacgttaacatattttacattttatccatatgccacaggttaagaccaagtgcttaaatcaaaagcttatttgaattattttaggaaaaataatctcagaaaagaaagttagagtgagggaagattagtgaaatagttgtatttggtagtagctttcnattaaatataatttttagggttaaactgggggacaagccttaaaaactgaaccacaatttntggggaccctgaatacat

SEQ ID NO: 304676 - DNA, 328 bp, Homo Sapiens
ggcacgagttcaataccctgactggcacttgaattggttcctgcctgagttactccttctattctcccttctctacactccatcacttccaggagaacatgagctccaaagtctgccagctgctttaactttcctttcagaagtcgcagagtgcagccttctttgtaaataaggtcaaggactcacaacccccacatttgcaaacttttccaaagctgtccttgacagagttccaagtccttggtgtcctggtggggctgtgtgagagtgcaagtcaagaagacctgaccttgaattctggctctatcaccctggggcgaatagtagt

SEQ ID NO: 304677 - DNA, 386 bp, Homo Sapiens
  misc_feature (317)..(317): n is a, c, g, or t
  misc_feature (338)..(338): n is a, c, g, or t
agagagctagaccatgagcttcaccctgtcaaatctttgcactgtaaacagcagacccacgctcctcttttccaagatcctgcatccaggcctgccaaagcccagagctatttgtagatgttggcgaggacacgtctctctgtctgctcagtcaataattcactgcaataccaggtattgcaaaagaaggcctttgccttgccttccaataagagttacagggtagaaagcagaaacctgccctgcagctgccatgaaccccacctgagcaggcaagttaggctacacttgacagtggaagctcatcagccacagtnaagcagcccccaccacttgtntatttatttatttcctttgcacccaaccctgctgtgggcgcccccccc

SEQ ID NO: 304678 - DNA, 539 bp, Homo Sapiens
  misc_feature (135)..(471): n is a, c, g, or t
  misc_feature (475)..(486): n is a, c, g, or t
  misc_feature (510)..(510): n is a, c, g, or t
  misc_feature (517)..(517): n is a, c, g, or t
gtacattgttactctagagggttagtaaaccttgggcagagtattgggatcttgataagaccacgtaaaactcggcctttgaaatttcttccctactttgcctcacttaagtgttaaaattgctgcctgatgaannnnnnnnnnnnnnnnnnnnnnnnnnnnnnnnnnnnnnnnnnnnnnnnnnnnnnnnnnnnnnnnnnnnnnnnnnnnnnnnnnnnnnnnnnnnnnnnnnnnnnnnnnnnnnnnnnnnnnnnnnnnnnnnnnnnnnnnnnnnnnnnnnnnnnnnnnnnnnnnnnnnnnnnnnnnnnnnnnnnnnnnnnnnnnnnnnnnnnnnnnnnnnnnnnnnnnnnnnnnnnnnnnnnnnnnnnnnnnnnnnnnnnnnnnnnnnnnnnnnnnnnnnnnnnnnnnnnnnnnnnnnnnnnnnnnnnnnnnnnnnnnnnnnnnnnnnnnnnnnnnnnnnnnnnnnnnnnnaacnnnnnnnnnnnnaagtaactaccagcccaggtaagntttatanagtgtgagaatgactgtcctgc

SEQ ID NO: 304679 - DNA, 485 bp, Homo Sapiens
  misc_feature (385)..(385): n is a, c, g, or t
  misc_feature (392)..(392): n is a, c, g, or t
  misc_feature (397)..(397): n is a, c, g, or t
  misc_feature (459)..(459): n is a, c, g, or t
  misc_feature (467)..(467): n is a, c, g, or t
tacaaacaacaggaatataaaatgtgggacaccttctgtggcctggacatccctgctgcctcgagctccccgcagctgctgatgttcgctagcgcctctcgtcaccccagtaccacgctctgaccttctgttcctgctgcacctgttccccaccccagcatctttgcccgagggaaggcttcgtccaatcccgttcccgccctggatgaccacgccagctgtgggcctgcctggccgaacgcaggtctccatcagaggggcccgtctgcatgggggtgcctgcacacctgtcgtgtcgacatcactgaggaccccttggggctcaggccagcttgagggctctttgtctcctaaataactgggacagtattggggcttagatgancagtcancatanaataagtgaccggaaatacagagatgtgtggactaagactgttgaggttgatcggatgtgtnaaaggccnacagtgactccctcacgg

SEQ ID NO: 304680 - DNA, 463 bp, Homo Sapiens
  misc_feature (369)..(369): n is a, c, g, or t
  misc_feature (396)..(396): n is a, c, g, or t
  misc_feature (442)..(442): n is a, c, g, or t
caatgtgcagaaagagccagcttcctgatggtcctataacccatatccccacattcctctgggagtcacactgagaagtcatcttggattgggacaagtgtcttgcatgctagggttgccttagaaaacacagactttatactttttttgttgtgaactaaaaattaaatttaactacatttcttcttacttgtagaagaaatgtcttctctccttgcactgacaattctaaagaaagtctcaattgtaggctagtgtttcttctctcttaaaaaaatgaaagaattgatgatgtcttcctaaactggaaaggaggaggagttttgttcaattcgataaaaatgtgtatcccacatctttcatgaaganttatcccattcaaagagaaaatgaganactttagtgtgtatattaatgtatatatttcgactggctttggtancaggtttgtttgtgaaatgca

SEQ ID NO: 304681 - DNA, 322 bp, Homo Sapiens
tcaataccctgtggaagccaccaaggggtggggcttacaccctctagcaatggcctgaactacatcttcaccccttttagccacagctggagctgaagcagttgggacacaggacaccaagtcctgaggatgcacacagcaatagggtctgggcctggccacaaaatcactcctgacgttaaaaactatcagaacagcataatggaaactgttcccatgatcaaaccacctcccatcaagtccctccctcgacacgtggggattagggggaccgcaattcaagatgagatttcagtagggacacagagccaaaccatatcat

SEQ ID NO: 304682 - DNA, 416 bp, Homo Sapiens
  misc_feature (311)..(311): n is a, c, g, or t
  misc_feature (336)..(336): n is a, c, g, or t
  misc_feature (346)..(346): n is a, c, g, or t
  misc_feature (356)..(356): n is a, c, g, or t
  misc_feature (379)..(379): n is a, c, g, or t
  misc_feature (383)..(383): n is a, c, g, or t
  misc_feature (385)..(385): n is a, c, g, or t
gtgagcgtgaaacttaattcatcagtacggaaaacatcttggcagtttaaccactattgtaatactcatgtattgatacgtgtttcagaatttttctgctctcttcctcagtatgtatgtacagcaaaagcttcagagagaaactccaggccatgcaaactcatgaactaaactctgggagaggtgctggtgatgacctggaagggaaagatgagtgtttggcacaggacgggaccgaccgaaagtggttgtgtgggagggtttgatggggtgctctggttgttgttgggagaggaggggcaggtgggtcnctctctggcaagccacgggtgtggnctgcttgganaggatcagancattgactctgaggactatgaantctntnagtaggaaagaaagagaagtgagagatagag

SEQ ID NO: 304683 - DNA, 465 bp, Homo Sapiens
  misc_feature (90)..(318): n is a, c, g, or t
gaaactgactgacgttaagtccttagtaaatatttgctattactttagtcccagctttattgttcattagctgttggggcatggggatgnnnnnnnnnnnnnnnnnnnnnnnnnnnnnnnnnnnnnnnnnnnnnnnnnnnnnnnnnnnnnnnnnnnnnnnnnnnnnnnnnnnnnnnnnnnnnnnnnnnnnnnnnnnnnnnnnnnnnnnnnnnnnnnnnnnnnnnnnnnnnnnnnnnnnnnnnnnnnnnnnnnnnnnnnnnnnnnnnnnnnnnnnnnnnnnnnnnnnnnnnnnnnnnnnnnnnnnnnnnnnnnnnnnnngaaccaatgaatttccaccccctggaaatataataagcttcaaatgagataaaatatgaagagtttagtgtggcgcctggttgtcaatggatgctcgacaaatgttaatttctcctccttttcttactggccttccttcctggcttt

SEQ ID NO: 304684 - DNA, 427 bp, Homo Sapiens
  misc_feature (390)..(390): n is a, c, g, or t
  misc_feature (407)..(407): n is a, c, g, or t
  misc_feature (415)..(415): n is a, c, g, or t
acaggtctccggggatttaggatgggcaggcagacagaattccagaagttgattctgggagaatcagttcagttttcccagaagtgcctcatgggcaaagcagtttctgccaagctataaaacggctcacgctggcccctcctacagaggaaaaccagtgtctcatcattgtgcaggtgctgccccacaaaacaggtgtgtttgtgcctttggataacctgtcaccaaacctacagttccttaccatgtgcctgcccttttgtgcagctgcatacaggccccagagccaagcagaagaaatgtaacccttgcccaggaagtggatgtgaccacgaccatgcttctcttaaatgtaaagcaagcagagatccaggggtttcctgtgtcctncggcccttcccggtcgnaggaaggnaaaagcttccct

SEQ ID NO: 304685 - DNA, 360 bp, Homo Sapiens
  misc_feature (11)..(11): n is a, c, g, or t
taatgaaaganatattctatggagatattgttaatggtgctgcaataaacataaaagcataggtatctttttgatgtaattgtttctttccctttgggtatatacctagtggtagaagtgctgggttgaatggtagttgtatttttagttctttgagaaatctccatgctgtttccataaaggttgtacattcccaccaacagcgtataagcatttccttttctccacatcctcaccatctgttgttttttaatgttttaacaatagccattctaagttggtgtaagatgatatctcattgtgggttttatttgcatttctctgataacttgtgatgttgagcattttttcatggtttgg

SEQ ID NO: 304686 - DNA, 207 bp, Homo Sapiens
  misc_feature (184)..(184): n is a, c, g, or t
ctatcagactgctaaacagcaatcatttgttcacataagatttagtaaacttctcttatgcaccatgtagtgcgctaggtgctggagatgtagaagtgaatataacaaaatccttatcatgaaaaattagatggcaatccagtgggaaaaaaacttgacacgtaaacatataatgaaatctggnagtgatatgatgaagtttgttca

SEQ ID NO: 304687 - DNA, 405 bp, Homo Sapiens
  misc_feature (57)..(57): n is a, c, g, or t
  misc_feature (272)..(272): n is a, c, g, or t
  misc_feature (292)..(292): n is a, c, g, or t
  misc_feature (338)..(338): n is a, c, g, or t
ttcggcacagcgccttttcttgaatccgttagtaattgactgaacccttgcccctgnttaggggactcagaaataaactagatggctgaggtccctggccttgtggagcgttgttctagtaacggaaacagttataagtgagcaaaaacgtaacttggggtagttataagtaccagacagaaaaaaaggaaagcataaagagttaaaggatgcttgcaggagaggggagctgcttttctagctggctgccttgccctgtgtctctgggctgnctgcattcctgcaatccagnaatggctcagtatcataaatcccccttttaataaacgaaaattaanggatcttcaaaagagggcttaaagaccctctccatagtcactcagctatgaagcacagagctggggg

SEQ ID NO: 304688 - DNA, 444 bp, Homo Sapiens
  misc_feature (37)..(38): n is a, c, g, or t
  misc_feature (56)..(218): n is a, c, g, or t
atttcggcacaggtcagggatttcctagagctggganncgggaagggatggagaannnnnnnnnnnnnnnnnnnnnnnnnnnnnnnnnnnnnnnnnnnnnnnnnnnnnnnnnnnnnnnnnnnnnnnnnnnnnnnnnnnnnnnnnnnnnnnnnnnnnnnnnnnnnnnnnnnnnnnnnnnnnnnnnnnnnnnnnnnnnnnnnnnnnnnnnnnnnnnnnnntataaaaactaattctttaatatgagtgacctggagataaccaacttcttgtggatccttgtggtggtgggagaaatattggaagctattgcttctaggtcatttggtgaaccaactaatttgtaccatgggttgtgtatgagatgtgtgagaaatagagactgaatagtcttaccatggaatatatagaaagtagttcattatttactatatttaattcaaccac

SEQ ID NO: 304689 - DNA, 398 bp, Homo Sapiens
  misc_feature (243)..(243): n is a, c, g, or t
  misc_feature (378)..(378): n is a, c, g, or t
acgaggttgatgaaaaaaatggttttattgtacttcatttcattttatagatggcaactgaggcaaaaagaaggcagtaactgccaaaggtcagacaggcagtaagtggcagagttgggatctggctcccaagtccctgttcttcagtaacattatgctgcctctcataatgttctttttttcaataaactgtgtgtgggcttctaaaatagtaacagttctttatataaaaggggaaaaaangttttaaaattagagcagggttgaataaacgttcaacttaaacttaacatttgactgaattttatctgactttttccatgtaatattgacatcatcgaaacatactgtagttatttaaaccgtgtccgtgggtcnaaatggcctgcatccaatgg

SEQ ID NO: 304690 - DNA, 182 bp, Homo Sapiens
  misc_feature (94)..(95): n is a, c, g, or t
gaaatttgtaaaaaataagttttgaagattacttaggtaaataagaggcagctgggctaaaagaagttaaatttaaaggataatttaaaaacannaacaaaaactattctttattccacccagtaggaagcatttaattttcctcaactctgtgtcttagaaaagtttgcttagaagtgttt

SEQ ID NO: 304691 - DNA, 304 bp, Homo Sapiens
aacagacatagccagagaataataggtatctacccattcccataacccagttaaatttcacttataacctttcagagttacatactgcttttttcccatttacagagaattcatcattctccttgctattttttccttcctaatagctaataacggatcatttcttcccttttgtttatgcccactcccttttgattggtcttcaaatacagagtaatgacctctgggtaaagatggggcttgaacactagggtatagtttcactctctcccaaaaaccacactgaaatgatggtagaggtttt

SEQ ID NO: 304692 - DNA, 162 bp, Homo Sapiens
tgaaggcaccgtatccaaggctgtatggaagtctttctaatcaggacataggcaagacaagtcctaagcccaagcttttatgccttatgaagacgcaacaaacgtttgaacaagtcattgttttgagggacagaggttttacagatggatgataactagcat

SEQ ID NO: 304693 - DNA, 237 bp, Homo Sapiens
  misc_feature (113)..(113): n is a, c, g, or t
  misc_feature (202)..(202): n is a, c, g, or t
  misc_feature (213)..(213): n is a, c, g, or t
tgtaatttttggtgaaatttattatagtaccacccaaagttagggactgtcatgaggaataaatgatgtgtgcatatacttttgtgtaaatacctatcacagtgattggaacntagcagggctaaatcgaatagttgttgaataagctaatgtattggggaagctacaaagggtagattgttatacaaatgcttgtacttcntatttttaacnaaaatagattgagcaatcagaatc

SEQ ID NO: 304694 - DNA, 452 bp, Homo Sapiens
  misc_feature (392)..(392): n is a, c, g, or t
taattataattaatgattttctgaaagtaactgtcaagacaaattttcttaactatctcttttcacctttgaggtttccacaagtgccaattgctgctacaggattccatttagattgttctcagctcagagctcaattaggtatttttgtcttgacctggcatgaaacggaagtgctagagtcattgtttgagtctttaatttttccccagaacctttgtacaaatacttgatcttgcctttacaaagtggcaaaacaattctctgatctgtcatgtttgtttgctagccctggcttcgttctctcctttggacaattacctaggtttggcaaaattgcttttcgtggcctttggaggcacagttccctctctgcggttcatttgccttgnttaagatccataattcactgaaaaaggcttcctcagttggctgttagaatccggtggcta

SEQ ID NO: 304695 - DNA, 418 bp, Homo Sapiens
  misc_feature (235)..(235): n is a, c, g, or t
  misc_feature (298)..(298): n is a, c, g, or t
  misc_feature (335)..(335): n is a, c, g, or t
  misc_feature (342)..(342): n is a, c, g, or t
  misc_feature (370)..(370): n is a, c, g, or t
  misc_feature (375)..(375): n is a, c, g, or t
  misc_feature (402)..(402): n is a, c, g, or t
tctcagatgagaacctaacatctagttagtaaaaatctactcatagctcatattctttatttttctttctgtagcagcttctgcacttctattctatctaagactgcagaatttgtccaacttgacattcagattctgcttcaatttccatttgggtgctactagcattgtagctttttaaatatttgatgactttctgaaaacaggcagttttcctagccatgtttgatgtttngagaacacagacttgacaaaaagtcaatccattcatatatgcccttaattagggaatacaagntattcaaagacacaaattagctttgctggttaaaagnattctgnttgaagagtttgaagtttaactggtggnaaacntcccaccaatgtttcaagattaatttntttaaaacctccaagg

SEQ ID NO: 304696 - DNA, 214 bp, Homo Sapiens
ggcacgagattttacctacaatagaacttctttcagaattggagtcagtcctctcaaagccagtagctgcggtatcacctaagtttatggaatattctaaattctttgttgtcatctcaacaatgatcacagcatcttcaccaggagtaatttctatctcaaaaaaccacttttctgtgctcatccataagaagcaactattcatccattcaag

SEQ ID NO: 304697 - DNA, 121 bp, Homo Sapiens
ccacaccactcgagcctcccagatgagaacctgcatttcaacaaggtccttgatgcagcaaagtttgagatatactgggctagaacactcaggggacacaaaggttctctgaaaactaagg

SEQ ID NO: 304698 - DNA, 178 bp, Homo Sapiens
taaacaggaaaaggaaaagttatgtattacttgaatattgaagaaaaactaaaaatttattgtgggggcaattcaggtgttgagcaaaagaactgctactttacaaaaataaaatagtgtatagaaaccaagtatatataatctgaaaagccatccatttctataataaaaaaattta

SEQ ID NO: 304699 - DNA, 434 bp, Homo Sapiens
  misc_feature (92)..(223): n is a, c, g, or t
  misc_feature (333)..(347): n is a, c, g, or t
catgtatttcctgaagaatggaagttagcactaaaagcttggttagagtcaagataactctttttgcttaaaatagttaaattgcccaggannnnnnnnnnnnnnnnnnnnnnnnnnnnnnnnnnnnnnnnnnnnnnnnnnnnnnnnnnnnnnnnnnnnnnnnnnnnnnnnnnnnnnnnnnnnnnnnnnnnnnnnnnnnnnnnnnnnnnnnnnnnnnnnnnnncctctttattgtgttgggtcccttcctctttttgtctgctacttcacacttcttaaatagttgaataaatctttaaagcctcactcccttttaaagttccttaatactcnnnnnnnnnnnnnnnccccaatgtgagagactggtagagatgggggaaaaaatgggtgccttttgaactcattgttgggatggttgagtgctgttagggaag

SEQ ID NO: 304700 - DNA, 494 bp, Homo Sapiens
  misc_feature (381)..(381): n is a, c, g, or t
  misc_feature (415)..(415): n is a, c, g, or t
  misc_feature (432)..(432): n is a, c, g, or t
  misc_feature (450)..(450): n is a, c, g, or t
  misc_feature (480)..(480): n is a, c, g, or t
ggagggagagggagaacaaaatgtcatttctcaaatgatttgttttaccctaaccataccaaatgaaataaaaatttcaatggatcaaatgcaaatactgaaacaggaacataaaggtgtgaaggctacaaataagtcttctcttccccatcccaacacgtaaaagttgagtttaacctaagttatttgaatcaacctggaaattttttaggagaatatctgagtattaaacagcaattcagaggttgagatttaagtaataatttgatttgtaacactttagcatgtcatcccattggattccagttttctttcctttaaagctgacattagaacgctcttggtggatatatttacatcacgagatttgcaagcctaaanactttttttaaaaaagttttaggtgctagaattncgggttattcaccagtntagccaaaaccataatanaagaaataatttcttcacatttataaaatnccaagtgcaactca

SEQ ID NO: 304701 - DNA, 463 bp, Homo Sapiens
  misc_feature (310)..(310): n is a, c, g, or t
tatctctgaagagcacactgctagcaacctgattgtaaatgaccagaaggacttatatccaacctatgtgacttaaacatacacttaagtactctaaaccactatttaaaaaatacttctagagagattctgaaatcttaatttggttgcactttcctgggaatatattttttgaaaactattttgatatttctttcatataacattattggatctgtatcactaagttaattgtctaaaaggtaactgatttcatcaaaccttccagtattaataatttttaagccattttgaaactgaggcctaaaanactgaaatgcttatgtcgttgtacttactcctttctgaaatgatcagatttttaaaaaatgggatttctccatataaataatattatcaaaaaagggatttctcatataaataatattatcaaaaaagctggattttaaaagtttctccccaa

SEQ ID NO: 304702 - DNA, 489 bp, Homo Sapiens
tctaatttgaggctaactgaaataattttcttaggctatatgataggctctttcattaatgaagagtaaattgttatttcttaagtgagtcagagccctttactgagctcagtcttgaattggcattctgtaggagaattagatgtggatttcctacagtagttgtcagttatcatgataagcctctgcatattaaatatttcctaagttcttttcactctgtgcataattatggggaaattacattttgattgactagaacagacacctgtctgtattttatcaggaattgccttttcatatatccgtgtatgaattcttcagttttataatgttttcaaatggcagctaattccaacatcacaaaatagttactatagcaatttatttcatcttttttccccatttgacatttagagtcagaactaatcaataaagctggatggttcaccctctacctggccttaaaaaagtcaatatataaatagc

SEQ ID NO: 304703 - DNA, 131 bp, Homo Sapiens
tgaataaataaaagactaccatgaatagcaaccactctttattagggaattcttccatttgacatattaaaatttcccagccaggcttggtagcaatttgggacggcaaagtaggaagactgctttaaacc

SEQ ID NO: 304704 - DNA, 232 bp, Homo Sapiens
  misc_feature (151)..(151): n is a, c, g, or t
tatgattctctgaggattcattcatttctgcatattttgaatgtctgctacacagagataaatgatgtaaaatccaggctatcagagctgggtcacaatttagtggagaagatgagtacgacaaaaatttaccatggagtgtgaaaagtgnctcctcatagagacatgtacatcatgcccatagtaagtttagggaatttggaaccccacttaaagtcctaactcaatttta

SEQ ID NO: 304705 - DNA, 252 bp, Homo Sapiens
  misc_feature (36)..(36): n is a, c, g, or t
  misc_feature (142)..(209): n is a, c, g, or t
  misc_feature (232)..(232): n is a, c, g, or t
  misc_feature (238)..(238): n is a, c, g, or t
acccttcccacaacacagactatttttcaaataganataaacatatggatgtgaaactgcttgaaaagaatttttttaaatataataaatgaaacaactagacagaagataaggaaataggggacttaaacgacacaataannnnnnnnnnnnnnnnnnnnnnnnnnnnnnnnnnnnnnnnnnnnnnnnnnnnnnnnnnnnnnnnnnnnagacacatgggaccatttccaangatagncatatgttaggcaa

SEQ ID NO: 304706 - DNA, 231 bp, Homo Sapiens
  misc_feature (12)..(12): n is a, c, g, or t
  misc_feature (26)..(26): n is a, c, g, or t
agctgaaaccgnagtataagcatggngttgaaatgagcatggacttgtgatgagaccacagatgcatcaagatttcaagctgtgcattatttaggccattttattcatttggctcccatttgaccacctcagctgcactgccagaggcagctaatccctctgcatctagcatcatctatgcctggataattcacgtatctcaccacacatgtatatcatttctttcttttg

SEQ ID NO: 304707 - DNA, 208 bp, Homo Sapiens
  misc_feature (122)..(139): n is a, c, g, or t
atctgcttgctactaggatcttattcttcactccagtccaggcattgggcggaagggtgaatgcagagtggcacacagcagcagatgggaattagctggctcctcagccttccagggtgggnnnnnnnnnnnnnnnnnngattggagagtccaggtgggtggttgctgtttttccccctttctgtgacacaatttaaggtaaagtaat

SEQ ID NO: 304708 - DNA, 235 bp, Homo Sapiens
atttcggcacagcgccaatatatatcagatgaataggctaatttccctgagttgctggccttattagtccctactctgttgccccctggttacctaatgcatgttcaaaaggtatagttttcatcacctgcttgatcttgattttcagacagcatcaaatcagttgcaaaacaaatccaagctaaaattttgagtgtatgattaatttactataagcatggtaattatggcagta

SEQ ID NO: 304709 - DNA, 451 bp, Homo Sapiens
  misc_feature (15)..(15): n is a, c, g, or t
  misc_feature (217)..(218): n is a, c, g, or t
  misc_feature (220)..(220): n is a, c, g, or t
gtttaaatacatagntatttgtaaatctaaagcataacaagaaatgtgagaaaaacaacacatttagaaattgttaaaaaataagttattcagagatagggacaggttcttggtttgtatgactatgagaccgtgaagtattagccatctccgccttcctagaaagatgtctccctcctcgcttcggactcctccttcctcctaaaccttggttaanngnctgctgctcttgcactggccacaagagagactttttacagacttgagtctgccaagagaccttgcttttgttctatagcacctgttttaaatttcacccttcccaggaggcattttcctattaagtgagagtgagatgtagattctaccctctgtaacacaaacgacacacgaacacttcagtgcaagaaagaaaaatacaaagatggtgatactttgtgcggttcgtcag

SEQ ID NO: 304710 - DNA, 481 bp, Homo Sapiens
  misc_feature (294)..(294): n is a, c, g, or t
  misc_feature (334)..(334): n is a, c, g, or t
  misc_feature (395)..(395): n is a, c, g, or t
  misc_feature (464)..(464): n is a, c, g, or t
actggaatgatttctaccaatagaatcctgtatagatattgattcactatggaaactgtggaatcctgtataaatatcgattctttcttctggagcacaatggcagtttaccagcccaaataggcagtaacagctactaagctcccaagatgtcattgtatgctggtggagctaaaccacagcagcattacactgtttctgatgaaatcagactttcattacttctgcatcatatcagaatcatctgatgactcttccaaaagcatacatgcttgggccggcattcctgggtgnatctggtttcagtagatttgagaattgggacaccaacacnatgtattttgaaagagccctccaaggtgattctcatatacttcggaattcaggtgaatgcnaaaaaaataagtggttaagcttatgcacatggctgctaaaaagggagaacttaactatattaataaccnagagttctgaagagacc

SEQ ID NO: 304711 - DNA, 412 bp, Homo Sapiens
  misc_feature (242)..(242): n is a, c, g, or t
  misc_feature (333)..(333): n is a, c, g, or t
  misc_feature (340)..(340): n is a, c, g, or t
  misc_feature (349)..(349): n is a, c, g, or t
gaaccattttctgcatggcggattcttgccaaacacccagtgtcgtacaattgctggacagaggccagtcttagagcaattgctagtagtcactgtaacaaaagttgttttataatttttctaagatgttaagactatttgaaaatagtgaagaacacccattcatcttttcattacttggctgaacaaaaaaagagaaggtcattctacgtgatgaagtcattgtcggttgatattccagncccaaaaacgaagaaccttgggggaaagggaattaaatggtcggcggtttttagggggactattcagtggtgacgtcttaatgtcagtggnattcagngctccactngtgttgggccgtcttgtggggtgccggtttctagggcagctgattcgggctggacattgctta

SEQ ID NO: 304712 - DNA, 234 bp, Homo Sapiens
gtcttagagtgacataaagtagtcttaaataaatagttcttagtttattttaagcagttgattgtactaacgagatgtaattatctgaagtatttatgattagcatattggtttttataagtatttctgagttattgagggtgcttaaaaatgctgaagaaactttaaaacatgattcttcttataattttatgtgattcttatagcacaatcatttttgaaaaaggaaaacta

SEQ ID NO: 304713 - DNA, 183 bp, Homo Sapiens
cttatccatcttcatacccaggacagactgacttacccttgcaaaacactttactctggtatctgttaatgatccctcaggccattgctacttgtttattccaagagtatcacggacaatttcctgatttaactcttctaaacttttctcacttacaaaaaacgctgcaagtctggactttgg

SEQ ID NO: 304714 - DNA, 203 bp, Homo Sapiens
  misc_feature (102)..(155): n is a, c, g, or t
aaagagtatgtaaaagcatggtacacactgcttttgaagattacgtgtgtctattctagatgtgtcttatttcttgcagatatattgcctacaaagattttnnnnnnnnnnnnnnnnnnnnnnnnnnnnnnnnnnnnnnnnnnnnnnnnnnnnnntaaatatataagcattctactagaactaaagttaagaatttgaaatag

SEQ ID NO: 304715 - DNA, 438 bp, Homo Sapiens
  misc_feature (230)..(230): n is a, c, g, or t
  misc_feature (328)..(328): n is a, c, g, or t
  misc_feature (415)..(415): n is a, c, g, or t
agggagccatgagcctcgtgacataactgttgttaaaaaccctttttcagaatctcgttattatatgtgcttgccagaagcttacatattttagttcagtgaagtcatccacacagggctgtgtaccaccacacagttggtttggaacaccagtgctgaaggttgaaggcttttagggccggcagacctaagggaaaaatccgaaaccaaaagatgggattaacgagttnaaaagctcaggtttgggttgagatcgaacccccctggaagctcagcttaagattgacttaaaaatcagttaacaaggggcctggaagtttaatgtggnagccctgaggacttctaagaaccacataccgtcttttgacttttgaaaagtgcgtggcctctcttggccccttcaagttttgggctnaatcactttctagtaaggtgccc

SEQ ID NO: 304716 - DNA, 213 bp, Homo Sapiens
  misc_feature (105)..(105): n is a, c, g, or t
  misc_feature (108)..(108): n is a, c, g, or t
  misc_feature (110)..(110): n is a, c, g, or t
  misc_feature (173)..(173): n is a, c, g, or t
taacaggtacaaaacctaacctggtaaatatagggtgcagccagaaagcaggcctgaatatgatctctttctaaaagtgttctgggcacttgagaatgcctatgnatncncccacactcaccaatcaagtaactcagttctttatgggtagctgagggtatgtacagaagggncaggattgtctcttttgagagttattccccatggaagcat

SEQ ID NO: 304717 - DNA, 311 bp, Homo Sapiens
  misc_feature (181)..(181): n is a, c, g, or t
  misc_feature (213)..(213): n is a, c, g, or t
  misc_feature (232)..(232): n is a, c, g, or t
  misc_feature (248)..(248): n is a, c, g, or t
  misc_feature (293)..(293): n is a, c, g, or t
tgacactgatgtctggcctactgttttttaatggttcatttaaattactgtgccttctacagttggtatttacaccatgcattggataaaatggggagatgtcttaaagtagtgtagggaagcctccgacagaaaacctgggcctgggtggatcaggacttatacttacttttgccttagntatcttcgtgaaatggaaggtttgtgtttttnagtgggtcagaaattggantttaaaatgttggttnagcaattttggtttactgtctttcttcatctacaaataatttganacttttaccactgtgttg

SEQ ID NO: 304718 - DNA, 132 bp, Homo Sapiens
  misc_feature (47)..(47): n is a, c, g, or t
  misc_feature (87)..(87): n is a, c, g, or t
  misc_feature (111)..(111): n is a, c, g, or t
  misc_feature (116)..(116): n is a, c, g, or t
atgagcactgcgccccgcctgccatatgcttcttcaaggcattgatntctcctgtctttttatcttaaatgctttattggctgttgnctgttgcacacgagacctaagttnatgancaaaaggattggactg

SEQ ID NO: 304719 - DNA, 506 bp, Homo Sapiens
  misc_feature (37)..(37): n is a, c, g, or t
  misc_feature (127)..(162): n is a, c, g, or t
  misc_feature (171)..(375): n is a, c, g, or t
  misc_feature (418)..(418): n is a, c, g, or t
  misc_feature (429)..(429): n is a, c, g, or t
  misc_feature (436)..(436): n is a, c, g, or t
  misc_feature (493)..(493): n is a, c, g, or t
agctatttgatggcagtttgggttaagtgatttctgngactttcccatagattctttgaatttaaatgagaagcctgataaaaattccaagttaaagatacccaggaaatctacaacagatcaagcnnnnnnnnnnnnnnnnnnnnnnnnnnnnnnnnnnnngagatggannnnnnnnnnnnnnnnnnnnnnnnnnnnnnnnnnnnnnnnnnnnnnnnnnnnnnnnnnnnnnnnnnnnnnnnnnnnnnnnnnnnnnnnnnnnnnnnnnnnnnnnnnnnnnnnnnnnnnnnnnnnnnnnnnnnnnnnnnnnnnnnnnnnnnnnnnnnnnnnnnnnnnnnnnnnnnnnnnnnnnnnnnnnnnnnnnnnnnnnnnnnntcatgatcgccgcctttgctccaaatgttgggattcagggtcnacgtgcgcagnttgtaanctgtttttagatcaatatgtgatttacctagcatcgtttaaattagcattggattanttttaattacggc

SEQ ID NO: 304720 - DNA, 178 bp, Homo Sapiens
ataagattaatgggtcttacagcagaagtgagaaagggatggggcatctttaaataattttaattctcattatgcatatcacagtcttctacacacatacatctagaagttgattaaatactcagggtgttcttcgctttacagccacttaattctaaactactgagtttttcttgag

SEQ ID NO: 304721 - DNA, 132 bp, Homo Sapiens
  misc_feature (36)..(36): n is a, c, g, or t
tgacacacaggcatagggtaaatgacctcagctttnaagtcaggtatacttgagtccattccacaccttgcttcctaattgccacctgattttagagaagttttctaaccctctttgagctgctatacagtg

SEQ ID NO: 304722 - DNA, 500 bp, Homo Sapiens
  misc_feature (59)..(110): n is a, c, g, or t
  misc_feature (377)..(377): n is a, c, g, or t
  misc_feature (398)..(398): n is a, c, g, or t
  misc_feature (410)..(410): n is a, c, g, or t
  misc_feature (464)..(464): n is a, c, g, or t
tagaatagaaattgtacagtcttcaatgccatatataacagacccctctttaggttttnnnnnnnnnnnnnnnnnnnnnnnnnnnnnnnnnnnnnnnnnnnnnnnnnnnncattttaaatttgtcatggataaaatgatctctgtggctatgaaaagttagaacacataatcctacaagaacataatatttttaaacattatttatgtttccaagcccatctttaaaagttattcaacctataaatgaatctataaaatatagttgaagtacagtgccaatgctactatagaaacaaataatatttatgataatattctttgggaaaatacattgatgtccagcatgttagcactaaagcaaaaggctgggaattancagatgtgagctctccacaanccatatttggantagagtcagtgtgtgggtggatggcgagtgatgggcagaaggcagactggaganttagggagagaatggttaaacaaataaggctggtgt
